United States Patent Application Publication US 2026/0103690 A1 - sequence listing, part 91

SEQ ID NO: 450577 - protein, 492 aa, unidentified
MKLRKDQPKQSQKLRQQKNGRTGHCPQTAGWHEMNRKQRREMARKIQAEDLSLEVMHPHAAGIDIGNESHYVAVPPTRDEQPVRRFGCTTAELKAMAAWLKQCEIRTVAMQSTGVYWIAVFDILEAAGLEVYLVNARETKNLPGRKTDVQESQWLMKLHRYGLLRTSFRPSQEVRMMRTYWRQHQDLVQAGGRHIQRMQKALTQMNIQLANVLSDITGKSGQAIIHAILKGERDPYELAALCNPNVKASEEEIARSLEGNWQEDLLFMLKQEQEGYEFCQKQMAECDEQLREYLAQRKDRSAGASLPEEKRKAQRRMNRKNVPQFDMREQLFRTTAVDLTRIDGIEVLTAMTVISEAGWDMSRWPDEDHFVSWLRLSPDNRVSGDRVIGKGRLPTNNRLSVALRMAATTLRTSNSYLGAQFRRLKRRLDAPVAIKAMAAKLARLIYRMLRYGMQFIDQGAEVYEAAHRQREIHYLKQKAASLGFQIIQAAAS

SEQ ID NO: 450578 - protein, 494 aa, unidentified
MKMASCSRASRRNAKNALKLKAQARKKGNAASASLELDKLEPIHRRAAGIDIGSAENYVAVPQEAVEPGESPVRVFGVFSQEQDALVEWLRSRQITTVAMEATGVYWLSLYDKLEAAGIEVYLVDPHGVKAVPGRKSDWMDCQWLQKLHTYGLLQRAFRPDAPIRRLRTLTRQRAELVCAAASQQQCMEKALICLNLQLGLVISDLVGETGLSIIRALLVGERDPEVLVERYRSQRCTKATKSEMKQALCGTYNDEDLFVLQQCVDTWDFLQEQIGECDGKIEVALLAIPTARAVEAKAPPRPIPAAAEQPKKKANGTQGKNAPEKDFTSILRRICGVDLTQVMGLNLLSVLMLLGEIGTDMSRWRNEKAFCSWLGLCPGAKISGGKVLSRRTRKVTNRAATILRLAAVAVGRTDTWIGLFYRRMKARKGGPKAVTATARKLACIIYHMLKFQEEFVALDMDKYVAHAQAHRLRYLRREAKKLGYELVEQEQVA

SEQ ID NO: 450579 - protein, 376 aa, unidentified
MEIIYECCAGLDVHQSNVVACVLQGPLTSTRPKKHLQKFDTTTKGLLALHEWLTDFDCEIVAMESTGIYWKPVWHILQGNFDLVLANPYKIKNIPGQKTDKKDASWIAKLLRVGLIPKSFVPEEPIQDLRELTRLRKMWIESRNREKNRAHKILQTAGIKITSYMTDIFGLSGRNLLNLLINEEDITAEKVEAAVYTSLKFKVPELVEGLTGFFRSHHKFLLAQILDVIDMYNSKIGELETKIAEYLLPYQKQMDNLLTIPGISTDSAAVIISEFGIHMNQFSSAERLASWVGLCPGNNESAGKRRSTRISKGNAYAKRVLCQCAYSACKSNHQRFKNYYQRICRNRGGKRAIVAVAHLITRIIYYMLLRNEVYHE

SEQ ID NO: 450580 - protein, 363 aa, unidentified
MKIMVGIDLHSNNALCGLMDEKGRRLLHQKLPCNLSVILELLQPYRERIATIGIESTFNWYWLVDGLQDHGYHVVLANPAAMQPYSGKKHTDDVSDAYFIAELLRLDLLPRAHIPDRTIRPVRDLLRRRLLLVRQRTTLILSFKSLNERTLGERVPLNRVKTMTPEEAQGRFTAPADQLLAEEEIALMGHHTEAITKLEQHILGVAGKWTSYQRLQELPGIGKILGLTIALETGDAKRFADAGNFASYCRCVRSVRRSNDKKKGENNRKCGNKYLAWAFVEAAHFACRYDEQCRRFYDRKKQRTNPIIATKALACKLAKAAWHVMAQDAPYDATRVFGPGQKNDLGETRREPAKGSGPLSQQN

SEQ ID NO: 450581 - protein, 346 aa, unidentified
MDQISRIGMDTSKHIFQLHGVNAAEAPVLRKKLRRKEMMTFFENLAPTEISIEACGGSHHWARLLQSFGHRVRLIPPQLVKPYVKRGKNDAADAEALCEAMSRPMMRFVPVKSTEQQAALMLVGVRDRLVRNRTQLANAIRGYAAEFGLSAAKGRAHLVPLLERIEADESLPGLARELFAIQAEEYKQLQVQIAAVDVKLTAWHRADECSQRLAKIPSVGPIGAVLLRMKTPDPALFRSGRQFAAWLGLTPKDHSTAGKVRLGVITRAGDEVLRSVLVVGATAVIQHARRHGKGSPWLIALLKRKSPKVAAVALANRTARIAWKMMLTGEPYAERSASTVLAGALR

SEQ ID NO: 450582 - protein, 324 aa, unidentified
MYLGLDVSKNTLDCCLNKDGFFYAYKISNNRKGFEKLKIWLDGHGCDETLHCCCEATGNYYEAAAEYLAAHYKMSVENPRKIKAYAVSELKRSKNDKQDAKTIAEFCEEKSRKLKTWKPKNQMEKELQSITRYIARLKQQKASETVKRQTASDNIKDLIDETIDYLGSKIKEAEGRLKTYINQNPELKQKANNLTTIPGIGIQTAAIIMAALSGNNDFKTAKQFTAYLGLDPAEYKSGTSVKGKDRISKIGDCITRAALFSPALVAYRIGTFPRLVANMRQNGKHIMQILTAIMRKLAVVAYTLHKTNTTFEKQRHTRIQQKAA

SEQ ID NO: 450583 - protein, 411 aa, unidentified
MLKIVYPICCGIDVHKNFVVACIASTNEKGVTTYKSERFSTYTQGLRELAEWLSVNNCRDVCMESTGKYWHPVWNVLESTCNPVLAHPKYLKAIKGKKTDKKDAKWIADLFKHDLVSGSFIPPAKIRELRDLTRYRSKLTNYKTGEKNRAQNCLTSSNIQLDHAFSDVFGKTATKILNYLLEHPEDKNFDVAPFVDGRCKTPIEEIQLAVDGTISHEQTEKMKIIRSHMDSLEICKLNLESAILTLSEQFLPQINLVSSVPGIRDFSAISVIAEIGVDMSVFPSAKHLCSWAGLAPQCNESGGKKKSSRVSHAGAYIKPLLIQCSNAVVTSNKHPEIRNRYLAIKKRRGHKKAIVAIARMLLTAIFHILNKNESYNPELYRQSDVSPVDYEQQAILLLEKRGFSVSKIPVE

SEQ ID NO: 450584 - protein, 341 aa, unidentified
MLIIGVDYHPSMQQIAWVDTETAECGERRLAHCAEAEQFYRELKQKGVSVRVGMEATGHSRWFERLLAELNFELWVGDPAQIRAKQVRKQKNDRRDAEHILKLMLENNFPRIWVPTPENRDVRQLVWHRHRLVGMRTRVMNQLQAIAMNEGVRRKRGLWSEQGRAQLESLPLPPWTSRRRQELLELLDRFDPSIDQLSQAIEQEAERRPEVQRLLTHPGVGPITGLAYVLVLGTPDRFRCGKQVASYLGLIPCEDSSADRWRLGHISKQGNALLRYLLGQAAQSVARCDEQWRQQYAHLTMRRNHAIAKVAMARKLAVRLFWMWRRGWDYQQLKKFGSHAG

SEQ ID NO: 450585 - protein, 342 aa, unidentified
MDNIGLDLHKRESQLCVLTEAGEILERRIHTSRERFTAVLGARAPARILLEASTESEWVARHLETLGHEVIVADPNFAPMYATRRRGVKTDRRDARTLAEAGRLGAYRSAHRASDGQRHVRAELAVRDALIRTRTRYVNVVRALTRRDGLRLPSGMPARTDAKLAALPLSPTLAAELAPLRALWEPVNTQIAAADARLAHVAAADPVVAQLMTTPGIGPVTAVAFVATLDVVTRFASAHQVEAYLGLTPREYSSGEQQRRGRISKTGNARMRYLLVEAAWRVLRTKDPAVAPLRAWAAAIAQRRGRSIAAVALARRLAGILYAMWRDGKDYRAPWPTAVAVA

SEQ ID NO: 450586 - protein, 360 aa, unidentified
MSRSTVTLQSPLTNKTSQYQVKACDANALLELIERIRTRVARELRRPIEVMSCYEAGYDGFWLHRVLKAHGIHNHVLDPASLQVNRRARRAKTDRIDADRMVRALIRYLRGEPEACSVVRVPSVEQEDAKRLHRERRRLIAERVQHVNRIKGLCATQGIYHYAPLRKDRLARLDDLRTGDGRALPTRLKAEIARELKRLEVLLEMIATVETERDVILTSAASTHLNAGKIKMLAKLKAIGPEFATTLVGEVFYREFANRRKLGSYVGLGSSPFCSGPVDRDQGISKAGNPTARSMMIELAWTWLRYQPGSALSIWFRERVGNLKGRPRRIAIVAMARKLLVALWRYLQTGLVPTGALLKA

SEQ ID NO: 450587 - protein, 393 aa, unidentified
MKLVGIDIEKKHFFCIMDKDSGEVLLQPSSFSNTKDGFDSLIQKLSSYSKDSILIGMEDTGHYHFALLKYLLEKNFTVALINPKTTDYTRKIQNGITKNDKLDTLPICDVLDTPVRKKQYRITKVNSFDLYEQKQLTRHHHNLKEELNVYTNRLQKCIDIVFPEFNSLFSSKYGIIYMNVLKTFGSAENIASTDIRTIRKCFEIKGRGNRISLTAQQLKDSAKSSIGISSAAEVIKIKHLISQIELINEQLAETDKKIEEFSIQNNSPILSIPGISHFFGTSILAELGEISNYSKPSKIIKAAGVAPYHYESSQYNAQHTAITKKGSPYLRKTLYQIILPVINNNPVFNQYYDLKISQGKGHRCACGHCVRKLLRIIYHLSSTNQQFDDALLR

SEQ ID NO: 450588 - protein, 343 aa, unidentified
MQTITTIGLDIAKSVFQVHGVDAGGQVIVRRQLKRRYVLTYFQKLSPCLVGIEACASAHHWSRELQALGHTVRLMPPAYVKPYVKRQKNDATDAEAICEAVTRANMRFVPTKTPGQQSGLLLHRARHLFIRQQTSVINAIRAHLAEFGIVAPVGRHGVEELLNVVADPNDKRVPEIARACLSAFGAQLRRIKEQILEFDRLIRAWHRSNELSMRLDEAPGVGPVLATALVAAVADPKSFRSGRNFSAWIGLVPKQHSSGGKNRLGNISKQGDRYLRGLFVAGALAVIRYAKIHGTTHRPWLTALLARRPTKVAAIALANKIARMVWAMMARGERYKEPFALAR

SEQ ID NO: 450589 - protein, 434 aa, unidentified
MEEVTDEPLYRDRVCGIDIGKAQMAAAIRVPSDSNPARRASETRSFGTTRREVLALADWLRCWQVPAVVMEATSDYRKGPFCRLEAGGFECVLADARQVKNLPGRPKRDPSDSRWLAACFERGAVRPCFVATPEFRIIRLHTRYRRDLTEERTREKQRTEKLLESAGIKLSSVISRLHLVTGRDIMDHLIAGERNPKVLAQLARTAARRKIAELEEALEGAEFFTAEHAALLAMMLARIDRLTAGIDELTTVIERLLAPYEEQLQQAESMPGWQRRAAQDALAETGVDMTRFPTGAHLASWAGRTPVDHQSGTRKGRAKAKKGNRYLAGITGETAVAAGRTQTRDGVRHRRLARRRGTAKACVATGNTQLKASQLLAGPGTRYQDLGPDYYERQASIRRQIAHHVGKLGALGFEVTLCRIPEPDPDPAGQTQAA

SEQ ID NO: 450590 - protein, 344 aa, unidentified
MEISTIGLDLAKNVFQVHGIDADGNVVVRRTLRRAQLLAFFASLPPCLVGMEACGTAHHWARELIKLGHNVRQMPAAYVKPYVKRGKTDAADAEAICEAVTRPTMRFVPVKSPEQQAALSMHRARDLLVKQRTQLVNMVRALLAEFGINIPQGVRLALEMARKIVDGEAPPVPREAAKIAGRLSQQALDTHAQLREIDLDLLAWQRTNDTARRLMSIPGIGPIGATALAASVTDANQFRSGREFAAWLGLTPRQHSSGGKERLGRISKMGDKYLRTLLVVGMTSLIKGVKRKPETADPRLVALLARKPVRVATVAMANHTARVAWAIMARGETYRAGHQPRLAA

SEQ ID NO: 450591 - protein, 323 aa, unidentified
MEAMIERCAGLDVHQETVVACVLFGPLDKKAKTSIETFSTTTTGLLALSDRLATLQVSDVVMESTGVYWKPIWNILEGSFHLVLANARHVKNVPGRKTDVKDAEWLAKLLRCGLIENNFVPPEDIRDLRDLTRYRKKLIHHRTSEQNRIHKILQDANIKLTSVLSDIFGLSGRRILEAILNGEKIETDGLRKMVDWRTKASITDIASAINGRIRRHHRDMLRYHWDHMGYLEQTIEELEKQIDQLLSPYRKEVELLDGIPGVNKAAAATFIAEMGVDMSVFKSAKHLASWAGVSPGNYESAVRRWVLICPYLSQLNILPLGLV

SEQ ID NO: 450592 - protein, 358 aa, unidentified
MSIVCGRAAGIDVHKKMLVVVVLDSTDPEHDVAVGRYGTTHSRLSELRAFLRARGVEQVAMESTAQYWRPVWMALEGEFALTLAQARSTRAPRGRKWDLADARRIARRLLADDLPVSYVPPPEQRDWRLLARTRVAMTEMLTQIRNQIGQVLEQAQIKLSSVVSDVLGVSGRRMLKAVIAGERDAERLAEPGRQKLHASREELADALHGNPTVAQRLVLQLYLDQIEKLERDMATLERELAAAQTAQQRAIVRLCAIPGYSARAAQQVIAEIGPCAAAFASAGKLASWIGVCPGQQESAGESCGARSAKGNRMLRRLFSQIAWAAIAAKGSEAGRRYRRLLCKGAGKAAWGWLTPWSG

SEQ ID NO: 450593 - protein, 340 aa, unidentified
MELYGGIDLHSNNSVLAIMNGEGERLYRRRLPNDLGVVKTALAPYREHLKGLVVESTFNWYWLVDGLMEAGYRVHLANTTAIQQYNGLKYSDDDSDALFLAQLLRLGILPEGHIYPRAERGVRDLARKRAHLVRQRTANVLSIQNILQRSAAKRLKGDKVKQLKVAEVEPLVGSADVAVAVESTLQVTHCLDQQIARLEQVVVERIKLRKEFGVRQSIPGVGTILALTIMLEAGPIGRFAQVGDFSSYCRCVSSARRSNGKLKGKGNVKNGNRYLAWAFVEAANFAVRYSAPIRGFHQRKSAQTNAIVATKAVAHKLARAAYHMLRQQKNFEVRMAFGAQ

SEQ ID NO: 450594 - protein, 418 aa, unidentified
MKRVEDTSGNEKRFIGLDVHKHYITVGGMNVRHEMVLRLRNVEMERFKAWAEANLRPTDEVVLEATTNTWDIYDTVASLVKRVVVAHPAEVKQIANARVKTDNQDVVRLLRLLIAGMIPEVWVPPVEVRELRALISYRWRLVKMATAIQNRMHSLLHRHNIQAPEGKIDTGENREWWERVQLSELERLRLNQELKTLRLVREHIVEVEHELGRLSTSERWGKQATYIMQLPGVGIVVTMTILSAIGEIQRFPSAKKLVGYAGFGAGVEDSGQKHRDKGITKFGRKELRWALVEAAWQAIRSNPRLRAEYDQLCKRKLPNQAIVAIARKLLVTLWYVLSRQEAYDHFTDEDLAYKMLTWAWHMDQSAKRDMTNQQFAKYGLLQLGRGEDLTRLVKGGLPRRIASKEEVLALKPELSLKQ

SEQ ID NO: 450595 - protein, 370 aa, unidentified
MRLVLAIELSNKSWVLAAQVPGLPKIKARQTIAPTTDALMGAIDGYRRRAAAVGRTFERVIAIYEAGWSGFWLARWLVARGVEAHIVQPSSVLVDRRMRRAKSDGIDAELLLRTLLAWLRGEPRVCSMAPVPDEADEDARRAVRERAELVAERVSLVNRVGAILATLGTADYNPLLQSRRRRLDELRTASDQPLPKHARAKIIRLLTRLELVLAQIAELDELRDAVLEDQAPDAAGQMIQQLAGLRGVGVQSATILVREAFVRRFANGKALGSYAGLTATPYDSGGMEREQGIGKAGNRRLRTVMVELAWIWQRYQPDAHVRWFRERAGPTGRRMREVMVVALARKLLIALWRYAVDGVVPEGAVLKPQA

SEQ ID NO: 450596 - protein, 315 aa, unidentified
MLIHYIDIAKRNFVIAVSSLSKTKTETNNPKGIAHTIEYLKKHKVALVVTESTGGLEIPAAKAIRRAGIAVIIANPRQTHQFAQSQPLTKTDAKDAKMPAFFAQMTAQKEDWQTMPYQPPTEAEEVLEALVNRRNQSADMRTAEKNRLHQVHETQVGSVKQLIAHFDRLIDELDKQIDNHTRTHFDGKAQVAEQIKGIGSITTATLMAMLPELRRLSHKRIAGLAGIAPHPRESGETKFKSRCFGGRSAVRKALYMATVAATRFEPLIRDFYQRLPSEGKPYKVAVTACMRKLLTISNARIRDYFAENDTAENGI

SEQ ID NO: 450597 - protein, 311 aa, unidentified
MTLHPILIGCDISKDRLDCFVLPEGRHVAIDNAAQAVNDFVSTLAGAFVVFEATSIYDRILRSVLDQAGVPFARVNPRKAREFARSAGYLAKTDKVDARMLAHMGTALHLDPTVEPSQERKTLKDLLQRRRQLVDMRTAEKLRLLQARDRDVRKDITGLIAILNRRIAKTEQAIHTLIKATQQLEELSVRLQTVPGIGPIIAACLIADMHELGTCDRRSIAALAGLAPLACDSGRMSRQRRIWGGRKQVRDMLYLAAVTAARSNSHFAAFYKRLRDAGKAPKTALIALARKILVTINAIVKNKTTFTPMTT

SEQ ID NO: 450598 - protein, 418 aa, unidentified
MQDNSQHSQQAPKFIGIDWADREHEVCVIDADGRERSETLEQSPEAIGQWLTRELADGPIAIMLEQSRGALAYALMLRDKVVLYPVNPKQFSRYRESYSNAGSKNDRSDARLLARMLRERIDTLTPWTPDTENTRLLGRFCEIRRQLVDERTRYVQQLTDRLKCCFPQALTWPGAKSFSPLMLELLRRWPDPRKLKKADRRILAKVFAEYKLKNQKQQDELLHYIRSMTLLCSDAAVLEPAAIVIRLHVLQIRQLDKSIGEVAQRIDEEMQKHPDADLFRSLPGAGRVMAPRLLTAFGSQRERFAKADDMTTFSGIAPVTKQSGKMRVVHRRYACPKYLRQTFHEFADHARKWCPWSRAYYNLQRSRNMKHHAALRKLASRWIRILFVVWKTRTPYDQAKYLATIQLKNPKIIPFLKT

SEQ ID NO: 450599 - protein, 414 aa, unidentified
MRMVRWLGRAIGLDVHRDFCVVAVCEDGKVRSGARVPSTPEGLRLFAQSLLPTDRVALEVTGGCWEVARILEPHVDRVVVVSPDDTGIVQARAKTDRLDARALARLLWAGELEAVWMPDERCRVLRRRLARREQLVRSRSRAKNEIHAVLQRRLKGKPPCSDLFGVKGRKWLAGLELPLEERESVDAGIRQIEFLDAEIGQVEALVARQALGWPEIRRLMTVPGVNLICAATFIAAVGDPRRFPTARQLVAYLGLDPKVRQSGEAPARSGRISKRGSASARWALVEAAWSVVLRPGPLRAFYRRVRARRGHGKAIVATARKLSILFWCLLTREEDYAHQQPSLTKRKLRQLEIRAGAPKNTKGAAGIWSTNQMVAKAERELAQQAEASYLRMVKDQQAGAPARKVGASATVERA

SEQ ID NO: 450600 - protein, 397 aa, unidentified
MLFSTKRSDGKTVNLTTLILMMTSSSGDQWKPSKLKSPQQKLIKEGDHHMRFYTISHKHYCGIDLHTKMMYVCILDSDANILIHKNIPTNGKAFLKLIAPYREDIVVGVECMFSWYWLADLCAKEGIEFILGHALYMRCIHGGKAKNDRVDSEKIARIMRGGDFPLAYAYPAELRPVRDLMRRRSHLVRIKSEIQSHISITNYQYNLEPFDKNIVHKGNREGIADHFDNASVRLNVETDIAVMDSLHDQIRNLENYIIRHAKDYDGRMLYRLKTVPGIGDILALTIMYEILSIDRFPTVQKFCSYSRLVKCANESAGKKMGTSGSKIGNAHLKWAFSEAAILFIRGNDKAQKYVTKLSKKFGKGKALSILSHKLGRAIYFMMKRNDVFDMNYFFRNS

SEQ ID NO: 450601 - protein, 456 aa, unidentified
MQHYYLGIDVSKGYADFVILNDKKRPIEENFQLDDTFEGHSYLYERLLRFFDDHPDSTIYAALESTGGYEDNWFSALIKFQGTLNLKTARLNPLGVHANSKADLKRNVTDKISAQSVAEYMIAHPEKISYHQQDHLASLRKQWGFIKMLTKQSTQLLNQLEPLIYTANPELLVYCKDGVPEWLLKLLIHYPTSSSLSKAKIVKVARIPYISTDRAKELVGNAKKSVASATDKVTGKLIVATVKQISHLKQVIKVQTGLMAQECSVSEVDLLKSFTGIKDFSAIGLMLEIQTVERFLSAKKLASFFGLHPVYKVSGDGIGGFHMSKRGRREPRQILFMVTLSAIQSNPLIRGIYLEHIQKGMEKMAAIGLCMHKTLRIIYGMLKHNSVFDPEIDRRNREKMVQHNSRVSKDKNRRYQAFDSRAPISRRQHGKREERKQSHSDNITNNGIIAPAPLST

SEQ ID NO: 450602 - protein, 451 aa, unidentified
MRTRRPRHPRSESSPHVHPNAAGLDIGSDEIWACVPEDRDAEPVRSFGTFTPDLYALADWLAAGRIETVAMESTGVYGIPVYAILEAQGLRVYLVNARPLQHVPGRKRDVKDGQWMQYLHTCGLLSGSVRPDAERCAVRAYLRHRVALLAYRAAHIQHMQKARHQMNVQLTQVLTDITGAPGLAIIRAIVAGERAPVHLARFRAPRCASSTEDIAQALTGHYQPEHVFALKQALALYDVYTEQVQECDAEVERRFQAIKPVWPDELPPLNRANQHRTHHKNAPDDDARGLLYQLLGVDRVAIPGLNASTVPTILSEIGLDPWKWPNAKAFCSWLGLAPRHEISGGKVLRRSTLKTSNRAGQAFRLAAQAVSRSHNGLGAYYRRMRARLGPKAAIVATAHKIARIVYHLLTHRTAFRDLSAEDYEQRARERDLANLRKRAAKLGLTLVESPA

SEQ ID NO: 450603 - protein, 449 aa, unidentified
MMEPQEIEDEEHEQVLERVAAAGVAKASGMVCTRVPHPSRPGKRRTRVWEAAATTGAVLELAEQLAGEGIEKVTLEATSDYWRIWFYLLEAAGLSVQLVNARDVKNAPGRPKTDKLDAVWLAKLTERGMLRPSFVPPAEIRELRDYTRLRTDLTRDRARYFSRLEKLLEDALIKVSSVASSLDTLSARDMIEALIAGERDPRVLAGLARGKMKAKHAALAEALTGQFDDHHGELARMLLDQIDALTTQVERLTTRTEELIAAIPAARGVDAGGATGPGAGEGPDAAVRSAIARLDEIPGISRHTARVILAEVGPGMSRFPTAGHLASRAKLSPRTIQSGPKSKSGRTGQGNPYLKGALGEAAAAAARTGSFLGERYRRIVKRRGKLRALVAVARSILVIIWHLLADPSASFHELGAGYYASRTDTDRKTRNHVRQLEALGFTVTLASAA

SEQ ID NO: 450604 - protein, 346 aa, unidentified
MGMDIAVLGVDLGKNVCSVVELDASGAVVMRRKVRRETLIRLAEKLPPCVVGMEACCGAHHLGRLFAAHGHDVRLMSPEYVRPYVKAQKNDDRDAEGIAEAATRPTMRFVELKSQDQLDMQTLHRSRDRLVGERTALINQLRAILLERGMIAPQGKRKLEQFLSVLMDEQDGAGLSPRMVILVADVRAQWAELDRRIAAFDGEFVRSARENEDARRLVTIPGFGAIIASALVASVGRAEAFDRARDLSAWLGIVPQQFTTGGKPKLLGISKRGNKYLRRQLIHGARAALPYVAERDTPLGRWAKALLERAHRNVAVVALANKLARIAWAVLRRVERFVATGMPRAA

SEQ ID NO: 450605 - protein, 341 aa, unidentified
MNIVTVGIDLAKNVFALHGVDQSGKAIFIKPKVARGQLLETVANLPPCLIGMEACSGAHHWAREFSRFGHTVKLMAPKFVAPYRMSGKRGKNDAADAAAICEAVTRPNMRFVPVKDVDQQAILCLHRTRQGFIEERTALYNRLRGLISEFGIVLPQKVERLRREIGAHLEELPGWANRCVGDLLVHADRLNERIDEYDKAIAQAARQDARSRQLMQLPGIGPTTASALVASLGGGHDFKNGRQLAAWAGLVPGQYSSGGKARLGRITKAGDAYLRSLLVMGARAVLAGLGEKQDRFSRWARSLVERRGYWKAAVAIAAKNLRLSWAVMKYGDDFRLTAAIA

SEQ ID NO: 450606 - protein, 325 aa, unidentified
MLGIDVAKDTLVCTQVDPTTRKTCWSGQVPNTPAGLAQLLARTPESCPWVLEPTGRYSSLAVRLAQAERRQVLLAPPKRAKAFLASVQDRAKTDRLDSRGLALYALSQPLRPFLLRSEAVEQLQQLLRARKGLAKALTSLELQRKELPHAAPALDPAIASLKEQKKALDAQIAELVSDTQAFPAVAELDRVPGIGPLTAASMAVCLQSKEFAHPDQFVAYLGLDIGVRQSGKRQGQVGLTRQGDAELRRLLFLAAMSNVQVKDSPFRLQYERERAKGLSGTAAACAVARKLAKVCWSLVKHGGKYDAARVQQQPKRAPAASPPAS

SEQ ID NO: 450607 - protein, 353 aa, unidentified
MKDYYVGMDVHKASIVIAVQNAAGKVVMQSIIETKAQTVRDFVKGLHGTVRLTFEEGVHAAWFYDLTHSLLAEVVVCDPRKNKLLLSGHKSDRVDAQKLAHLLRAGLLQAVYHGEQGTRSLKELAHSYDSLVQDCTRVMNRLRAMYRGRAIECPEQSIYDSAGRAQWLAQLDDKGARLRAENMYKQLDALAALRDEARAQMVNEAAAHPASRILQRVPMIGPVRAAQIIATVNTPHRFRTKRQFWAYCGLAVVTKASAEYGFTKGELQKKAKKNSTRGLTNNFNRRLKEVFKSAAVTAGVRGQFKPYYEGLLAKGMSPEAARLTLARKIAATTLAVWKKGEAFDPQRITQQAA

SEQ ID NO: 450608 - protein, 349 aa, unidentified
MRFYTGQHEYYCGVDLHVRTLYLCVLDAHGKKRVHKRVRSEPTAFLEAIEPYREGLVVGVECIFCWYWLADLCASEEIPFVLGHALYMKAIHGAKAKNDQIDSHKLAVMLRGGSFPEAYVYPRGMRATRDLLRRRLFFVRKRGELFAHVRNTFHQYNLPRPSGQLLYKKNREGLAEAFDDTIIRSTIEADLALADRYDTVIRELERRILAEAQVHDPETFERLLTTPGVGKVLALTLLYELHDITRFGTVQRFSSYCRLVKSQHTSDGKRTGSAGGSKIGNAHLKWAFSEAAVLFLKDNPRGQAHLHRLQRRHGKGKALSVLAARIGRAVYFMLNNNQDFDIERFYART

SEQ ID NO: 450609 - protein, 340 aa, unidentified
MNATTYGLDIAKRVFQMYWVDAQTGEIANRRFGREELIEFLARRPAGRVVLEACGSAHWWARKIRALGHEVVLLHAKFIRPFVQTNKTDAADARAIWTAVQQPEMRTVAAKTEDQQAMLALHRMRSLLVKFRTMQVNQLRGLLYEFGATFRAGRVAGLAEVRARMAELAEVLPGTMVCGLPDQLQRIEVLEQDIGRLERQIGSWQKQEAACRAIAEVPGIGKLTATALVATMGDAKTFKSGREFASFLGLVPRQSGTGGKIRLGSISKRGDPYLRTLLIHGARSVMCHAKAPPAWQKEIQARRPANVAAVALAHKMARTAWAILAHGQAYQKDYVSVKPT

SEQ ID NO: 450610 - protein, 467 aa, unidentified
MPELKKSVRKHRRQRREITTQDWRLGLEVVHPRAAGIDIGAGEHYVAVPPHCDPEGKPVRSFQTFTADLNRLADWLQRCGITTVVMQSTGVYWIPVYDVLERRGIEAFVVNARHTRNLPGRKSDVQECQWLLQLHVYGLLRNSFRPAEEIRILRAYWRLRQEHVGEAATCIQRMQKALIQMNVQLTNVLNDISGATGMAIIRAIVDGERDPQELASFRDPNVKASQEEIAQHLEGTWREEHLFALKQQLANYDHYQQMIRDCDTQLHRHLQTFAGKGDPKDLPPVERAKRARGQMPEEFDLRAELFRISGVDLTRIDGINALTAQTVLAEIGPDLSRFPTEGQFVSFLGLCPDNRVSGGKILRSGTRKVKHRAATALRLAARSLYKSKSYLGARYRRLRTRLGAPKAITAMAHVLARIVHRMLKYGEKYVDRGAQYYEEKLREQQLTALTRQAANLGMTLVPQVARA

SEQ ID NO: 450611 - protein, 311 aa, unidentified
MNNTIGIDISKDTLDAHRLADGQHKQFLNGKTGHAQLVKWIGKQSDPLIIFEATGAYHRQLERVLCTHIIPFVKVNPKQARRFAQASGKLAKTDRVDCEMLAKMGAALQLVPKPFTAENLYDLKELLSARRALIKDRTAAKARKATVINALIKQQLEKRLRQIKNDIAKIDALMLDVAREDQYMSERLDILFSIPGIGVITALMILVDMPEIGALNNKQVASLAGLAPISQSSGKWMGKARIQGGRPNLRNAIFMPALVAIRHNADLKTKYDQLVTAGKEKKVAITAVMRKLLVLANALLRDNRKWAEKAA

SEQ ID NO: 450612 - protein, 387 aa, unidentified
MVTKTKRRKSRGSKKRFIGKPTGQIQERVQAVGPERFGVIAVDCAKRRSKWMLCNFYGKVIVEPTQVEHTTGGLRAMTQRVAAACQAEGLTDTIVAVEMTGIYHKPVQRAFRKARFDTRIVHPFASSHYRRPLHPDAKTDDNDLEAIFHAAIKGYGLLTLPVGEVYQSLQAISRHRHNLVKQRARLMVQIRRLLHQTMPGFADLWEDDKLFHKSIALCVALNFSSADAIRKAGVDGIASHLNNTKVRFQRRTIERIVAWAGTAAEPSELGAMHTRQWQQLNEVRQLLGEQITAAEREMAGFLAKTPYILLLSVTGINVVSAARLAGEAGPIEHYASARAINGRAGLYPSRYQSDEVDHADGSLVRQCNRKLRGAAMLIAENLIKCHP

SEQ ID NO: 450613 - protein, 415 aa, unidentified
MALKIVYKICCGIDVHKTFVVACIASTDNNGVTTYETHRFSSYTSGLKNLLQWLLTRNCKDVCMESTGKYWIPVYNILEDDCTIVLAHPKYVKAIRGKKTDKKDAKWIADLFKHDLVAGSFMPPADIRQLRDLMRYRFKLTCFRSSEKNRLQNCLTVSNIQLGNVVSDTFGKSAQAILDKLLENPADTSFELEPLVFKSLKKKLPELRDAIDGYITPEQAGKLKVIKAHYEDLESRKSELEELILALAAPYQQELSILQTAPGIRSDFTAIGIISEIGTNMEAFPSAKHLCSWAGLTPTNNESAGKKKSVRVSKAGCYIKPLLVQCANAVVKSDKHPEIRNRYLRLKKRHGHKKAIIAIARMLLTALYHMLKNGENYNADFYRKSDLPPVDREITVEQALIIARNQGYKIKSATA

SEQ ID NO: 450614 - protein, 323 aa, unidentified
MTYIGIDISKDSFVAAFPKVSGYQTQTYPNTVKGIRKFIGLLSATEHHCVMEATGNYGFMLLYLLDRQRIAASMVNPKQIKHFSRMMMTVTKTDPKDACMIAMYGEKMNPPVYKMPSETVMLLKQKKTIIRQLKKQLTASKNLKGSLVALPFQDKNGIKALDKTISFLASQIESLESELADLASSEFDRQVKLLTSIKGIGITLATALIVATGGFSYFNNAKQVSRFIGICPTYQLSGTSVHIKGGINRNGDASLRSLLYVASWSALRSNTTCKECYVRLKANGKPSKVALIAVANKLVRQAFAVIKSDAPYVDGFVSTRQTK

SEQ ID NO: 450615 - protein, 320 aa, unidentified
MTYIGIDISKDSFVVAYPRKSGYTTKTFMNDTKGVRSFITSLPEDCHCVMEATGNYSMLLLYLLQQAGIPTSMENPQKIKHFSRAMMTVTKTDEIDAKLIAMYGEKMNPAPYKIPSESIMLLKQKRTVLRQLKKQLTAMTNLQHSLSVLPKQDPTAKVATEQTIKFLRKQISKLEEEITNLSNKEFKRQMELLTSIKGIGESIASALITATGGFANFSSAKQISRFLGLCPTYQQSGTSVNVKGHINRNGDSHLRGQLYIVAMASIRCNTACRETYERLCDRGKPGKVALIAVANKLIRQMFAVVTYNRPYIDGYVSSLA

SEQ ID NO: 450616 - protein, 372 aa, unidentified
MTIAGKECSEGVLEVVLGVDTHLDVHVAVALDQLGRRLGEMATPTTVRGYEKLLRWAEGLGSVRCAGVEGTSSYGAGLARYFKAAGVAVMEVERPKRRHLRRNGKSDSRDAESAARAVLAGEMAGEPNSGDGRVEMIRTLRAARRSAVKARAQAANQLQGLRVTAPDKLRDRLRGLSTKDLVAVAARFRLGADPEDVEAATRFALRSVARRYRTLSAEIGELDARLDRLVAETAPNFLSLTAIGTNHATTLLVVAGDNPERLKSEASFASLCGVSPIEASSGKVARHRLNRGGNRDANRALHMICVVRMGRDQRTREYVARRTTEGKSKLEIMRCLKRYIAREVYRVLVPAAAASLCRRHRVLRNIVRTVIR

SEQ ID NO: 450617 - protein, 408 aa, unidentified
MEAIIERCCGLDVHKDIVVACVLIGPADGKARKEIRTYGTTTAQLEQLRDWLGQIGCTHVGMESTGVYWVPIYAVLEEHFELIVGNAAHMKNVPGRKTDVKDAQWIAELIRCGLVRKSYVPPKWQRALRDLTRYRRKLVEAQASERNRLQRLLETCNVKLASVATDVFGKSGREMLRALIKGDESPEQMAQLARGRLRKKLEQLVLALRGKVESHHRFMLEMQLGRVEDIEANIAVIDSKIDEAIAPHRAVMERLMTIPGVDRVVAMTVIAELGTDMNVFPTPAHAAAWAGVCPGNNESAGKRMGQQKRRGNVHLATALVQAAMAASKTKNTYFKARFWKLAGRAGTKRAAVAVAHSILNAIYHMLKGSVDYKDLGGDYLDRFLNRRSEQRLVQRLRSMGYEVRAQTA

SEQ ID NO: 450618 - protein, 401 aa, unidentified
MSRVPVAWVGIDAGKQTHHAAAVDRDGRLLWSVNVRNDQAAIEALVERAEGTAGEVRWAVDLTSAAAVLLLAVLVATERQVIYVPGQVVNRMSGAFAGEAKTDARDARVIAETARLRRDLTQLRTPNDLVVQLSRLVGHRTDLMADWVRGVNRLRDLLTAIFPRLEQALDYSTRAALTLVAGYCTPAAVREAGTETLVAYMISKGVRRNTATGMVAKATEAAAAQTLALPGETITAELVRRQARKLLDLDREIKDIDKDITARFRQHPQAAVIESMPGMGPILGAEFITATGGDLAAFGSAARLATYAGLAPVPNDSGKRSGVLHRPRRYHRRLRHVFYMAAFSSLKREGPSRTFYQRKRAERQRHTKAMIALARRLVDVLWAMLRDNKPWTAPTPATATA

SEQ ID NO: 450619 - protein, 316 aa, unidentified
MDTSTIQNINIGVDTGKSQLDIYIRPLDIFFSLSNDDKGIKQAIKTINQYSPQRVVIEATGRLEMPFIPACADANIPYVIANPVHVKRFAGAIGQRAKTDKLDAKLIAHYAEAIQPALTKLKHDSMRLMADLVVRRNQLLSMQTMEKKRLQIMPKQLAMTIKPILTAFKKQIEKIECKLIKLIEGCPEYQVKNEILQSMPGIGKIAAASIISNLPELGYITNKQAAALVGVAPINRESGRYKGHRKIQGGRAQVKTVLYMAMMSAMQCNPVFKSTYQRLQAEGKPKKVAIIACVRKMVIILNSMLRDGVLWDAKTA

SEQ ID NO: 450620 - protein, 313 aa, unidentified
MSAAHFIGIDVSKEHLDIAIRPTKGLFRFLNTDEGVDALIQQFHPLKPTLIVLEATGRYHQLVLSRLLAAGLPAIAINPRQARDFARAIGRLAKTDAIDADVLAEFAEKIRPELRAIADEATQELEAICTRRRQLVTMLSAEKNRLHTAAQRIRSEIQKHIHWLEKEISQLEKDMDKRIRSSPAWREKDDLLRTCKGIGPVTTHTMLSCLPELGTLSGRQIAALVGVAPFNDDTGKRNRPRHVQGGRLAVRAVLYMATLAAIRHNRTIREFHRRLIATGKAKKVAITACMRKLLTILNAMLRDKKPWQSDFVA

SEQ ID NO: 450621 - protein, 419 aa, unidentified
MFSDTALIVGVDVHQHTNVTLVMDGCGDVVDNHHSFANNRSGTDQFARYLTQIAATGGFATIHIAAEATNNFWLPLFCQLERLPSLSDRPVTLYPFNPRLVHNFKKALGEEEKTDLQDAGVIAERLRFGKKLPRPFVMEELYLPLRTLTRYRYHLVRELVRVKSYCLSLVYLKATDYTDKNKRPFSDTFGATSQAALRQFATLDEIANMPFDELVEWLDVKGKRRFPNPEENAHKLQQVASDAYRLPDEWAAVIHDIIALNLRHVSLLENLIGRVETAIAQQMETIPHTLETIPGIGPVFAAGIIAEIGDPARFEYDEAKVAAYAGLRWPRSQSDEFEAEDRRMSRSGNRFLRYYLCEAAQLVRLHAPEYRDYYNRKYKEVRKHQHKRAVVLTARKLVRLIVRLLTTNEPYRLRKVSKE

SEQ ID NO: 450622 - protein, 347 aa, unidentified
MCKGNLITKSNKINNDKYDYYIAIDWSQRNMAIATLRNEGNKAKITDIESNVDDLKAYFKSLRGSKIVTIEETTSTHWLYVELFEYVEKILVCDPYRNKLLSDGPKTDKLDAANLCKLLRSGLLKEVYHSLDKKYELRQLVSEYEQLVKFGVRVKNEKSAIYRSMGKSYKKKEEIGDDTLGWIISQKDQRIELYETQKAEYEKMFAKKIMHDKDLKHLKGVNGVGVIGAVKILSTVIDAKRFKNEGKYLSYCGLVKHQKMSGGRSYGQKKTRYSRRLKSVYRIAANAVINGNSPMKEYYDSLLQRGISGENARNQLSRRIAIITYGILKTGTQYKPYKWRESQQVGN

SEQ ID NO: 450623 - protein, 345 aa, unidentified
MKIVVTIGLDIAKQVFQVHGADKAGRPVLRRKLKRSEVARFFTEQPSCLVGIEASGSAHYWARVISSFGHTVRLMAPQFVKPYVKSQKNDANDAEAICEAVTRPQMRFVLQKTIEQQDLQCRHRVRSRLVACRTQLINQIRGLLAEYGIVLPQHPGQVRRGLPTVLEDAENQLTGSGRELFQSLYEELAELDEKIAAADDRIQIAFQSTPNCQRIAAVEGVGPLIATAAVAAVSNGHSFENGRQFSAWLELVPRQNSSGGKSRLLGISKRGDPYLRTQLIHGARSVVYRAKAKTDKRSLWIIDKQQRLGTTKACVAVANKKTHASSGRSLPANKNIVVQHEFSEA

SEQ ID NO: 450624 - protein, 399 aa, unidentified
MFVGWDWASTSHAVTVLDTSGTIIDRWTLAHTEHGLDTVLARLATHGDPADLPVAIERSDGLVVARLLAAGHPVVAIDPGAFHAARPRWGAAGAKTDPGDSYKLADYLRTDGHRLRRLEPVGAVTCELQALVRLRDDHVAAKTAASNQLGALLDIHWPGAKQLFFRLASKITLAFLTEFPTPQAAVQLDAAALAAFCRRHAYRGGRHPAELLKRLRSAPRPPVGLDPAVLSQVVGAQVDLLTTLLATIADLDEAITTRLAKHPKAHLLARLPRVGQLSHAQLLAELGPILDRTSSADHAAAEAGATPVTRASGKTSSVHFRLAANRRARQALHIFADNSRHSSPWAATLYANARARGKRHPQAVRVLGRAWLRVIWSCWHTNTPYDPGKHRAEQRLAAT

SEQ ID NO: 450625 - protein, 424 aa, unidentified
MKFKLQDKQNQLIERISDKHLVVGVDIAQELHVARAVNFRGIIVGDPLTFENDEEGFARLLQWINQLKTLKGFTSTIIGMEPTGHYWINLSKWLYDQDIEAVTVNPHLVKKNKENRDNSRSKSDKKDALVIADMVKNGYYSFIRPTSEAFEKLRVLMSNRDMTVKRLVSAINQINRWVDIVFPELRQVFKDVKGKGAMATLRLFPTPVELRSMKAPDIVVGWKNQMKRQPGLIKAQVLIELAKHSVGTRQALDAYKLHLEQLIEEFDLATAQLKRVENEVTEVLKRIPFAKKLLAIKGISEIALAGILGESGDLSGFAHGNSLLRHAGLHLSEASSGKWKGQIVLSKRGRSRLRRFLYLATMSLVMNNPDFKELHANNVKVKKMKKMKSIMKLIHKFARVIVGMARKNDSYRPEKVQPIMSMAA

SEQ ID NO: 450626 - protein, 347 aa, unidentified
MKKIFIGIDVSKEKCDATAISAENGLTGVEKLDYLVFENHPKGFRTLLSWAKKLRSDIPQEDILFVCETTGAYDRALCDYIYSKGLDIWRESALQILWSSGVRRGKDDKTDSLMIAEYALHHMDKVHLYESPDSRILEIRTLFLYRRKLEQEKTSKLVRIKELEATAGKSRTLTFILRDAKKSIRQLEKSIKECEDKILELIEADKALNKSYQHLDSVKGLGIVNITALIVYTNNFKAFKTSRKMATYWGVAALRSKSGTSVDKRADVRNLSSSMLKSYLTQAAMHTIAKGGIYHDYYHRKIAEGKTHSIALNNAKNKLLHLAMSLVTHDMDYEANHEFLRTQRVAN

SEQ ID NO: 450627 - protein, 422 aa, unidentified
MDLVSAELPARTLVVGIDPGKVSNRVLLATGEKGMLGEPVSLPTQREGIERLCTLIAEVDAPQTVIAIEATGSLHLPWAAELERRLPGSLRLLAPSETQAARTQLGSRRFKDDDRDCAALVSLARQGLGRPAQVGTLEALLDAVRHRRRLIAQRTVARQHLHHQLNSLCPGLSAPPGHGRALALDSPTGQAVLACAVEFAGRPPIARSLIARAPGRLTRANATFWAERWRGCLEPPADAKLRAERMKRDIRRWQALAADVEAVEDQVRVLLAGSAGEVLTTLPGVKAARAAAFAVHALPIERFPTAERLYSFTGLAPARYESATIRKARAISRQAPGERRDALMGIAWGLSQHCEAFRARDRELRGRGMRPIEARVAWRGTPAASPTGCLKPKSLSTKSATLGPGTRAGGDGVTAMPREGAT

SEQ ID NO: 450628 - protein, 396 aa, unidentified
MKRFHGLDVHQEYVQHCVLSAEGQILQEERLPFGALWEAFVTSLTEEDEVVMEASTTVFARYDELAAYAGRVAVVHPHKTRLIAQAHFKSDRLDGQRLAHLLRLDYLAEVWVPPWACRDLRSQLSQRQSFQKDSTRRKNVLHALVRAHRLRPPADLFSQAGRQWLREQAAASPTWGVQITTNLTVLEAVEEARAALDDHLVQVARDTPIVLRLMQQAGLDWLGALILYAAIGDITRFPAAKKVSSYLGLVPALSQSGKKCYHGGITKAGRKQARWLLVEAARVAIRYDGTLQTFYERLAAKKGDAVAIVATARKLAVRVWHIWHEDENAATLDAERWARKLQRLGWRVGKERLPEGTPEFVRQTAAALAVELPAEAPGGRGVGSGGRAGEPAKEEA

SEQ ID NO: 450629 - protein, 299 aa, unidentified
MLDCRIGMDGPELRVKNNSEGIEELAEFRRQHGVELVAMEATGGYEKLAFALLWAKGLPCALLNPRAVRQFAQAMGYLEKTDRIDAGVIAWFAQVKRIVGQPPASQTQQRLRALVSRLAQLTLLSSAQKNQRRLVSDVEVLASIDEILSTVRRQIRLFENKIAELLDSDPLWQALDRVLRSIKGVADRTIARLMAELPEIGTISNKAAAKLIGLAPIARDSGNASRPRPVRGGRRAVRDVLVVVATVVCRYDPDFIAFKQKLKNAGKPPMVIRVAAARKLLVRLNSKARDVRRELAFAS

SEQ ID NO: 450630 - protein, 345 aa, unidentified
MKSTIIGVDLAKSIFQVCIVDKNNKIVSNLSIKRRDLSRYICSQPEALVVMEACSGASYWARKFTSYGHEVTILAAQHVTPFRRGQKNDANDALALVEAVQRPQIKSVPIKSFDQQDLQSIHRVRERLVKQRTALANQIRGISLEYGVAIPKGIHQLSRQIPEIIENAENELTMRTRELLADLYKELKLLDSRINHYTHVLETEAKQNEACKRLLKLEGIGPIIATAMVSMVGRGDCFTNGRQMAAWLGLVPRQYSSGGKPRLLGISKRGDSYLRKLLIHGARAVIRHLKEKTDSKSRWLRQLVSRAGTNKAAVALANKTVRTAWAILTKGEDYQVDFVLNTAKS

SEQ ID NO: 450631 - protein, 341 aa, unidentified
MNHYAGIDVSLECSSVCVVDTGGKILREARVASEPEALIGWFQLQGFCLERIGLEAGPLSQWLFAAMRQAGLAVELLETRHVRKAFEAMPVKSDRNDARGIAQLMRLGWFRPVHCKSMSAQETRSLLTARKLVQSKLRDVENSLRGILRGFGLKVGKTTEQGFAARIEELVAGHPHLQTIAKALLSVRAALRTEFAAFQKQSRKMAQSDPRTRLLMSTPAVGPIVALTYASAIDDPGRFRSSKQVGAHFGLTPKKYQSGETDYTGRISKIGDGSVRTALYEAAHVMLTRPVKGCSQLKSWAMRIARRAGMSKAKVALARRLAVIMHRMLADGTAFNTKAAA

SEQ ID NO: 450632 - protein, 332 aa, unidentified
MNYELFVGIDISKLTIDAVAFTAETFKAPTHCIFNNNYDGFTEMLEWLAEYGITDDKILFCCEHTGIYICPITAFMDVKGLSLWVENGLHIKRSIGIKRGKSDKADALSIANYAFSNRFNARIYHFPSVTASKLRHLLAHREQLVRHQTSFKCTCSELKGFDKENALYCIADSQEMLRIYAERIKKVDAELSTVIEEDQELNVKFRLVQSVHGIGKQTALFILIYTEGFASFSDYRKFASYCGVAPFPYSSGTSIRGRNRVSSLANKKLKSLLTMCALNTIKKDNEFKRYYDRKKAEGKNSMCVLNVIKNKLLSRVFAAVKRGTPYHDEIAA

SEQ ID NO: 450633 - protein, 414 aa, unidentified
MTEEEIISWFAGVDWGSERHQVCLLDARGTTVGEREFPHSGEGLAELGDWLLSMASAASTVAVAIEVPHGPVVDALIDRGFVVYAINPKQLDRLRDRFSVAGAKDDRRDAYVQADSLRTDRRLFRRLQVADPRLIELRAWSRLAEELRAERVRLSNRVRHQLWRYYPQMLKLTDDLAAPWFLELWAIASTPAKAGRLRKSTVERLLKQHRIRRMDAETVLRILREPAIKVAQGVAEAASIHMRSLVARLRIVNRELREAERKLDELCTTIGEIEHTSGEGLQRRDVAILRSMPGIGRINLGTLLSEASGPLSRRDYEGLRTLSGAAPVTKRSGKSLIVVRRYAAHVRLRDTVYHWARVATQRDPKCRARYTALRKRGHSHGRALRGVADRLLALACVLLQRQTLFDPYFGGSTA

SEQ ID NO: 450634 - protein, 393 aa, unidentified
MICVGIDVAKDKHDCVILNSEGKALTGVFTIPNNADGFDTLLQKIHGCTSPDDKIKVGLEATGHYSYNILGFLLNQGLPTYVINPLHTNLFRKSMSLRKTKTDRVDAKTIAAMLMSNVDLKSYTDTAYHNEELKSLTRYRFDKVQERAQLKQSVSRLVTILFPELEKLVPTLHMSSVYALLIEFPGAKQIAEAHLTHLKSLLKDASKGRYGRDMATEIRDAAKRSIGSVMPAKSLELRHTIRLIRELDSEIKDIEAAIEAIMEELQSPITTIPGMGFRMAAMILAEIGDFSFFDSPDKILAYAGMSPSTYQSGHLSLAGTYSHMEKRGSRYLRYALYNATKYVCHWDPGFAAYLAKKRAEGKHYNVALSHAAKKLVRLIYALEKSRQPYRRAA

SEQ ID NO: 450635 - protein, 371 aa, unidentified
MRFYTTQHRFYCGIDLHARTMHVCVLDAAGTVVYDRNLPCHFETLLQALAPFRDGIVLGVECMFGWYWLADRCAEQHIPFVLGHALYMRLIHGGKAKNDRIDANKIAHLLKGGNFPLSYVYPKGMRETRDLLRRRMYLVHKRAELITHLEILNAQNNLPPFGKKLSYAANRAELHIPERFTHPAVQLSATLDLDLIDKLDELIARVELHLTRTAKVDDVQTYHRLRTLPGLGPILSLVLLYEMHDVARFDQVGQFLSYARLVRCDHESAGKKLGWGGKKIGNAHLRWAFAEVACLFLRASVRARAWKQKQEKKRGPGKVLGILAARLARSVFHMLRKQEAFDEDRFWNGQVSEPPPAPSTKKPARPRTKAR

SEQ ID NO: 450636 - protein, 431 aa, unidentified
MKTYILRDPKTVEPQSPLKSPLHRQRPDPALDAIVDRICDAAVRPSTAPTGPVLYVGLDVHNDSIAVSLAPSDSTEVRRYGLIGGAHDDVLRLIKKLATAHSGVALRFCYEAGPRGYPLCRFIRALGHACLIVAPSKVPRAPGDRVKTDRRDADQLARLYRAGELTGIYVPDPQDEAIRDLIRARYQVATQRHRARQQLKMFLLRQNIRYAGITAWSPAHLRFLATVKLPFAEQQWVFQEMVNVISEADARLARYEKQIAAVVEGWRWQPVVAALMSLRGVALLTGSTLVAELGDLTRFATAPQLMSYLGLCPSERTSGADRQQGGITKLGNGIARKAMIEAAWNQRTAPRISRTVLARQEGLPKAVTEIAWNAQTRLHQRYKHLTGVGRKKSQVAAAALGRELAGFIWAIGRLVKPRPAPAPSSVKQTAA

SEQ ID NO: 450637 - protein, 356 aa, unidentified
MSQKLDTSPAVIGIDIGKNSFHIIGQNQRGAIVLRQKWSRGQVEARLANLPPCLIGMEACVGAHHLSRTLKALGHDARLMPAKYVRPYSKGQKNDYRDAEAIAEAVQRPTMKFVATKTADQLDLQALHRVRERFVGQRTGIINQIRAFLLERGIAVRQGLRFLRAELPGILATRTEALSPRMLHILEDLTADWRRLDARIEDLSSEIEALARQDKGCERLMSVPGIGPIISSAMVAAIGAGDAFSKGRDFGAWLGLVPKQSSTGDRTILGSISKRGNRYLRTLFVQAAWVVLVKIGPKHWDRYGLKSWIEAAKKRLHHNVLAIALANKLARIAWAVLHKGRAFECVKTNEAASRTA

SEQ ID NO: 450638 - protein, 409 aa, unidentified
MYKDTRKGKPILAGGRAVVGIDIGKRKHAAAAVSPQGEVLARLASFSNTREGIDRLEQDVLKKASGPRKAIVAMEATGHYWMPLYHELRRRKYRCIVLNPIQTNSRSSVRIRKTKTDKIDSLGIARFILTGDALATRVPNESTAELRLLVRHRRRLVQARGDMERYAHTLIDRVFPEFEGVFCKTFLPSARALIRQVGIAPDEITLHDEDVRNVLHHASRQRLATEKVDLLLEKANDSIGSRQAESVATEQLRSIFDYIETIEKQTADIEHDLESRIEAMGSPLLSLGINSTLAATIHAETDPISDFRGPDQYVAYAGLDPSVRESGDTIRGRSKISKRGSPVLRGALYLAAFSVYRKHDYFHRCYQKHRRKGRKHTNALVVVTHKLARVVWRMLTDNRKFTKRPPKRR

SEQ ID NO: 450639 - protein, 358 aa, unidentified
MVDKVTEAAVVGGVDTHKDLHVAAVVDQNNKVLGTQYFSTTRQGYRQMLAWMTSFGTLKRIGVECTGTYGSGLLRYFQNAGLEVLEVTAPDRMERRKRGKSDTIDAECAAHAAFSGIRTVTPKTRDGMIESLRVLKTCRKTAISARRVALQIIHSNIISAPDELREQLRNMTRMQLIRTLGSWRPDASEYRNVTNVYRISLKSLARRYLELHDEIADLDVMIAAIVDELAPELIKRNAIGYESASQLLITAGDNPQRLRSESEFAALCGVSPVPVSSGKTNRYRLNRGGDRAANSALHIIAIGRLRTDAKTKEYVARRVAEGHTKMEAIRCLKRYISREVYTLLRNQNRRINSIPITA

SEQ ID NO: 450640 - protein, 408 aa, unidentified
MERFYLGVDWADQFHQVWVSDFDGKKVVEKKVTQNIDGLAEFGRWLDEQRAKPIELWAAIEKPQGRIVDFLLDHGVEVYPVNPKALDRARDRFRMSRSKSDGFDAYVLAQFLRTDHGHLRALKPNSVQAQELKLLTGNQQRLGHQKTRLLNQLTATLKEYYSRPLEVFSDLETQIALDFLKQNPTPDDLSKLTRRQWNRFAKREHHLGAERAQELWEELNQPQLTVPEHVVRAKAHLLRVLLGQLDPLRKAVKSYEERIKSFFGSMPAAELFKGLPGAKTGTIIATLWAELGDPKSRWESFRHLQAEAGVVPVTKTSGKSRVVQFRFSCNKIMRHAAYWLAFVSLNRSEWANHYYRDQRAKGHSHHQSLRALGAKWLKIIFVMWRDHKPYDENYHLANIARQKMRQAA

SEQ ID NO: 450641 - protein, 398 aa, unidentified
MTGSSDYESVQVFIGVDVGKDTHHAVAVNRSGNRLFDKALPNDENKLRSLISDLKQHGQILLVVDQPATIGALPVAVARSEGILVGYLPGLAMRRIADLHAGEAKTDARDAAIIAEAARTLPHALRTLKLADEQIAELSMLCGFDDDLAAQTTQASNRIRGLLTQIHPALERVLGPRLDHPAVLDLLQQYPAPEKLASLGEKKLATQLCKLAPRLGKRLAADITQALTEQTVVVPGTNAAVVVLPRLALQLITLRKQRDEVALEVEQRGLAHPLYPVLTSMPGVGVRTAARLLTEVACRAFASAAHLAAYAGLAPVTRRSGSSIRGEHPSRRGNKTLKRALFLSAFAALRDPISRAYYTRKMSQGKRHNQALIALARRRCDVLFAMMRDGTFYTPTAS

SEQ ID NO: 450642 - protein, 341 aa, unidentified
MQAPRHIGIDLHRNRFTCCVRLENGRNYLSDWKLEDLPRFVKKLRPKDEIAVEVTGNTRLFRDAVAPHVARVVAVDPNQFKVISHSVKKTDPNDARNLALYLEKDLLPEVRMKEKTQAQLASLTQTRDTLVKLRTSLKNKVNNILSAHGINLEKEALSSEKKLREILATQFDPMIGIELKVIVDQIRSLNQSIAELEKTIAEEGSKLEGHKNLTSIKGIGPLTGSILLSVIGNIDDFADEGKLAAYFGIVPRVSNSNETERSGRITKRGSKLGRTALVQCALIAQRYSPYLKRHYEKVKARRGTGKAIIALARKLLGIIYRTLKNKWVFEDFANFVLAEAD

SEQ ID NO: 450643 - protein, 401 aa, unidentified
MNAVGIDVSKGKSMVCVMRPFGEVVLEPFEVLHTAQNLRDLAEKLKALDGETRVVLEATGNYHKPVAFILHDAGLFVSVVNPVLIHDYDNNSLRRVKTDRKDAAKIANYTLDKWTRLRQYLPEDDTRLALKNCYRQYQQAVAIRTMLKNNLISSLDLTFPDANKLFVSPPKSNGCEKWVDFIGDFWHSECVSSLSADAFAKKYLKWCQKHGYIFTRSKSDEIYACALNSASLPKSPTSKLLIQQQVAQLKAVSQSVAAFQQEMLRLSQQLPEFDTVMEMYGVGPSLGPQLMAEIGDVRRFSSKKSLIAFAGIEPLPNDSGKVVGNDKGISKVGSAVLRRTLFLIMSVILQTQPQDEPVFQFMNKKRSEGKPYKVYMMASANKFLRIYYARVKAVMDSERSQ

SEQ ID NO: 450644 - protein, 354 aa, unidentified
MYGLKHQKEKRSVDHFAGLDVSVKETSVCIVDDTGKIAREVKVASEPEVLLTVLKNPAYRFKRIGLEAGPLSQWLFSALAEAELPVVCVETRHMQAVLKAQINKTDRNDARGIAQMMRVGLYRPVHVKTLRSQKLRMLLTHRKLLQSKAIAVDNDLRGTLRNFGLKVGMVGTVKFEARIKELVENLPDLATLIEPLLVVRRVLREQFAILHRRLLAIVRDDEVCRRLMTTPGVGPVVALTYRATVDVPARFRKSKAVGAVFGLTCSKYQSGEIDRSGRISRCGDEMMRVMLYEAAQSMLYSKKWSWLKAWAMQIARRRGMKKAIVALARRLAVIMHRIWVDGTEFRWTREPAVA

SEQ ID NO: 450645 - protein, 405 aa, unidentified
MNDLHYIGFDVHKKSIQYCVKLADGRLVREGRIAATHSAVAEWLATQHTPWKGALEATMFSAWIYDQLLPHAVELHVAHSAMLKALATGKHASDRLDARKIADLLRANCLPSIWMAPPELRSLRLLLRYRQLTVRQTVQIKNRIASTLMELGVDYDSSRLHGKRYYQDLLTRLGHLPPPVRWLLELSRGAIDMFATTDRLLLRQLAQDAALRQRVARLQTIPGVGQITALTWALETGDPHRFPNASHAMSYCGLVAALQESAGKQYRQPLSRKRNAHLQTMLIEAAHLAPRYHPHLRALYEKVKAERHSGAAAVAVARKLTAYLLAVDKSGQPFELRAVDPPRDNTASPAGPPSEALAVARQPTPSRVRSAAAAPLTGPGARRAVANQALVGSEGEAPRRSRTTR

SEQ ID NO: 450646 - protein, 344 aa, unidentified
MGDVSTIGLDIAKSVFQVHGVDVAGAVVIRKRISRAKVLEYFGELPRCLVGIEACPSAHHWGRELQALGHTVRLIPPSYVKAYLKRGKNDANDAAAICEAVTRPSMRFVPIKTKDQQTALMLHRTRQLLVRQRTMLSNALRGHLAELGIVSAKGRNGTGELLRIVADSADSRLSPAVRGILDVLAGQYGAIGAEIASIDKSIMVLHRGCEASRRLAEIPGIGPIGATALVAEIGDWNTFSSGRSLAAWIGLVPKQHTTGGKDRLGSITKQGNRYLRWLLVVGAMAVIRYARKHGTQKRPWLGRLMERRPTKVAAVALANKIARMAWAIMVRGERYKEPKLLLAA

SEQ ID NO: 450647 - protein, 338 aa, unidentified
MKLYGAIDLHSNNNVTVLIDEQDRVVYEKRLPNDLSLIAQQLSAYQGSLEGVVVESTYNWYWLVDGLMDRGHTVHLANTSAIQQYEGLKHTDDSSDARWLAHLLRLGVLPQGYIYPKDERAVRDLLRKRGQLVRQRTANLLSIQNLLTRNTGNSINSNRIKTLDANRVDELLTNPDLALAVKANLAVMQCADEQIDRLERTVTNRIKLREEFSLLKTVPGIGLILGLTIMLETGDIGRFADVGNYASYCRCVGSQKLSNGKKKGKGNTKNGNKYLSWAFIEAANFAIRYCARIKSFYQRKKAKSHGVIALKAVAHKLCRACYYIMKNRVAFDVTKAFA

SEQ ID NO: 450648 - protein, 344 aa, unidentified
MEHYVGLDVSLKETAVCVIDGEGNRIWQGKCTSTPQDMEALIRKRAPHAVRIALETGPLCVWHWHALRAVDLPVVCIHARHAKAALMMQLNKTDPNDAFGLAQIVRCGWYREVEVKSIDSHRIRLLLSARSRFVSMRTTLYNQIRGLVKTFGIVLAPGKGGTFVREVEAKMPCDPIVETVIGSLLSAWKTITAQLIKLDHDIKVLARESAVHQNLMTVPGVGMVTAAAYVATIDSPQRLSKAKDVGAYLGLTPRRYQSGQVDRNGRISKCGDGMLRALLFEAAHALLTRTKHRSALQTWGLALAAKTGPAKAKVAVARKLAVIMHRMWLDNTPFRGSADLALAA

SEQ ID NO: 450649 - protein, 339 aa, unidentified
MNKFSEKEWFIGGDLSKETIDLVVCSQSGEFQRDSKRVRNDLGGFEAMWEWLTNKSIDPKKSLFCFEHTGTYGLLLFSWLSAKEIDYCVEPALQIKRSVGMTRGKNDKIDAQRIAQYAYKQRDNLNSFTFPAKALLRIKQQLTYRDQLVRIRTSFMNSIKAHQQYEQVLNTDEISQDIKVQIEALTASIDRVERQIHTIIQEDKSLEKNFILANSVKGVGLLIAAFILVSTNNFESFENGRKFSCYAGIAPFEHSSGQYKGRTRVSHLANKRIKALLSNGANSAIRWDPEIRSYYKRKTAEGKDHKLVVNAICCKLVNRVFAVVQRGTPFVQTYANLVN

SEQ ID NO: 450650 - protein, 399 aa, unidentified
MKYVGWDWASQTHDVTVLDDSGSVLERWAFAHTEAGWAATIHRLRRHGDPDKLPVIIERTSGLVVDRLLEAGHPVVPVHPTSFYAARPRWSASGAKSDPGDSYKLADYLRTDGHRLRRLEPIESGLRELQALVRLRDDQVRTRTATVNQLTATLDAHWPGPRNLFRSLASAIALAFLTDYPTPHAAAHLGEARMAAFCRRHSYRGGKPATELLERLRAAPVAPIGLPAETLSAIIGAQVALLRSIQSTIAATEQLITARLAEHPRAQLLQQLPGVGMINLAQLLAEVGPILDRVKSAEQAATECGAAPVTRASGKSSGVYFRWAANTRARKAVTSFAHNARMQSPWAGELYANARARGKRNPHATRIVARAWIRVIWACWHNGTPYDPSLHHHRRQLTA

SEQ ID NO: 450651 - protein, 358 aa, unidentified
MTTVSNKQKWFNTIRLTKDDDLYIGIDAHKKSLHIALWLNDTPAIDFVMPPDNAKLIDTLNKLRVALRMVVYEAGPTGYSLARMLRQANIPVSVVAPSKTPRQSAPDSKTDSLDARKLAEYAAKGLLRGIAIPTKHQEAQRQLTRLRQQLVEKQTRVKLQIKGFLLQHGIDQPNGLSRWSCPAIENLKSIRLSEHLRYCLDMLIEELRFIAEQVKSAEQKIKDAFSEKPICDTVKLLTTHPGVGQIIATQFAAEIFNPKRFSDKTQLAKYVGLAPSVHQSGQTSRYGPILKTGRPQLRCSLIQGAWIWVQNDRDAHKTFCRLIHNTGHKNKAITAMARKLAVHLWMMARDNKPYACAD

SEQ ID NO: 450652 - protein, 427 aa, unidentified
MSYRIAAVDVHKKMLAIVVADVAGEGEFQFERRKLGATPGELHVLAQWLDQQGVEEVVMESTAQYWKPVWGMLEQFWKLARQRREGAPKMAGTLHLCQAKSNHGPRGRKNDFLDGERMIKRLVAQELVLSFVPDPEQRLWRTVTRRKYQLTRTRVSFRNQLECLLEQAHLKLSSFVSDLLGLSARRMLQALAEGETDPAVLAAMADCRLRATPEQLRDALGACTQLNGVFRRLLKMALEELELIETHIEQLEREAMELMQEHQDAVRRVAEVPGFGVDSAVQMIAEVGPEAANFDTEKELSSWVGVCPGNQESAGESQSTRSPKGNRHMRRLLTQAAQSAVKVKGSIFEMTFHRLLPRLGYPQAIWAIAHRLCRLLWLILHKGVHYEERGPAVDAKSKRRRATRMIRELQKLGYRVEGGPLPAVTRA

SEQ ID NO: 450653 - protein, 342 aa, unidentified
MESAVTMGLDLGKSVFQVHGVDAGGAVVVQRRLTRGKLLHFFGKQAPCLVGMEACAAAHHWGRELRKLGHTVRLIPPRYVKPYVKRQKNDAADAEAICEAVTRPNMRFVEIKSCEQQGTLVLHRVRLMLMRQRVQLSNAIRGHMAEYGLVAPVGRNGLQRLIAILGNPDDERVPAVARASLAQLVCQFGLLNDQVLENDRRVRASARATELGCRLMEVPGVGPVLASAMVATVPDPAAFKSGRNLAAWIGLVPRQNSSGGKEKLGGITKQGDRYLRQLLVAGALAVIQYAQRHGTKRPWLVHLLARRTPKIAAVALANKMARMMWAMMMTGERYREPTVAAA

SEQ ID NO: 450654 - protein, 343 aa, unidentified
MEVYVGLDVSLKETSICVVDDSGKIVSEGKVLSEPLALAEFLRAKAGNAKRIGLETGPTTTWLWHELRALGLPVLCIDARHAKAALSLQINKSDRNDAVGLARIMQCGWYKEVQVKSLSCHEVRAVLISRAQLVKTKVDLENQIRGLLKNHGLVIGKAGGNIFRRRAEELVGEYHLLREAVRSLLAVHEVVRREIADLTRKLLALARNNDASRRLMTVPGIGAINALAFCAAIDEPSRFRRSRSVGAYFGLTPRRYASGEVDRTGRISKCGDAMVRTFLFEAAGVLLTRVQRWCKLKAWGHKLWKRIGFKKAKIAVARKLAVILHRMRRDGTDFVWSTKEAVA

SEQ ID NO: 450655 - protein, 433 aa, unidentified
MLKINYMSTLFVGIDVSSKTNAVYAMDFEENKYLSSPFDNNQPGADKLVNMITECMHKHKNLDTLLIVLESTSVYSVHISNFLSTSEVLMPYKPYVFCVNPKTTANYRKSYIGMEKTDPTDAYLIADFGRVGRTKKLEPWRGGQFIALKRLTRHRTHLSECIAREKTYMVSNLYLKFSELQLLEGDDKPFGNLYGATSSAVLTEFLSPQEIIDMPEEELLAFLAEKSRNRISDISKTSELLRKAARDSYRLDKCMYEPLNVSLASSFNCIHAYQKEIRLIEQAIEKCINGMNPNALIILQSIPGIGPVWASGILSEIGDITAFHSSDALAKYAGLYWPKGDSGDFVSEDNQMSKAGNPYLRYYLGEAANSVRKHIPGYADFYARKYAEVTKHQHKRALALTSRKLVRLVFGLLVKNQLYTGEKLDTEYNIKSN

SEQ ID NO: 450656 - protein, 350 aa, unidentified
MTTMTPEPGSVTGGVDTHLDIHVAAAVNHLGGVLDTKSFPTTAAGYRRLLRWLRSFGPLHAVGVEGTGSYGSALAQHLTEDDVRVIEVSRPNRQVRGRHGKTDVIDAIAAARAVLSGEATATPKAHSGPVEALRLLKIVQRSATKSRTQAGNQLRAIVATAPDDLRSRLRSLKTTELVTTCAAFRVRAEDDSLATVTRLALRELAQRIQLLDEQLARTKTRLARITTSVAPQLVARKGVGPDTASAILVSAGDNPHRLRDERSFAALAGSNPIPASSGKTTRHRLNRGGDRQLNAALWRIAIVRLATDPDTQAYLARRTGEGKTKTEAIRCIKRYIAREVFAALPQTAAG

SEQ ID NO: 450657 - protein, 408 aa, unidentified
MEVVHPRCCGLDVHKQTVCAGISIKEGPVQERQKKRFETTTAELRQLFAWLKEWKVTTVAMEATGVYWKPVWNALEEGFELLLVNPQHLKSIPGKKTDFKDGERIADLLQHGLLKGSFVPSRPIRELRELTRARASFAQERSRIINRIEKTLEDPNIKLGVVASDVVGASGRAMLEAIIGGETDPVKLAELAKGTLRNKIPRLQLALEGRVTDHHRFLLRQWLDTLDFVDRKIAKLEEQIREKARPFEAMLQAWMQVPGLRRINAYSLLAEIGADLNQFPTAAHLASWAALCPGNRESAGKQTSGRTRPGNRWLRRTLCEAAWAASRTKKSYFGALYRRLVRGRGKNRALIAVAHSLLVTVYSFTQSGTAYLDLGSEYFEQLNKKYLERALVRRLEKLGHRVILEPAA

SEQ ID NO: 450658 - protein, 339 aa, unidentified
MTIAVLGIDLGKNSCSLVGLDAAGRVVLRRRMRREGVIAFGAKLPGCVVAMEACCGAHHMGRALAEQGHTVRLMSPEYVRPYVKAQKNDDRDAEAIAEAATRPTMRFVALKSEAQLDVQTLHRVRDQLVGERTALTNQIRSVLLERGHVVAQGRAKLTACLAALLDTDAGASLTPRMRTLMAEVRERWQDLDRRIAALDAEQARINEDARRLTTIPGIGALNATALVAAIGDVASFARGRDLAAWLGLVPRQVKTGGKPRLVGITKRGSKYLRKTLVQGASAALPSLRQSDTHLGQWLRGLLARSHVNTAVVALAAKMARIVWALLRHGRVYEPAAVAA

SEQ ID NO: 450659 - protein, 385 aa, unidentified
MKNTIVHHEGAASLEAAVKKVKLSGSIIKIGLDVHARLYVAVAQYDCLLPKPVRRLGPSEFVPWVKQLLRAGHTVHVVYEACGFGFGLYRELKAAGAHCYVIAPRKLDEQCTRVKTDPRDATTLCQRLSRYLEGNTRELAVIRVPTEGEEQARHVSRQREQLVCLRQKLEAQGRSLLVNHSLPSPAHWWKNQTWSRLLKLLPCWICLRLEVHRPVLLGLEQQIGALSAQLGATAPADVPAGVGKLTTVIMTREICSWERFTNRRAISSYTGLCPGEHSSGSKRVSGSVTKRGNPRLRAALVECAWRMVRFQPQYPPVKKRLAILAKGAHATGAQRKKAIVAVARHLAVDLWRVHTGRCSAAQLGLKSAETLIVRGEQKAELNALA

SEQ ID NO: 450660 - protein, 363 aa, unidentified
MEAEKRRYVGIDLGKREYTMAIIGKNKKTSIHQGKTSLHGRQGLYRLLEKGDKVALEAGNLAFIMACELMEQVGCEVRILNSAKLPLIWNAPTKTDREDAMKLAHLIEERRDEKLPLVPLPSKQELERRSRVASYRRAVYGKSRMINTLHAMFVHQGHTTIVKKDLSTAERRRKAIEVLRGEEREEAAYLLQHLDLYEIRIKALKSKIHEEAKADENMMRLQSIAGVGPIVAYAYVSFVGDGSRFSKGSQVSNYLGFAPRLDYSGTIQRQGHISKRGNGYLRGLLVQAAWAAVRSKSGGALRERYKHITSFQGSSKKKTIVSIGRRMAELMYSVMKNKTEYKPQHWKGTGNKTALLVEQAIGA

SEQ ID NO: 450661 - protein, 321 aa, unidentified
MAETDKVYVGIDVSKDTLDIATMPQPSSRRFSNNPPGIDELVEYLRELAPTLIVLEDTGGYQRDAAVALNDVGLPTVVVNPRAIRLYAKARKILAKTDRLDAGVLARYAWKEQPEIRPMPDRDQRELRDTVTRRQQIAEMIAAEKNRCHQARGAVKAGIEAHITYLESQRSELDEVLDKIIASNAQWAESESLLRSVPGVGPVITYTLLAELPELGSLNRRKIAALVGVAPFNNDSGKHQGHRCIWGGRAPVRCALYIGVLAGIRYNPVISPYYYRLRKEGKPFKVAMVACIRKLLTTLNVIIATRRPWDTNRIALTGIAQ

SEQ ID NO: 450662 - protein, 370 aa, unidentified
MLDTTTFVGLDVHARSIKAVSLDVMTGEVRAATFGYDAGAVAEWIRSVGPGARCVYESGVTGFDLQKRLSGLGVDCVVGAVSKMIKPSADRRRKNDRNDAEFLARMLSVGNVVEVWVPDDECEAARDLTRALEDARDDLSRSKQRLSKFLLRHGLVFDERTPTGRRKGNWTRAHWSWIESIRFAEGADNDALAYYVDAVRRAAEEKARLEGLVEAEARKPRWRKRVDSLRCLKGVDTASAADLVFEAGEFSRFRNARSFAAWVGLTPSEHSSGESDRRGAITKAGNKHLRKTLVEAAWHYLTCSGRPKDLAKGQAPDRGARRHAAKGVRRLVERREALLARGVHGNKANVATARELACWVWAVGLMAEEA

SEQ ID NO: 450663 - protein, 404 aa, unidentified
MQVVHERCAGLDVHKKTVVASVISREGQETRTFGTMTRDLLLLADWLTERGVTHVAMESTGVYWKPVYNLLEDQFTLLVVNAHHIKAVPGRKTDVKDAEWIADLLRHGLVRGSFIPSRPQRELRELTRARRSLIQQRSQVANRIQKVLEGANIKLASVATDVVGVSGRAMLEAMVAGTEDPQVLAEMARGTLRKKTQALEEALEGLVGPHQRLLLGTHLRHLDFLDGEIARLDEEVAARLRPFEQVLERVDAIPGIGRRVAEDILSEIGTDMSRFPTAAHLTSWARVCPGNNESAGKRKSGSTGHGNSWLRPILVQAAQSASRTKGTYLAAQYHRIAARRGGKRAIMALAHTILVTIYYMLTRGTVYSDLGGNYFDERDRQATIRRAVRRIEGLGYTVTLKEVA

SEQ ID NO: 450664 - protein, 401 aa, unidentified
MRFAGIDVGAERHMVAMVGEQGEVLCRSSPFGEDASGYAHLFELLGPPGGCLLALEATGHYWRNLFVALLAKGYAVAVLNPLRTRRFAEEELQRTKTDAIDALGIARFAAQKRPPATQLPDIATEELRELSRLRDRLQEDFASRLRQLHRAVDLGFPEFTRHVRTLESQLANTILSRYPTAASFRGASVKKVGRIVYDGSHKIGEELARALIEAAANSVGSHHSEPYRLRIEYLCEDLRVLRRRLKDLARDIESKLDDHEVGKLLTTIDGVGPLTAACLIAELGDPARFRSAAAIASYVGVAPRLRQSGKKRFSGSPTIPFGNARLRKALWMVVLNAVRCNPWLRQYYGRLRAAGKPGKVAVIAAMRKLLAAVWSVAIHRRPFVPHLSPIPATADAVTNNV

SEQ ID NO: 450665 - protein, 403 aa, unidentified
MNAVGIDVSKGRSTIAVIRPFGEIVRSPFDINHTPRELTELANFIMSLDGESRVVLEHTGKYSDPVIKVLSEADVFVCPVNAKLIHDYGGDTIRRAKTDKIDSLKIAGFCLDKWSKLERYSPADELRKTLKTFNRQLAEYMKVKVMLKNNLISLTDQTFPGISNLFTSPARESDGHEKWIDFLARFWHCDCVTSLSEEVFAERYKTWCKKHGYNFSLAKANQLYETAGNQQSTLSKNDFTKTLILQAVEQMNSLCVSISKLKAEMTKIAQTLPEYETVIAMHGVGKTLAPQLIAEIGDIRRYPKRTSLARFAGIEPLENQSGSYNQHSRRISKQGSPQLRKALFQVMRCVLQKSNHDEDVFRFINRKRSEGKPFKVYMIAGANKFLRIYYARVKECFDALTTA

SEQ ID NO: 450666 - protein, 343 aa, unidentified
MQTVTTIGLDIAKSVFQVHGVDAAGQVVIRRQLKRRQVLAFFQRLPACLVGIEACASSHHWGRELQVLGHTVRLMPPAYVKPYVKRHKNDATDAEAICEAVSRVNMRFVTIKTPEQQSCLILHRTRHLLIRQQTSVINAIRAHLAEFGIVAAVGRNGVEQLLGVVADANDKRLPEVARACLAALGVQLRVLKAQILEFDRMINAWHRSNETSRRLDKAPGIGPVLATALVATVADPKTFRSGRNFSAWIGLVPLQHSSGGRDRLGHISKQGDRYLRNLFVAGALAVIRYAKIHGTQHRPWLAALLARRPTKIAAIALANKIARMAWAMMVKGEHYKEPVALAR

SEQ ID NO: 450667 - protein, 344 aa, unidentified
MNHYAAIDVSLELSSVCIVDATGKVLRETKVETRPEALVKLFKGFGLPLTLIGLEAGPLSQWLYAGLIDAGFDTTLMETRHVKAALSAMTVKTDRRDARGMAQLIRMGWFQPVHAKSPGSQQMRALLVARKQLQHKLRDIELSMRGILRGFGLKVGHVTDKSFEARIRKLVTGHTMLEQIAEAMLAARATLLSQFKKLHKAVLDIVRHDEVCRRLMTTPGVGAIVAITYMSALDDPGRIKKSRNAGPLFGLTPKRYQSGETNVTGGISRVGDEMVRTALYEAANALLSRTTRFSALKRWGLDVAKRRGLKRAKVAVARRLAVILHRMWIEGTTFRWSKTEAAQA

SEQ ID NO: 450668 - protein, 316 aa, unidentified
MSKDSMICAGIDTGKYKLDVALAGSSGQLMVDNTPEGHTALSHWLREQRVKRVGIEASGGYERAVVTFLRGAGFVVVMLQPAQVRAYARLQLQRAKNDKLDAALIAASTAATQRLHAAPDPRLSSLADALTLIEQLTEDVARLKTRRESVHGDPRIAALWSAEIARIKTLLRAELAALSAAIRRHPDLAVRLDLILSVAGIGLKTALAILLRMPEIGRASREEVAALAGLAPYDQDSGEHQGDRHIEGGRARLRKALYAAALPAAFRWNSDLGAFYRRLLGKGKAHKAALIACARKLLVQVNAVVTRGTPWTPHPI

SEQ ID NO: 450669 - protein, 441 aa, unidentified
MSNRRTLTRGDRRRNDKLARLRSIVRPDLAIVGIDLASAKQAAVVVDHDSMVLGRRMFLGDPWVIDEILDWAAPIAVDAGFTGVVVGCEPTGHRWKAILDRCRARGVEVVCVNPMLVHRGREEEDFTRDRSDFKDSTIIARRVSDRHCFVPYALEGHWCRLRHLGARRDDQLVAAGAARQQLRDLLECVWPAALATAADPLDSITWRAAMAVSCDPAEITAMGFDTFAASVTAELDRWGGQRRNLRILRAIWAAAAEPGGVERERPAAVERARDAIRDWRRALDELADVEARMIEVLDALELTDLVTTIDGLSAVGAAAILAEAGDPARFDCARTWVKHAGLCPRANESGTFAGQTKTSRRGRPGLRTAAWRAVWGALHHNPVYAARYTHLRTRTDNPLRDGQARAAIAAALLRQLFVVVTRRVAWDPAIAAGREVTPLAA

SEQ ID NO: 450670 - protein, 305 aa, unidentified
MKIYIGIDVSKLHLDLHHHQQSTQIPNTAKAIRRWLKALPPAAVLVCEASGGYESLLVTLAHAAQRPIARLNARQVRDFAKAKGRLAKTDKIDAQILVDFAEAFHPEPLGLPDPLQQALAALVKHRAHLLMQITQNNNLAETLADKKLLALVARTVAFLRQQADQIEALMADQIARSPNLSTKVQRLRQVQGIGTLSATALVALMPELGFLSATQAAALAGVAPFNRDSGQSRGQRHIAGGRSQVRSVLYMAALVASRHNPVLKSLYLRLLANGKAKKLALTVLMRKLIILANLLLKNPDFTLAS

SEQ ID NO: 450671 - protein, 411 aa, unidentified
METNEKRYWAGVDWGDKQHTVCVVSTEGNVVSSSRVAHSAGGVAELVESVSRLKGLAGMAIETSRHVLVDALLKAGITVYAINPKQSHQWRLCESVAGPKNDLRDARSLANGLRLYAQQLRPLKPEPVNVRVLAMLCEQEQGLIEQRTASVTALEAALKAYFPLILTWFPDWAQPVAWRFVQDFPTPEALAHATKQKLCGWFKTHRSRLTPQRLRRIEQRQDVLALTADPATHQAHALRTVALARELLAIQVGIDQHRKQIEALYPQLPSAALFSSLPGAGRKLAPRLLCLLGSDKDRYASSHNLCMLAGTVPIEFGSGEKSTVVFRRSCRKNYRNTLHQFAWVSLRYCAWANAFYKKCRREKQSHAQALRNLATKWLSIIFRMWHDGLPYDNQRYLDALKKTNSPLLQFL

SEQ ID NO: 450672 - protein, 343 aa, unidentified
MKGLYAGSDLHGNNNLVGIVDEQGKRIFKKRLQNEPQLILEVLKPYKEEIVGVVVESTYNWYWLVDALMDEGYKVHKVHLANPSAIEQYSGLKHADDKHDAFWLAEMLRLGILPEGYIYPKEERPVRDLLRKRAHLVRLRTSLVISLQNILSRNLGRKMNVNDVKVLKEDRISPLLEMNEDLALAGRVSKEAIDHLSHQIFRIEWVVQKKTALKPEYRYLPSVFGVGKILSLTIMLETGPISRFPTVGDYVSYCRKVPSQWTSNGKWKGSGNRKNGNKYLAWAYSEASEFARRLYPEARAYYQRKMQKTNAPVAHSALAHKLARAAYYVMRDHVPFEPGKLFG

SEQ ID NO: 450673 - protein, 403 aa, unidentified
MPTTKLQKTDDFAGQNFYVGLDVHKKSWAITIRSLGIEVSHFTQPPGAEALSNYLTREFPGGTYHSAYETGFCGTGIHEQLCKLGIKNILVHAADIPSTDKQKKNKTDLHDSRAIAGHLERGNLEGIHILTQEQQEIRSLFRLRESKVNDVTRSNNRLKSFLMYYSIKLPERVSKNEFLSNKALAWLNMELGCAAGTFALQQYIEDLKYQRQQLFHITKSLRVQVQALHEKTYKSLLSVPGIGAITAMGLIAEVADFSRFNDPDEYCSYLGLCPWEDSSGDTIKTKGVQPRCNRHLRPLLVEASWQAIRKSRTLFAYYSKHTGKSGKKAIIKVARKLALIAKGVATTGQLYQDDYLKKKQLEQRPDSYRDKKDLKAGRFSSGITEQHINKQPDDSMQIATMPG

SEQ ID NO: 450674 - protein, 456 aa, unidentified
MARRKKKQPNVIYNQGLQPMRTDCAGLDVGSREMWIDVGIENSPDPVRKFDAFTEDLNVMAGWLKSCGIRSVAMESTGVYWIPVFQILEAHGIEAVLVNAAHVKNVAGRKTDWLDCQWIRILHCYGLLRGSFYPAPEIAVLRSYMRHRQALVESAATHIQHMQKALSLMNLQLHHVISDITGVTGMKIIRAIVAGQRDARQLAAMRDGRIKASEQTIVKALEGNYRSEYVFQLQQSLQLFDTYQDKIEVCHQQIEAHLQRMDSKADAGPLPEARSKKKTIRNRPQFDVRQQAFRISGVDLTRIDGVQESAALSLLAEIGIDMSRWNTEKHFVSWLALCPNNKITGGKVIGRHTKKSAQRAREILCLCAQSLLDSRSALGAYCRRLCGRLGKPQGITATAHKLALLVYRMIKLGKDYLDIGQERYEEQFKQRALKHLARKAKDMGFQLVPVTENQVP

SEQ ID NO: 450675 - protein, 354 aa, unidentified
MNTTQNSTKSKIVKVIGVDLAKDHCDVIGYDENGKICLRLDGCSYAKLREILANLPQAVVLMEACKGSMFHARSIADLGHEVRLVKGTDVKALRNVNHKNDLRDAAYIAKLYFVPGTTYVYIKSQQQQSLQFLQNEYKSLQELRIQAGNQIHAGLEEFGCPVRKSSKFIKTRMVAHLEKHAELIPEDVMASFKRRREIWLNLLQQEEEAKRRLEQVAATDANAKRIMTVPCVGPQTAVGLLVHVGVDFGRFKNSRQFAASLGLVPKQNSTGGNNTLNHITKCGPKRLRSNLVQCAQLVLMYAEKWKGNFGDWVRKMRDSGKKHGVIVCAIAAKLARIIYRLMKDKVDYTPVLSC

SEQ ID NO: 450676 - protein, 379 aa, unidentified
MFENITYVALDDHKRRHQVAVLLPGMKREDASTWRVENTRAGIRKMVRKVMKLAPGDVRFCYEAGPNGYVLQRQISEFDRVSCVVVAPSKTPRRPGERVKTDRRDARKLVSLFRSGELQSIVPPMEEEEAIRDLCRCRRTAQKRATASRHQLDKFLMRNGYIYRDGKNWTRRYWEWLRSLKFDDWRRERTFQAYVFGIEQDEDRVKRLDLEIVRAAEEEPYRTLVGFVRCFRGLDTLSAMVLTSELYAVGRFTTAPSLMGFVGMVPSEDTTGWDPHRGPITKAGNEHLRRILVEAAKHYRHPARVSKALVERRKGQPDWVIAIADKAQTRLHQKYWKLVMGKGKHPNIAAIAVARELVGFIWAVLIRAATTQSVDELVA

SEQ ID NO: 450677 - protein, 344 aa, unidentified
MIEVSTIGLDLAKNVFQVHGISDDDTVVIRRRLRRAEVVTFFSRLPPCLVGMEACATSHYWARELGQLGHEVRMIPPRYVKPYVKRGKNDALDAEAICEAVQRPSMRFVPVKTAEQQGALVIHKTRDLLVRQRAILVNALRSHLAEFGIIVAKDIGNAPQLAAVVRDETDRRVPTTARSALVTVVDSIDALSRRIKVLETRIRHWHRANLASQRLATIPGIGPITATAIAATVPDPKAFRSGRHFAAWLGLTPQQNCTGGKERLGRISKQGNTYIRRLLFIGAVGVVRYARRRSPLEEWIRHLLERRPTRLVTIALANKLARIAWAILAHDQNYRAGQPVVASD

SEQ ID NO: 450678 - protein, 358 aa, unidentified
MIRLTKKQKWFKQKNLTKKDKIYVGLDVHKKSISVAIWLNGQIGLTFNASADYARLIKQLRPIQKAIKLVVYEAGPTGYGLARTMEKAKIPVQVISPANTPRPSKRRSKTDRLDCCELAEFAAKGLLKPVTIPTEQEEADRQLQRLRDQLVSKRRRIRQQIKSFLLQHSIAEPDGLQGWSFAAIDKLQSLPLNTALRFTLDMYLEEMAQIRIYLEQTEAELQALSQQKRHHRAIKILRSHPGVGPVTAWAFRLEIFRPDRFDQGTEVAGFLGLAPRISQSGQTTREGPIVKTGRPQLRSKLIEASWVWIRYDAQARKVYNRLSSNTGNANKAIVAMARRLAIRLWKMLCDDQLYRPAG

SEQ ID NO: 450679 - protein, 318 aa, unidentified
MTQAEIFVGIDVSKAQLDIAVRPTGETWTVPHDDAGLDTLVARLRPLQPTMIVVEATGGWEVRVAGTLAGAGLPVAVINPRQARAFARATGQLAKTDRLDAQVLARFAEAVRPTPRPLPDEAAQELITLLTRRRQLVDMLTAEKNRLGHARGPVRAQIRTHITWLERQVTARDTDITTLIRQSPVWRERDDLLQSTPGVGPVFSTTLVAELPELGTLSRQQIAALVGVAPLNHDSGTLRGTRTCWGGRASVRTVLYMATLVATRCNPVIRACYTRLRAAGKVKKVALVACMRKLLTILNAMLKHRRPWRSVKAEPCMS

SEQ ID NO: 450680 - protein, 374 aa, unidentified
MGCQAGGEAASLTTMITDDKTETNKSYDTIKLGIDAHAKWYYVARQLDGATPQPVQKMTFEALLRFVAKQQALAGEVHTCYEAGAFGYHLHRKLEALGVSNLVVQPQDWDKRGKGVKTDRIDALALCQRLDRYVRGNRKAFSVVRVPSEEEERERAFSRQRQQLVRERQRLQAMGRSLLAMQGIHVRGKWWKGQTWAAICREAPAWVVERLEVFMKLIEPVEVEERKLTEGIQKVGRKSRIPKGVGPLSFEVLRREVGDWSRFNNRREVSSYTGLCPREHSSGGKRRGGSVNKSGNPRVRAMLVEMVWRMMRWQPGYHALRKWMAVLGDASRSAAVRKKAIVAVARQLAVDLWRLFTGQTTAEKLGLIYLPEAS

SEQ ID NO: 450681 - protein, 338 aa, unidentified
MELYGAIDLHSNNNFSMISDGEDRVIRKKKLTNDLGEVDLFFRDYKTQMRTIVVESTYNGYWLVDGLQELGYEVKLANPAAMQQYRGLKYSDDETDAQWLNRINRLGVLPEGYIYPKELRGLRDLLRKRMLLVQTRTGLSNSLKHQYQSWRGIDMSRLKIQKLEVDDIREVFEDPYLQQSAEVFAESIQSLSRHVDEIEGSVFKALKEDMLVRRLVILPGIGKILGWMIRLEIGELERFEAVENYLSYCGLVESKRMSNAKIKGRGNAKNRNKYLRWAYAEAAIAALRNVRIKKYHDRLLKKKGPVKAKAIVASKLARVSFMLMKDPALIYDENRLFV

SEQ ID NO: 450682 - protein, 432 aa, unidentified
MISISLPVAPENSVFAAFVGLDWADQKHDLVLYDQHGGKPEHRELVQTAEAIDEWACGLRQRFGGRPIAVCFEQSRGGIAYALLKYDFLVLFPLPPARLASYRESFSNSGAKDDPTDAALLVDYLLRHRDQVRVWQPDTPATRELQLLAEARRDAVDQRTRLSNQLTAVLKRYFPQAVMLVGYDVDRPLACDFLSKWPTLTALQAAAPATLRKFYYAHHSRNEERIVERLELIKSAIPLTTDQALIQAGVLQVQCLIGQLRALAKAIERYEARLGELMDQHPDAALFRALPGAGPALAPRLLVAFGSDRERFQSAAELQSLSGVAPVTKRSGKQCHVHRRWACPKFLLQTFHEFAHCSCKRSTWAKAFYLQQRSIGKGHHAALRTLAFKWIRILFRCWKTKIPYSEERYLESLHHRNAPLLAFLPTTEIAGV

SEQ ID NO: 450683 - protein, 316 aa, unidentified
MYLGIDVSKLTIDCCLIADGQNHQKKFQNNKGGFEQLINWLQSHKVTDKLHCVCEATGTYYEALAEYLYLRYTITVENPRKIKGYAIAELQRSKTDIQDAKLIAQYCQDRKHKLKAWKPPAKEQKQLQEIARYLDYLKQQRATEKAKQHEAPDYIKSHIQTTISNLTAQIQIVKKQLLQFYKDNPSYNNLRKRLKTITGIGEQATAVLLSTFKRHEFKNAKQFTAYLGLDPRKYQSGTSVNGKSRISKIGSSEIRKSLYMPALVAYRCNAFPEFVDRLKNKGKHIKLILIAIMRKLAVIAFTLLKNGQDFQVERYK

SEQ ID NO: 450684 - protein, 365 aa, unidentified
MSTITIGVDLAKQLFSTCEMDARGRVRRRQDVRRDALGAWLAQLPAGTEVAMEACSGAHHWARCCLAYGLQPRVMAAHLVTPYRKSRRTKNDRNDAEAIATAARQGNMRFVPVKSVEQQARLSWHRVREGYKAESLAIGNRLRGLLAEFGVVMAKSDLALRRVLADLDAQVALPAEFKELLRELAEHWTRVRERIDACDVRIASHARQDERCVRLRAIIGIGPITADAVVTSVGSAGEFANGRQMAAWLGLVPTQHSSGGHDRLGVISCQGDAYLRTLLIQGARSSLQRAQATAPPKRTPEQIWIGQLACRLPFGKVLVAVANKHARQLWAMLAREEAYDPQAWLKHPMVQRPAGKRAVSVAATS

SEQ ID NO: 450685 - protein, 417 aa, unidentified
MGGESKMSRRCIGLDIHRDFCEVAVWEQGQVRSAGRIEARPEALAEYATALRPTDEVALEATSGARQVAQILEPHVGRVVIANTHRLAAISDSKRKTDRQDARTLAQLLAAGVLESCWLPDEGTRALRRRVSRRHNLVVSRTRAKNEAMAVLHRNLSQRPPMSDPFGAKGRRWLGALELPSDEVETLSAALRQIDFLSGEVEVIERELARFAAGSAEARRLMTVPGVAMVTAVTFLAQVGEIERFASPKQLVGYLGLDPRVRQSGNGAAFTGRISKEGASLVRHVMVEAAHAGIRSPGPLRAFYERVRSRRGHAIAVVASARKMVSLFWHLLKRKEDYRHSIELVTQKKLRKVELLAGAPRRRGGGRCEGPNRDERREIDRDRARAAAEEYQRFVAERQQGTGTGNGGAAMQAAPRT

SEQ ID NO: 450686 - protein, 363 aa, unidentified
MVSPILAQWTTLSEDFVLLGAIMDTVSLIGIDLGKHCFHLHAQDGSGRMVLRKKLTRNQMFTLLSNFPSCTVVMEACAGAHWIARRLQTLGHEAKLISPHFVKPFRQGNKNDFADAQAICEAASRPSMRFVSPRNEAQQVVSALHRVREALVRERTGTINQIHAFLLEFGISLPRGMAVIRRLPAVLETQALPPRLVAVLERLQAHFKYLDEQIGQLEHELLTQLHEDERSERLLEIPGIGPITASVLMSELGDARQYGSARQFAASIGLVPRQYSTGGKPTLLGISKRGDKGLRRLLVQCARVIMLRIERRTDSLGVWVRSLLARRHSNVVACALANKLARIAWAILAKGTHYRSAPTALPA

SEQ ID NO: 450687 - protein, 355 aa, unidentified
MDSTKYIGMDVHKETISIAVLNSVGKLVMESIVETKAITIIQFVQGLRGDLHLTLEEGTWAAWLYDLLRPHVKEVLVCDPRKNALLKVGNKSDRIDARKLAELLRSNLLRPVYHGEHGVRTLKELSRSYLAISGDLARVMTRLKAVYRSWAIPCAGKQVYAPRHRAQWLNKITEAGVRRRAEFYYQQLDELRSLRQQVRRELLAESGKHKASKLLCQIPSIGPIRAAQLIAILQTPHRFRTKRQLWAYGGLGIETHSSADHRYVDGQLQPAKRRVSLRGLNRNHNHELKNIFKGAALIAATKAGPFQEFYAALVAKGMRPEMARLTLARKIAAITLIVWKKGVRFDAQHLKPQTV

SEQ ID NO: 450688 - protein, 382 aa, unidentified
MANSLRMQVLDQRPRRPGGPPRLSRTIIAVTEKLLEHEEVPMGIVGGLDIHRRQVTFDYLDTVTGEVRRGKIAPADREHVRSWLGRFAGRGDVAFALEGCTGWRFVAEELEAVGACAHLAEPADTAHERGSKQRAKTDRSDARLLRELLVMGRLPESWIPPDHVLEVRGRVRLYKALSDERRGWMQRIRATLFHQGVPALACHLLDADGQGHLQMAELSPAGRESIEVALRQIERLEAELVQLRGALVGFAHHQMGCRALQGHYGIGALLSVAIWEEMGDCRRFGSSSDAVRHAGLDVTVWASDSVRAPGHLARQGPAVLRWALYEAGQAAAKQTSPDHDYYLRVRERLGPERAALSVGRKLGRRCFHTLRDLGEQALAPAA

SEQ ID NO: 450689 - protein, 340 aa, unidentified
MEITTVGIDLAKTVFQVHAVDQHGKVVLKKQLKRGQVAEFFANRPTCLIGMEACGSAHYWARKLQALGHTVKLMAPQFVKPYVKTNKHDAADAEAICEAVRRPNMRFVPVKNVEQQAVLALHRVRQGWIKARTAQANQIRGLLSEFGLIVPQGIGHITKRVPALLDEAKEELPGAFRELMLRLLDHFKELDRQVSEMDHQIQHWHRANALSRKLEDIPGIGPITASALVASVGDAKNFANGRQLAAWLGLVPKQHSSGGKTNLQGISKRGDTYLRTLLIHGARAVIRQIERKTNVQGWLGKLLGRRNKNVAAVALANKNARIVWALLAHDRNFRADYVVA

SEQ ID NO: 450690 - protein, 456 aa, unidentified
MTLDDRPILQPDAAGIDIGAREIFVAVPAGRDENPVRVFPTFTADLEEMAQWLVSCRVTTVAMESTGVYWIPLYDILESHGITPCLVNARNMKNVPGRRTDWHECQWLQFLHSVGLLRAAFRPDGDVVAVRSLMRHRTDLVQIAAQHIQHMQKALTQMNLQIHHVISEITGMTGLAIVDAILAGERDPAVLAKLRDHRIRASEEIVRKSLVGNWKQEHLFTLKQSRQIFQYYQESIAACDEEIEKLVVAFEPRVDPAEHPLPPDRKAQQRKRKRRGINPGVNPKTGFDMRTEIYKLFGVDVTQIPGLMVTPLLLFSEVGRDMSKWPTTDHFCSWLGLCPDNDISGGRILWSGTRGTRNRAGQIFRMGAFALHHDLSPMGDHLRRMKSKIGPAAAQTATAHKIAIIFYTMVKKQVEYDASIWARKDAEREQRFEARLKRQAHARGYKLVKIDENIAA

SEQ ID NO: 450691 - protein, 436 aa, unidentified
MGEGYRYYVGIDWATEAHQVCLTDATARIVKERAVEHSGAALGELADWLGHLAAGDPGSIAVAIEIPRGAIVETLVERGFHVFSINPKQLDRFRDRHTVAGAKDDRRDAFVLADSLRTDEHCFRRTRIDDPLVIQIRELARVDDDLRAEENRLCNRLREQLHRYYPQLLHLSSAMTDPWVWDLWEVATTPAAGARLTATSVTKVLRARRIRRVTAEEVLTVLKTQALQVAPGTAEAASAHIALLLPRLRLVHQQRASLAKRIEKLLDELGAAEASEEQRREHRDVHILRSLPGAGRVVAATMLAEASQPLAARDYHSLRSLAGVAPVTRQSGKRRTVIMRHGCNDRLRNALYHWARVAAQHDELSRAVYAAQRARGHTHGRALRTVADRLLRILMAMLQNGTTYDATRLRRPMPEVDLTAVVPGVPTSSVPAEEAA

SEQ ID NO: 450692 - protein, 408 aa, unidentified
MNPLYVGIDVSSKSNVIYLMLPDGAKHSCFSVANSQDGYSQMVKRILSAVTSRSLDTVVIGLEATSVYGDNLVFFLREDASLAPFNRKIHVLNPKQVKNFKEAYNDLPKNDYVHSFVIADCLRFGRINKEVYLGDYRYKALQNLTRARFFAVQNLVKEKQRFINVLFKKYSTMTQEKVFSDTFSTTALAVYEEFESAEALAAMDLQELTDFIMEKGKNRFPNPDAVAKAIQKAARSSYRLPKTVNDSINQVLSISITSIKALDAQIKQFNKAIEAQMELLPNVLISIPGIGPVISAGIMAEIGDINRFPGQAQLGKYAGLAWTQNQSGDFEAENTKLIRSGNRFLKYYLCEGALSLVRCDTEYSSFYHSKYKEVNRHQHKRALALTARKFVRLVFRLLKDNRLYRAAE

SEQ ID NO: 450693 - protein, 343 aa, unidentified
MEHFAGLDVSVKDSSVCIVDDTGRIVREVKVASEPEALLQVLANPAYQFKRIGLEAGPLSQWLFSALAEAGLPVICVETRHMRAVLKAQINKTDRNDARGMALMMRAGLYRPVHVKTLRSQKLRMLLTHRKLLQSKAIAIDNDLRGTLRNFGLKVGIVGTVKFEARIKELVENQPDLAVLVEPLLIVRRTLREQIAILHRRLLALVRDDEVCRRLMSIPGVGPVVALTYRATVDVPSRFRTSKAVGASFGLTPAKHQSGEINRTGAISKCGDEMMRVMLYEAAHIMLTRTTKWSWLKAWAMKIARHRGIKKATVALARRLAVIMHRIWVDGTEFRWTRETAAA

SEQ ID NO: 450694 - protein, 352 aa, unidentified
MQEIRRKNWAGQRLFVGLDLHKKNWVATVRSRDLHLKTFTVPSGEEAFWKTLNHQFPGAQFIVAYEAGCFGYHIAEYINNNGGKAVIFPPHRIPTPPGVFVKTDKIDSRKLASELSKGLDGIYQPDRISLYHRSVIRKRSQLVRRKVEIQNQIKSDLLFYGIQLYTLGRYWSAEFLRRLWELEFVAPGYTRTFRIILQEYQEIVRNIKETTDYIKEMAQSDLYKERVCLLKSVPGVGDLSAMTILLEIFDINRFASAEKFASYVGLVPSEYSSGEKIRKGSLSGMGNKTLRSLLIEVSWVVIRKDPVLFEKYNRVKKGKTGAEAIVSVANSLARRIHYVLTNRSPYCLGVVA

SEQ ID NO: 450695 - protein, 342 aa, unidentified
MDEVTIVGVDLAKSVFQVHASKSDGRAVIRKRLPRTRFLSFMSQIKPCVVAMEACATSHYWARELIALGHEVRLIPPIYVKPFVKRQKNDANDAEAIVEAAMRPAMRTVPVKTPEQQGLAMLFRTRELLLTQKTQLVNALRAHLAEHGVIVAGGRRSIDPFIRVLDDVTNTLPHVVRKVGATYLDRIARTAGEIEDLERQIDEQAWEHEMAQRLRTIPGVGPVTAMAIEAFAPAMESFARGRDFSAWLGLVPRQHSSGGKQRLGRTSKMGQRDIRRLLISGAMSIIHWRGRNGGKPGSWLARMLACKSRMLTAIALANKLARIIWAIMTRKDVYRDPAGAVC

SEQ ID NO: 450696 - protein, 368 aa, unidentified
MHETITGFVGLDAHAQSTAIGFAQTGREAPRFLGTVGPKFLELSKALSRLGGPAQLLVVYEAGPCGFALARELRAKGYRCEVVAPSKIPRRPGDRIKTDRRDALSLARLARAAELTFVVVPDERDEAMRDLSRARMDAVRARLRARQQLKALLLRHGRRYTGKSSWTAAHERYLATVSFVHHAQNIAFVEYRQAISQEQARVERLSDALAQQLEHWRMRPLVRALMTLRGVDQLAATTLAAELGELKRFARPRELMGYLGLVPSEHTTGEKRRLGTITKTGNSHARRVLIEAAWNYRFPPRITVALQKRQEQQPSAVRTIAWRAQLRLNHRYRTLTARGLQHNKICVAIARELAGFIWSIGQQVSPCT

SEQ ID NO: 450697 - protein, 415 aa, unidentified
MRVHRNCCGLDVHKKIIAACLIKEDAGGNSIYEKRLFGSMTRDLHELAQWLCTAQVTAVAMEATGVYWMPVWNVLEPYGLQLLLINPEHYKAVRGKKTDLKDGTRIAELLQDGRLEGSYVPAVAIRVLRDLTRYRTKLVQYQSSLANRIQRLLEQCNIKLASVASDVLGVSAMAMLRALAQGETDAMRMADMAKKQLRKKIPQLRLALEGCVLPHHRWLLREMIEDLDHVGTKITRIEETIEQQMRPFQSAVERWVTVPGIKHRLAWTLVAEVGPSVEAFPSAADLVSWAGVCPGNNQTGGKRKSGTTRAGNPWLRRALCEAAWAASKTKGTYLQAQFRRLAALRGPKRALIAVANSILTAGYYMLQRATTYQDLGPAYFDKRNTVRATHRLVKRLEALGHRVILEPRFIADPSS

SEQ ID NO: 450698 - protein, 410 aa, unidentified
MQTLVERGCGLDVHQATVVACLLIVLKNGRVQRQVRTFGTTTRELMGLRKWLLSESCTHVAMESTGVYWKPIYAILEGAFEIVVANAQHVKKVPGRKTDVKDAEWIADLLCHGLLRPSFVPPSPIRELRDLTRYRRKLVESRTAERNRLLKLLETANIKLASVATDVFGVSGLLMLHALVEGKATAQEMAELAKKQLRKKIPELELALEGKVEEHHRFLLRVQLRRLRTVEEDLGILEQRIQEKLKPYAAQFTLLQEIPGIDETLAAAIIAELGVDMGVFESVSQLSSWAGVCPGNNESAGKRRSSRIPKGNVYLKTALVEAANSAAKAKGTYLRDKFYRLKARRGYKRAAVAVGHKILVAIYHMLSHQVCYNELGDVYLDNLNKHHVTRNLVNRLERLGYAVTLQQKAA

SEQ ID NO: 450699 - protein, 402 aa, unidentified
MTYDYVIGMDACKYFHHACVLDIDGTQVLSKSINQNEQSLRALFSAFSAYDHKVLVVVDQPNNIGRLTVAVAQDIGIDVRYLPGLAMRQLSRIHAGNAKTDIRDAYIIAHAAKNLPESLRSVDRVEEAFLQLKVLNGIDEDLARSYTRLINQIRSALVGCYPQFEQALRGQIIHRKWVLHLLARYGGPTKIKRLGKAKAAAFARRYKARNPEPVLDAIFAAISEQTVTIAGAHYAEMGVAMSAKDALLKLEHRQQIEKEVIELINDIPHTQFLLSMPGIGPKTAAQILMTAGDMSDFPSAGHLASYAGLSPRTNQSGTSIMSNSLNRAGNKKLKNALWQSSFASIRSHERSRQFYERKRREGKRHNAAVVALARRRLNVLYAMMRNHEHYHDPAPSQEDLAA

SEQ ID NO: 450700 - protein, 329 aa, unidentified
MKIQHIIGADLSKKSIDLVCHLLNTHLQIENSITGFKNLVQWMWQQKINPSETMIVMEHTGLYSYCFEKFLHQHQIAFCKVNALAIKRSLGIVRGKTDKLDAARIAAYGYEKKDKLVVDLPPSDALKRLQLLHSTRERLVRHRASLTCAIKEYRHIGIPEKDILMQTQLQLIKNFDKQIEKLMSEIETIINQQEPLKYNFNLLQSIKGVGKILSLTAIIKTHNFTRFANARKFAYFCGTAPFEHSSGTSIRKKSRVSHLADKQMKSLLDLSAKSAIQYDKELREYYLKRTEAGKSKMSTINVVRNKILYRMFAVIKRQTPFLENYLQAA

SEQ ID NO: 450701 - protein, 336 aa, unidentified
MSENYLGIDVHKNWCVFAEIDSKGKLVRRGRFRNDFGEVTEFAGSLSPRVHLVLEPVLNYLWLLDHLEPFAGSVHVATPFKVRVIAESKCKSDRYDARMLAELLRTNFLPESWVPPYEIRVLRSLTRQRQHLVKMVVMNKNRIRHLLFSHGIRLRVFDIASPKGRAAMKAVSLPEVTRQAIDQCLRMIQVLESSIAGLNQRIVDEIRGNPTTELLQTIPGIGRIWSATIYAEMGDIGRFASAKAFASYTGLTPVVRTSGESRWAGGITRLGSKPLRRALVEASIDAIRKSPALNRMYCRIRYRSNFQKARVAVARKLAVIIYAMLKNGEPFRVQPL

SEQ ID NO: 450702 - protein, 341 aa, unidentified
MKKFIRIGVDLAKNFFQVHGIARDGAEAVSRKLTRAKFRAFFEGVAPCRVGMEACGSAHYWGRELKRMGHDVVLIAPIYVKPYVKRGKNDAADAAAICEAMSRPDMRFVPIKSADQQAVLMLHKTRELLVKQRTMIVNALRGHLSEFGLIAAKGIQRVHELVAMALGEEGFPEAARQAVAALAEQSEQLDGAIDGLEKQIAQSGARNPMVRLLKEIPAVGPLISSAMAASYPDPSVFKSGRDFAASLGLSPSQHSSGGKEKLGSITKKGNRYLRKMLVVGCTSVLRVAHKYKGALAEWIVAIKAKKPERVAAVALANKLARVCWAMLSTGEGFREELYAKA

SEQ ID NO: 450703 - protein, 371 aa, unidentified
MEHVTTYVGIDAHKKDLFIAMLVGNQTTPVTWQLPNEPNAVRRLVRKLEREAPGLVRVGYEAGPCGYALQRQVTTPRVSCEVVAPALIPRKPGERIKTNRRDARKLAELLRAGLLTEVRPPTPEEEAVRDLCRARDDAREDLQRCRHRLGKLLLRRGLHYGGRNWTRAHRRWIDSIEWAQPAERVVVDDYLLAIDHLAARLIELDARLTEIAQADPYREPVAWLRCFRGIDTLTGILILAELHDFRRFQSPRALMAYLGLVPGENSSGEKHRRGRITRTGNTLVRRLLVETAWHYQHRPGIGIALARRRKGQPGRVIALADKAQQRLCRRFRKLAAEHKPAPKIAVAIARELAGFLWAALQPESATVNSRP

SEQ ID NO: 450704 - protein, 412 aa, unidentified
MEVWYACCCGIDVHAKMLVACVLKQGQKEVRTFSTMTEDLLQLRDWLTHEGCTHVAIESTGVYWRPVFNILEGALEVMLTNARDAKGYKARKTDVIDAEWLADLLRHGLLKPSFIPLLPIRELRDLTRYRESLVRERTTLANRIQKLIESANIKLGQVASDALGASGKAMLRALAAGGTDAEQLSHLAQGMLKRKQPQLQQALEGRFTQAQRWILTELLDQYDHVEGALQRVADRIRQEVENSADPFVPDAVQLLDTIPGVGETVAQIIVAEIGVEMDRFPSANHLASWAGVCPGNNESAGKRKSGKTTKGSRYLRAALVQAAWAASHQKETYLAAQYKRLVKRMGKKKALIAVGHSILVIAYHVLQNRTPYQDLGGDYFARRNVDKQRKRLIRQLAGLGLKVTVEEIKEAA

SEQ ID NO: 450705 - protein, 391 aa, unidentified
MIYIGIDVAKDKHDCFITNSDSEVLFKAFTIFNNLDGFNDLYQKIESVMDDVTKVKVGLEATGHYSYNLLGYLIDKGLPTYVINPLHTNLYRKSLSLRQTKTDKVDARTIASMLMSDVNLKSYSDTSYHNEELKSLTRYRFDKVKERAKLKTSVSRLVCILFPELEKLVPTLHMASVYALLSEFPSAKHVATAHLTRLTNLLSESSKGRYGKDTAITFRDSARASIGSNMPAKSLELKHTIKLIQELDSEIDEIENEIKIIMDEINSPILSIPGINYRMGAMIIAEIGDFNRFDSPDKILAYAGFSPSTYQSGQLDGAYAHMEKRGSRYLRYALYNATKYVCHWDPTFAAYLAKKRAEGKHYNVAISHAIKKLVRVIYHLEKTKQQYIKAA

SEQ ID NO: 450706 - protein, 340 aa, unidentified
MSLHGGIDLHANNSVIVLINEQDEVIYRKRLPNALPTILEQLAPYHMQIKGLVVESTYNWYWLVDGLMEADYRVHLANPAAIQQYSGLKYTDDHSDARWLAHLLRLGVLPEGYIYPKAERAVRDLLRKRAHLVRQHTANVLSVQNILVRNTGARFSVKRLQELTKQELKSLLAEEPQVLAVTSSLAVLDCLRQQIKTLEKTVHKRLHHTPAYEQLLTVDGIGTILAQTITLETGAISRFPTVGNSASYCRCVDSTKISNGKRKGTGNVKNGHPYLAWASMEAAQFAMRFQPEAQRFYQRKLAQSRNNTVLARKAVAHKLARACYYMMRDLVPYEATKAFG

SEQ ID NO: 450707 - protein, 422 aa, unidentified
MNKRRYRTTKVNDVNWQLIEECADKERVVFGVDVAKADFVGALMTQDRSVIQTLKWRHPEQTRRLVEDLLKHLEPGSLEVVMEPSGTYGDPVRSLFTRSGIPVFWVSPKRVHDAAEVYDGVPSLHDAKAAYVIGRFHLDGGSRPWKELPRSRRELKAAVKLMELYRDHYQRGVDRLEGLLARHWPEAGALLEVGSVTLMTVLATYGEPAEVAAHGLEAEHLMRRTGGRLLSEEKVRQLLETARSTLGLPCSEGERTYLKTLAEETLRSYRLLTEVKKGVEHQALNEPTVAPLAPVVGKITSAVLVASQGTPLDYPNAGSYLKSLGLNLKEHSSGKHQGQLKITKRGSGIARKYLYLATLRLICNDPVAQAWYQRKVQRDGGRKGKAIVAIMRKLTKSLWYVAQGQTFDTRRLFNTRLLNLSA

SEQ ID NO: 450708 - protein, 354 aa, unidentified
MSQTQNAAIAVVGIDIGKNSFHIVGHDERGAIVLRQKWSRGQVEARFANMSPCLVGMEACVGAHHLSRKLNSLGHNARLMPAKYVRPYSRGQKNDFRDAEAIAEAVQRPTMKFVATKTADQLDLQALHRVRERLVSQRTGIINQIRAFLLERGIAVRQGQRFLRAELPRILATPPDVLSPRMVRMIEDLAGDWRRLDERVESLSNEIETIARQDAGCERLMSVPGIGPIISSAMVAAIGAGDVFTKGRDFAAWLGLVPKQISTGDRTILGKISRRGNRYLRVLFVQAAWVVLIKPKIWERHGLKTWIEAARKRLHHNVLAIALANKLARIAWSVLAHGRAFEARKIDQAANQSA

SEQ ID NO: 450709 - protein, 348 aa, unidentified
MISTKYIGMDVHKESISIAVRNAAGKIVMECVIETKASIILQFIDGLRGDAQVTFEEDTSAAWLYDLLKPRVTKLVVCGPRKNKSMREGNQSYKIDARRLAELLRLGHLTSGYHGELGLRTMKELVRSYLTITKDLARVMTRVKAIYRSWAIPCTGKEVYAACHRAEWLGRISEPGVRQRAESYYLQLDALRVLRQKARRDLLAESKKHKAWKRLCRIPSIGPIRAAVLLGILQTPHRFRTKRQLWNYGGLAIETHSSADHRSVDGQLERSRKNALVRGLNRNCNHELKNLFKGAAVVASSKRGPFAEFYAALVAKGMRPEMARLTLARLPRLCCLCGRRECASTPII

SEQ ID NO: 450710 - protein, 394 aa, unidentified
MIFVGIDVASTKHDVFIMSYYGEILVKGFTIPNNLLGYKKLQHTILNVMESSVDSKVRIGLESTGLYHLNIMNFLTTEGFLVQEINPLLTSMTAKANSLRKTKTDQIDAKAICMFLFQNQTNFKPYTPKLYNTEALKSLARYRFSLVHDLSQMKVKLYTLVARTFPEYLGFFSSLYIKTSLNLLHKYSIPSNIVSARIDGLTNFLLKSSKGKIGKFKALKLKELAADSIGDKSAFYAIQIRSVIDLIRNYQSQIALIEFEINLVVDTHFKFILSVPGLSYNMAAIIIGEIGDIHQFKSFDSVLAFAGMDPVVYQSGNYNLTNTRPSKRGSKYLRWALHQVSMVIVRRDDKFASYFHKKHHDDSKHYYVALGHVGKKLLRVLYSIIKYRQIYVSQ

SEQ ID NO: 450711 - protein, 347 aa, unidentified
MRFYTRQHQYYCGIDLHARTMYVVVIDHAGQVLVERNMKTNAEEWLRLIEPYRSDVVVAVECIFTWYWLADLCAKEGIHFVLGHALYMKAIHGGKAKNDKIDAHKIAALLRGGMIPQAYVYPAGMRSTRDLLRRRLHLVRKRGQLLAHILNTNSQCNLPEFGGRINYKANRTGVAERFEDPCVRKSIEVDLDLIAHYDELIRDLDLHIVRTVKSDDADTFYRLQSIPGVGKILALTIFYEIHQINRFPSVQDFSSYSRLVKCSRSSAGKHHGTGGSKIGNVHLKWAFSEAAVGFLGKSPEGRKLVERLRRKHGKAKAISILAHKLGRAVYYMLTRQKAFDMQRFANS

SEQ ID NO: 450712 - protein, 520 aa, unidentified
MVRTRTRRRSSRRQIATSLGKPRGVLHPRVQQVGPEHFGIVCFDCAKVRSKYLLADFYGRLLIPPTTVEHTRPALDGAVAHLRRAFEQHQLRDGLVAIERTGRYHRVVQRTFAAAGFETRILHPFVTKQYRQPVDPGNKTDDADLAAIHRATVTGCALLEATRDEAWTTLQLLIRHRRDLVCKGAALNCQIRDHLEAALPGYAACFDKLWDSVIPWHLLRHYPTATQIREAGVTTLCHSLRQADIRFQQRTIQTVVDWAEQAAPGDIAAGQHLRIALALYEDRQRKTQEIKALERDIAGRLVQTPYVLLLSFPGINVVSAADFAGEMGPIEHYLNAKSITGRAGLRPSRYQSDQVDKANGPLVRCCNHALRAAILTIADNLIVCNHHFNVLATQWAAQGKDPRHTRVKVGLRFCRIGFQMVAGRQVFRHPCIQDRHYILEKLTAFHREHDTGMVEVLRDLHAAIRHVPPREYAAEAKPLQDEYRRIQDGRRRGPQLLGNILPIVFARLGVGLVSSNESGE

SEQ ID NO: 450713 - protein, 338 aa, unidentified
METYAGIDLHSSNNFIGVINDKDKILYGKRHANRLDDVLRALDPFKDSLKGVVVESTFNWYWLVDGLQEHGYRLHLANPSAIQQYEGLKHTDDPWDSFWLAHMYRLGILPEGYIYPKEHRAVRDLLRRRLLFVRHSTAHILSLQSMISRNLGFKMSNNELKKLKPADIESLFDCSNLVFMANNSLAAIEFLKKITKGIEKKVKSQVKLRKEFEMLLTIPGIGNILGLTINLEVGDIGRFPKVGDYSSYCRCVGSKRLSNGKKKGENNKKNGNKYLAWAYVEAAQFARRYCVKAQSFYQSKEAKTKPVVAIKALSNKLSKASYYIMRDQVAFDEEKLFG

SEQ ID NO: 450714 - protein, 481 aa, unidentified
MSNRKMSTFERLQNGGPLNRQERRELQAKLNASDPGLQIVHPDAAGIDVGNASHFVAVPAGRDPQPVQEFGSWTADLRRMAAWLKSCGIRTVAMQSTGVYWIAVQEILEQAGFEVYLVNARGTKNLPGRKSDVQECQWLMKLHTYGLLRNSFRPPEEIRSVRTVWRLRDRLVKDAGRAIQQIQKALTVMNIRLAVAISDVSGVTGMAILRAILKGQRDPHELAKLRDPRIRATEKEVASSLEGNWREDVLFELQQVVEGYDFLQRQIATCDERLQQYMAVLPARPMESEEVVEEPAKGSKNRRKSKPRRKNQPGFDLESELHRVFGVDLTRIDGIKVMTAQVILAELGPDLSAFPSEGQFASWLELVPRRDISAGRVIKQLSRESKNRVANAFRMAAQSLSRSDSYLGARYRQLRGRLGGEKGVKAMAHYLARLTHRLLTKGQAYVDRGAAYFEKQRAERELTRLQRKAAEMGMQLIPANA

SEQ ID NO: 450715 - protein, 329 aa, unidentified
MYYVGIDISKRFIDVCLLVDGIKGKRKTKALPNDPNSAQALAQWLILQKCDPSQAHIIMEATGVYHEHLADGLHQSDILVSVINPHRVREFAKGMGILTKTDKVDAYVLACYGCLKQPENWLPPPQEIRKLKALLQHRDSLLNDKQRIENRLSALKSTTAPEEILTSLESIERNLKDELARIERLIAEHIDKHLRLKNDLKLLKSIDGVGEQIGWNMLAIIRGNNFRSAEQVAAYLGVIPVERRSGTSVCGRARLSKIGPPGIRAKLYMGAIAAISWNSHVRGLYERLRLKGKAKMVAIGAAMRKLVHLCYGVLHTQQPYDKNHGAVAG

SEQ ID NO: 450716 - protein, 366 aa, unidentified
MDKDTTYVALDDSKRKLAVAILRPGQTELEQREMAKEPHLIQRVFRRLAREGAVAACYEAGVSGYDLYRQITACGVACHVIAPALAPRRPGQRIKTDRRDAAKLVRLFRAGELTAIHVPAEAEEAVRDLTRCREDVRRDVLRWRHRLLKFLDRHGRLYVTGKNWSQRHWAWIRQQRFDLPPLQRTFEATLFALEQARAHQAELDQEIAALAEQAPYREPVGWLRCFRGIDTLSAMILRAEIVDFQRFTHPRELMAYLGLVPSEYSSGDRERRGALTKAGNTHARRVLVEAAWHYRHRPTLGRALAARAQGQSPACRAQAWRAQQRLYRRYRHLVGHGKRPPVAVAAIARELVGFIWAVMTQRAPAA

SEQ ID NO: 450717 - protein, 357 aa, unidentified
MQLQDAFSIPKIFIGLDIHKKSWTVSIQTVLFFHKTYSMPSIAEDLYQYVERTFPNHAVDLVYEAGCCGFSAARYFLNLGWNVLVVNPSDVKRGDKERYQKTDALDSKNLSNQLKSGVLRGVFIPTEEHEQFTTLARHRAQVTKKLRQTKSHIKSMLLFHGIKVPEEFDNPNWSKAFIAWLEEIKFSTSCGDLALQGKIRMFKFIKSEYLEIANQMRAYCRKNNKKDYNLLKSIPGIGGYLASVILAECGDLRRFNNEGQFSSYIGLVPGMYNSGESEKCLGITPRSRSQLRSYLVEAAWIAIRKDTEMQNYYRKHQGKNVKSVIIKVAHKMARRILSVIKTETAYQINRNIELVEQ

SEQ ID NO: 450718 - protein, 460 aa, unidentified
MNKKKSGRRKGSVQKKVDWKALEIVHPDAAGIDVGGSEHWVAISPDRDSEPVRCFGTFTADLHQMASWLVEKGVRSVAMQSTGVYWMPVLEILEQHGLEVYLVNAQHTKNVPGRKSDVEECQWLLKLHAFGLLNNSYQPTDEIRIARTLWRQRGNLVAEAASAIQRMQKVLIEMNIQLGNVLSDLSGVSGMTIIGAILQGERDPWILASLVQPEVQATPLEVAKSLEGNWREELLFVLSQQVELYRIYQSKIVDCDFQLRKHLETFGSKVDLQTQPIGPKPKGKKGSRNAPQFDLRTELYRITGIDWAQINGMDVLTAQTVIAEAGADLSAFPTEKQFTSWLGLCPTNEQSGGKILKRRTRKVVNRASGAFRTAATTLLRSQSYLGAQYRRLRTRLGAPKAITAMARKLACLFYRLIKHGQQYVDKGTEYYEARYREQQIRALATRAQRLGLQLVIPETT

SEQ ID NO: 450719 - protein, 415 aa, unidentified
MKIVFPTCCGVDVHKSFFVATIIKTPKDSLQPSYQKKRFSTFNSDLKRFASWLYENECLDVCMESTGKYWVPVFNILEKRNIRVVIANPKWVKAVKGNKDDTKDSKWIGDLFRIGLVKSSFIPAKDIRILRELTRYRYKLTSMKSSEKNRFQNAFTVCNVALDSVVSDMFGKSATAITDYLTSDEDFDPQHCISLLHRSLKKKADDVLASIEGCEIAPEQKYRIGIVRDHLHYIEKLIERVDTCIDAMVEKYDGAISLLCTIPGIDRSSAITVISEIGVDMAQFGSSKRLCCWAGLTPGNNESAGKKKSVRISRAGVYLKPALVQVAHAAVKDKLNPYYALKYERIAKRRGKKRAIIAIARMILTAIFSMLSTGEIWNPVDLFKVDMPEHLKEQQLQKAVKQAVRFLEAQGLKVS

SEQ ID NO: 450720 - protein, 323 aa, unidentified
MTLVVGIDIAKRTFDLATLQPNGKHRTKSKLSNDQAGFAVFEDWLQRHAEPGAWIVMEATGIYHEALAEHFHALGYRIAVLNPAQIARYAQSQLQRSKTDKLDAKLIATYGQRHLDHLRAWQPEPRSLRQLRALTRHLEDLQALRQMELNRLDVSRENVKDSIQAIVQRLNEQIEWTLKQIKQHIDDDPDLRGKRDLLVSIDGIADKTAALILAELGEIERFTHSRAVTAFAGLDPRLQESGAFYGRTRISRTGSARLRSALYLPAVVAMTYNPAIKAQVERLRARGKMGKQTVCAAMRKLLSIAYGVLKSGKPFDPALAIAH

SEQ ID NO: 450721 - protein, 335 aa, unidentified
MAVDQNGRQLAQKTLLATKAGHLEALQWAARWSQRKWALEDCRHVSRRFEADLLAAGELVVRVPSKLTGGARKVARTSGKSDPIDALAVARAALREPDLPVAKLEGAGREVRLLLDHREDLVGERTRIQNRLRWHLHELEPEAVIPARMLSRYHTLAELEGRLRSQHGVVVEIAIELVVRIRELTRCINRLEADIAGRVSGLAPTLMQLTGCGALCAAKVVGEAAGVSRFRSKAAFAMNNGTAPVPASSGNQMRHRLNRGGNRQLNAAMHRIAVTQLSRPGPAKDYVARRLANGNTKTDAVRALKRRISDEVYRRLLHDERAVLASPSGSVEVAA

SEQ ID NO: 450722 - protein, 394 aa, unidentified
MEQPTPFAALIGLDWSDRKHDLCLIDATTGRRELFVIAHTPEALDDWARALRARFNGAKVALCLEQSRGSLIYALLKYDFLVLYPINPQMLSRFREAFTPSRAKDDPSDAEYLVELLVHHRERLKAWTPDDERTRTLQLLVEHRRRLVGDQTRISNRLTALLKGYFPHVLQWFPDIRTKMVCDFLLRWSSLDALKCVRPTTLEKFFREHHSQRTETIEKRLTAIKAAVGLTTDRAVINSSVVMVKALAAQMKTTLEVVHEFDRQIEELCQAHEDFELFIALPGAGKVYASRLLVALGSNRERWASADELLCFSGVAPVIERSGKSSWTRWRYFCPKFIRQAFVEYAGESIRHSEWAKAFYVSQTAKGKSHQAAVRALAYKWIRIIWKCWQTREI

SEQ ID NO: 450723 - protein, 384 aa, unidentified
MSENILYVGMDTDKNHVDVAVAEPLPGGEVRYWGKLANTPAALDRVIKRLRRDGRQLKVCYEAGPCGYGIYRRLNGKPNVSCQVVAPSLTPRRPGVRVKTNRRDCLTLAKLLRAEELTAIWVPDAAHEAMRDLIRARGTAAQDLARCRQRIGSFLLRQEIRYVGKPWNKKHRAWLGRLEFVAPAHRLLFGELLEALDQAVARRDRLNDHIAELVPSWSLAWLVEALQALRGYQLINAVSLVAEIGDPRRFANPRQLMGHIGIVPSEHSSGDKVLRGPLTKTGNRRARKVLIEAAWTYARVAKRPAARALAQPPAVRAIAEKARHRLSSRYRRLTARGKLRVVAIAAVARESLGFIWAIAQATGPASILEPCRPANGTGRGSGSR

SEQ ID NO: 450724 - protein, 342 aa, unidentified
MNITTIGVDLAKSVFQVHGIDKRGKAVIQKRLRRSKVLEFFVQLPPCLIGMEACSSAHYWARKLREQGHNVKLMAPQFVKPYVKANKTDAADAEAICEAVTRPTMRFVPIKSVDQHAVLSLHRARSGFVKSRTAQANQIRGLLGEFGIVLPQGIVHVAGRLPDIIEDADNELPMVFRELLLRLRSHLLELNRQIQELEDQIDAWHKNNEDSQRLAKIPGVGVLTASALVASIGDARCFKNGRELAAWLGLVPRQHSSGGKPLLLGISKRGDAYLRTLMVHGARSAVRVAANKQTPTDCWTNKMGTRRHTNVVSVARANKNARIVWALLAHKRDYDGEYQLAV

SEQ ID NO: 450725 - protein, 326 aa, unidentified
MTLSHLTDNIFVGIDVGGAGLDVAWHRGDSAHYANRPDAIATLVERLRAGPEVTRIALEPTGGYEKPLVKALRQAQLPVEIIHTTRFSAYRALVGVKAKSDTSDARLLASYAAAPDEVRGRKASHVELPEDAVREELSELASRRDQIKHMIHAETCRLGTIRKHELRQMITAHLEILRAEDKQVHRMMLELVRQRTDLRRDQQLLKTIKGIGVKSALVLLASVPELGRIDNKAAAALIGVAPFVRKSGTMNAPARIHGGRAPVRSILYMAAVTASKHNPLLSPFYDRLIAKGKPPKVALIAVLRRLVVFANAVLRSGQPWKGASAT

SEQ ID NO: 450726 - protein, 411 aa, unidentified
MRVHHNVCCGIDVHKKSVTACLMWGPADKEPEFEIRRFGTMTRDLQKLAEWLKQAGCEAATMESTGSYWKPVWNVLEGQIPRLILANAQHVRALPGEKTDRKDGKRLAELTRHGQVRPSYVPPRAILELRDLTRYRSKLLSAGSSERNRIQKVLEDANIKLGSVLSDVFGVSGQKMLQQLVKTDTVDIANVIQLAHWKLKPKMEAIEQSLEGKLTDHHRFLVKASLEHMRFIEEQLKRLDEEIQRRLQPYQEEYALLQTIPGIKETGAARILAEIGADMSPFPDGDHLSSWGGVCPGNNESAGKKFQSKIRKGNVHLLSALTECAWAATKKKDCHFRNKYYRLKSRRGSQRAIVAIDHAMLKCVYVVLSQRKPYEEPKPTSLTEAQKQRKASSLCRQIRALGYDVKIQKTA

SEQ ID NO: 450727 - protein, 419 aa, unidentified
MTRSKAYRAVAVKHVDLDALLAGHAGGPARVGLDISKDEVRAVLRWPEGQFERPWRCDNPGQVGDLTDLLCRLGQGRELVVALEPTGTYGDPLRQALHDAEVVVHRVSPKVAHDYAEVFDGVPSQHDGKDAAVVAELSAAGKSVVWPFTRNAADQEMAYWVDRLDQQRRLLAMSYGRLEGLLARHWPEVTRLLPVRSGVLLRCLERYGSPAAVAADKEAWGRVRRWGGPLLSEAKARAVLASAASSVGVRTETFDVRRLQEHAGQARQVRQDQGACRRRLAELVVGNAVLTAQASVVGAATACVLWVQVGDPRAYGCGAAYRKAMGLNLTERSSGRWQGGLHISRRGAAEARRWLYYAALRLVRSAGVRGWYEAKKERDGGQAGRALVGVTRKLALALYHVAVSGEAFDSRRLFAGWAK

SEQ ID NO: 450728 - protein, 483 aa, unidentified
MVLRVPIGSWMPYKRINIPKANRHGAIFQTLKFKIMSKSKTKKEKVKRISQLTVINPTAAGIDVSDTEMMVAYPISPEQLEIRVFGCFTRDLHSIANCLKENGTTTIAMESTGVYWIPLFLLLQEYGFEVYLVNAKHVKNVTGRKDDESDAEWIQKLHSCGLLSASFQPDNMVRTLRSMVRHRKNLVRTSATYLNRMQKAMELMNIKLHTIISDIDGKTGLLILEAILAGERDPEVLADLRDKRIKASREDIIKSLEGHWTTEHLFELGQCYQLYCTHRQMIDECDKEIEKQLVIQIASKNEGVIPDIPKVKRKASGKHKVQFNLTADLKEILKVDVTEVCGINELSALTILSEVGCDMTKWKTEHHFTSWLGLAPNTKISGGKVMSSRIMKKKHHAGQAFRMAANGLYNSKSPLGDYFRRLRAKAGAPKAVVATARKLAIIYYKMVANKEAFNPKALDDYRKKYNEKKINQLKRKIAQLEAA

SEQ ID NO: 450729 - protein, 359 aa, unidentified
MTSMNHNRRRGRVVIGVDTHKHIHVAVALDDFGGVLGKEKFTADTAGYGQLIDWAMTHGHLLTFAIEGTGSYGAGLTAAVRRSDIGVVEVMRTDRRDRRLRGKSDFLDAENAARAVLAGHADAVPKTADGVVEMIRTIKVAKDVAVKARTSALISLKAVLVNAPAALREQLQPLSKMALIHRCAGLRPGSMTTVEAATKHTLRSIARRWEQLNDEITAHEKMLVELTTTLAPQLYAAFGVGADTAAEMLIVAGDNPERVRSEPAWARLCGVAPIPASSGMTTRHRLNRGGHRQANAALYRTVIVRMQHHEPTKTYVARRTAEGKTKAEIIRCLKRLLAREIWSLMRPLRTSPQTMKSAA

SEQ ID NO: 450730 - protein, 317 aa, unidentified
MHIAKNSQDLKIDNTLAAVKKLYAKLKKIYKKEVEKLVFIYEPTGSYSELLRKFCADKSIQCFIINPKQFSNYAKALGVEVKNDEVDAQVLAQAIVLAKPSQIKVPVYDKDVEQIKELMSFYKFTTKQTAQLKGHLESLVAKAGNSFSIKELKKSIKASKEKEKRIIEQVHQLIQANPIYKKSYENITSIMGVGQIGGIALLHLFLKYPEANQRQITSLAGLNPVYRQSGSSLQSSYRISKSGSVFYRGALFMGVMTAVRYDKNFKAFYERLKANGKHTTQAQIAVMRKIIIVAHSLYKNDAKYVKKEDTLEGETMD

SEQ ID NO: 450731 - protein, 405 aa, unidentified
MTTQFFVGLDWAVHSHAVCVIDASGAVRERLEIAHDREGLAELMRRLARFGTSVRIAIERPSGLIVDALVEAGHQVFPIHPNAVKASRPRYRSHGGKCDASDSYLLADLLRTDGHRWAALAPQSDSIRALRAVVRSRDDLVGARVALGNQLYSTLEAFWPGAAGIFADITSPIGLAFLQRYPSPTKAARLSEAQLGRFCRTQHYSGRRSPAELLARLRAAAHGAAGQLTNESMAQVVRSMVAVLKPLVAQISALTRRIEAFVASLPDGQIIMSFPRAGRVCAAQILAELGDVRERFPTLDRLVAEAGAVPVTYQSGKTRSVSFRWACNNRLRQAITCLADNSRHANAWAQGLYAAARARGCDHPHAIRILARAWLGVIWRAWTDRKPYDPKLHNAALKLLPNAGG

SEQ ID NO: 450732 - protein, 342 aa, unidentified
MVQPVTVGLDIAKNVFHAHGVDAQGQKVISRKLRRGQVEAFFAKLDPCLVGVEACATAHHWARTITKLGHQVRLMPPAYVKPYVKTQKNDAADAEAICEAVTRPNMRFAETKTVEQQSVLVLHRTRAMLIRHRTRIGNTIRAHLAEFGITESIGRMGLSRLVAIIASGEDDRIPEVTRRALMCLVDQYCLLQGQILELNRQVLAWHKSNAASRRLATIPGIGPLAASALVASVGNAATFKNGRSFAAFIGLVPKQSSSGGKERLGKISKRGDHYLRWLLVVGGLAVIRYAQRHGTRRPWLLKLLQRRTTKIAAVALANKMARIAWVLMTRGGSYHEPVPHAA

SEQ ID NO: 450733 - protein, 323 aa, unidentified
MSESLSSPAPACVGIDVSKDKFDVFIDATGQAFSVTNDADGIRGLATQLSQMQLFRIVIEATGRLQRRLAVALLQCSLPVSVINPRQARDFARSKGQKAKTDAIDARMLAEYGRLIQPRLTQNVPENQVKLQDLLTRRRHLVEFRAAEMVRLDQFEGTEIHGDIRKMIRHLDDKIDRFDQKIAKLVADDSDLSGKARLLTSVKGVGAILAGTLMAHLPELGTLNRREIGSLAGLAPFNHDSGVGQGRRHIRGGRAVVRTVLYMSALTAMRCNPAIKAFAARLNAKGKCFKVVAVACMHKLLTILNGVVKSQQPWRGLGVAQNS

SEQ ID NO: 450734 - protein, 351 aa, unidentified
MVIIGVDYHPSDQYIAFVDAETGESGERRLNHSDGEAEKFYRELKQRGVSVRVGMEATGYSRWFERLLAELGIEVWIGDAAKIKTKRVRKQKTDRNDAQLLLKLLLENTFPRVWVPSPENRDLRQLLWHRHRLVQMRTRLMNQLQALAMNEGQRRKKKLWSEQGRAQLEKLPLATWASRRRQDLLELLDRMNPTIEELTVAIEQEAEKRPEVLQLMTHPGVGSLTALAFVLIIGTPERFHCGKQIGSYVGLNPSEDSSAGRQRLGHISKQGNSLLRFLLVEAAQAAARCDPDWRRRYVHLAMRRERRIAKVAMARRLAVRLYWMWRNGWEYAQSVEFGSYAGQLVTGHGVN

SEQ ID NO: 450735 - protein, 332 aa, unidentified
MTNSEQQKIHVGIDVSKRTLDVCLLPGEAAEASHAESFSISNDQEGVNDLLHRLQGADTELVVMEATGRYERLAATILGAAGIAVAVVNPRQARDFAKAIGKLAKTDKIDAFVLARFARAVEPTPSVIPDEEAQHLQGILARRRQLIEMLVSEGNRLKMVRGNPSGKKTLAKRLQAHIKWLEREIERTDSDLDHAIEDNAVFKANESLLRSVPGVGRVLSRTLLAELPELGELTHKRLCALVGVAPFNRDSGQRQGKRETWGGRAPVRAALYMGALVATRHNLVIKEFYERLLAAGKPKKVALVACMRKLLSILNALMRDHAIWRCPHALTP

SEQ ID NO: 450736 - protein, 408 aa, unidentified
MNENTTSAPAALVAIDWSDQKHDIALLPAGAERAEYLQLAHRPQNLAEWICGLRQRFGGKKVAVAVEQKRGALIHALMGYEFFQLYLVNPATLASLRKAFKQSGAKSDLLDRDLLLELLQKHRDRLTRWEPDDVQTRHLALLVQDRREAVNECTRLGEQLLDTLKNYFPAMIDLAGPDLTTRLACDLILRWPDLTTLQRAKVQTLRRFFYAHNFRHSKMLEKRLDALQAALPLCEDVAIIGAGRLKAIRLARAILALLPAIKQYDRQIGDLFKAHDDAAIFSSLPGAGPALAPRLLVVFGSRRDRWRHSLDVATYSGIAPVIEQSGKRSIVHWRWACPKFVRQSVHEFARSSLRSCTWAKRFYQTQRARGKNHHGALRALAFKWIRILFRCWQDRCPYDPAKYTPANL

SEQ ID NO: 450737 - protein, 442 aa, unidentified
MATKLVNPNAAGIDVASNEHVVAVPEDKSKDSVRTFKGFTRDLHQLAKWLLSCKVETIAMESTGVYWFDLYTILLDYGFEVYLVNAHHVKNVPGRKSDVSDARWLQQLHTFGLLRASFQPDNITRSLRNHVRQRKSIVQQMSRKTQHMQKAFDQMNIKLNNVIRDLNGTTGTKIITAILEGERDPKKLAQHRDKRIKASEETLIKSLEGNWREEQVFNLQLAYDHYIFLQKQLKQCDAESEKIIQKMTSGNSPKSRTKKVQKSKNNPDFDVAQYLHAALGVDVTQIYGIKEVTALTIFSETGANLKEKFPTEKQFLSWVNVVPNNKITGGKVISSKVKKKKNAAGQAFRDGASALWRAKNPIGDYLRRKKAKSGAKKAVVATARKIAAIYYKMVTEKVEFNPLEISKGKEQYLQKRLKQLEMAKEQTQMLLSDYQHQNSLVI

SEQ ID NO: 450738 - protein, 354 aa, unidentified
MRFVGIDLHKRSMTVCVFDKVSGETFDRRFFCSQPEAIVDFFTGLGPFEAVMEATATYEWLWELLEPSARRLVLAHPKKIRVIAESMKKTDKRDAFFLAWLLAADSVPEAHRPSPRQREYQHLVRHRCELVRSRTRVMVRVRSILAAKNLDHKGLFTAKGRAAFEALKLTAMERFRLGELFRLIDTFSESLKIAEKALRDFRGEFSAQEKRFHEILTSIPGIGDLVADVILCTLGNIERFRSAQKCTSYAGIVPGFRESDSKRKELGITKEGPRMLRWALVQAAWRAARNSPRWRKVFEAIAKRRGRKKAVVAVARRLLAVAYTLLKKNELYKEVLQKPVSPPPKVRNKMRFSA

SEQ ID NO: 450739 - protein, 360 aa, unidentified
MTGTMTWAAMDVHARSVHAAALDVETGELCRRRFGSGRVEPVVEWLAGLPHPVRACYEAGPTGFGLYRAAAAAGVRCEVIAPSKTPRASGDRDKNDRKDSEHLLRQLMAGALTAVTVPTASFEAARDLARAREQVRVDLMRTRHRLSKLLLRHGRVWDASTWTLAHQRWLGGQHFEHVNTELAFIDGLAACQGLVARRDALDERLSHVAREEEFWPLVARLRAFRGIDTLSALIIVLEVGDFHRFDRAVQLGSWVGLTPSRHQSGEQDTHGPITKTGSRYARRILVEAAWHYSRTPRIGAALAARHEGLPDHVLQIAWRAQHRLHRVHRRLLAHNKPMNVANVACARELSCFLWAAATAR

SEQ ID NO: 450740 - protein, 332 aa, unidentified
MNYYIGIDVSKATLQVYIPIKEENISIENTKKSLKSLYSKLKKYYKKEVHKLVFIFEPTGTYSSLLKHFCSEKNIKAFIVNPRQSANFAKALDNRSKSDIIDAEILHKFYVMAKKGDIVVPTIDKAQEALGAMMGYYKLLQKQRNALSNHLEALEAKEGNSSIKKKLNKEIEKLKLQEKEMIKEMKNFILSDTKLVQSFECIISFKGVGDISAIALLHLFISYPKANRQEITALSGLDVIETSSGTSVHRRSRISKRGNALYRGILFMPILSSVTNNIYLKSFYNRLKENGKHSTAAQIAVMRKVILITHSLYKNNQKFDDTIYEKRVGWNR

SEQ ID NO: 450741 - protein, 404 aa, unidentified
MKGPIVSIDVSKGKSDYQAFKDLNVEYTGSRSIKHNKEGFDEIVNLVREMEKKLETEVCVVYEATGVYHRVLKKVLEDNNIKQFIINPLLSAKTRKNDSLRSPKTDKLDPKSIAKTYYSHSLHNSHKQETIYHELRELSRYYEDILVHIRKDKVAFRAQLDIVFPGYDTLYDDLYGPVALAIIEKYPHPEILQKKKINTVSKVIQNKTCHRQAVSDTMADKAIEYSKTIYSGCDKDDIEVLILQRFIKKLNEDMAEAERTIGEMIKLAQELPDFNIIKSIPGIGDNLAARIIAELGDMTRFKKKNELVAFAGLDPRISESGQNDGDHMHITKKGNKRLRCLLYLAVTCSIRLKRDDNSIKDFYIKKKQQSNPMCSKAAKTACASKLVRIIYSMCKTGELYQYNK

SEQ ID NO: 450742 - protein, 404 aa, unidentified
MFYAGIDWADQKHDALILDEVGRKLGSIRVSHTKEGLDKLDAWLSSMLGGQDKEQMACIIETSHGLLISFLLEQGWPVYPVNPRTVDRKRSASGAKTDAIDAYLLAKTGRADFADLHRLTPDSEKVAELKGLTRDQDSLIQMQTRLVNQLTACLKAYYPIALDLFAKLQQRSALVFLQTYPTLEAAQGASVEQICHILKSAGHTTASKVAPKIFEQLHQPSLQANAVTTRTKARLAVALIVQLLPLIEQITEYDKEIEQLFLSHEDSEVFSSLPRAGKRLAPRLLAEIGDDPARYSTAASLQALGGTSPVLFASGNYSKPHRRLGCIKPLRNALHQFAWQSTLQEEWALIYYERKRAEGKSHSVAVRALSNIWARIIFALLQSHEIYDRTTFETARHLHALKAV

SEQ ID NO: 450743 - protein, 417 aa, unidentified
MNTENYGALVTLDWGDTEHAFATEVAECPAETGKMPATPESLHGWLEEIPKRAGGRPVAIALEGGKSAVIHALLEHPWLTIFPVHPAASDRFRKAFTPSGAKDDVPDALVLLRILKQHRDLLRPLKLDSPETRKLEGLVAARRQAVDRRTRLACELGSTLKTYFPQALELCGREPATDLMLDFLAKWPELKSLKAAKPATLRAFYAAHNSRHADVIALRLSLIAQARALTEDRAVIEPAMLEVKMLVDILRPLQKNIELIEEHISEAFDAHPEAELFRGLPGAGPATAPRLLAAFGTDRSRYPEACNLQKYAGIAPVKQKSGHSTWIHWRWNAPKFLRQTFVEWAGQSVPKCAWAKAYYRQQRAAGKHHQATLRALAFKWIRILWRCWQDRVPYDEARYLTSLQRQKSPLAARLAVS

SEQ ID NO: 450744 - protein, 344 aa, unidentified
MSEVITIGLDIAKYVFHVHGADERGRAIFSKRISRVKLLDFFAAHPSCTVALEACGGAHHWARQLTQLGHEVRLIPPAYVKPFVRRQKNDAIDAEAICEAAQRPSMRFVAVKSEQQQAAGLVFRTRDLLVRQRTQLINAIRGHLTEYGWIAPKGPSHVAMLADLIEEEEMASSLPEAARAMFRLMLDVLAGLDGKIADLDKEIARRAREDEVSRRLMTIPGIGPISATAIAALAPPAETFAKGRDFAAWLGLTPLQRSTGGKRKLGATSKMGERTLRRLLIIGSSAVVFQASKRGTPRGSWLEQMLARKPRMLVTVALANKMARIIWALLVKQENYRAPVAAKT

SEQ ID NO: 450745 - protein, 497 aa, unidentified
MPSTDVAAKATIVGAMKRKSIFKNNSQNIDAAFIEAGLPEKVLLVPLDFAKSTHYACFCDGLGRYLRQAFTVKNTKEGLDYLVERIEATRKSRAIGNKRHVIIGGEDSPSYTRNFMQRLNELGYLAVRLSSCEVHRQAESVDSSTDRTALRAIAKTMLNRDARPIDGHDVYTELRGLTRQRRRIVHLSTAVKNRIHTHADRLFPGFLAKDSVLTPFSRASLELMSKPAFGAVSISRKNEKALGQLLKRAGTARSAEIAPALKQQARDSIPADKDAARLSAYILAGELQLFRSLASNLEALDQGCARLLARTPEAFIASIKGIGITLAASICAESGSLTQITRTDGLNAYAGIVPKVKQTGGPESEAKIRGRRRSFNRVLKDYTMQAGNHLYLHGPEELMQDAVRRKLAGKAVDTAMARRFLRIARALCKNHLTYLPSHLRGQNASSRERAQYILDTWPALLVKWKRLGLHEEAFAAENPLGQWRLIMQEIHDIDLPL

SEQ ID NO: 450746 - protein, 433 aa, unidentified
MSKFFNNPVVGIDVSADFSYAAILAPNGDVYKKSFRINHDVKGFTHLVNEIKKVEEEFNMKTGLFMESTGVYHLSLFHYLKNNFDNTFVINPLVTKCNKNVAIRKVKNDKKDALSIANIGKFQNIKLSQPNDLDNFLLKNLIREYYKLRDSCSTYKKKLSADLRVIFPNYNTVFSDSTSNTSLELLSNYPTPKSVMDAPKQDVMTILLEKSKKSVTWSEKIYSKLITIAEEAKIIGVPLSGLAIKISSSLAVIKAFKSQIDNLLNEINTLIESYEFPESIKENIKLINSIPGIGHLTAITLIAEIGDINGFIKPKHLVAFFGIDSSVNQSGKFQGTQCKISKRGTRIGRRALYAVALASIRRSRTGIPINKVLLEYYQVNLKGKKAKVALVAIMHKILNYIFAVLRNQSPFEQRDPKLHKQIFLENKCLNTAA

SEQ ID NO: 450747 - protein, 467 aa, unidentified
MKNYDYNLFVGIDVSKGKADAAVLAVPELRSVKPRFLRKKLSFKFIKADVAEFLNTVRKYSSDPHCLHTYFALEVTGIYSTNVYGFIKENCNSDEEIHQLNTDFVNKWRESHNISKSDPLDAQTISTIIGTDDDVRYVSDSVFENKNGYQDLKALVHRHYQIKKLYSQETNRLIALCDCYFPELQYVFEPKSAAFLAVLSQYPTSHDIINASKNEVFSLVYEASKHRCNMDKIDKLFNYAQDTLVPHVSDHIRCVIFNTVESIFNIRAQLKLIEKDIRKLASTFNVYSLLMTITGCGPLTAAVIIAETGDIFRFKNADHYVSYSGSSPRNKRSGKSVEIMGKISKKGSKYLRHALYMIAEFARRHNPVLKHLFERVKNGNKKRHKLAVIAVANRIARYIYSIMKNESSFVIMHENIMRLPEETRNTFFNSISLDFPKNTRKQIYQYSDVNGEIHRFVYKNETTESIA

SEQ ID NO: 450748 - protein, 355 aa, unidentified
MKYYTSTTEFNCGIDLHARQMYVCLMDRQGNKRVHTNVKDNDFRFFLKLVEPYKHDLTVCCECMFGWYWLADACQAAGLTFVLAHALYVKAIHGGKNKNDRVDSEKLTHLLRSNLIPPAYVYPADKRPLRALLRQRIFYVWRRSELLARIHSHQLAHNRLPARQTRRTRDPWEEQLLAAEDHPLRQIALKNDLAMIRHFDQQIFALEEELQRQTKKVAGREYTLLQSVPGIGENLGLTILYEIGDINRFPTVKDFLSYCRLVKGTVASAGKIKGLRGAKLGNPYLRWAFGEAAVIAKRDHFRIRPLAQRLEEQMNGNKFKANTVVAIKLARAVYFMLKNKTVFDPDRLVAALARN

SEQ ID NO: 450749 - protein, 410 aa, unidentified
MEPILISCAGMDVHEKKVDVCIAHGPFDEPPKFEIRTFSTMTLDLEELMAWLKKYEVTTIGMESTGVYWKPIFNVMEGEFAIVLANAQRLKAIPRKKTDIIDCKRIANLLRYGLLPNSFIPPREIRELRDLNRTRRKLVGMMTSEKNRLIKVLEAANIKLSSVVSKIYGVSSLALIRSLLEKDKLSREEISQLAKGKLKKKVDQLEKALNGKLTDHHRFLLGMHLENIDHLAKQIKKIDEEIQRKMVPFQKESKLIQTIPGISEVNASAILAEIGVDMSQFPDAAHISSWAGVCPGNNESAGKKKSGRTQKGNSFLKGALTESAWAASKTKDTSYSAFYRNIVRRRGKKRALVALAHRMLIDIYYVLKSGEPYQDIGAEAVCERTMKRRERSMIRSLEKAGYSVVKAEAA

SEQ ID NO: 450750 - protein, 415 aa, unidentified
MEPIHKRVAGMDVHRMEHVVTILLEQEDGTVLNETRKFGGFKRDMRALVDWLRSHRIELVAMESTGIYWKSVFSHLEAAGIEALVVNAFHVKNVPGRKTDVSDSEWLAQLARFGLLRGSFIPPKDLRELRVVSRYRRKLVQSLTGEKNRLHKVLDDAGIKLGGVVSDIDGVCARKMVEGLIAGKTPAELSALGHGKLKSSDELLQASMDGDLSPRHRLVLSTALNHLRYLEQQVAQLDRYLIEAMKPYAWAWRLLQTIPGIDEMSAAMILIEIGVDMQRFGSASRLASWTALCPGNHETAGKRKSGKIRHGNPIVRYLLCEAANAARRTKTVFQAKYTSLVIRRGYKKTVIALAHKLIRTIYFVLTRRKPYHDTTVDYEAAIVARNAPRWIKALKKYGYWPKAAAANPATATAMA

SEQ ID NO: 450751 - protein, 352 aa, unidentified
MLRPKDKACGADIHKKTVVATILSADGTKVEGEFGTTVPELIRFKEWLKENDCNSVAVESTGTFWQPIYSVLEGSVEVIVANPYMIKHMPGRKTDKVDSNWIAQLCLKDMIEPSRIFPKADRELRRLTRARESLGKIRTQLKNSIHKDLDSSHIKLSSVISDIFGKSGMHILRGLLDGQNLDAIIEGIPSGRVKKKADQIKEAVHNNLDLTQVILIESSLSLIRSVEQQTDMIEAEIANRIVSRQEDLEIARSIPGVDFISGATVLAEIGNYQDFSSPEKMAAYFGIVPSVSQSAGRLHTGSITKHGSKHMRWILVQIANAASKKIGSKLRRFYLRIKAGSLPQLRLYTTIL

SEQ ID NO: 450752 - protein, 405 aa, unidentified
MQVYIGIDWSESKHDVVAMNAAGAVLAQLTIPHSMEGFLQLIDLQEKLGMNSEDCLVGLETAHNLIIDFLWSRGFGQVFVVPPRVVKSSRTRFRHSAARTDLSDALVIADCLRTDRGRMQPWHPDSLLTQQIRAKVSLIHHLTRGIGRLYNRLRDVLLRYYPAALDVFGNQSKVWLAFICAYGNPEKARKLTFEDFRLFARQHRYPNPALLLAAFARLQAPQPAASATIVVVYEDEAHTLARLLLEMKTSKEKALKELKNLFDQHPDAPIFDSLPGAGDLLAPALLAKFGDDRDRFTSPASVQALAGTCPVTDASGKRRVIKFRRACDREFRRITQQWAKASLGKSVWANAYWLKVYSRRGYASHAYRCLANRWLAILWRIWQDGVIYDETYHLQQRAMHSKACN

SEQ ID NO: 450753 - protein, 429 aa, unidentified
MTNPQSTPEVVVWVAIDVAKDRHEALIEAPGWKSRKKFRVQNTAEEFRAFAEFLHGLALPVRIGFEPTGNYHRALAYFLHSEGFHLELISSVALARTREAMHNSWDKNDPKDAQVILHLLKGRLTQHYHDPMVHHLNDLQELSKTHHHVSLEKTRTQHRLLTHYLPLYFPEIARYHSSSRSEWLWNLLIEFPTPRSITQLARGEFVRKAWNLVGRKVAKERILIDIYMTAQSSVGIPAEENSQAVAMLRFVLRQLLTLCQLRATIEERADDLLSSNEDYQRLRRIPGIGPISALTILAEAGDLRRFSHHRQFLKFCGFDLATEQSGQFRGLSRLSKRGNARLRAVFWMAASVAVRMRENSFRAKFERYTRSDPGSADRKRKAYVAVAAKIARVTYALIRSGADYRCFHEVAVPGGRTRSARAVEAIPTS

SEQ ID NO: 450754 - protein, 335 aa, unidentified
MQIKHFIGIDVSKDTLDLSVVVDGKSLQHYGIKNRTVEIKSTINKIMKGLGATVDDTIFCMEHTGMYNLPLVKWLQSHQGKMWLESGVHIRKTLGVVRGKNDKVDSSRIAMYAYTNRHQIKFWNAPRKLIERIAALLSQRARLNKAKKQLNTANKEQKRFLDKDIMRSLNKYTQKTILVINKQIEAIENEILGLINDDEKLNRIYKIITSVHGIGFVTASYILVTTNEFININNPKKYACYSGVVPFEYSSGSSVRGRTRVSHMANKNIKSLLHMSALSAIQMQGDLQEYYKRRVSEGKNKMSVLNAIRNKLVLRIFACVNQNREYEKIYEYKLV

SEQ ID NO: 450755 - protein, 372 aa, unidentified
MRVVGMDVHVHNSFLCVTDPDGQLLKRGRVGNTLGQIAEFLGALPGGDQPLRVVLESTTNSRAIQRMMLDYGKGAGVEVQAQVLDARKLRVIAESVSKCDKLDAAVLNELARSNLKLPACYIPDDEMFALREHLRARSDLVRMRTMLKNRVHSILHRRGILNPLKDLFTRDGRQWLGEMKLDEAGRLILDGYLDTLDQLTQTIDKSTAALTTLSRTQRWCKPVALLRTMPGIGPITSLTILAELGDFNRFKSRASVSNYAGIVPVIRKSNEKSFSGHITHRGPAHLRSVLVEAAWTASGRVPQYGAIYSRLSAKRGKQVAIVAVARRILEDAWTMLKNDEVFRLMTVKSELTDVCIGDSSTQVGVANPNDAG

SEQ ID NO: 450756 - protein, 344 aa, unidentified
MVTFGVDAHKRTHTIVAVNDRGTPVGQTTVGTTSQDHLVLLRWAARFGAERRWAVEDCRHLSRRLERDLLAAGESIVRVPPKLMAHVRNSARTYGKSDPIDALAVARAAQREPNIPLARLDGPDREVRLLVDHRESLISERTRLICRLRWHLHELDPAWEPKARSLDAQRTLDEVRGRLQDHVGVVARLAVELTERCAELTITIKALEKEITELTTQLAPALLELPGCGALTAAKIIGETAGVDRFKSRDAYARFNGTAPLPVWSSNKARHRLSRTGNRQLNAALHRIALTQARWHPPAKEMIERRKSGGNSGREALRVLKRRLSDAVFQALLHDQTAGLTLAA

SEQ ID NO: 450757 - protein, 344 aa, unidentified
MKHTTIAVDLAKSVFEVALSIHPGQVAERHRLRREAFLPFFAERRPATVLMEACGSAHHWARQLEALGHRVLLLPAQHTRPYVMGNKTDRTDAKGLLEAQRNEQIRPVPVKSIDQQALAALHRLRSAWLAARTGRINTVRGLLREFGIAIPLGAKRVVPIVQALLEDADSPLPDSVRPALDEARAEILELERRMRKVEHQLRALARQTPVVHRLRSIPGVGLLTATALVAFVGDVGRFPSARHFASYLGLTPRERSSGLRRRLGAISKRGDVYVRMLLTHGARSVLWKAKSRTDIDRLRAWALQLERTRGHNKAAIALANKLARIVWAVWRRDVAFTEQLAPAA

SEQ ID NO: 450758 - protein, 492 aa, unidentified
MKTPASSLAAKRRVLNAKKLQRQKKQIVSAAKPASLDELKPVHRRASGIDIGSAENYVAIPSEGLAAGESAVRVFGVFSPDHDALVEWLQQHQVTTVAMEATGIYWLSLYDKLEAAGIEVYLVDPHAVKAVPGRKSDWMDCQWLQKLHTYGLLAKAFRPDAPIRRLRTLTRQRTELVMCGGAHQQHMEKALISMNLQLGLAVSDIIGETGLRIIRAILDGQRDPKELVKLRDPRCRKSSVAEMEAALTGTYDDEQLFVLQQSLKAWEFYQKQMAECDPRIEKALAAIPKALPAPQPAPVKAVPAAHNPTPKSKRIDSGHNAPTINFTEALRRICGVDLMKVCGLNLLSVLMLIGEIGVDMSRWRSARAFSSWLGLCPATDISGGKVLSRRTRKVKNRASTILRLAAWAAGKTDTWIGRFYRRVKMRRGAPKAVTATARKLACVIYHLLKYQEEFVLLDTSIYEAKAQEHRMRRLRKEAKSMGFNLVEIEEVA

SEQ ID NO: 450759 - protein, 430 aa, unidentified
MKSNTQNAKIEAITEKTLVLGIDVGSETHYARAFDYRGIEYSKKPFKFSNTEAGFVTFKEWILDIKERHEKDKVVLGMEPTGHYWFNLGKFLQDNEMKPVLVNPHHVKKSKELDDNNPTKNDRKDPKVIAGLVREGRYMIPYLPDGVYADLRTASNIRFQLQAELTRIQNRISRWFNIYFPEYKTVYGKPDAKSGILILKAAPLPEDILTLGIDGVNQIWRDAKLRAVGKARAKTLIEAAEHSVGSKEGAVSARMEIRMLLEDYESRNTRLQEVMVLIEELVRKIPMTEKLLEIKGVGIRTVSGFLAEVGDISRFNNPKELQKLAGLALVENSSGKHKGETTISRRGRKRLRYLLFEVAMSLVAKNPEFRELHNYYTTRRLNPLKKMQSLMAIAAKLIRVFYVMLTKGVNYDPKKMVNDIKRPAVYLQTA

SEQ ID NO: 450760 - protein, 350 aa, unidentified
MEISVFSVDLAKNKFQVHGFDARCEKRVAKTLKRPQFLKFFVERSERCEVVMEACGGAHHWSRQLLKLGYRVRMIPPQFVKPFVVGNKTDANDADAIYEASRRPSIRSVPVKRIDQQDALLAHATREQWIKMRTALINQIRGELAERGIVFNKGVAALRRGLPALVDAECSGDVTPTFQAWLCQRQQDLKDFDTRIKDCEKQIQQQYKDSAACEQIGEVNGIGPLTATATVALVDDGRQFHSARHFGSWIGLTPKEHSSGERRLLGGMTKRGNVYLRKLFINGARSVISASLGKRKTGRPLNERDQWIEALVARRGFNKAVVAMAHKNARIVWAMLTSGECYRPPEALAA

SEQ ID NO: 450761 - protein, 328 aa, unidentified
MAAPSILGIDVSKDTLDVCLLHKEQTHQGRFANRPEGHRTLLRWLRKRRVRSLRACLEATGLYGEELAQSLYEAGYQVSVVNPLRIKKYAESQLRRNKTDRLDAWVIADFCRTQDLVEWTPPPPEWRELRDLVRHLDDLNTMHQQEQNRLQAGLKSDAVISVLQQHIAFLDDQIAQLTQQINDHFDQHPHLKQQRDLLRSIPGIGDKTAAILLAEVRDFLAFDNVRQLVAFAGLNPSQRESGSSVRGKTRLSKTGNPAIRAALYWPAISAKRHNPLIQPLCARLEQQGQPKMVAVGAAMRKLLHQAYGVLKTGLPFDPNYLSEVGVLP

SEQ ID NO: 450762 - protein, 304 aa, unidentified
MQTFPNIGVDVAKDAVVVACAAQSFPAHSIANQRASLLAWLKSLPSGSRIGLESTGCYHELLADLAHAQGHTVFLLNPLDTRHYARAMGNRAKTDRVDAELIARLIEQEHTRLRPYTPPTANQRKLDQLIRRRAKIVRIKSSLKLTMLDLSGFATELKAVLCRLDALIAKIDAAMSAIAACSPQHVDAQQHLQTIVGVGPVVGMALTNTLERVPFHNADAFVAFTGFDPRANDSGHKTGRRRLSKRGPAELRRLLFNAAMSAAKTKVWKPVYEHYPALPRPTVQSNLADRPQGKVPLRAARSGE

SEQ ID NO: 450763 - protein, 412 aa, unidentified
MEVFCGIDWAEDHHDVALVDGAGTLLARRRIGDDAAGLAQLLALLAEHGDSSGDLIPVAIETPRGLLVACLRATGRKVYPINPMAVSRYRDRHSIAGRKSDHGDSVVLANVLRTDAHAHRPLPAGTELAQAVAVLARAQQDAVWDRTQAHNRLRSHLREYYPGFLAAFADLRGGITRPEARAILAAAPAPAAGAALTLAQLRALLRKAGRSRGIDAEAARLRDALRASQMRQLPLVEQAMGRQALALLGQLNAACEAAADLEQAVTESFNQHPDAGIITSFPGLGPLTGAWVLAEIGDDRSRFADAKGLKAYAGAAPITRASDKTRAVLHRRIKNQRLAAAGYVWAFSALTASPGARGHYDKRRADGDRHAATERNLSGRLLGCLHYCLATRQRYNEHIAFPAATSRQRAAA

SEQ ID NO: 450764 - protein, 336 aa, unidentified
MKLTVIGMDIAKHVFQLHAINAATGETERLKLKRGQLLDFFAKREPSLVAMEACGGAHHWARQLQGLGHDVRLICARSVRPFVLRNKTDATDARAIWTAVQQPDARFVAIKSEAQQAILALHRLRAQLMKFRIMQTNALRGLLHEFGQTLPEGYQALSKAIPDALAMAAEHLPAMLVDSLREQWARVQATDKDIAILEHRLKIALRENQQCQRIAEIPGVGLLTATATVATIGDPGTFRSGREFAAWLGLVPRQVGTGGKVRQLGLSKRGDTYLRTLLMHGARAVITRGIRSPWLDSLLQRRPFNVVVAAMANKLARTIWAVLYRGTRYQQASTAV

SEQ ID NO: 450765 - protein, 462 aa, unidentified
MARSKPKASRTAVPVPAFPPPLAAANLHAAGIDIGADAHVVAVPPSDDPQPVRGFGAYPADLNAIADWLATCGITTVALESTGVSWIPLFALLETRGFAVLLVDPQQVQKIKGRPQSDVHDCQWIQRLHTFGLLASAFRPTDQVCVLRRDLRQRAMLLTSAAQHIQHMPKALTQMNRKLQHVISDMTGVTGLAILRAILGGERDPEKLAPLRDDRGKYDEATIARALQGNGRDEHLCAVAQAVALSDVYHQKIIACDRHIEAYLQTFADRSEGQPLPPPPRPRKRGGNQPAFAVRGPLHRITGVDLTQIAGLDETTSLVILSEMGLDMQRWPTVKHFTSWLGLCPHHRVSGGKVLSRRTKPCANRAATALRLAAACRHHSQSALGAFFRRMKARMGAPKAITATAHTLARLLYTMLKHGTAYVRQGMDEYAQQSRDRMVKTMTRRAKALGYTLVKAPEGNLA

SEQ ID NO: 450766 - protein, 314 aa, unidentified
MQYIGIDVSKDDFHVAWNDEKVQIFANSKEGISSFEDSLHHLQYDRQATQIGLESTGIYHLLSSVLLTDHGWAVVVINPYITSKAIKSSLRQVKNDRKDALVIRKVLMLGEGYLFTDTPEILRLKALLREYTSLTKMKAKCKNIISIQNKYQQTTDEALDSVFPQLIDSLNENLKQMKKRLQKTNSEEQKLLQTIPGIGPVCSSALVAFIGNIKRFDDPKKLVAYLGLDCRVHQSGTSINGKGFITKRGNPVLRSLLFNAAYVARQHNPELKTFFEKKLSEGKHYFSATCAVERKLVGIVYAVWKRKTPFVKCD

SEQ ID NO: 450767 - protein, 386 aa, unidentified
MEQSSTLYVGLDVHKDSIDIATAEAGRDGEVRHVGRIGGDLVALVKSLRKLVSRGYRLHVVYEAGPCGFVIWRHLTALSTECEVVAPSSIPKRPGDRVKTDRRDALQLARLSRDGNLTAVRVPGAADEAVRDLVRAREDAVREQRNGRHRLKALLLRNGIPYAGKSSWTAAHLRWLATLKMQHPAQQIAFQEYLNGITESTSRIARLEQAMLNALGDWTLKPLVQALQALRGVSLIGSMTLVAELQDFLRFEHPRKLMAYVGLVPGEHSSGPKHRQGSITKAGNSAARRMLVEMAWHYQHPARVTPIIARRQDELPKAVIDIAWAAQLRLSAKFRRLQARRLMKTKVVVAVARELAGFVWAIGCEVQTSGWQGVAVTPAAQEAAAA

SEQ ID NO: 450768 - protein, 346 aa, unidentified
MLYAGLDLSRKRLDFHLLDGEGATVEVGAAPPDADGLHSLTARLDRHGAPIHAAIESMNGARFVHDRLELAGWLVEIADAQKVKGLAPLACKTDRIDAWVLAELARRDLVPAIWLPDPLVRAERERARWRLHLVRHRSSLKQRVHAVLLTHGKPCPVSDLFGVRGRQLLARLGLPEPWQGTIEASLRLIDELDREIGECERELRRLGADHRYVPLLCTVPGISWVLAYTIAAELGDISRFPAPRKLAGYSGLCPRVYQSGQRDLRGPLAKQGPRYLRWALVEAATHACTHPIYRDRYQQTKARIGKQRGAKVAQIDLARRLSEAIWHMLSRGEPFAPKGATDPLAA

SEQ ID NO: 450769 - protein, 391 aa, unidentified
MSGTSDRVVIGMDPHKRSATIEVMAGDETVVGGGRFDTDRDGYAEMRKYARQWPNRVWAIEGCQGIGRHIANRLLADGEHFVDVPPKLSARARVFATGQGRKTDVTDAHSIALVGTRMAGLRPVVNDEQLALLRILVDRRRSLGEDHTRMVSQLHQLLLELIPGGAKKSLSAAQAKALLATVRPRDVVGKARRRVAAELIGDLERIYRRSKEADKELKELVAATGTTLMDLHGIGSSGAARLLVEVADITHFPNRAHFASWNGTAPIGASSGDQVRHRLSRAGNLQINRVLHIMATVQLRNPTEGRAYFDRKKTSGKTSMEAMRALKRRLSDIIYRRMTDDAVAATAADPGGQRGTTTDSSVTNSHPQAGSSEKSLPRPATQLRTPLSAMS

SEQ ID NO: 450770 - protein, 369 aa, unidentified
MEITKVKKYTYFIGIDVSRNKLDHAVFRGRDMLFHRETGNDPESIMAFIMELKQLPGFVMTRAVFCMEQTGIYTNHLLGRLKTVKANVVIDGPLQIRNSLGQIRGKTDKLDAKRIAEYAYKNREHLRLWIPKRPVILQLANLSALRNRLVILEGSIAIPLKEEGDFNKKGTVKMSKQLSSRTQKAIKADILDVEKTIARLIAADQRLARLSEIMNSVVGIGPVITTQIIVCTNEFRDIKDPKKFACYSGVAPFMQVSGTMKGKTRVSQFANKRMKALLHLAAIQAMRNIPELRAYYERKTVQEGKHKMSVINALRYKMILRIFACVNQDRLYEKEYVRKQQPEALLTAPEITELADSIMADALSNGIEE

SEQ ID NO: 450771 - protein, 408 aa, unidentified
MQVLYPRCAGLDVHKDTVVACVRCVSEPEHHETRSFATTTRELLALGEWLVEHGCSHVAMEATGIYWRPVWHVLEGQAELVLANAQHIKSVPGRKTDVNDAMWIADLLAHGLIRSSFVPPQPIQELRDLTRTRKQLVREISQHSLRIQKVLEDANIKLGSVLSEVLGVSGRAMLGAIIEGESDPHRLADLAQGTARRKHDELVEALHGRIRPHHRTLLRLHLNLIVALEHTVGEVDAAVGKSLEPIHQRARLLTTMPGISEVSAEVIVAEIGIDMTRFATPGHLISWAGLCPRNDESAGKRRSTRLRKGGTWLKTALVTAAWAAVRTKASYLRAQFQRIKARRGARKAIIAVAASMLTSAYFILRDGVPYRDLGPTHFDRQHRDKTVRRLLRRLHDLGYSLPHQLTPA

SEQ ID NO: 450772 - protein, 353 aa, unidentified
MAIAEGGRGGEVRYLGEFPATEAAMRKLVAKLAAKFAKLTFCYEAGPTGYGLYRLITSLGHECIVVAPSLIPKKPGDRVKTNRRDAISLAKLSRAGELTAVWVPDERHEAMRDLSRARLAAKKDLQGKRQQISSFMLRLGRVYPGKTTWGPAHMNWLMAQKLKHREQRTALEELLQGVRQENERVERLDQAIREAVPEWSLAEVVTALQAMRGIDLIAAVGVLAEIGDLSRFQNPRELMGYLGLVPSEDTTGDRVKRGHITKAGNGRARRILVEAAWAYRYPARVSREKQPKVAAAPRRVREIAWKAQTRLCRRFRSLERKGKLRTVIATAIARELAAFVWAINREVMGNRQA

SEQ ID NO: 450773 - protein, 428 aa, unidentified
MTHSEIKSTEFAAYIGIDWADQKHDICLREAGSNRIESLQIDHKPDSISNWVSGLRQRFQGRSIAIALEQKRGALLYSLMLYEFIILYPVNPHALASYREAFKTSGAKDDPVDADLLREMVYLHHDKLHPWTPDDPLTRELSLLVEYRRRLVDDKTRLTNRLQALLKQYFPQALDWAGELDTLRALEFLTRWPQLEAIQVATPEQVRDFYRQYYRLREKLPERLAEISAAQPLTRDKAVNNASITMVKGLLETLRGLIAAIEAFDQRIETCFEQHSDKDIFNSLPGAGAILAPRLLAAFGADRARYQSAKEIQCFSGIAPVTERSGKTKFVRRRLACPKFVRQSFHEFAKSSINWSAWARAYYDQQRRRGNKHNEAIRSLAYKWTRIIYRCWQDHKPYDESVYIAKLELRGSPLAKLIPTAAEQAEAS

SEQ ID NO: 450774 - protein, 320 aa, unidentified
MAVIGVDVAKLSLVAVRTSSTGVVKESFELENNEKEIGIWFDKLKLKHNYLLVASEATGDYHNVLAKACLSRNIPFRLMNPILTKQFNRGTVRRRKTDLKDAEIIAKLAIQGDGSLVSPASFAPSKAIHRTAIRLVKVQQTLSRMHDRFLEALPEEKVVGEILDNCLNLISESCDKLRLQAHKTTDPKLMKLLSSITGVGEHVAVTLVNEIEDINRFPSPKSLIAYAGLDPRVKQSGTSLKHNTHITKRGSIYLRRDVFIAATIASRWDPEMKEYREKKLAEGKRYREAMVACSRKLLNRVYAVWKRETPYERRLITTGT

SEQ ID NO: 450775 - protein, 341 aa, unidentified
MAEYHVGLDVSLDETSVCVVDQDGKVLKECKAATEPADIALAISAYADDVARVGLEAQSLSPWLYTELQALGLPVIVVETQHMKAALRAQRNKTDKNDARGIAQMMRMGWFRRVHVKSHDSMQLRVLLSNRRLLKRKFLDVENELRGTLKAFGIKIGKVSRGRFEARTIELLDGADPTLRGMVISMLRVRRMLWDECLKLHALLVRTVRDDPVCRRFMTVPGVGPVVALTFRTAVDDPHRFSRSRTVGAHFGLTPRKFQSGTIDYDGRISKCGDGEVRTALYEAASSLLVRCKTSSELRSWGLSLVKRRGHKKALVAVARKLATLLHRMWLDGTDFRPAAA

SEQ ID NO: 450776 - protein, 387 aa, unidentified
MIYVGIDIAKETHVAAAVDSDGVIVIEPFSFSNNHEGFKLLKSKLDSLDKSNLLIGLESTAHYAENVIFFLHGCGYELAVINPVQTAAMRKTGIRKTKTDKVDSLLICKTLMVNSFRRYTENDIKTLKLKSLCRFRQNLKKSKARLKIQLTSYVDVIFPELQYFFKSGLHIKSCYELLKVYSSPDDIAALHLTKLSNILTKASRGRFGKQDAESLKSLAKSSVGVKNTYISIQITQTIAQIELIESQLNELETVIETAMDELDSVIMTVPGIGKLNGAMILGEIGDIKRFSDSSKLLAYAGLDPVINQSGKFNAKRTRMSKRGSKILRYALINAAWNVSLNNDTFKRYYDSKVTQGNSHYSALGHTAHKLVRVIFKLLNDNITFALV

SEQ ID NO: 450777 - protein, 351 aa, unidentified
MIIIGVDYHPSDQYIAFVDTETGEGDERRLNHSDGEAEKFYRELAARGASVRVGMETTGYTRWFERLLAELGMELWIGDAAKIKTKRVRKQKTDRNDAQLLLQLLVDNKFPQIWVPSPENRDLRQLLWHRHRLVQMRTRIMNQLQALAMNEGQRRKKKLWSEAGRAQLEKLALAPWASRRRQDLLELLDRMNPSIEGLTAAIEQEAKKWPEVLRLMTHPGVGPITALAFVLIIGTVERFQCGKQIGSYVGLIPCEDSSAGHQRLGHITKQGSSLLRFLLGEAAQAAARCDADWRRRYMHLAMRRQRNIAKVAMARRLGVRLYWMWRKGWEYADWIKFGSHAGQLGTGNGVQ

SEQ ID NO: 450778 - protein, 356 aa, unidentified
MTSSSKYIGMDVHKESISIAVRNSAGKIVIESVIQTKASMILQFIDGLRGEVHVTFEEGTWSAWLYDLLKPHVSKLIVCDPRRNALLKEGNQNDRVDARKLAELLQNNQLRPVYHGDHGLRAVKELVRSYLTITKDVSRVMTRVKAIYRSWGIPCSGTQVYSARHRAAWLEKIREPGVRRRAEHYYQELDGLRSLRRVVRKELLVESKKHQVWKRLCGIPAIGPIRAAVLLGIVQTAHRFRTKRQLWTYSGFGVEGHSSADHQVVNGQLQRKKKPIEIRGLNKNCNHHLKNMFKSAAINASTKPGPFQDFYAALVAKGMRPEMARLTLARKIATIVLIVWKRGVCFDANHLKPQTA

SEQ ID NO: 450779 - protein, 350 aa, unidentified
MIVLGADTHKSSHTIAAVDTSTGQVLGDKTVAVGARGFAALVLWARGLDGERVWALEDCRHVSGALERFLICRGERVVRVSTRLMAGTRRSSRERGKSDQIDAVSVARAALAAGIETLPTAALAGPELDIRLLVDHRERLVRTRVALNNTLQWNLHDLWPELTLPGGALFSKKWTTKIARRLARAEQTMRVRIARDELRRMRELTQAIKALQAEITVLVTEIAPQLVAEPGCGPLTAAKLVGEIAGAERFTSDAKLARAAGIAPIPASSGRTDRHRLDRGGNRQINAAIHRMAVTRARCDPETQDYIARKKTEGKTQRDAIRCLKRHLARRIWHLLHPPPPTETSLNLLT

SEQ ID NO: 450780 - protein, 425 aa, unidentified
MLGVGIDWSEEFHLVALGRPGEGVIDISRVEHSPTAVDTLVGRIAGLEPDPAEVRVVIETRHGLLVERLVDAGYVVVPVNPDLVARRRGPAKKKDDSEDARIACLIALDRHERLRPLIPHGEIAGELRSIARDDERAARDERRLGNRLRQDLIATFPAALQIGGDDLGAPTFLRLLERWPTANALAGASREELVAFARSCRHGWPERFADRVATSLAADHFRPKEYLVRAKADTIRLAATQLLAIARQRRAWERRMGELLLGAPRRGRDHQPRGDGLGNGFPDGEIYLSFPGLGDRLAARIAGEIGDHPEQFDSPSSLQCYAGKAPVTRRSGKSELVVACRLAHNRFLGAAVQQWAFCSLKRSGWAREFYDAQRARGKGHHAALRALGNRWLEILWHCVRTGVLYDETVHVANRNRALGRTAEAA

SEQ ID NO: 450781 - protein, 428 aa, unidentified
MKKHSFSKLGAITPHTLIAGVDIAKKIHWARFTDYRGIPLGKALKVLNNKEGFENILTTIKGVCKQNELSKVILGLEPTGHYWKPLANYLTSQEIKVVLINPYHTKKAKELDDNSPTKNDQKDALTIARLLRDGRFYQLYLPQDVFAELRVLSNIRGSLMKRQNAIKNTIRAVLDEYFPELVTVFKYPLKGKACRQILKSCPFPSLILQLGIDKVLSEIKKAVKKTIGQKRVEKLLRTAKNSIGVTYGIQSARLKLTLLIQELELMEKQLDQIEQAMEQALTLTGFKEIILSIPGVGIITAASFLGNTGDLLRFTHPRQISKLAGYNLIEDSSGENKSKTTISKRGRKQLRNVLYQMARTTVAVNPQMKTLYHYLKARPRNPLKKKQALVVISKKMITIIYSLLKKQTQYQPELVFNQFRLNQLKQVA

SEQ ID NO: 450782 - protein, 345 aa, unidentified
MELHTIGIDLGKTVFHLVGLNLRGEVVVRKKFSRTQLLRFTANVHVGLIGMEACGGAHFLGRALREQRHEVRLIPAQYVKPYVKTNKSDYIDAEAIAEAVTRPTMRFVPIKTDDQLDLQSLHRVRERWVMRRTAVINQIRGLLLERGITLRKGRCHVGAALPGILEDAEAKLSGALRMLLAQLKLELDHLDLRIDEANALIKKTACENEACQRLVAIPGIGPVTATAVIAAIGNGGAFRKGREFAAWMGVVPREHSTGGKQKLLGISKRGNSYLRRLFVQGARAVLQQRTKQSSGLSVWLAQLISRSHRNVAAVALANKLARIAWAVLAKNEQYRPSVVPDVAAA

SEQ ID NO: 450783 - protein, 320 aa, unidentified
MMYIGIDVSKDSFVAAYPRKNGYTTMTFKNDTKGVRSFITSLPEDCHCVMEATGNYSMLLLYLLQQAGIPTSMENPQKIKHFSRAMMTVTKTDEIDAKLIALYGEKMNPEPYKIPAESILLLKQKRTVLRQLKKHLVATKNLQQSLAVLPKQDGASKRAVERTIKFLERQIAELEDEITHLSNKEYKRQMELLTSIKGIGKTLASALIVATGGFTYFSNAKQISRYLGLCPTYQQSGTSVNVKGHINRNGDTYLRSQLYLVACNCTKYNAACKETYERLRANGKSGKAAVVAVANKLIRQAFAVVTKNQPYVDGFVSSIA

SEQ ID NO: 450784 - protein, 368 aa, unidentified
MNTVKFIGMDVHKNSITIAICDADRHDQPRIYGAINNDLDAIDKFCRKMVSTANQLHFVYEAGPCGYGIYRHLTQKGFDCMVAAPSMIPKKSGDRIKNDRRDAKMLARLHRAGELTAVYVPDERDEAMRDLTRAREDAVLATRKAKQRLSAFLLRNRVIYTGRTRWSKDFFNWLSDIAMPFPVQQVVLQEYIDTVNDNLKRVERLTEQIRLQVPSWRLAPIVSALQAARGVSLIVATTLLAELGDLSRFDNPSQLMAHLGLVPSEYSSGESIKRGGITKTGNGHARKVLVEAAWAYRLQARVSRPLLKRQQKLPDGVCQIAWKAQLRLCARFKRLTAQGKAKQLVVTAIARELSAFLWAMAKQVQPVA

SEQ ID NO: 450785 - protein, 355 aa, unidentified
MENQSNLEKSFFENKELFVGMDVHKAKWVVTIRTYDLELKTFSMQPSAEMLEKFLLSTYPGAKYKIVYECCFSGFWIYDYFSEKGYQIIVTPTNRIYKDGSTIKTDKIDSRKLAFQLSRGLLREVVVPAKKIREYKYIFRIYDKQKMRKGQILRQVKAILEQKNHPLKWEKWNKGLVERLKELKFEDKLFDLKFGNLLKEYEYTVSQIKDSEEIIGKIKEEEDIGQGITRIEKINGIGIISSVRMSVYLFDRKDRFVSSEKLNHYLGLTPSERSSGEKISRGRSGMCGNRQLRSIIIQLAWKTVRKDGALLDKFERVYKKSGSKQKAIVAVARKLMTKLYAVITKEEAYKVNMAA

SEQ ID NO: 450786 - protein, 330 aa, unidentified
MDILGIDISKRQFDVALLLGERLRQAVFPNTEAGFKELLAWLAKHRPSPDAPLHACMEATGNWGLDLAEVLHGAGVRVSIVNPARVKAHGQSELARNKTDKLDAALIARFCRAHQPTAWTPPAAHMRELRELVRRCDGLKAARVQEINRQKSGTASPAVAASIKAHLDWLDRQIEAVMGAVQALVALDPVLSRNHELLLSIPGIGVTTAPVLLAELPNIGEFMPKGLAAFAGLSPQEHSSGSTARRPGRISRMGSERLRRALYMCALSSKRRNPALAGFVARLTAVGKPPKVILLAVARKLLVFAHAIIRTQTRFELAAGLAGQPEPAPR

SEQ ID NO: 450787 - protein, 361 aa, unidentified
MSKVRSWAGLDVHARSVLAVTLDAESGELRSARLPGEAAKVVAFCVGLPGPTRVAYEAGPTGYGLARALVAAGIGCVVAAPGKIERPAQDRIKTDARDAERVLRLLMIDALHAVRVPTVEEEALRDLVRAREDLRGDLMRARQRLSKLLLRHGIFYEDASSTWTQRHRAWLRAQDLGGGAQATLHDYLGGIDTLECRRGQLEHTIAEFVPSSPYAQTVARLRCLRGIDTLSAVGLAAEIGDFTRFDRPGKLSSYVGLVPSESSSGETRRQGKITKTGSKHARRLLIEAAWHYRKTPARGTTLQRRQDGQPANVIAISWQAQRRLHNVWRRLADDRGKRRTIVAVAVARELAGFCWAITRAD

SEQ ID NO: 450788 - protein, 418 aa, unidentified
MDVVHRRCAGIDISKKDAKVAVRVAGGGRAGTTTVVTTWSSMTGQVLALREHLVSQQVTCVVMEATSDYWKPFYYVLEDGPWELMLVNARHARNMPGRKTDVSDAAWLAQLGAHGLVRGSFVPPAPIRALRDLTRTRTALTRERAREVQRLEKLLEDAGIKLSAVATDIVGVSGRAMLEALIAGQRDPAVLADLAKRKLRWKLGELTEALDGRFADHHAFLARTHLDLIDHLSAAIEQVTARIEEAMAPFRGVRDLIVTIPGVSTGVADVIIAETGADMTRFPSPGHLSSWAGTCPGANESAGRVKSTHTRPANPYLKGALGVAAMAAARTKGTYLAAKHRRIATRRGPLKAVVAVEHAMLVSIWHMINDQAPYRDPGADYYARLNPDKIKNRAIDQLTAIGYTVTLTPRPLTGPQRQ

SEQ ID NO: 450789 - protein, 372 aa, unidentified
MEYFAGLDVATLESALCVVDGAGAIVLEAKVASEPAAIAECLRPFSSALRNIGHEAGSLSPWLQRELKAMGFPIHCLETVHVKAALKAQRNKTDRNDARGLAQMMRTGWFKSVHVKSEASYRLRLLLSNRRNLKRKFIDLESAVRMSLKAFGVKVSAQCGRMGFDAKVRELVAHDPVLTGLCDAMLRARAALWAEYTKLHKLVVQVTLKDEVCQRFMEIPGVGPVTALAFKSAVDEPTRFKKSRNVGAHFGLTPKREQSGTSINREGAISLAGDGDVRTLLYEAASCLMTRSKAQCDLKRWGQRVARRRGSRKAIVAVARRLSVIMLAMWRDGTFFEPGDTSAPPPRKARKTAPRALPGGAKRLPAPKRART

SEQ ID NO: 450790 - protein, 341 aa, unidentified
MESQRHIGIDLHRNQFTCCVRLENGRNYLTDWRLEDLPRFIKKLRPDDEIAVEVTGNTRLFRDAVAPHVARVVAVDPNQFKVISHSVKKTDRNDARNLALYLEKDLLPEVRMKDKTQAQLASLTQTRDTLVKLRTSLKNKVNNILSAHGINLEKEALSSEKKLREILAMKFDAMVSIELEVIIEEIRSLNQRVAKLEKTITEEGSKLEGHKNLTSIKGIGPLSGSILLSVIGDIDDFEDEGKLAAYFGIVPRISNSNETERSGRITKRGSKLGRTALVQCALIAQRYSPYLKRYYEKIKARRGTGKAIIALARKLLGIIYRTLKNNWVFADFPNFVLVEEV

SEQ ID NO: 450791 - protein, 331 aa, unidentified
MEYFAGLDVSMAETQICVMGRNGAVIHKAKVPSTPADIAAELAQLPTCRRIVFETGRMAPMLYHGLRQLGLPVICVESRQAYQALKLLATHKTDHNDARGLAHLARTGFFKPVHVKSLPAHAVRSLIIARKKLVGQRVTLENQIRGLAVVFGVRLPRALSSTFIRQALQASEGIPGLSAAMQGLVAARTAVLAAIVAIDGDIRRMVRASDACRRLMSIPGVGQLTALAFTAAVDDPKRFRRSRDIGAYLGLVPRRHQSGEIDYSGSISKCGDRRLRTLLYEAANVMLTRYKGALKLKEWAFAVAKHRARPSPRDHHACDAATRHRVQSRIS

SEQ ID NO: 450792 - protein, 340 aa, unidentified
MEAISVIGIDLAKSVFQVHGVDAQGQVVVRKRLSRAKLLPFFAKLPRCLVGMETCASANYWARELMALGHEVRLMPPQYVKPYVKRSKNDASDAEAICEAVTRPTMRFVGVKSPEQQSVLMLHRTRSILTRQRTQIGNAIRAHLAEFGIVAPVGRQGLDRLIAVIGDEGDDRVPIPARRCLSMLVEQHRLVLAHLLDTDRAIRADSRASELGRRLQEIPGVGPLVASALVATVPDPHVFKTGRGLSAWLGLVPRQNSSGGKERLGGITKAGDTYLRKMLFVGAMAVIRHAERYGTRRPWLTKLLGRRNPRVAAIALANKIGRTAWALMTSGEHYREPVVA

SEQ ID NO: 450793 - protein, 413 aa, unidentified
MEVVYPRCCGLDVHKKSIAACVIIREQGKAQKLERRFGTFTSDLEELAEWLEEFGVTHVVMEATGVYWKPVWNVLEGQFELMLVNPQHVKALSGKKFDRKDASHLAELLQHGLLQGSFVPSVEIRQLRDLTRNRARTVQETVRIKNRIDKILEEANIKLSSVATDLFGVSGRLMLKQLIAGEQDATKLAGLARGRLKSKHSQLQQALAGKLSGHHRRMLDRLLRALETREAEIAEDERDIRREIKPFDKAVQAWKQLPGIEDVTAWSLVAEMGPDMAPFDTADQLASWACVCPGNHESAGKQRTGKTRKGNPWLRHAISEAAWGASKTKKSYFHAQYHRICARRGDQRAILAVAHSMIVTGFYLIKYGYQFKDLGADFFDRRNREHTARRAVKRLSSLGYRVILEELPTAPPN

SEQ ID NO: 450794 - protein, 388 aa, unidentified
MLQQESEESNGGRTVVGIDPCREFLQLAILAPNKETKFLKLPLAPSITAEILKSTDPRTTQIAIESYGSYGKLFIYDLLRKGYDIREVNPHISKKLCGLYSEEHSDLKDAESLAKALLLIPDLPKIAITDKQQVLAKLTRTRRKLVKDLNGYLNRLHIALTESYGVVYKKLFKILSMKKALKFFEDYPTINDSVSDERAKERLGAEKWELLRQAGTWEDHTYLETLRTEIRGYIEIIRSITSTKVAVEAKIRDSADLIEEMKLLGTFPGIGGVAGATLLSEIGDIERFGTESHLSAYCGVSPVIWQSGTGKVKTKRRRRYSRRLKGILYFIALSQIRINPESRAYYDRKRTEGKTHWQAMNALSRQLIKIIYYMLKDKAPYQRTPLVN

SEQ ID NO: 450795 - protein, 403 aa, unidentified
MNSVGIDISKGRSTVAVMRPFGEVVISPFEVRHTDSELSELARQLKSLDGETRVVMEATGNYHAPVAKLLHDAGLYVSVVNAKLVHGYGNNDLRRVKTDKKDAVKLANYGLDRWLTLPRYVPEEDTRLLLKNCYRQYRQYSKVQTVLKNNLISLLDTVFPNVNRLFSSPIRGDGSEKWVDFVAEFWHCRCVSEKSERAFTSKYLRWCRKHGYNFSEAKAHTIYAEASGHIGVMPKSETTKLLVEQAVAQLRATSTALAALKHEMQSLASMLPEYPVVMDMFGVGPTLGPQLIAEIGDVRRFYSKKALVAYAGLDAPPNDSGDVTGKHKSMSKIGASSLRRTLFLVMSVYLQNAPLDEPVYQFMDRKRAEGKPYRVYMMASANKFLRIYYATVKAYLESLEHTA

SEQ ID NO: 450796 - protein, 354 aa, unidentified
MPLKTTSLEAVPTIGIDIGKNTFHLIGLDKMGAIVLRQKLSRNQVDIRLANMPRCLIGMEACVGAHHLSRQLKALGHDARLMPARYVRPYSKGQKNDFRDAEAIAEAVLRPTMKFVAIKTVEQLDLQGLHRVRERLVCQRTSVINQIRAFLLERGIAVRQGLRALRTAMPNVLAMTDKLSPRMIHMIEDLCTDWRHLDARIATVSNEIETLSEQDDGAKRLMTVPGIGPIISTATVAAIGSGDVFSKGRDFGAWLGLVPRQMSTGGRTILGPISKRGNRYLRMLFVQAARSVLLRPKSWQKYGLKSWIEAAARRLNRFKLAIALANKIARVAWGVLNGGRNFEVRSMRTAPQAG

SEQ ID NO: 450797 - protein, 340 aa, unidentified
MKLYTGIDLHSSNSYLGIIDETGKRVFKRKLPNDPAAILETLAPYNNEIVGIVVESTYNWYWLVDLLMAEGYTLHLANPTAIQKYSGLKYSDDQHDAFWLAEMLRLGILPVGYIYPKEDRPIRDLLRKRSHLVKLRTSLVISLQNIINRNIGFKLRGSKIMASTTDHVTPLLEFNEDLALAGKVSKDSIDFLTLQVKALEATVAGKAELREPYAKLLTIQGVGKILGLTIMLETGPISRFDKAGNYASYCRKVSSKWISNDKGKGKGNEKNGNKYLAWAFSEAAELARRFYPEPRAYYNRKMKETNIVIAHAALAHKLARAAYYVMRDQVPFMPEKLFES

SEQ ID NO: 450798 - protein, 408 aa, unidentified
MNAVGIDVSKGKSMVAALRPMGEVALLPQEFLHTAVGLEQMAYAIIAPGEDTRVVMEATGRYHEPVAAALHECGIYVCVLNPLFIKQSGGGSIRKVKTDKADAMKIAKYGLDNWVDLREYTPMDTIRQQLKLCSRQYNLYIKTVVSLQNNLISLADKTFPGVNELFSSPERADGHQKWVDFATTFWHCDCIYRVSEKAFTERYQKWCKRKDYHFRAEKALDIYAGSCGHFTTLPMNDNTKLLITTAAQQLLAGKMTLAALRAEMTRLAKQLPEYDTVLAMYGVGETTSAQLMAEIGDVRRFPRRSSIVGFAGVDPAVDQSGKHEAKSTPTTKRGSPHLRKTRYQIVCTYLRKAPEDEPVYQFLDKKRTDGKPYFVYMTAAQNKFLRIYYARVKECLEAFDAQQDTVQN

SEQ ID NO: 450799 - protein, 337 aa, unidentified
MKQYIGCDVHKRYSVFVTMDESGQASRAVRVAHGNGELEGYLSSVPGGTPVAVETTGHWYWILDAMEKAGLEPHLAHALAAKRMMVSPNKTDKLDAKGLATLLRNGTLPEVWVPSGSLRDLRGLMRSRLALRRMGTGLKNRISSALARYGLPQQFRGDLFGIGEAATKCRQESVAALPQHSRFATEQELDLLEALETCVTAVTEEICGSIGKLGWVRRLRTMPGVGEILGPTIYLEIGLVSRFPTPAHLAAYAGLVPRVNSSGGHTRMGRTRRECNRFLKWAFVEAAEVVVAHQESMSAARGSAVSTSEEQSGGSAWQGGGSSGAPSGGIGLAHFGT

SEQ ID NO: 450800 - protein, 400 aa, unidentified
MLSIGIDVSKGKSTVCGMKPGGEIVYAPFEVQHTREGMLELVSLLRSSGEEVRAVLESTGSYHCPVVAALLENGIFVSVVNSLRMKRFCSQSIRKVKTDRIDAMQIALYGLAYWQELQPTRLPEDTYRELQLLARQYYQMTSMLIKAKVDFNAICDQVLPGMQELMSDHAGRHKLSDFVLRYRHTTHILEMGETRFRKDYCKWAEKKGYRNCERMAALIFATAQNGIPVLPNAPSTQIVITEAIRVLHTVEASRDAILTQMQALAKTLPEYSLVREMPCIGDTLAPRLIAEIGDVRRFHSKRALIAYAGIDAPPYQSGKFCANNRHISKRGNRYLRKTGYEVMQSYVMHKPANDPIFTFIEKKRSEGKSGKLAMVAGLNKFLRVYYGKVTELYRSLSAIE

SEQ ID NO: 450801 - protein, 363 aa, unidentified
MKDYTGKTIFVGIDVHKKTYSVTAISDSVVVKRDTIKANPSVLITYLNKRFGTGKIFTAYEAGFSGFHLHRALEEAGIKNIVVHAASIEVSKDRVKTDKRDSLKIAAHLSHGKLTGINVPTVEREDFRSLTRLRDSFTREKTRFACKIKAILFQYGLMGPDDDKRVSLTWIKKLSELETTPGIKYAIQQHAEMWLTYDKKIKEIDVKVKEQAIQDQTIDVVYQSTPGVGPTSARALANELGDLQQFKNNKQLGSYIGLTPSEHSSGEHVRQGHITKQGKPILRKILVQVAWTAIRHDEELYSIYERISSRAGPKRAIIAIARIIICRIRACFRTNTLYTPKKVVKPKEEEALKMKKCSLELAA

SEQ ID NO: 450802 - protein, 397 aa, unidentified
MYIVGIDIAKRKHEAAVIDGEGAVIIKPFSFTNNCSGYNRLLAMLTKAKLPLDEVSFAMEATGHYWLALFTRLQKEGFRVQVINPVQTNSIRSFYIRQAKTDPRDALLIAEVIRFGHFSESTLHPENIYELRELCRGRHAIVSMQADVKRKVVALLDQVFPEYETAFTNLFGDTSMAILQTCPTPKELSEMRLEELCHLIEVSSHKRFRMAKAQELQVLARNSFGFAMAGDVFSTMIRLYAKHLDFLKQQVREMDRKIAEIMDTLDTPITTITGIGPTLGAYILSEIGDISRFPSAAKLAAYAGIDPTMRQSGEYNGVRNRMSKRGSPYLRHAIWLAASSAVLHDPALKLYFQKKRDEGKPYMASVGHACRKMVSIIYAVMRDNKAYTPCIPNEISA

SEQ ID NO: 450803 - protein, 363 aa, unidentified
MLYLGIDQHRKQLTVSVRNESGSVVLRRQVSTRWEKVRAFFSEIRDLAAEDGGYLAVVEVCGFNHWLLALLAEHGCRETIVVQPEEQSKHKTDRRDASQLSEVLWLNRARLRQGLPPRGLRRIQLPGAEAQADRRLTSLRHNAGRELTRTINRIKAVLRRHNLEQECPTKGIQTKAATKWLHTLKLSAVERIEVDEQLLRAGLLREQVQHLQAEIAAHFERNAAARLLSTIPGAAPYSALGLASRVDDVRRFKHPRSLANYWGLTPGSRNSGEATDRLGSITKQGSALARFLLGQLVLHVLRDDAWMRSWFKAIKRRRGSKIARVAVMRRLATIVWHMLTRNEAYACGGPPRARLQPRPAGAR

SEQ ID NO: 450804 - protein, 342 aa, unidentified
MDRLSPVTRIRKVGFTMENELHFIGIDVAKAKLDVDILRPDGRHRCKKFDNTLSGLEALVRWLRGHDVNRAHVCMESTSTYMEDAAAHLSDAGYTVSVINPALSKAFAQSEGLRSKTDKVDARMLAHFCREKRPPAWEAPHPTERALKALVLRHQALTEMQTQEKNRRETAPEVQLTSIDILLGCLSAELARIEKQIKDLTDNDPDMKQRRKLLNSIPGIGEKTAAVLLAYTGLKLKFGTGRQFAAYAGLTPVQHESGSSVMRASRMSKAGPVHLRKALYMPALSALYHTAWGKAFRKRLEGNGKRAKVIIGAMMRKLAQVAYGVLKSGKAFDASQHELLIA

SEQ ID NO: 450805 - protein, 427 aa, unidentified
MRFIALDVHRDFCEVAIKDESGLRLAGKVRTAVAELQLFAESLAPEDQVALEASEPALQIARILEPHVGGVAIANTRKLRAIAESKVKTDKLDASTLCELLAAGFLPAVWSPDEFTRALRRRLQRRAKLVRARTRAKNECHAVLARHLKGKPPMSDVFGKKGRRWLAALELAADESETVACCLREVDFLHSEIGLVERELAAQALGCEEIRRLMTVPGVSLVSAATFVAVVGDVRRFSSPKKLVSYVGLDPRVRQSGEAPARHGRISKQGSPEARHMLCEAAWVLIRTPGPLRAFYERVRARRGAQIALVATARKLSVLFWHLLTREEDYAFQRPTLTRRKLLGLELKAKDGRRSWPSGHSVGTKQDREREREYAKQVETAYRRLTADWQPRAPRSGAGATRGRASSSHLLGEETATRQGSAPEPAL

SEQ ID NO: 450806 - protein, 456 aa, unidentified
MSKNQVSLEVINPNASGIDIGSRSHWVAVGQDAQDVKEFGVYTEDHQELSKWLKEHEVTTIAMESTGTYWQNIFSFLVAQGFEVILVNGRQTKNIKGKKTDIKDCQWIQKLHTLGLLSSSFLPDSTTDIIRTYSRHRQNILKQSGATVQKMQKYLRLMNLRLDVVVNDIVGLTGKKIIESFISGEKSGKELAKHRHYNIRKSEEEIAKALQYNGREDYYFALKQEWKTYLHLQKQIDETDKEIKKLLKKIIKNDENKKKHTANKKDYKRKNKNAIRNTDMNQIGFQYFEGIDLMAIEGVNDATVMAFISEIGLGGIKKFRTAKEFTAWLRLAPNNKISGGKVLSHHLPKGSNRLKIALRQAANVIGNLKEGHLNNFFRRINYKKGRATAISATARKLAVIIWNMLAKGEPYKPPTEYLFLDQKRKLRLVSRIKKNIAKFDIKPQDVGFDNLLNLNT

SEQ ID NO: 450807 - protein, 429 aa, unidentified
MTRISAGVDVSKNRSTVCIMDQDGKFIMRPFLVWHSTEELDFLADTLKRLNGEVRVIMESTSVYQYPIALQLKERGLFISIVNAYEMKQFANIDFRGGKTDKKDSRTIASYGISYWDKLVEWQIPKDTYFNLDLLNRTYMNAKKHRQIILQELQHYIDCAMPGMDKELHSLNLSTKKDFMLDFVEKFWHRDEIVNMTEAEFTEVFTAWAKEKGYRPGKGKAAKIYAIAKSCIPYYPANPTVKTILQCIVDKLSGVNRTLVTIVTQMIEEAKKLPEYQIVREMPGVGDPLAARFFGSAGDIRRFKNSKALVAYAGIDSPPDESGDFSSTHRHITKKGSKVFRDTGYEIMMALRAQKRTWEKVRKNPEVYDYMLKKEAEEKPRKVAKIAALNKFLRIVYARIKELYDNMALAERAKAKTKSKTKAKTKATA

SEQ ID NO: 450808 - protein, 387 aa, unidentified
MNKSNRVIGLDVHPDSFAGAVLLKGKDAASARVVSTSRRVELPELEKWVARHTGEQDVLVLEASGNAFAVAERLRVLQRQVVILDSHRAGKVGKAYCANDRVDAIKIARIYLTALSPVVWQPDAKTRERREVFSAYQAVVKEATRLKQQLRSMLNEHCVRLESGFRLSHPSAINRLLKLREWTPVRAMLLEQLHRGLVSAQARRTRLRRYMAQEVLDEPELLRLTRLCGISLITLYGLSASIGDIKRFSNSRKLSAYFGLNPSVEQTGNWEGEGALKRHGRGALRALLVQSAKKLLRVNNPLQKWGLAVATRRGRNKAAVAVARKLCVAVWHVMQGHVIGAIERMTTLHTKLHKLATELGLNTIKSQGYETKEAFVQKKLYLLRSYA

SEQ ID NO: 450809 - protein, 367 aa, unidentified
MSRMKRLAVQQLDVSKDYLVIGLDLAKTDTAVIAITTDGELYAIDRLKYSDLLNQARQLGSTVFAMEPCNGMTYLVHELEELGHECRVINGEAVKDYVKSHFAGQKNDLNDAQAIAFLAQDEMLKFIRVKAKSEMTMQTLQVVRQQLIKQRTCSVVCIKGICQNYGLVISKSIMSEAKIRPIIEETQKLPDEIKEPLKRLLRNAARFTIDIKQIDKAIEQGLKGNETAERLLEVPGLGPQCVSRLLTTIGDINRFEGPKNLAAYYGLVPRSHTTGHNEKMGKITKHGDRLMRAFLVQGAHAVLIQHTKGRLPKSALKKWIDKKLSAGMPCSKLSIALAAKLLRIAFAVLKYKKKFDIKKAGVARCSL

SEQ ID NO: 450810 - protein, 323 aa, unidentified
MMGLPNSICVGIDVSKMSLDIASNQTISPFATSNDVDGFDVIIAELKQYSIALVLMEATGGLEAAVACSLQAQGFDVAVINPRQARDFARSMGYLAKTDRIDATMLAQMAEVINRHPERARFIRNLPDAEREVLNAMVVRRRQLITMLTAERNRLHPSHPQSRKSISTIIGVLQDELKRINKSMEVHISTHFKTLAEILGGVKGIGAATIATLLAEVPELGHLSRREISALIGLAPFNRDSGNMRGRRTIFGGRANVRSALYMATVVATGHNPVIKQFYNRLVESGKAKKVALVACMRKLLTILNAMIKKNEPWDSSHHYLSQ

SEQ ID NO: 450811 - protein, 426 aa, unidentified
MYYVGLDVHAKRSSICILDDHGKLVKRLEVKGDWSRLLEVVDAQVPRPFAVCYEASCGYGHLYDQFARRAERVRVAHPAQLRLIFRSKRKNDRVDSAKLSKLLYLDEVPVVHVPGVDVRAWRGLINYRRNLVCRRAAVKTQVRALLRGLGVAATVRGLWTAKGIAWLKGLAMTAADGVRRDVLLDELAHQDKQVGKVERELDRVAAKHPGVALLRTIPGVGPRTAEAFVAHVDDVARFGRVKQVGTYFGLVPCQDASADRNRLGHITKEGPAQARWLLAEAAWQGRRRSATIRAFFDRVMRGDADRKKVALVATAHYLTRVMAAMLRSGEAWREDPRCPALPAKADAKADAKADAKAKAKAKTAAGAAAGVPSDPVAASYAPPGGVKVPSREYTGPCPPGGSTLTPPGSAGNASGHEVGGDAMRRG

SEQ ID NO: 450812 - protein, 375 aa, unidentified
MTSMPQPAARPHPVPPAATSPVVIGGIDTHKELHVAAVIDTGENVLATRSFSTTRAGYRALIRWMRSFGDVARIGVEGTGSYGAGITRHLADAGIEVLEVDRPDRSDRRRKGKDDDLDAISAARAALRGQRTSIPKSKDGAVEALRVLRVTRGTAIRARRNALQLLRMSIVSAPDEVRDQVRNLTRMQLIRTCAAWRPDTTSAADPASATRIALKSLARRILELGDEIAALDELIKPIVCKLAPQLLERTGIGIEIAGQLLVTAGDNHQRLRTEAGFAMLCGVAPLPASSGMTQRHRLNRGGDRQANSALHLAVISRIRMDPATQAYLARKTAEGHSKLEIIRCLKRYLAREVYYLLNPGQPTTPKQAPKINIGA

SEQ ID NO: 450813 - protein, 322 aa, unidentified
MRYIGIDVSKATFVVAYSSDKGGEIRTFNNTTAGIRQFIGTLPKDGSIHCVMEATGNYSALLLYMLNVAGITVSMENPLKVKNFAKAMLSTVKTDKSDARLITLYGEKMNPRPFKVQGEAILRLRQKRTVIRQLTKQITAMSNLRGSLACLPVPDKGATHTVDETIKFLEKKRDRLQAELTDLVEVELSRKLALLTTIKGIGITLATALIITTGGFTYFQNAKQVSRYLGICPTYEQSGTSVNIKGHINRNGDAYTRGLLYIAAWPASRFNAQCKETYTRLRQNGKSGKLAMIAVANKLIRQAFAVVAHDKEYIDGFVSNRP

SEQ ID NO: 450814 - protein, 346 aa, unidentified
MHYIGMDCHISTLDFAVVNEGGRLVKAHSVATGINGFMEFVKTVPPPRTIYMEEGTLAAWALETCVRFREKLVITDAKKNHWIGSSGQKGDSIDALKLAQLARGGYIKEIHHPVGQRRRFRELMIAYHDTVRSTTRIKNKIKARFRQNGIQCTGATVYSETHREEWKGKLPQEATLLLILDGLWRQLKQSEQTEEELLAVARAQAKQYPEIKLFKDIPGIGFIHAATISAMLETPYRFADKRKVWMYAGLGIMTRSSGGKIYSEKLSTDYNRLLKYTLKQAAEAAIQAKDNPFRRKYLDMTLLHGIAPHRAKLTIARDMLATMWAMWRKGEKYSPEIREKSSCKQG

SEQ ID NO: 450815 - protein, 342 aa, unidentified
MEITTVGIDLAKSIFQVHAVDAAGQVVVRKALRRAQVVPFFAKLPPCLVGMEACGTSHHWARELIRLGHDVRLMPPAYVKPYVKRGKTDANDAAAICEAVTRPSMRFVPVKSTEQQAALALHRTRDLLVKQRTQLVNMIRGLLAEFGIEMARGLRHALELAARLSAGDAAEVPPLAQRVVTGLADQIGAVQIQLTRLEKELLAWHRDSDLSQRLATIPGVGIVSATALAASVSEPERFRNGRQFAASLGLTPLQNCSGGKERLGRISRMGDRYLRRLLVVGMTSLVRRAKATPTSVDPRLPALLQRKPVRVVTVAAANRTARVAWAIMTRGGTYRAPAATAA

SEQ ID NO: 450816 - protein, 404 aa, unidentified
MALVERFVGLDVHKHYVMVAAIDATQQVVLTPRKLSLERFVAWAPEHLQPTDQVVLEATTNAWTLYDQLAPLVQEVKIAHPLLVKLISAARVKTDTRDTLHLARLLAAGLIPQVWVPPAPVRELRVLVAHRQRLVRQRTQAANRLHSVLHAHQIAPPAGRLGSAGQQAWWDQLALSPVERLRVQQDLTLLQTAERLIFSVDAELTRLSTQDPWKELAPFLMQLPGFAVVTSMTVLAAIGDITRFPSAKKLVGYSGLGASVHASGQTHHTGPITKQGRRELRTVLVEAAWSAVDHHPYWHAEFARLVPSLGKGKASVAIARKLLVVVWHVLTRQVADRHADRPMVLRKLQRWGASHGLATQQGLSSGAFARQLVDRLGVGALAAPAAPSGEGGSETQPLVAVADT

SEQ ID NO: 450817 - protein, 402 aa, unidentified
MDGTRRFAGIDWAKARHAVCVVDGQGRAVARFEVEHTDAGLRELVRRLTGVEGVAIERPDGPVVEALLEAGLPVVVIASRHVKALRARHGLVGNKDDRADAYVLADALRTDGQRLRPLRRDAPETVALRAAVRVRKDLVAHRTALAQQLAAHLALAFPGAVDLFDELASPIARAFLRRFPTAERAAWLSPRRMTAWLAARGYSGRRSGAELHARLAAAPAGVRGPSADALAAVTLALVAAIAAIDDEAKALEAHIVEQLGRHPDRAIFTSLPRAGRVRAAALLAEIGDRRERFPTPESLACLAGVTPSTRQSGQHRVVSFRWTCDKKLRDALVDFAQDSRRANPWAADLYHRARARGKSHPQAVRILARAWVYVIWRCWQDRVPYDPARHGALQRSVLTPAA

SEQ ID NO: 450818 - protein, 304 aa, unidentified
MKTTAQLPIIGMDIAKNVFQLHMVDPETGEIERLKLKRDRVAAFFANRQPSLVAVEACGGAHHWGRALQSQGHQVKLLPPKQVRPFVSRDKTDARDAQAIWVAAQQPHIFEVPVKSEQQQACLTLHRMRAQLMKIRIMQTNALRGLLYKFGIVLPDGHRTLLNRIQGELAKASDKLPGVITESVLEQLARVDRLQEDIDHIDKRLVIMGKQNQQMLALQTIPGIGPMTATALAATATDMSDFRSGRQFAAWLGLTPKQTGTGGKIRQMGISKRGDAYVRTLLMHGGQSHHCQESENGKRLAMSS

SEQ ID NO: 450819 - protein, 344 aa, unidentified
MDHFAGLDVSVNETSVCIVDDTGRIIRETKVASEPDALLAVLKSPTHHFKRIGLEAGPLSQWLYTALAEVNLPVICVETRHMRAVLKAQINKTDRNDARGIAQMMRAGLYRPVHVKTLRSQKLRMLLTHRKLLQSKAIAIENDLRGTLRNFGLKVGMVGAAKFEARIRELVEKLLDIAALVEPLLIVRRVLREQVAILHRRLLAIVRDDEVCRRLMTIPGVGPTVALTYRATIDVPARFRNSRAVGAGLGLTPCKYQSGESEYTGAISKCGDEMMRVMLYEAAQILLMRATKWSWLKAWAMQIARRRGVKKAIVALARRLAVIMHRIWVDGTEFRWTRQQVAAA

SEQ ID NO: 450820 - protein, 342 aa, unidentified
MDHFAGLDVSVKETSICIVDDTGRIVREVKVASEPEALLKVLGNPTYHFKRIGLEAGPLSQWLFSALAEAELPVVCVETRHMQAVLKAQINKTDRNDARGIAQMIRAGLYRPVHVKTLRSQKLRMLLTHRKLLQSKAIAIENDLRGTLRNFGLKVGMVGQLKFEARIQELVENFPDLAALVEPLLIVRRALREQIVILHRRLLAIVRDDEVCRRLMTTPGVGPVVALTYRATVDVPARFRKSKSVGAVFGLTCCKYQSGEIDWSGRISRCGDEMMRVMLYEAAQSMLRSKRWSWLKAWAMQIARRRGMKKAIVALARRLAVIMHRIWVDGTEFRWTKETAAA

SEQ ID NO: 450821 - protein, 403 aa, unidentified
MNSVGIDISKGRSTIAVMRPFGGVVISPFEVRHTGSELSKLAKQLKSLDGETRVVMEATGNYHASVAKLLHNAGLYVSVINAKLVHGYGNNELRRVKTDRKDAVKLANYGLDRWLTLPRYIPEEDTRLLLKNCYRQYRQYSKVQTVLKNNLISLLDTVFPNANRLFSSPIRGDGSEKWVDFVAEFWHCRCASEKSERAFTSKYLRWCRKHGYNFREAKAHTIYAEASGHIGVMPKSETTKLLVKQAVSQLRATSTALAALKQEMQSLASVLPEYPVVMDLFDVGPTLGPQLIAEIGDVRRFYSKKALVAYAGLDAPPNDSGDVTGRHKSMSKIGASSLRRTLFLVMSVYLQTAPLDEPVCQFMDRKRAEGKLYRVYMMAFANKFLRIYYATVKAYLESLEHTA

SEQ ID NO: 450822 - protein, 293 aa, unidentified
MRFIGVDLHSNSMTVCFLTASGKEELQAYSLSALAEFRQRLRRTDWIAVEATGNTRWFVGQIKERVGRVVIVNPNQFEVIRKSVKKTDRHDARALAQFLSKDLLPEARLKDERAAQINSLAETRDKLVKLRTTLVNKLHALHRGRGINSRRSQFLSEKGLRGVPARDWGAATRVEVEVIVTQLRSIQDGIQRLGAQMAESGAQLKGHANLASIKGIGPKAASILLSVIGEVNDFESEEKLASYFGIVPRVSNSNETVQHGRITKRGSKLGRTTLVQCTLVAKKYSPYLQNFYV

SEQ ID NO: 450823 - protein, 381 aa, unidentified
MFYFGIDWSQAYHHLCILNEAGARVSHIKFEHSPTGFAKIEHERCNLKVPASECLVGIETSYNSVVDFLLDRNYPVHIVPPRATNGYRNRQRGSGAYDDDSDAALLASIMRTDRDSHPRLRRNTALTQQILAQVRLIESLRVSIQRQSNQLRAVLQRTYPEALGLFGDLTAQITLQFLMAYPTAAEASALSRDAFEAFCRQQGYTRTDLIPRRYAHLVAAAPSADPTVVRAHRYQVRILAQVLLPQVRCRTQALAGLGHLFEQHPDAFIFAYLPGAGPLLAPALLAKFGDHRDRFPAPESVQAQAGTCPVTERSGKRKKRVKFLLQEGTCPVLTSTGLSLSPPSHTRSPIGSPCGLLSHPVHCPAGGLWAYHVPRSNHRMG

SEQ ID NO: 450824 - protein, 406 aa, unidentified
MNMNAVGIDVSKRKSTVAILRPGGKVVVKPFDVPHLSTNFQSLEKLIRELDGETRIVMECTGHYYELVARELSQAGFFVSAVNPQIIRNFQGLDNPLRKVKTDKADSVKIARYTLDSWANLKQYSLMDELRSQLKTMNRQFDFYMKHKTAMKNNLIGLIDQTYPGANTYFDSPAREDGSQKWVDFIDTYWHVDCVRKMSLSAFTDHYQKWCSRRKYNFSKSKAEEIYGKAKELIPMLPKDSFTKRIIKQAIEQLNTASQTIEQLRSLMNETASRLPEYPVIMAMKGVGPSLGPQLMAEIGDVTRFTHKGAITAFAGVDPGVNDSGDYSQKSVHASKHGSPVLRKTLFQIMDILIKTKPDDAVYRFMDKKRSEGKPYYVYMTAGANKFLRIYYGRVKEYLSSLPESE

SEQ ID NO: 450825 - protein, 449 aa, unidentified
MGNGSGVCRGDRNRNARLERLRRLVPVANAIAGIDLAGKKQMVVVTDHDSKVIARRTFRCRAWDLGPALDWAAGRAAASGWAGVTVSCEPAGHRWRVLGQLAADRSMPFVCVQPVVTSWSRRTEDLTCDKTDDKDAVLIARLTAQLRCYVPEPADETWARLRHLGVRREQLITEAGRQIQQMRDLLECAWPAALDTARQPFRPATWMAALPVIAGRDRGDLARTRRLGAARSGHAVRREITRRGGHKPCPRIVRAMFAALNDRAAVIAHRPGALERVALLAEDWQHAQHRLGQTEQRMTPVLGEPGLTVLATSITGLPAVGAAAILAETGGPRRFATGRAVVKHAGLAPREKLSGAFTGRTRLTGQGRPGLRLAAWRAVWGAQQANPVYRARYQHLTSRTENKLTPTQAQTVIAAAILRHLHAVITTGQAWDPAAAAHGTRHNSNALAA

SEQ ID NO: 450826 - protein, 372 aa, unidentified
MKTINAYVGLDVHKNSIYIAFRDHSAAGAQAIGSVPNDLTRLLKKLEPLGDPDEVQVCYEAGPTGYGLCRHLRELGYDCQVVAPAKTPSVAGNQVKTDRRDALKLAEFLATGHLTFVRIPTPEEEALRDLIRAREDLKIKETNTKRQLTSMMLRHSRVFSKQNGGGKCYWTIKHLEWVDRQRFDHEASNVAKECYVEEVRRLDKRIQQLDKRIAEISETVERSDLIRALQSFKGIKVLTAATIVAEIGDLRRFPTAKKFSSFLGLTPSESSSGETRNRGSITKAGNRRLRRMLVEAAWAYWRSPHISRELTARSKGTSESVRSIAWNTQQRLHRRLRALQHRHVPAKKALIAVTRELACAIWAIGQEESLAA

SEQ ID NO: 450827 - protein, 348 aa, unidentified
MTVYIGVDFHARQQTISYLTTETGEIRQLELLHEDPAKVRAFYEQFAGQRVIVGFESSGYAAWFEELLEELGCEIWIGHATYIRQFAKRRQKNDRRDADLILELLVSGDFPRIHRYSRSTRQMLQQLRYRQRLVKMRTMVVNMLLFTASSRGHSFRTQLQSKRGQARLGQLPLPEPLAQQRDELLSLLAQLDQKITTIERWLEQQTAEDVTVQRLRTHPGIGLLTSICVRYTLEDVGRFATTRKVSAFAGFDPMEDRSDERRRMGAISKQGSRWLRFYLVEAGQVAMRKDADLARVYQRISRRGGHAKAKVAVARRLLVRAFIMLRDEIDYAEFLRRGVAARSSRGSA

SEQ ID NO: 450828 - protein, 428 aa, unidentified
MLKINPLSTLYVGIDVSSKSNFVCALDFYKNKYINSSFANNQPGAEELAKKILECLKEHSDLNTVVAALESTSVYSIHIANFLSSCEELMHFKPYVFVLNPKCTANYKKSYIGLGKSDPIDAFVIADYARAGNIETEPWRGSQFLALKRLTRHRLHLVECMTREKTYLVTNLYLKFSELQMLEGDDQPFCDIYGATSSSVLTEYLSPEEIIDSSEEDLISFLAEKSRNRIKDISKTAELLRKAARDSYRLDKALYEPLNVSIASSFNCIETFKKEIKLIDTAIEREIKGLNPNAFIILQSIDGIGPVFAGGIVAEIGDISAFHSSDALAKYAGLMWKSNQSGNFDGEDTPMSKAGNRYLRYYLGEAANSMRKHNVEYGAYYRKKCNEVPKHQHKRALALTSRKFVRLVYGLLARNQLYSGVSLDTSNE

SEQ ID NO: 450829 - protein, 385 aa, unidentified
MQVMIEGQSRFRPFGLPYWGFEDLNKGVGSMTASYDYHIGVDYHKSYSHLVVQDSSGKTLRSGRVKNDRQSLGGFLERYRENSHAVVEATRNWMVMYDWLDDICDDVVLAHPLKVKAIADAKIKTDKIDATVLAHLLRADLVPEAWAPSERARDLRVALRERMFYVRLRTMTKNRIVTVFDRYPEQTAQLKKLGDLFGKAGRVQLAQVNVSEIDRIQIDRGLAFIGDIDVRIKQSEATIRAMTKANANVKLLKTIPGIGEFFARLIDAEIDDVSRFRNPKKLAAYAGLVPSTYSSGGKTFHGKIIKQGNKWLRWAFVEAVTPAIASDAQLHDQYEHLKIRGTNKARVAIARKLLTIAFQILRDQRAYEPRGTSTTEGASTISRLS

SEQ ID NO: 450830 - protein, 344 aa, unidentified
MQVTTLGLDIAKTIFQVHGVDAAGQVVVRQRLARRRVLAFFEKLAPCLVGIEACSSSHYWARELIARGHEVRLMPAQYVKPYVKRGKNDAADAEAICEAVTRPTMRFVPVKTPEQQSVMMLHRVRLMLNRQRTQLSNSIRAHLSEFGIVASIGRRGIDQLLVIVADEEDPRVPADARLCLTMLAAQLTVVKEQILENDRRVRASARATGLGRRLMEVPGVGPLLASALTATIPDPAAFKTGRDLAAWIGLVPKQSSSGGKERLGSISKAGNRYLRQMLVVGAMAVIRYAERHGTRRPWLVQLMQRRSTKVAAVALANKTARIIWAMMMSGERYREPAATGAVAA

SEQ ID NO: 450831 - protein, 737 aa, unidentified
MLSVGIDVSKEKSTVCGMRHLGEIVFGPFEIAHTESDLSELARMIVRLDDDARVVMEATGIYHLPVATFLREQGLFVSIINPYEMKVYRSQDIRKVKTDKRDSMVIANYGVDKWINLREFTPQEDVYVELRLLGRQYRFFMESRIEQLLNLTHLLDYTMPGLKSCFSGWSEYSGKDKLCDFVEEYWHYDNIIKFSESKFVERYQKWTKKKGYQFSETKAVQIYRLAKEGIPTVPSNAPSTKMLLLEATKALREINSALFAILTRMKELAKTLPEYPVVRAMSGVGDVLAVKLMAEIGDVRKYHSSKSLVAYAGIDPPPYESGKLIGTNRHITKRGSSTLRKIGYEVMRCVKANGRSEDDPAVYDFDRIRKQDRLLSYPYESMKPFLRLLEESASDPDVRSIQITIYRLAGKSKLVKYLCRAAENGKKVTVLIELRARFDEQNNIDWSKEFEKSGCTIMYGMANFKVHSKLCLITRNERGTLRRYTQIGTGNYNETTSKLYTDFSLMTADPGIGEDAALFFRNMGIGNLEGRYDHLLVAPLELQEKVIAGIEREMQKGPEGYLFFKLNSLTDRRIIEKLRDASCAGVKIHMMVRGICCLVPGIPGETENIEVRSIVGRYLEHSRIYVFGKGSTEKMYIASADFMTRNTRRRVEVGCPILDPNVRAKIWEVIHLQWSDNTKAMKLLPECKYEPVIGEGGVNSQEEQMKLAEESRRKTEGGEEKKEPQKNLWQRIIHWGK

SEQ ID NO: 450832 - protein, 375 aa, unidentified
MQSRITMSKEKKKKTEKKQKELLKYSVGNDIGKDKFDACISVIDSTQYVKIIATREFNISKEGLKSYLSWVQRKCKLELPVVHIMEATGVYYEKLAWFLHRSQECLSVVLPNKSKKYLQSLGLKTKNDKIDAKGLSRMGAEQNLARWEAPDKQMIDLRSVTRQRESLQEAQTQFRNQLHALKHGEFQNQLLITQQEALIATLDEQIKKTTKMITELVEKDSEMKEKFEKITAISGIGIISLATVVAETNGFKLFHNQRQLVSYAGYDVIENQSGKHVGKTKISKKGNAHIRRILHMPAFSVVTNNEPIFVNLYERVYFRTKQKMKGYVAVQRKLLVLIYTLWTKNEKYDREYHLKKKQVEHPDMQSRSSSFRSVA

SEQ ID NO: 450833 - protein, 315 aa, unidentified
MQDILEICCGLDVHKETVVACLLKGNVGEEPTKTIRTFSTLLAGLEELKAWLEAENCRHVAMESTGVYWQPVYNVLEEAFDGSMVLIVANARHMKNVPAKKTDMKDAEWIATLLRAGLLEGSFIPSKPIREIRNLTRYRKNIIEEIASQKNRIEKHLQSCGFKLSTFLTDIFGVSGRAIMDHLCRHGKISAQEVETLVKGRAKCKLQEIKEAVNGKMDVYQREFLKLLLGWLDQHYEHLQQVEQKLEEKLGQYQRQLEQLDGIPGIDKTAAAAILAEIGIDMSRFKTAEHICSWAGLSPGNNESAGKKVHSHHPR

SEQ ID NO: 450834 - protein, 338 aa, unidentified
MSKITTIGLDLAKHVFHVVCCDGRGKLVSKRMLKRRQVLTFFAALPPCRIGMEACAGAHYWARQLQARGHEVILIPAQYVKAYVRGNKNDYNDALAISEAMACPQMRCVGVKTPEQQDLQALHRLRERCVQMRTGLCNQIRGLVGEYGLVCPKGVAILRRQIPVWLEDGENGLSELFRRLLSQSYAQLQSLDAHIAFYTEELERQGRQNTVCQRLQTIPGFGPIAASVFYSQVGNGQAYRRGRDAAAAIGLVPRQHSSGAKQTLLGISKRGDRYLRSVLVHGARAVVARAGTKQDRLSRWINRIRAERGFNKAAVALANKTARIGWAVVANNTVYRAA

SEQ ID NO: 450835 - protein, 345 aa, unidentified
MPIVGGLDIHRKQLTFDYLDTATGEVKRGQVAPADRAHLRAWLARFAGREEVAFALEGCTGWRYVAEELAGAGIAAHVAEPADTAFARGRKRHAKTDKTDSRHLRELLAQGRLPECWIPPSLILECRALLETYHDLRAEHTAWVQRIHAVFFHQGAPALGDGALRAGRDLEAVRTAAACHLSPAGQLQVATALCMLAGLEDRLDVLRHRLLEAARHLTGAKVLAERLYGVGPVTALAMTCWLGGKDRFSSARKAVRFAGLDITVWSSDRKGPPGRLSRQGPPVLRWAVYEAGKTHARASAPDHRYYAAVKDRQDGKRAALSEARKLLRQACHILAELGDDALTAA

SEQ ID NO: 450836 - protein, 415 aa, unidentified
MKEWKEITYYVGFDWAHDHHDVVIVDRCGQIVADFEIQHTAAGWQRWNQQVAALGAGAVAVCVETSQGLIIEQLLESGVNVYPIAPVSSKAYRERKASSGTKTDRLDAWSLADALRLDGQGWKVLAKEDPLVAELRLLCRDEVALIEERTALVNQLQSALEQYYPAALEAFEDWTLPAAWAFVEAFPTPTVLRAAGQRKWEKFLHVHKLARPQTYGKRLEIFARANELVATEALTRTKSRLALARTRMLRVLQTQIEAYRAEIEKLFAKHPDHQLFGSLPGAGPKIAPRLLSEIGSDRARFDEPSALQALAGTAPVSYQSGQIHKVYVRRRCNKSLRATIHLWANLSRRASPWAALYYQALRARGKSHAGALRCLGQRWLKILCKMWYTRRCYDPDLHTRNQLKHGSWILQLQRA

SEQ ID NO: 450837 - protein, 361 aa, unidentified
MYSRSSDATYQLFVGVDIAAVTATVAWQAGQHKPSKPITIEQTPEGFDSLHHRLMKTGAGARPEQILVVMEATGVYWLSLATFFARLGYAVSVVNPAQAHHFAKALLKRAKTDAIDAQTLTRLAALLQPELWTPPPAIYEELEQRLTQRESLLRMRGQLRNQLHALGHLPVVVAPVRQRMEALDETLTTQITTIETELATLLPTENLEPPDEEDLSSECAWARTLAKLQTIPGIGLLTALWIVVTTMNFTLCSSAEQAAAYAGLAPMPRESGTSVQKRPCIGHTGNGRLRTALYLATLSAARYNPTIKRFYDRLRGAGKPTKVARCAAARKLLHLAYAVGTHLEDFDPNHQHKGKLPATGS

SEQ ID NO: 450838 - protein, 400 aa, unidentified
MISVGIDVSKGKSTICILKPYGEIICSPFDMQHVEKELEDFHNLLQKLDGEIRIVMEATGIYHLPVLTFLHDKGYFVSVVNPFAMKKYAKDSSIRGAKTDKLDSMMIANYGIEKWFKLQKYEGEEEVYAELKLLGRRYRYYMELHVKALQELTHILDYVMPGIKKMFNSWNETNGKDKLSDFVERFWHFDLITTMSLEKFTEAYLVWAKEKKYHQSRSKAETVYELASSGIPTLSSSTPSTKMLVQEAVSVLRTVDSSLSLILTRMQELAKSLPEYSTVREMGGVGDVLAVKLIAEIGDVRRLHNAKALIAWAGIDPPPYESGQFIGSKRKITKRGSSTLRKVGYEVMRVLKSHPAPKDDAVYNYILKKESEGKSKKHAKIAGLNKFLRIYYARVTAVYQ

SEQ ID NO: 450839 - protein, 352 aa, unidentified
MLVTIGTDSHKATHTVVAVDEVGRVLGEKQVRATSEGHLVLVQWAARFVDVVFALEDCRHLTRRLEADLLKAGYPVVRVPTRLMAQARRSAREPGKSDPIDAQAVAQAALRYPDLPRAELDGPAREVKLLSDHRRDLVGQRTRIAAQVRWHLHELDPSLEIPSRGLRRRSVVTQLQVGLAGAAGVVARITRELLARCEELNTQINGLDAELRVLVRAQAPALLAIPGCGVLSAAVIIGETAGVHRFGSRARFARFTGTAPVPVWSGASAGKVRLNRGGNRDMNCALHTIAITQARQGVGPGSSFIAKQTERGKDTTAALRLLRRRLSDTVFTALRTDQHVVARPAMTLAEAA

SEQ ID NO: 450840 - protein, 384 aa, unidentified
MSADHRPEQIAIRTDLGAIFVSLELSRATWLITSLSPGREKMSKHQVRGGDTAGLLARLAELQAKAHARTGQHFPLIVIQEAGLDGFWIHRVLQSEGIESHVVDPASIATSRRRRRAKTDKIDGEALLRALLAYKRGEPRVCAMVKAPTSREEDDRRISRERKVLTTERVAHVNRIKGLLFAQGISDYEPMHRDRRARLHDLTTGDGRPLPQHLKAQVSRELDRLELLLEQLKAVEAERDALLTATEAPAKPGSAELLLDLKGIGPEFASVLWSEGLYRNFANRRQVAAYAGLAPTPWQSGTVDHEQGVSKAGNPRLRTTMIQLAWLWLRHQPDSALSRWFHERVERRGGLRKTMIVALARKLLVALWRYVTAGVVIQGATMKV

SEQ ID NO: 450841 - protein, 468 aa, unidentified
MIRKSKRVTLGLSICYPERLANQPQKGGNPMNSLSYIERFRQIKNELRKNHNFLLIGIDVSKNSHVACIMNSLKNIYHKKFRFPNDSEGITSLLAATDAILQKNNYTETIFALEPTGNYHKPLANYLHNLGHLVCYVSSVAAKENRKTVDGRWRKNDPDDAYNVADLLNQGKIMFYDLEHQKQFKQLKPLILLRKKLHKRLCSIKAKIRNNLFAQCFPEIDSLYNSIDHPEIIEILKSFPAADQIRNTSFKEFYAQLAKTGRITTQKKQRIYNVWHKAADSIGCSLNAAMKLESKFVLQDLELVKNQLERIDREINSACCNSEEYKSLIQIPGFGPIYTGIFLAVVKDIKKFNHSDQIVKLAGLDLEYSQSGKYQSKSRSSKKGNALLRYALCGAVNGALKHKDFNEIFDQQLKRKGDNKDNRRILKVKLAVKMIRIAYAVLSKKEPFDIEKIKLNSVKEPVLIEREG

SEQ ID NO: 450842 - protein, 348 aa, unidentified
MTATRSIVVGVDTHARTHTAAVCDDIGRLIESATFDADRVGYHRMRCWARRHGEIVAFGVEGTGSYGVGLARFLTAEGDTVIEVNRVNRQHRRRRGKSDPADAEAAARAVLSGEAAAIPRDRTGLVEAVRALRIARRSAVQAKTVASNQIRDLIVTAPDDVRAELAGMTTVHRIKHASRWRPGEVTDARTATRTAIWRLARRWLALDVEARELETQMRTLLERLVPSLLAEHGVSTHVAAALVIAAGENPARLRSEASFAALCGTSPVAASSGNTRRHRLNRGGDRQANSALHVVVLHRTRRHEETRHYIARRTEEGLSPREIRRCLKRSLARRLHRLILHDLTRPLT

SEQ ID NO: 450843 - protein, 351 aa, unidentified
MEFFAGIDLGKRKSQIKILNQDRKVVEELKIENDPKEFFRIFKKYKGKIDVACEASSNAFWVWDTLAPIVRRFAVGHTTKIRWIAEARIKTDKIDAGILAELLRADLFPAIAIPPRRIRELRELRELRELIRGIIRMRRQTLRYRNQVHGLLGRHGIPYKRSEVQDAKLGELVRSVELAKPARLAADALLRLEAATPEEIGQLQVELQKELKGEEEINRQITLLESIPGVGFFSAALLVLELWDVTRFSDAKHLASYIGFVPGTHQTGETLWHGGMTKQGNVLVRWILVQDTWIAIHNHWFFGQLYERYKKRKGNTRAVVPVARALLKTIHRVWTEQKSYDEIYKEKALVG

SEQ ID NO: 450844 - protein, 367 aa, unidentified
MQRIYIGVDFHARQQTICYLKIETGELITSELKHQDKAAVRAFYAGFSAPVIVGLEASGYSPWFEQMLEELGCEVWVGDATEIRRRARWRQKNDRRDAELILDLMLHDEFPQLHRPSAQSREVLRMLRYRQKLVKMRTMGKNSLQALALQSGLSKRSQLFSKSGQQELRALQMSPVMEWQREQWLQLLEPINERLLETMHWLKQQSLNDERISRLRTHPGIGLLTSLCLVHTLWPVSRFRNQRKVVGYAGLEPMERSSAERKHFLGISKAGSRVLRYLLVEAAHTAVKKDDDLKRFYQHLVQRRGRPKAKTAAARKLLIRAYIMLRDEIDYAEFRQRAVAARLARLRHGPQMPAALIGQPASTERQE

SEQ ID NO: 450845 - protein, 341 aa, unidentified
MSQSYLGIDLHKRRSYVVLMDEGGDVLDERALPNGDMAEYLAERVPRATTDVMEATFNWPFMYDLVSEHVERVLLAHPQKVKLIAEATVKTDKVDAHTLTHLARTGYLPESYAAPKWLRELRRLMRHRQNLIADHTRHKNRIHSVLHSYNLSSPLSDLFGSKGRAFLAELLCDPAGPLTPSACQVIEDSMAAIDFYNERIQGLDQAFSAYARTDPAIDLLRSLPGVGLISAITIRAELGEVERFRNGHQVARWAGLTPKVLISDQMVRHGSITREGSTYLRQAMVSVALRAVRFSPSMRAFYQRLAKRRGSGIARVALARKLVILSYQLLRTGQPYREGDR

SEQ ID NO: 450846 - protein, 341 aa, unidentified
MSDYSYFCGIDLAKNHFSLHAVDQNGKVILHKSVTRSKLLTTIANMPLMRIGVEACGGAHYWARTLNKLGHDARIMAVKYVVPYRTKGKNDLNDAVAICEAVQRPSTRFVPVKSPEQQAILSVHRMREHWVRERTALMNRMRALLSEFGLIIPVGRSSLMKHVPLMLEDAENELPHLARTVIADAYHHLGELNQRIADTEQVFDSFAKVSANVQRVMKVRGIGPQTATAILASIGNGSQFDKSRDFSAWLGLVPKQYSTGGKPRLGRITKHGDKYLRTLLVHGARTVIANLGDKQDKLSQWCRGVLERRGMNRAIVALAAKNARIIWSLLHNQTEYENYAA

SEQ ID NO: 450847 - protein, 385 aa, unidentified
MQASTVDTPTAAQFGTIFVAIELSQKSWLVTLHSPDKDKLSRHKLEGGDDVELLALISRVRERAARALGGVPAVVSCYEAGYDGFWLHRLLLAAGITNYVFDPASIAVDQRARRVKTDRIDGEKMLRTLMAYLRGEPRVVRIVRVPAPEQEDARRASRERGRLVKEQTAHTSRIKALLRLLGMAVGNPRRRDWLSWLAVQRDWQGQAVPPRMLSEIRHEHARLMLVRERLEALAQQASADPTPGAAQMTERSELLLRLKCLGPAFATTLTNEVFYKDFRNRREVGSYFGLTPSPWQSGGVDRDQGISKAGNPRARCAAIELAWLWLRHQPDSKLTQEYRRRTLNAGKRIKRVAIVALARKLVVALWRYLTTGLVPDGARLKTAKA

SEQ ID NO: 450848 - protein, 310 aa, unidentified
MKQTIVYIGIDVAKAHLDVAWQKRLRRFDNDKAGRATLVKWIKQKQSDPVQVICEASGGYEQELLDALAEADLAFSLVQATRVRQYARAAGILAKTDKVDARVLARFGAAMRPEPTSPRSAAQKLLRELEAQRRHLSYLLVAEQNRLEQLNDEKLRRLTRALMGTLKKQIALIDSRIATLIMQDQELCQKAQKLTSVKGVGERTAALLLAQMPELGTLNRREAAALAGLAPFNRDSGTMRGKRLIFGGRRAVRHGLYMAALVASRRNPILSSFYRRLRIKDKPHKVALTAVMRKLLLALNQALTPNQSFT

SEQ ID NO: 450849 - protein, 489 aa, unidentified
MSKPSRQQQGKKDATLNAKAPKRKARGSHRPQGEGDQRRSQLRITNPDAAGIDIGSQVHYVAVPEGRAERAVRSFGAFSAQLDEIAQWLKECAVKTVAMESTGIYWVPLYQKLEEAGFEVLLVDARQAKHVPGRKSDVQDCQWLQQLHTYGLLRAAFRPEDSICRLRTLQRHRKNLVEGAGVWVQHMQKALNEMNLHLHHVLSDIGGYSGLAILDAILAGERDPRKLASLADYRVKKSRAQIEAALTGDYRPELLFVLNQSLQDYRQIQQQLAQCDLSIEKQLAQIADCANPSQDCGPRPQGPGSAGGKRVKIKPKDALEVSLAGHLKRILGVDLTTIPGLNVLAILTLVSEIGTNMAKWRNEKAFVSWLGISPNNKISGQRVLSSRTRKVVNRAATTLRLAAMVLGHTNTPLGSFYRRKRAQLGAPKAITATARKLGCLIYRLIKNGESYQEPDLHAYELKYKAQILNSLRKRANSFGFDLVEVPKAA

SEQ ID NO: 450850 - protein, 391 aa, unidentified
MLYLGIDIGKFSHSICLLDEAEEKKIFQISADKQGFEKLGQLIEKELKDKELLIGMEATGHYFLNIYDFLLRLGISKDNLVLLNPLQVKAFRNTNLRGAKSDDIDATRIAVLLRFGDFQRCNVLVDKLMNLRQLTRLRSELVALNGDIKRKIISVLDRIFPEFPSIFANCFGKTAMHLITEYPTPEELSLLSLSKLEKIIKKLSKRGLSKNKIEKLHYLANNSIGIKIGVESFKIELEILIARLKMCQEQVSGLETRIAELMKQFPQDIFSIPGIGQSTGASIMAEIGDINNFKSGVKLVAFAGLDPKLRQSGKYQGRTPISKRGSKYLRNAIWQSSMVAARVNPMFKKIYQNKRDKGKSHRYAVTATANKMTKVIYSVMKNKRSFKEQIV

SEQ ID NO: 450851 - protein, 337 aa, unidentified
MTFKRIAVDTSKSVFTLHGVDKQDRPILRQNLSRARFETFFAKLSPTEVVLEACGSSHHWGRFLQRLGHTVRLIPPQYVKPFVKRGKNDRNDAEAICEAASRPTMHFVPVKSAETQADAMDLSARDLLVRQRTQLVNAVRGHAAEFGIIAAKGVAQVAPLLKKIIATDMPPAAQETLAQLGRCIAQLDAQLAEVDQRLARQHKANPVSQRFATIPGVGPITALTMAVKVDPGQFQSGRHFAAWLGLTPKEQSTGGRQCLGGISRAGDERLRQLLVLGATTVIRHAKPGSKTATPWLLTLLERRPRKVVAVALANKMARIVWAMMTNDTAYRGTPQAA

SEQ ID NO: 450852 - protein, 334 aa, unidentified
MENIALIGIDLGKNSFHIHCQDHRGKAVYRKKFTRPKLIEFLATCPATTIAMEACGGSHFMARKLEELGHFPKLISPQFVRPFVKSNKNDFVDAEAICEAASRPSMRFVQPRTESQQAMRALHRVRESLVQDKVKTTNQMHAFLLEFGISVPRGAAVISRLSTLLEDSSLPLYLSQLLLKLQQHYHYLVEQIKDLESQLKRKLDEDEVGQRLLSIPCVGTLTASTISTEIGDGKQYASSRDFAAATGLVPRQYSTGGRTTLLGISKRGNKQIRTLLVQCARVFIQKLEHQSGKLADWVRELLCRKSNFVVTCALANKLARIAWALTARQQTYEA

SEQ ID NO: 450853 - protein, 369 aa, unidentified
MSPNEEPEALIFNLQIKTRRRHSMKYYAGLDVAMKETFICIVNEEGERVFESKATTDPFPLYEELSKSGYELEKIGLETGSLSLYLTNGLQELGMNAICIDARKMAAILSVTVNKTDKNDARGIAEAMRCNHYKPIHLQNSQSASLGILLKSRSTLVENRIMLKNTIRGVLKTYGIRLGEVAHGKFSLTVYESFSEIPHEAKLGIESLLKSYGAIHEEIQKLDKSLYNICKQDKEVQLLMTAPGVGPIVALTYKADLSDPSRFEKSRSVGAYYGMTSRQYSSGETVRLGRVSKCGSKEVRWLLTEAGIVLLTRCKKWSPLRAWGLKLMKKVGLKKAAMAVGRKLSVIMHRMLITGEPFKFSEASLQQAA

SEQ ID NO: 450854 - protein, 393 aa, unidentified
MFYLGIDVEKFSHSLCLLDDEGQESIWQINNDKTGFETLQEKLSFVNLLTEKSFLIGMEATGHYFLNLYDFFLQLGIDSKQIALLNPLQVKSFRNTNLRGAKSDNVDAKRIAVLLKFGNFDRCNVSVGEMMNLRELTRLKADLIANSSDLKRKMIAVTDRIFPEFMPLFSNRFGKTVIALLNDFSTPEEMAELSLSELTSIIKGLSRRGIASAKIEKLHDACRNSIGISFGKEAFKIELNLLLENLKLLQNQIDFLEEKIAGIVSKLNSPLFTIPGIGKSTGASILSEIGNIQNFGSAVKLIAFAGLDPKLKESGTYQGRTPISKRGSKYLRNAIWYSAMVICRVNPTFKKQYTERRDKGRSHRYAVTAAANKLTKIIYHVLKNNCPFNPELV

SEQ ID NO: 450855 - protein, 406 aa, unidentified
MNALTVGVDIAKEFHWVVATVPHPDTGKARQALSRKVDNTPGDIAALLAEIAELEADYGRAVIGLDILGGIARLLEVMVIQAGIELRHVSGLAVKTARRATRGGEHKSDPRDARVIADLVRTRDDLRVVDASDSDNIELSLLVSRRHDLVEDQTRTINRMLDLLCSIHPGLERVINARNKVDLALLARYVTPAEIRRAGRARILAYLKKTGRHNGPVLERLVAGALQAATDQQHVRVPGEDTAAAIIKDLAIELLALRTRLSDTDQRIAELLTDHPDAALIRSLPGMGAVLTAEFLAVAGRLTRFASGDQLASAAGVAPALQQSGKVRYLQRSTGGDRVLKRVFYQAAFCALQRDPTSRAYYDRKRAEGKTHHQAVIALARRRVNVLHAILRTRTPYEARQRLTAA

SEQ ID NO: 450856 - protein, 421 aa, unidentified
MALVMIGVDPHKASHTAVAIDPAEVPLGQLQVRACAAQAERLLAWAQAWPQRTWAVEGAGGLGHLLAQQLVAAGERVLDVPPKLASRVRLLATGNINKNDPNDARSVAVAALRSAGVGGVSRDDHATVLKVWSKRYKDLGRARTQVACRLHQVLCELIPGGLSKEITAGQAARILASFTPADAVAAARCELAAELTGDLRGFDTRIRGTRKKLSAAVAATGTSLTGLFGIGPVSAAAIIGDVRHVSRFPGRDHFASYNGTAPIEVSSGGRKVYRLSRRGNRRLNHAIHMAAVTQIRYRHSPGRAYYDKKLAEGKTGKEALRCLKRQISDAIFACLQADARRAAAKSPGGQLGNHSVSRAVGSHPGHRLFGQATPGPATHPTAPAADPAPSSFPAPLPSRASGRPGPGPGKARPRSGASRRP

SEQ ID NO: 450857 - protein, 452 aa, unidentified
MCLEDRPILEPNAAGIDIGAREMFVAVHSERDQHPVRVFPTFTEDLEKLAEWLVSCGITTVAMESTGVYWIPLYDVLEKHGLKPCLVNARSMKNVPGRRTDWHECQWLQFLHSVGLLRSAFRPEGEVCSVRVLMRHRNELVLMANQHIQHMHKALTQMNLQIHHVIDDITGLTGLAIVDAILAGERDPAVLAELRDRRIKASEETIRKSLVGNWRPEHLLTLRQSRNSYRHYQAQIAVCDEEIEKLIVEFTPWADPEERPLPPDRKKKQRRNKNKLGNPKTGFNLRTESYKLFGVDLTQVPGLAKNILTLFTEVGRDMSKWPTAAHFVSWAGLCPDNDISGGRVLWRGLRHTHHRAGELFRLAAMGLHHDQTPMGCYLRRMKSKLGPAAATTATAHKIAIIFYTMIKNHVEYDATRWAEADAQREKRFQEKLKRQARQLGYKLVPIEEQPAA

SEQ ID NO: 450858 - protein, 345 aa, unidentified
MSVSETYVGLDVSLEATAICVVAADANTVWRGSCPTDAAMLAETIRKRAPGVVRIGLETGQLSNWLTLSLRARGLPVLCLDARHAKAALKMQINKTDANDAWGLAHIVRTGWFREVAVKSMDAHQLRMLLVARSQLVGQRQAIANTIRGLLKSFGIVIPNGSKAPFAARVREAGADNDILMAIVGPLLEAWEALREQIGVFDRQIVARAKADPIAKRLMTAPGVGVVVALAYCAVIDDPYRFKHSSSVGAYLGLTPRRYQSGEVDVSGHVSRCGDGLLRAYLFEAATVVLQRYAKPSKLKAWGLALAKRIGMRRAKVAVARKLAVILHRMWRDQTDFQTGQAAAA

SEQ ID NO: 450859 - protein, 330 aa, unidentified
MKIEILGIDLAKRVFQLHGADRHGHALHRAKVGRSAFVAAVQELQPRVVAMEACSSAHHWARRFQAMGIEVRLISPQYVKPFVKTNKNDRNDAEAIVEAASRPAMRFVTVKSVEQQDIQAVHRVRESLVHQRTALINQVRGLLGERGITIPKSPAAFKRAMPEVLKECEGELTRFCQTLMMELFQEFHALEMRIALAETYIKSFMKQSALCKKIVAVAGIGPITATAIVAAIGEAKEFKNGRHLAAWLGLVPKQYSSGGKSRLRGISKRGNTYLRTLLIQGARAVLIYVAGKSDARSRWLQELIVRRGYNRAAVALANKNEECAGRSSLA

SEQ ID NO: 450860 - protein, 338 aa, unidentified
MIVIGVDVHKHSLTAVAIDEAGRMLDETTVTAADDELLVWAREIGDERLWALEDCRQLTRTLERQLLVAAEELVRVPPKLMAPERRAGRARGKSDPIDALAVARAALREPGLSRPRPDEQPFRDLKLLVDHREDLVDERRRAQQRLRWHLHQLDPSFVVPARRLDRPTHLERVARWLARREQEVQVRVARELVARCRSLTRTIVELERELEQRTVETAPALLELPGCAALTAAKLLAEVGPIDRFQTDAQLARHSGVAPLEASSGRVQRHRLDRGGNRQLNAAFYRIAITQARVHPAARAYLERKQAEGKSRREAIRCLKRQLARVVFNTLKASPALT

SEQ ID NO: 450861 - protein, 419 aa, unidentified
MAFKIFRKNCCGLDVHKTWIYACIGITDTNGRTEYKQARFSSFSKGLKELDDWLAKYRCFEVCMESSGKYWIPVFNILEKAGLFVTLAHPKYTKPQKGNKTDRKDAKWICDLFMCDMIKPSFIPPADIRHLRDLVRYRFKLTCMITGEKNRAQNCLTVSNLKLDDVFSDVFGKSSRSITEQILAHPGETFDVAPFVDRRCKTPIGEIQAAIDGAVSPEQAVKLRQCLDHIDELEMHIEKVQQEILRLSDKYQAALDLVRTVPGFDKNPMTAIQILSEIGGDMSVFPTAKHLVSWAGCCPRNDQSAGKIKSTRISRAGSYFKPVLVQVASALTRSKDHPEITNRYRRIKARRGHKKAIIAVCRMLLTAIWHILSDLKPYTPDGFVEPRPAEKSKVLTTAQALSLLKQRGYVISDSAPILN

SEQ ID NO: 450862 - protein, 469 aa, unidentified
MVNRRLSSRSLVRRTNAHSDVVPRGLGYKECKFSGRSEKVGRRYEEQEQIVAWMGVDWADEGHHVWEYNVGTGGKENYTVQHSAESLQEWLSEVGSRYAGKPVAVVVEQARGGLIYALMNTDFIVIYPVNPQSLAKYRKALYPSGAKSDPADAELLGEMVRQNPERFRAWVPGDVPTRTLQLLTEGRRKLVEDMTALTNQLTSVLKTYYPQALEWAGPLGSEQACAFLEKWPTLMELQKSRPFRIREFYQKYGRPSREVLNERMNQIQKAQPLTLDGAVLMASVMMVQALVAQIRPLRLAIENYDQEIERVFGQHPDRVVFESFPGAGKVLAPRLLAAFGADRDRFQTALEVQEFSGIAPVTERSGKAIWVHRRLACPKFLLQTFHEFANCAWRFCAWSKLYYQQQRARGKDHHAAVRALAYKWIRIMFRCWKDRTPYDDSVYVKSLTKRGSYLAKGLNLPRPDSVVNI

SEQ ID NO: 450863 - protein, 348 aa, unidentified
MNATTFGLDIAKSVMQLHWVEGDTGEIKRKRLSRAKLSEFFAQRQPARIVIEACGGAHYWARTLGALGHEVELLPARQVRAFVRGNKDDAADARAIWLAAQQSDIRRVAVKSAQQQAIQAAHRLRSHWVSVRTATINALRGLLYEFGVVLPKGRESGLKALALQRASVDEQIPPLMARLLDAQLQMLSEFEQQVAQIEKELTAVQRDLPAAKQLRAVPGIGLLGATALAAVLGDGSGWRNAREFASSLGLAPGHVGTGGKVRMGAMSKRGDPYVRTLLIHGARSVLNNYKPSPWVTQLLSRRPENVVAVAIAHKLARTAWALVAHGRSYDGQWRSVPPQKSVLQDATC

SEQ ID NO: 450864 - protein, 346 aa, unidentified
MKKIFIGIDFSKEKFDASLIYAEGLKECAASVHEVFDNRPSGFRRLVRWVKNHSDDLPVDYWLFCGENTGGYSIGLSNYLYASGYDMWLECAYKIKHSAGIRRVKNDKADSRAIAEYAMRNYDKMILYKPQSASLTCLREIFLYRHSLVRQKVALTVRRNEKRLTQEKSDARAFMSFTSKHLITEINKAIDKCDRKIKEIIAADEELRQTFDIITSMPGIGVQNAVCLIVYTDNFQRFDMNSRKIACYYGIAPFGRQSGTSVNSKPQVSPFANRMIKSLLSQAALAAIKSDINVHNYYQRLIQRGKHPLLVHNNIKNKMLHAIVAMIRDKVKYNPEYVYSNNKNVA

SEQ ID NO: 450865 - protein, 416 aa, unidentified
MTNQLNIVCGADIHQRFLVATILCRDGRTWADRFLMNLNGLLDFKSWLVSYGCQKVAVESTGRFWIPVHMILEGTIEVIVANAYKIKHIPKKKTDLKDSEWLAELCLNDMIEPSRIFPKEDRELRNLTRTREAYVRDLSKEKNRIHNVLESCSIKLASVISDIFGKSGMHILTGLLSGTSIDEVLKGIPDKRIREKKSEELRDALMGKLEATDIFLIRQSLQIISQFEMRIEELDREIRSRIASRPMDIKILRSIPGIGMVSAYTILAEIGNYLDFKKPEQLAMWAGLVPSVYQSADKLITGGITKQGSKHLRWILVQVAHAIAHAKGGKLKKFFLKIRAKKGYLVAVVALARKVLCLIHHLLVNQEMYEEEGRLSKRDAPIPKNKNQGTLTIEDMIQCIAQAGYVVKRLNSGMHG

SEQ ID NO: 450866 - protein, 358 aa, unidentified
MTRCIPTDAATITLGVDTHKDAHVAVALDGLGRRQGTLSIPTTPEGYKKLVDWASEFGPLEHAGVEGTGSFGAGLARFLKSRGIKVFEVIRPKRTQQYRSGKSDPIDAESAARSVLADTAIGEPKGADGEVEMIRTLRITRRSAVKARAQAANQIQALLLTAPEGLKSELCGLSTARVVEKAWRLRPGATPSDVEEATKFALRSMARRYQHLSEEIGKLDEQLNRVVSEVAPELVAVEGIGTDTAASLLIAVGDNPERLKSEAAFAHLCGAAPIPASSGKTVRHRLNRHGNRDANRALYVIAVCRMSRDERTRTYVAKRTAEGKTKKEIIRCLKRYIAREIYRILASPSSHSTSISGP

SEQ ID NO: 450867 - protein, 383 aa, unidentified
MQVTQFRSRYGGREPAVMSSVASPAGLIHLGMDTSKNMIVVATLLPGEESPVTGRVANEEAAIRRLVGRFADRSVLHCWYEAGPGGYELYRLLASMGVACQVVAPSLIPKGGSDKVKTDKRDARRLARLGRAGELTPVRVPSPAEEAVRDLVRARDAVLADRKRAQQRLTAVLMRHGRIWRGGSYWTAAHRAWIAAQRFGEPALAAAIGYYRATLAVRETELAAIEAELMPWAAREPLAGPVARLGCYRGIAELGALTLTAEVVDWRRFPAARAFMSYTGLVPAEYSSGERTRRGHITKAGSEPVRTALTEAAWAYRFAPAIGAALRRRQAGASPETLARSWKAQRRLHARYLHLLHAGKAGPEAAVAVARELAGFVWAEMTA

SEQ ID NO: 450868 - protein, 389 aa, unidentified
MIYLGIDVSKFKHNCYLTDEDNFDKGCHFEIKNSREGFEYLLKKLSNFDKDKIRIGLESTGHYHLNLSRFLLDLNFNIHFFNPYQTSLYRKADSFRNTKTDKVDAFFITKLLRATDSNPIHNELYHNYELKSLTRYKSSLKNDRVKLKNTIVGHLDLLFPELCEVCNDVFCKYILEVLKEYPSADKIAKANLTRLSNVIKKASKGSHSKEKAIEIRNAARRSIGIDSSAVSFRLVQDIKSFEFLCKQIKEVNKEIKPLLDCLDSPIMSIPGVGIEIGPSLIAEIGNIENFENPSKLLAYAGLDPSISQSGTIYSNYSSMSKRGSSYLRDALFLAAFLICQNEETFRQYYEKKKNEGKHHYVALTHVARKLTRVIFHLLNTNQKFVSQTP

SEQ ID NO: 450869 - protein, 403 aa, unidentified
MPRKRILVKSIDTSISYQVIGIDLAKHLVSACLITGAGEIFGIDRLTYDDLLKSAERMSPTLFCMEPCPEVHYLAEKLQGYGHHTKVIDGAAVKEYIKTHFGGQKTDLNDAQAIAFLSLDTNLPEITPKNTSNSVLSSIQAVREQFRKEYIQSFVSLKGICQRWGLPISKGVMNKNKVEELVSESKKIPQEVKDWLLELLQSCRELQKRLNKISKYLKEYADNDEICQKIMSVPGIGPITATRLKATIGDIQRFEKPKSIVAYYGLVPKSKATGHNEKKGGITRRGDRVARSLLIEGAGVVLNLAAKGFLRSKPLNKWIEKKRKLKMPWGKLCCALAAKMLRIVRAILIQGTSFNAKIAGVARCSLPKESRNNVMGNNNYPKFPHQMGASISIESFSNHTDHI

SEQ ID NO: 450870 - protein, 313 aa, unidentified
MKQVQSNVFIGVDVSKNSLDVAVGPSGESMRFANSEDGIALLADFIKPLAPTLVLFEATGGWEMNAVRHLAAKRLPLVVINPRQVRDFAKATGQLAKTDAIDARILARFGEAVKPEVRPLKPLELQKLEALNNRRRQIVEMITIERNRLVTAPEWIRPDIEELIAILKKRLAAINGDLNQLIRKSPLWREKDKILQSVPGVGPVMAMTLLADLPELGALNRKQISALVGVAPLNCDSGTYKGKRRIWGGRAAIRSVLYMCALTAIRCNPVIREFYQRLRRAGKLPKVAITACMRKILVILNAMMKSGTCWQTM

SEQ ID NO: 450871 - protein, 380 aa, unidentified
MDRILLGKNLTIGVTDRSPLGTVDPVLELGSSHHSLKSPNSCEGHRARISQGWDLESTYEEVQMSFVGIDVSKSQLDIAVRPDNKRWSASNAEADIAKVVESLKELSPQVIVIEATGGMEMPLVSALSQAHLPVVVVNPRQVRDFAKAVGRMAKTDRIDSEILAHFGEAVKPDVRLLKDEETQMLTALVTRRRQVVEMLTAEKNRLGISPKVVHKDIQKHIDWLQTRLEDSDRHLDSAIRKSPVWREKDDLLRSVPGVGQVLSVSMITGLPELGTLSRRQIAALVGVAPLNRDSGLFRGKRTVWGGRAHLRAVLYMATLSASRFNPVISSFYRRLVEAGKKPKVALTACMRKLLGILNAIIKNRIPWQANHSTCPTLKNP

SEQ ID NO: 450872 - protein, 343 aa, unidentified
MDHFAGLDVSVKETSLCIVDDAGRIVREVKVASEPEALLAVLTNPACHFKRIGLEAGPLSQWLFKALAEAGLPVICVETRHMRAALKAQINKTDRNDARGIAQMMRAGLYRPVHVKTLRSQKLRMLLTHRKLLQSKAIAIENDLRATLRNFGLKVGVVGTVKFEARIKGLVDNTPDLVVLVEPLLIVRRVLREQIGILHRRLLAIVRNDAVCRRLMTVPGVGPVVALTYRATVDVPYRFRNSKAVGAVFGLTPSKHQSGESNRTGGISRCGDEMMRMMLYEAAHIMLVRSAKWSWLKAWAMKIARHRGLKKAIVALARRLAVIMHRIWVDGTEFRWTREVAAA

SEQ ID NO: 450873 - protein, 388 aa, unidentified
MTQAPVSQSVPTIPDYDRTLVLAIELSNKSWVLAAQVPGLPRVKAKRTIEPTAEALLTAIQGYRDRAKVAGRQVERVIATYEAGWSGFWLARWLATHGIETHVVQPSSVPVDRRARRAKSDGIDAELLLRTLLAWLRGEPRVCSMVPVPAEADEDARRCIRERAELVAERVALVNRIGAVLATLGVGDYSPLLRNRRERLEALRTAQGTPLPPHAHAKISRMLDRLDLVRTQITALEQERDAVLEDEVPDRAGAMIQQLATLRGIGVQSATVLVREAFVREFANGKALGSYAGLTATPYSSGSTEREQGIGKAGNRRLRTVMVELAWLWQRYQPGSAEVSWFRERVSGTGARMRKVMVVALARKLLIALWRFATQGVVPGGAVIKPAS

SEQ ID NO: 450874 - protein, 334 aa, unidentified
MRQVSQVGVDVDSEKLVCMMQRVGQRMPLTTFANTAAGHKKFIRWATKRARSARVCLEATGIYSLQFALALHDAKNVEVMVVNPRAIKDFARACMQRAKTDAVDAGGILEYLERMPFTAWQPPAPEILQLQAINRRIVQLQTELTREKNRGHASGFAGASGDAVANDIEINIRHLERRIERMHDSGLQLVHGVPALATKLAHLVSAKGIGEASAMRLLAEVLVLPVDLAAPQWVAHAGLDPRPYESGTSIHRPRRITKVGNRHLRAALYMPALVAIQHEPNVKAFYNKLVAAGKKPMQAVVAVMRKLLHAIWGMLKHDQDFDGNKFFRLAEKTA

SEQ ID NO: 450875 - protein, 380 aa, unidentified
MKDTTKFVGLDVSKDTIAVAVAEGGRGEIRFVGTYPHTVEAVHKVVKQLGGPSVRLEFCHEAGPTGYGLYRLLRAMGLSCIVVAPSLIPTRPGDRVKTDKRDAVRLAQLLRVGELTPVWVPGEVDEALRDLVRAREDAVQDRLRARHRLSKFLLRWNRRPPEGTRAWSKAHRNWLDHLSWSDVRLQTVFQEYLNALDEIEGRIQRVEAAIHEQATQSDRAPVIQALQTLRGVAEVTAVSLVAEVGELSRFRNPRQLMAYAGLVPKEFSSGTRRWQGGITKTGNAHLRRVLVEAAWSYRYKPAIKGQIRKRQEGQPAKITDIAWRAQDRLHRKYRRMVSKGKPIGVSVTAVARELLGFVWAIDCEVERTCVQDGWREAAPL

SEQ ID NO: 450876 - protein, 340 aa, unidentified
MSEITTIGLDLAKSVFQVHGVNAADEAVTRKRLRRGQVLTFFASLPPCLVGMEACATAHYWARELRALGHEVRLMPPQYVKAYLKRNKNDAADAEAICEAVRRPSMRFVPVKTKEQQSALVMHRGRELLIRQRTMLANALRGHLAEFGLIAAQGLHNVAGLIAIVRNDEDERVPDMARRVLRVIGDAIVKLDTQIATIEAQIMAWHRSNPMSQRLAAIPGIGPIIATAIAATVAEPGEFHGGREFAAWLGLVPRQNSTGGKARLCGISKRGDSYLRRLLVNGAHAALLRSKAAKADPWLIALRGRRPRLVVAVALANKTARIAWAIMTKPDCYRFAAATA

SEQ ID NO: 450877 - protein, 482 aa, unidentified
MKAKQKEPTEKSTGQSSQLHWRQMNRKQRRDLERKIQSADLTLQLVHPDAAGIDIGNESHYVAVPPDRDSQPVQHFGCTTAELRAMADWLKQCRIRTVAMQSTGVYWIAVYDVLEQAGLEVYLVNARETKNLPGRKSDVQESQWLMKLHTYGLLRNSFRPPQEIRTMRTYWRQRNDLVRSAARHIQRIQKTLTQMNMQLANILSDVSGVTGQAIIKAILAGERDPQKLAAFRDPRVKASEKDIARSLEGFWQEDLLFVLKQEQAAFEFCRKQMAECDRQLEQYLQKMEDRSQGATLPEEKRKDRLQKKKGNQPQFDLQQQLFRMAGTDLTQIDGIDVMTATTILSEAGWDMIKWKDEDHFVSWLRLAPDNRISGDRIIGKGRLPTNNRVTVALKLAASNLRTSQSYLGAQFRRLRARLDTPVAIKAMAAKLARLIYRMLRYGTKYVDHGSSHYELQQRTREIRRLKLKAATLGFHLVQSTAA

SEQ ID NO: 450878 - protein, 400 aa, unidentified
MLHDHPSVGPTAILTQFGAIFVSLELSRSKWVLTSLSPGNGEKMSQYSLTAGNIGGLLARFTELKRKARERTGSDYPIITIHEAGLDGFWVHRVLRNEGIESHVVDAASIATSRRRRRAKTDKIDAEALLRALLAFTRGEPRVCAMVVAPSPEEEDRRRLCRERQTLLDERIVHTNRIKGLLFAQGISDYAPLRRDRRKRLEGLRTGDGRPLPVHLKTQISRELDRLELLIDQIRSVEAEQEAVLAAESKAAPETGSGPAKAVSEAEPRNAVAMLLTVKGIGDHSAAILWSEGLSRQFSNRRQVAAYAGLAATPWRSGAVMHEQGLSKAGNPRLRTLMVQLAWLWLRHQPQSALARWFNARGERSRKGSIVALARKLLVALWKYVTHGVIIEGAVMKPVA

SEQ ID NO: 450879 - protein, 389 aa, unidentified
MVSVQSNRGGHAAFMEGAPMLDTTTFIGLDVHARSIKAVSLDVMTGEVRAATFGYDAGAVAEWVRSVDPRARCVYESGVTGFDLQKRLSGLGVDCVVGAVSKMIKPSADRRRKNDRNDAESLARMLSVGNVVEVWVPDDECEAARDLTRALEDARDDLSRSKQRLSKFLLRHGLAFDERTPTGRRKGNWTRAHWSRIESIGFAERADNDVLAYYVDAVRRAAEEKARLEGLVEAEARKPRWRKRVDSLRCLKGVDTASAADLVFEAGEFSRFRNARSFAAWVGLTPSEHSSGESDRRGAITKAGNKHLRKTLVEAAWHYLTCSGRPKDLAKGQAPDRGARRHAAKGVRRLVERREALLARGVHGNKANVATARELACWVWAVGLMAEEA

SEQ ID NO: 450880 - protein, 418 aa, unidentified
MNKKRLSRPLGRCIGLDVHLDFIEVAICGEGKVWSAGRVPATAEGITTLIDSLLPADRVALEVTGSSREIARRLEGHVAKVIIVSPGDTGISQARAKTDRLDARALAKLLWTGELEAVWMPPEWTCRMRRRLARRDQLVRARSRVKNELHAVLMRCIKGRPPVSDLFGVKGREWLRGLELPDVEGETVTAGLRHIEFLDAEIEQVEQLIATEALQSPQIKRLLTVPGVNVICAAIFLAAVGDIRRFKGSRPVVAYLGLDPRVYQSGSSPARGGRISKQGSPRARWALVEAARSVAQQPGPMHAFYERLRARKGHNSAIVAVARKLAVLLYCMLTREEDYAHQQPSLTARKLRMLEVKAGQPTVKGKPTGVFATREKMREAEKQLAAQAEASYKRTVADWQATRPKTKKAGASVTPGRA

SEQ ID NO: 450881 - protein, 338 aa, unidentified
MTVVTVGIDLAKNVFAVHGVNAAGKAVLVKPLVRRAKLLELIATLPACLIGIEACTGAHYWAREFQKMGHTVRIMAPQLVSPYRMGGRHRKNDAADAAAICEAVTRPNMRFVPIKSVEQQGQLFVHRAHQGYVSERTALINRIRGLLSELGIVLPQAFKAFLSGVAQVLEDLPGYCNQVIGDLLNELYHIEEKIKNSEKLIQQLARDNSAAQLLMQFRGIGPMTATAIVASIGNGHDFKNGRQFSAWLGLTPRQQSSGGKARLGRITKAGDSYLRTLLVLGARSVLLGAAKNDDPVSRWALQLKERRGYGRALVAIAAKNARMCWAMLHLRDEFIFPA

SEQ ID NO: 450882 - protein, 345 aa, unidentified
MLDDQTGELVERELPHEGEQVRNFYSTLPKPVLVGLEATGSMRWFLQLLEELGIDFRVGHPAQIRAAEPRKQKNDRRDARLLLTLLAENRFPAIWMPSSAQRDLQILLRHRDQLVRLRTRGQLSLQAVALSHGLRRGSALWNRKGQQALRALPLAPQAGLQRDTLLALHPQLQTPIAALDREVAQQAEQRPRAQRLMTHPGVGPITALATEVFLGDPRRFADGKAVASYVGMIPSERSSGGRQRGGKLSKQGNSLLRFLWGEAAIHAVRRDPELQRFYRLKLVQKGLGKARMAAARKLGIRLWIMLRDEIDYAEFCRRGHPQRQSSGTAWAGMPAVGQWSNGPSV

SEQ ID NO: 450883 - protein, 390 aa, unidentified
MYLIGIDISKFKHDCFIATETDEVIKESFSFENNAYGFNYLLSVLNSLDPSKEKRIGMESTGHYGINLMRFLHNNKFSFMVLNPYLTEKYRQATSLRRTKTDKIDAHIISKMLLFLDYQTYSSKSYHISSLKSLTRFRLRMIEARTKLKLRVQNILDLTFPEFPKYFSNIFGVLPMRILSTYPSPEKLAKVDINSSYLALKEGIKGSYSFQKFILLINDAKNSIGKSNENYELELLSSIFLINCYNSEITKTEKQIEGIMNQYCFKILTIPGIGIQSAAVIISEYGDFKSFKNSDQMLSFAGLEPSVSQSGTQSFNGHMVKRGSAHLRYSLMNVANTVVKYNIVFSNFYWKKRNEGKYHRVALSHVVKKLLRLIFHLEINNLSFDSELLK

SEQ ID NO: 450884 - protein, 449 aa, unidentified
MREPQEIEDEEHEQVLQRVAAVDVAKASGMVCTRVPHDARPGRRRTRVWSVDATTNAVMELAGYLAAERVEKVTLEATSDYWRIWFYLLEAAGLDVQLVNARDVKAAPGRPKTDRLDAVWLAKLTERGMLRPSFVPPAEIRRLRDYTRLRTDLTRERARYWQRLEKLLEDALIKVSSVASRLTTVSARDMIEALIAGQRDPQALAGLARGRMRVKHAALAEALTGNFDDHHAELARILLDQIDYLASQIGHLTARIEQEIAAIPAAWGIDADGTAGPGAGAAQDAAALPALARLDDIPGISRAVAQAIIAEIGLDMSRFPTPGHLVSWAKLTPRTIQSGAKTRHGKTGKGNPYLRGLLGEAAASAARTDTFLGERYRRIVRRRGKLKALVAIARSILVIIWHLLASRIVRFRELGAGYYASRTDKAKKTRNHVRQLEALGFTVTLAPAA

SEQ ID NO: 450885 - protein, 340 aa, unidentified
MNEITTIGLDLAKHVFQVHGVDAEGRTVLRKQLRRAQLLAFFSRLPRCLVGMEACATAHYWARELSAFGHEVRLMPAQYVKAYVKRNKNDAADAEAICEAVLRPTMRFVPAKTAEQQAAVLLHRGRERLVRQRTMLVNALRAHLAEFGVIAPQGLRNVGRLIAIIRDEEDARLPSLARQVLQVLATQIEQIEAAVTVLEKQLMAWHKSNPVSQRLATIPGIGPIIATAVAAMVAEPSGFRSGREFAAWLGLVPRQNSTGGKNRLGGISKRGNQYLRRLLINGASANLLRSKATNADPWVIGLRRRRPSLVVAVALANKTARIAWAVMHRQENYQRMAAAV

SEQ ID NO: 450886 - protein, 339 aa, unidentified
MFMIGIDPHKGSHTAAAVDRNETVIDTLRVDADCHQRAVLLAWAARFEPRTWAVEGATGMGALLAEQLVAAGEHVVDVPPKLSSRVRLLERGRIDKTDPNDARSAAIVGWRTPALNVVGGLDEHRVVLRLLADRDHQVTANRTRTICRLHALLCLLIEGGTGRALTAMKVSGLLATVHIDGPVTLERVAAARQLLDEIQTFDTARVEVRKRTKDIVGASATTVTEIHGIGPLTAAIIIARIGDVKLLPPAGVGARHNGTAPIEASSGLQKRHRLNPRADRQLNHAIHMAAVTQVGHDTPGRVYYLRKQAEGKTRKEAMRALKRRISDAVYQRLVADTRN

SEQ ID NO: 450887 - protein, 370 aa, unidentified
MLDTTTFVGLDVHARSIKAVSLDVMTGEARCATFGYDAGAVAGWVRSVDPKARCVYESGVTGFDLQKRLSGLGVDCVVGAVSKMIKPSADRRRKNDRNDAEFLARMLSVGNVVEVWVPDDECEAARDLTRALEDARDDLSRAKQRLSKFLLRHGLAFDERTPTGRRKGNWTRAHWSWIESIRFAEGADNDVLAYYVDAVRRAAEEKARLEGLVEAEARKPRWRRRVDSLRCLKGVDTATAADLVFEAGEFSRFGNARSFAAWVGLTPSEHSSGESDRRGAITKAGNKHLRKTLVEAAWHYLTCSGRPKDLAKGQAPDRGARRHAAKGVRRLAERREALLARGVHGNKANVATARELACWVWAVGLMAEEA

SEQ ID NO: 450888 - protein, 368 aa, unidentified
MGSVAVVAMDIHKKFSKAVVMDEAGQILWECEVEHGDLAVMSEFFSRFEAGAHVVMEATFNWPWIADLAQGAGLCVHLVDSMRAREMAKGYAKSDRKDAIYLGKLFLSSEIFPEVYLAPVDVRDKRYLFRQRSLLVRTRTAVKNAVHGQLFRLGYVTDEEVSDLFGVSGRQYLAGLEVGEKERFLLEEKLKVIDVLALHMGILEGKIAVQLEEDPRAAILMSVPGIGKLVAYAILAEMGQVERFADRRALSAYAGLLPLEDRSGGKANPKHTGQKYNRWLRHAALEAVSGALRSSGRMKSLYMRVKLRNRSTPGKARVAVAREILELAWLLLTRGQYYQEYPPGRPGSRIEVSSRPNRASQAALCARS

SEQ ID NO: 450889 - protein, 363 aa, unidentified
MKEEKRRFVGIDMGKREYTMAIIGANGKMKDFHGKTSSQGRQALFRLLTRTDKVALEAGNLAFIMAYEIQEQVGSEVRVLNSAKLPFIWDAPTKTDKEDARKLARLVEERRDEKLPIVPLPSKKEIGRRKLIANYGREVKGRTRYLNLLHAMFVHQGHTTVVKKNLATSERRNETVVLLTGQEREEAEWILKHLELYEQRIKELKGKMQKEAKEDEDMKNLQTIPGVGPVVAYAFVAHVGDGSRFSKGAQVSNYIGFVPRLDYSGTIQRQGHITKHGNSYLRGLLVQAAWTMTLCKKDSSLKERYICLTAFGGKSKKKTIVSIARRLSELMYSILRNKNNFESRVWVGRREYLTDIKELRKCS

SEQ ID NO: 450890 - protein, 348 aa, unidentified
MSKHAVPAGEVSGLLRRFAELRRKAAARTGRDLPIIVIQEAGLDGFWIHRVLQSEGIESHVVDAASILTSRRRRRAKTDRIDGETLVRTLMAYKRGEPRVCSMARAPTPQEEDRRRVCRERRTLMGERVSHVNRIKGLLSAQGVFGYEPLRKGRRERLEDLRTGDRRPLPVRLKAQIIRELDRLEVLLEQLKTVEAERDALLKPASDEAASPAAMLARLKGIGPETAAVLWSEGLFRQFDNRRQMAAYAGLAPTPWQSGSIDHEQGVSKAGNPRLRTAMVELAWLWLRNQPTSALSLWFHERVQRLGRQVRKTIIVALARKLLIALWRYTTAGVVIEGAVMKAAAVTN

SEQ ID NO: 450891 - protein, 450 aa, unidentified
MSPLALDVVTKTDKTPVLGRMLSKYVGRKTSSIENGITKARNHSRQRGNIMRVVFGIDVSKASSEVAILVNGEKVHGYTIPNDAIGFNRLLGDLKTVHQPEIVFEATGVYSRRLQAFFEDNSYAYTRLNPLESKKQLDSLRVRKTDKIDAEKLAMSQFILNRKPSYVQEALYQELRDLSRFYQNLTEDIVCAKNRLHKVLQVTFPELENILSAPTGEQYWNLVITFPCNSFVLESDDATLTAIIRQSTAKRISEKRVTYLVDKLTKLANQSYCAVKKTSPVIEEVKYYAGELLRLSEHRQGVVEEMVTLAQSLPEYEILLSIPGIAETTATSIIGELGDIRRFHSANQINAFIGIDLRHYESGNFLAKEHITKRGNPYARKILFKCIHNIASASHTNPCHIADFYEKRKRQSQVTSTKPHTIASIHRLIRTMYYLITHNKLYDYTSTQNR

SEQ ID NO: 450892 - protein, 350 aa, unidentified
MSVTHYIGFDVHKKSVSYCVKDAAGTIVEEGKLRATHEALRQWAGKRTEPWHGAMEATLFSGWIYDALKPFTAELQMGHPAMMKAIGASKKKNDRIDARKTADLVRCNLLPACYVAPVEIRELRRMLRYRNLIVAQAVRMKNKMSGLLMEVGAEYNKQELHGKKYFAELLGRLEEVPESVKELLRLSRGALEMFETTQRQILNKLQKEPRLVKRLKVLKSINGVGEVTALSWALEICDPNRFPSIADAVSYCGLTSALVSSADKQRRGPISKQRNAHLQTVLIEAAKLAPRWNPQLAALHEREMGRGDRNRATLSVARKLVAYLLAVDKSGKPFQIPTPAVLETKVATAP

SEQ ID NO: 450893 - protein, 312 aa, unidentified
MAQISPCVGIDVSKARLDVAVFPDNTSFAVDNTPAGWAELAARCAELSVVTIGLEASGGFEQGVARALQDRGFTVRLLNPFRVRSFAKALGKLAKNDKIDAAVIAHFVATMPGRPLPPRSTIRQNLAAVLTMRQQLTERLVMVRNQARGLADPLLCRLSKRHITGLLADIRLLDCRLAAIVAGDAELARQYALLCSVPGVGPVLAVTVLAELPELGTIDRWKIAALVGVVPYDFDSGTMKGKRCIWGGRTAVRNVLYMAALVASRCNPKLKALRQRLAQAGKPAKVALVAVMRKLLTILNAMLRDGREWQPA

SEQ ID NO: 450894 - protein, 340 aa, unidentified
MQTINKFYLGLDMSKPYFDASLLAVINHQKQSMESARFTNDPAGIKLFNKWLKQYKVSFDEHSIVVLENTGIYHRLIWSYCAKNNLPIHIGNAAHIKWSFGIARGKSDKIDSQRLCQYAFKHYDELKATPALNPALLQLKDLMSSRSKLLSQLNSNKTYLKELKAVNDKQVQSTLEKAYQMAIAGLAKSIKDIEALIKNIITANEAFHHNYQLLQTVPGIGHLTAVYLICCTNNFAGKISGKQLACYAGVVPFEHSSGISVRGRTRVHKMANKDLKKLLHLSALSAIKYYPEFTHYYQRKKAEGKHSMSVLNAIRNKIVLRVIAVVNNKKAYVNNQNEAA

SEQ ID NO: 450895 - protein, 390 aa, unidentified
MSQPFDASRSLTAFEQDSTLVAVIEMSQSNWLVAAVVPGVERQPLKKLDAEADALLKLLQRWRDEARKAGRVVRRIVCAYEAGRDGFWLARWLQAHAIEAYVIHAASIAVSREHRRAKSDRIDTELLMRSFLGWLRGEKRHCSMVAIPTMAQEDARRPSRERESLVGEQTRIGNRVKAVLALFGIGGFNPKLRKAAQKLETLGTVEGTSLPENTRAELRRDLERLRLVRDQIRAIEGERLRRLAAAPRTATGPHAMVRLLARVFGIGIETADMLVNEALSRNLRDRRAVARYAGLTGAPDESGKRRREKGLARAGNGRVRRGMIQLAWRFLTWQKHSRLAHWFRERTADGRSTTRKTMIVALARKLLIALWRLVTTGELTEGIKLRPAGA

SEQ ID NO: 450896 - protein, 370 aa, unidentified
MSQSSTLFIGMDVHKDSIAVAYVAQDHGAEVASLGTIGTRQCDIDQLIRKMQSKAQHLVFIYEAGPCGYWLYRYLRKKDYDCWVVAPSLIPKKAGDRVKTDRRDAVQLARLARSGDLTAVYVPKVEDEAIRDLTRAREDTLSDRKDAKFRLKAFLLRHDIRYTGRANWSPAHLRWLSEVICPTPAQQIVFQEYVRAVNEHTERLQRLEQELQDHVQAWRLHPVVEALQALRGVQFTVAVTMVAEIGDLTRFDTPRELMKFLGLVPSEYSSGERRQQGSITKAGNTHARKALVEGAWAYRYPAKVSRHLQLRLEKQPKIIQDISWKAQVRLCKRSRRLVARGKHANVVTVAIARELVGFMWAIAKEISVTP

SEQ ID NO: 450897 - protein, 389 aa, unidentified
MGSSLHLNTPAACGEHGTMFVAFELGKTQWKLGIVLPGKARLSRYVIDGGDGEAAWQLIAKARARAEKQLGGPVRVMSCYEAGYDGFWLHRWLLARGVDNQVIDPASLQVNRRKRRAKTDRLDLEQLIGALIRLLWGDRLACKVVHVPSPAQEDDRRAWRERERLVKERTAHINRIKGLLHGQGVRDALPRAKAFGGWLGSQRTGDGLALPAHLVDELKREHGRLMLVEAQIGEIEAQAEAARKAAAPSPLAVRINQLIELKSLGPVSSQTLVGEVFFRDFKNRRQVGSYFGLTGTPFDSGDKTREQGISKAGNPRARTAAVELAWLWRRHQPASTLSRWFEERVGHQKGRVRRIAIVALARKLMVALWRFLEHGVVPEGANLRAAPHG

SEQ ID NO: 450898 - protein, 357 aa, unidentified
MKKVAYLAMDVHAGHCVLGHMDFDGTFIGNRRFPTSEQHIIQALKAVKAKEKYLALEESNLAYWAAQVARPYVTEVISSDPKENALIYRSPNKRDKVDTHKLCRLLRLGELKRVYHPENDERAIFKAAVQHYIDLRDQQVVLKNKIKAMYRHWGVIEVGGQFVYGIGTRDDYLQRVEHLHIRNQLHRLYRLMDATESMQKRALTAMKQLGRKYPEIKEFEKIPGIGEILSHTFDAFVQTPHRFADKRKLWRYCRLGITDRSSDGKPLGFKRLDKSGVSELKAVSYRAWLSAMRSDNEVRRFYSRSLRLTVNHVHARLNTQRKIIAVMYGMWKRGEAYRPQLFLDSPQMSVVQVRQHH

SEQ ID NO: 450899 - protein, 355 aa, unidentified
MTIVAHSRPFVIGVDTHAKTHTYAVIDPTGQLLGCEQFPTTAQGIARAIAWVGRRTTGQAEALWVIEGVATYGARLAHAAAEAGYEVAEAPRMSAKIRHGVGKSDALDAQAIATAALGLDESRLRRPRADDGVRQALRVLVASRDQMTHEKTMNVNALNALLRVHDLGIDARRPLTAAQIGEASRWRDRDESLAHAVARDEAIRLARRILTLEEALTANHARMAELITDSPAAALLEEKGIGAYTAAVVITAWSHPGRIRDEAAFASLAGVNPIPASSGNTIRHRLNRGGDRRLNKALHIITVTRMTHDPNTKAYVEKRLTEGRTRRETRRGLKRYIARHLYRTLNALHDTPATT

SEQ ID NO: 450900 - protein, 400 aa, unidentified
MRAVFGIDVSKASSEVAILVNGEKVHGYTISNDAIGFSQLLGDLKTVHKPEIIFEATGVYSRRLQAFLDEHGYAYTRLNPLEAKKQLDSLRVRKTDQIDAEKLAQSQFVLNRNPTYVQEEVYQNLRDLSHFYQNLTEDIVRAKNRLHKVLQVTFPELENILSTPSGEQYWNLVIAFPCKDFVLDLSKDELSESIRQSTSKRISDKRVAYLAEKLIALANQSYCAVKKNSPMLEEVRYYTKELLRLSEQRQAVLDEMVELAQPLPEYDILLSIPGIAETTATSIIGELGDIRRFQSANQINAFIGIDLRHYESGNFIAKEHITKRGNPYARKILFKCIHNITSASHTNPCHIADFYEKRKRQSQTTSTKPHTIASIHRLIRTMYYLIMHNKLYDYASTQNR

SEQ ID NO: 450901 - protein, 347 aa, unidentified
MTTIEDARVITGGVDTHAGMHVAAALDSIGGLLGVQEFPATAAGYASLLGWLRGFGTLAVAGVEGTGSYGAGLARHLAAAGVRVVEVDRPDRQDRARQGKSDPLDAVSAARAALSGRASGAPRGRDGAVEAIRALMVAKRSARQERIQAINQARALIMTGPEELRARFVRRSPAQLIEAIAALRPRPGDVPGYATRVALRELGRRAQFLDAQLDRLDELIGPLVTARAPGLLALHGVGPDTAAMLLVAAGDHPERLRSESSWAHLCGVAPIPASSGKTVGRYRLNRGGDRQANSALWRIVIVRMNSHSATRAYADRRSEEGLSKKEIIRCLKRYVAREVYRQLRNGA

SEQ ID NO: 450902 - protein, 320 aa, unidentified
MIISTAAGIDVGRDWLDVAIATSASPAGGRHFRIANTPSAVAALPARLRRAGVERVVLESTGAPAARLVRTLAEAAMPMGVVDPRRIRALRLAEGRRAKTDRLDAGLIARFALIMTDAARPAPTPAMMELRALSTRRRQLVEMIAAEKTRLKQTFEPILLASLKETIRLLGEERARIEAMIEARTSATPEDQRKRQLLQSVPGFGRIICATLLADLPELGARDNKAIASLAGVAPHIQQSGAAQGHAHIQGGRPCVRAALYMAALTAVRSDPGLKADYQAMRAAGKPAKVALIATARKLVVAANAMIKHDRPWSTQHQRS

SEQ ID NO: 450903 - protein, 388 aa, unidentified
MPQQRKPNDLSRSLIALDMDTTLIAVVELSLSSWLVAGIVPGVERQPLKKLKTDENALLALFNRWRDEAVRSGHKVSRIAVAFEAGRDGFWLARWLRARDIEAHVIHASSIAVSREHRRAKTDRLDTELLKRAFVGWLRGERDHCKMAAIPSLREEDAKRPSRERESLVGEQSRLVNRMKATLIRLGIRGFNPKLRHAEQRLEALRTPEGESIPPSTLAELKRDMQRRRFICDQIRSIEQERLERLERTPDTKPHAMVRLLARVTGIGIETADLLVHELLLRNMRDRRAVARYGGLTSSPDRSGGTNREKGMARSGNARVRRGMIQLAWRFLLFQKNSALAQWYRRRTEHAPKARKTMIVALARKLLIALWRLVREGVVPEGVAMRPA

SEQ ID NO: 450904 - protein, 334 aa, unidentified
MRQVSQVGVDVDSEKLVCMMQRVGQRMPLTTFANTAAGHKKFIRWATKRARSARVCLEATGIYSLQFALALHDAKNVEVMVVNPRAIKDFARACMQRAKTDAVDAGGILEYLERMPFTAWQPPAPEILQLQAINRRIVQLQTELTREKNRGHASEFAGASGDAVANDIEINIRHLERRIERMHDSGLQLVHGVPALATKLAHLVSAKGIGEASAMRLLAEVLVLPVDLAAPQWVAHAGLDPRPYESGTSIHRPRRITKVGNRHLRAALYMPALVAIQHEPNVKAFYNKLVAAGKKPMQAVVAVMRKLLHAIWGMLKHDQDFDGNKFFRLAEKTA

SEQ ID NO: 450905 - protein, 343 aa, unidentified
MKITRVGLDIAKEVFEVHGVNEHGKVELRRQLRRARVLEFFANLEPCLIGMETGSGAHHWARELQKLGHTVKLMAPRFVKPYRKNDKSDRNDAEAICEAVGRPNMRFVAVKSEEQQLVLSVHRMHAGFKSERDALSNRLRGLLAEFGMVLPKGAARLRSGLPALIAQERLPALMNQVLADGLKRLRELDELVAQHERQIRVLARQSEPARRIMDARGIGPMTATAAVASIGDAKLFKSGRAVTAWLGMVPRHNGTGGKLWMGSITGRGDTYLRTLFVQGARAVMNTTRGKTDPLSLWVERLRARRGDNVAAVALAAKNARMVWAMLARGEAYRSPQAAQDVAA

SEQ ID NO: 450906 - protein, 378 aa, unidentified
MNRIIKIGMDVHTTNYTLCIFEPSFEHDGTVHCITQVKPEVKNIIRVIETFKKKHENEELNIVCGYEAGCLGYSLYHELKEKGIECVILAPTTMKTEKGGRKLKNDYRDAKMIAECLAYGGYSAVHVPTELDNSVKEFIRMRDDIKENLKSIKQQIIAFLTRNGKQFDGKSFWTRKHIDWINTVSFSEPLLQDTLKEYMIEYNHLCDRVETLDKQIEEISLKEEYVEKVQQLQCLIGIKTHTALSLIVETSDFNRFKKGNMYSAYLGLIPGDDSSGGQENKLGITKAGNSHLRKLLVEAAQGYTRGRVGFKSKDLKSRQEKCSSEVVAYADRANERLRRKYYRMTLRGKKYNVAKTAIARELACFVWGIMTDHIDLCS

SEQ ID NO: 450907 - protein, 482 aa, unidentified
MKPKSPEKAKPATRRPMQGNWHQMNRKQRREMTRRIQSEDLSLAVIHPDAAGIDIGNESHYVAVPPTRDSQPVRRFGCTTAELKEMAVWLKQCAIRTIAMQSTGVYWIAVFDILEAAGFEVYLVNARETKNLPGRKSDVQESQWLMKLHTYGLLRNSFRPSQEVRTLRTYWRQRNDLVQAAGRHIQRIQKALTQMNIQLANVLSDVSGMTGQAIIKAILSGQRDPHELAAFRDPRVKASAEEIARSLEGNWQEDLLFVLRQEQHGYEFCQKQMAECDQQLQQYFSHSEDRSQGASMPQEKRKERLRKKKGNKPQFDLRAELFRITGTDLTRIDGIDVMTAMTILSEAGWDMSKWKDEDHFVSWLRLCPDNRISGDKIIGKGRLPSKNRVTIALKMAACTLRTSNSYLGAQFRRLRTKLGPPVAIKAMAAKLARLVYHMLRDGMQFVDRGAQFYEAQHRNLQIKSLKRRAAALGFQIIEAAAA

SEQ ID NO: 450908 - protein, 334 aa, unidentified
MQNITLIGIDLGKHSFHIHCQDKSGKALLRKKFTRTKLMQFLATCPPSVIVMEACAGAHFMARCISDFGHETKLISPQFVRPFVKSNKNDFVDAEAICEAASRPSMRFVQPRTETQQAMRALHRVRESLIRDKVKTTNQIHGFLLEFGISLPIGDAVIKRLSLVLAEHEIPEYLSRLLVRLHTHYFYLVEQIAELESELSQSINADDTAQRIMTIPGVGPITASLLSSQLGDGKQFSCSRDFAASTGLVPRQYSTGGKSTLLGISKRGDKNLRRLLVQCARSFIMRLERKHGKLAEWVREQLNKKHSNVVTCALANKLARIAWAITTQKKEYQA

SEQ ID NO: 450909 - protein, 355 aa, unidentified
MAVTIVEEARPVICRTAITGGVDTHADTHVAAALDPVGGLLGVREFPATAAGYAGLLGWLGGFGTVALAGIEGTGSYGAGLARHVAAAGIRVVEVDRSDRQDRRRQGKSDPLDAVSAARAAQSGRARGAPKGRDGAVEAIRALMVARRSAAGERTRTNGQARALLLTGPDDLRARFTRHTPAALVTGLASLRPRPGDVAGYAVRVALRELGRRARFLDGQLGRLDELIVPLVTARGPGLLAVYGLGPRTAALLLITAGDHPGRLRSEAAWAHLCGVAPIPASSGKVTRHRLNPGGDRQAGHALWRIVFTRLGSDPATRAYAERRTAEGKSKAEIIRCLKRYVAREVYRHLRPAAG

SEQ ID NO: 450910 - protein, 350 aa, unidentified
MRIIGCDYHPGFQQIAFVDTETGELQERRLQHPQEAEKFYRELAAQGRKARVGMEASGHARWFERLLAELQFELWIGDAAEIRTKRVRKQKTDRQDAQLILKLLLKDDFPRIWVPDWENRDLRQLLWHRHRMVQARTRVMNQLQAVALNEGLRCKKRLWREAGREQLEAFPLAPWASRRRRDLLELLDRLSPTITELTQTIEQEAEKCPGARRLRTHPGVGSLTALAFVLIIGRAERFQCGKQIASYLGLVPSEDSSGDRRRLGHISKQGNTLLRFLLVEAAQVTVRSLPEWRSKYFHLAMRRGRKIAKVAMARKLAIQLFWMMRKEWDYEQVRRFGPHAGQPEHRRGVQ

SEQ ID NO: 450911 - protein, 320 aa, unidentified
MSQNTSAIMNQNLTTVHTGLDIAKASLQLDLQSKSCDLSNTPPGHHQLVKRLATVPNVHVVCEATGGYERAVVAALHAAAIPVSVINPARVRQFARASGELAKTDPIDAAMLTAFGQAFAPKPTPPRSTVEIKMAALIARRAQLLELHVAERQRADNCVDPALRKLFTTWLSQMEKQIAKVEALIEALLAEQSTLANQVQRLDEITGVGRITAVTVLATIPELGQLNRRQAAALAGLCPYNRDSGQWAGKRCISGGRSEVRRALYMAALSASRSNPVLKPFYQRLIAAGKPGKVALTAVMRKLIVLMNHLLKNPNFTLAH

SEQ ID NO: 450912 - protein, 412 aa, unidentified
MDNTAYYVAGIDVHKRMLAVVVANARDRELQFEGRRFGTTISELQKLSTWLQERAVQEVVMESTAQYWKPVWFVLEGQFQLWLAQARSNRGPRGRKTDYRDAKRSVSRLLSDDLILSYVPDAEQRGWRTLTRTKYQLRRDRVRLQSQLESLLEECQIKLSSVVSDLLGASGQRILCAIAAGETDPARLKALGDKRLRATDEELRDALNGQPQPLHRRLLKLYLERLNLIEGQIAELESMIAEAMKAHQDAVVRLSQLPGLGVDSAQQIIAEIGPRAESFPSAGQLASWVGVCPGLQESAGESSSNRSAKGNRAMRRLLNQLAHAAVRKRDCYLQIVFKRLSPRLGYAKAVWAIAHRLCRLIWKVLHEAVQYVEYGPAVSALTLKRRKQRLVTQLAKLGYSVQLTPILARAGS

SEQ ID NO: 450913 - protein, 417 aa, unidentified
MEKKEKFVEYEQVIERGCGIDVHKKVIVATVRGTGIKTETRTFDGFTESLERLRDWLKECKITHIAMESTGVYWKPVYNILEEDFEILLVNARHIKNVPGQKTDKKDSRWISKLLLSGLLKGSFVPPRNIRDLRDLTRYKRKVIEQISSEKNRIHKLLEDANIKLSSVVSNLSGATATKIIDAMIDGQEDINELVKLRHGKMHCSVEELAASLKGKLTGHHKFMLQTYKDSIESKEAIIKKIDDQIEKQLEESELLLDAELLATIPGVGKEGAAYILAEIGDNMEQFPSEQHLASWAGMSPGSNESAGKKKSSRITHGDKYLKVLLVQCAWAATRTKKTYLRSKYDSLVGRRGKKRALVAVGHKILIAAYFILKDKVAYKELGPEYLGELKKDKQVTKHLKILKELGVEVEIKENVA

SEQ ID NO: 450914 - protein, 429 aa, unidentified
MNSTQNKKIEQVKETTMIVGIDVGSEKHYFRAFNWRGIELTRKPVAFSNSMEGFNSFYNTIVELMQKSELEEALVGIEPTGHYWFDLGQFMGEKSIKFVMVNPHHVHKTKELDDNSPSKNDRKDPRVIAGLVRDGRYFYSYMPTGVYAELRNASNRRFVLVEEQTRAKNRLQKWIAVYFPEYKGIYTHIDAKGGLLVLKQAPTPEEIVKLGEEGIIKIWKDAKLRRNGNKKALKILNAAMRSIGLRTGLTEARMEIQDLIEDYELQTKRLERVNDLIKELCQQIRYADKLLEIKGIGITTVAGFIAEVGDITRFDSTKELQKLAGLELVADSSGKHNGKTKISKRGRKRLRYLLFEAAISVVGKNEEFKEIHRYYTTREKNPLKKMQSLIAVACKLIRVFHVILTKGVSYDASKMLEGIRHPGEQLKAT

SEQ ID NO: 450915 - protein, 351 aa, unidentified
MEKVIKQCVGIDCAKEKLDVSFAVMNSSFDSSILSTTVFTNDRAGWKKMIKWAEQLEIKDLQTQFVIEATGVYHEQVCLYLFLLHRQISVLLPNKVKKFAGTLKIKTVNDRVSAQTIAQMGIEKKLDSWQPPHEVFNLLRQLTRERHQLIEEKTQILCELHAEQSGAWPNKKSIQRMKQRINLILKQIVETENEMKEQVNEHPWLKEKLAHVCSIPGIGFLTAVTVVAETNGFNLVRNKKQLVSYAGLDVIEKESGSSVRGKPRISRRGNKQIRRAMYFPAFSAIRAKSKMHHLYDRLEAKHGIKMKAAVAVQRKLLELMFLLWKKNENYIENYDIKKLEQPKKAALIEMA

SEQ ID NO: 450916 - protein, 433 aa, unidentified
MLKINYMSTLFVGIDVSSKSNVVFAMDFDENKYISSLFGNNQPGADKLAGMIAECMQHHKNLDTILIVLEATSVYSVHISNFLATSEILMPYKPYVFCVNPKATANYRKSYIGLEKTDPTDAFLIADFGRVGRTKKLKPWRGGQFIALKRLTRHRMHLSECITREKTYMVSNLYLKFSELQLLEGDDKPFSNIYGSTSSSVLTDFLSPQEIIDMPEEDLLSFLAEKSRNRISDISKTSELLRKAARDSYRLDKCMYEPLNISLASSFNCIHAYQKEIKLIEQAIEKCINGMNPNALTILQSIPGIGPVWASRILSEIGDITAFHSSDALAKYAGLYWPKGDSGDFTSEDNKMSKAGNPYLRYYLGEAANSVRKHSTEYADYYARKYAEANKHQHKRALALTSRKFVRLVFGLLVKNQLYTGEKLDTEYNIESN

SEQ ID NO: 450917 - protein, 369 aa, unidentified
MQKTLYIGLDVHKESIAVAIAEQCREAPVRFVGTIPNTPEQLAKLARRLSGDGETLEFCYEAGCCGYGVYRTLKGLGHGCLVAAVSRIPTKPGDRVKTDRRDAQKLAVLHRSGDLTAVWVPDEVHEAMRDLVRSRIDATRELVRARQHLLAFLLRYGRTYPGTKNWNGVHRKWLASQVFEQPAHQCVFQDYMEAIQTAQERRDGLMRRINDMIPSWSMGPLVGALRGLRGFDTIASVTLVASIGDMSRFETPRKLMGYVGLVPSEYSSGGNVARGRITKTGSRDARQTLIEAAWSYKYPARVAADKMAILNKLPKRVRDIAWKAQSRLCQRFRKLQARGKKPTVAVTAVARELSGFIWAIGREVHPATP

SEQ ID NO: 450918 - protein, 369 aa, unidentified
MEQCSEVFVGIDVAKMRNAIAVADGERGGEVRYLGEVDAGPESMRRLIKRLAAKHERVHFCYEAGPTGYGLYRLITDLGHPCTVVAPSLIPRKPGDRVKTNRRDALALAKLLRAGELTAVWVPDAGHEAMRDLVRARAAAVESLRVHRQQVSAFMLKHGRIYPRKTGWTMRYLRWLQEQRFEHPAHQIALQEMVEAVRIAKERVARIETVIAEFVPSWSLGPIVQALQTLRGVDLIVAVTFATEVGDVGRFENPRQLMGYLGLVPSERSTGDTVRRGGITKAGNGRVRHMLVESAWTYRHPPKIGKEKLYRLEAVPPRVREIAWKAQSRLTARYRALSGRGKKATVVCTAIARELVGFMWSVAREARAT

SEQ ID NO: 450919 - protein, 354 aa, unidentified
MTQLTATLPSLTIGLDVGDRTTHVCVLDGARRVVHRGRCATRRVEVLRELQAFLGARVILEAGSQSPWLSAALREQGFAVQVADPRRVALISKDPRKTDRRDAEMLARLGSGCPELLGQVHHRDERTQADLSILRARDLVVRTRTKVIQQVRGLAKAFGQRLPSASSAAFGRRVADSIPQILQPAIAPLLALLEQLEATIRGYDAQLAELARTRYPAAAVLQQPDGVGPVTSVAYVLTVADPRRFRDSRHVGSWVGLCPAQRASGDSHPTLPISKSGDGYLRRLLVQCAQYILGPFGKDSDLRRYGLRLKARGGAGAAKRAAVAVARKLAVLLHRLWITGQPYEPLRASAAPAT

SEQ ID NO: 450920 - protein, 431 aa, unidentified
MSKYLNSPVVGIDVSENFHMVSILSPDGSLYCRIFKIKHNLDGFNYLLVKIEEVEKKFSMKTGIFMESTGIYHLSLFHFLKNKKLEVFLINPLITNSSKNTDIRKEKDDKKDSLSIARLGKFQEIKAYSYFEPEIFSLRSLIRDYYKQVDIRSIYKKKLAADIHLVFPGYKNIFNSMTSKTSLKILKKCPAPQALLCADKDELINILSSYSKRGMVWANTKYSELIKVAEEAEIIGFIVDGLITRIINNITMIETLNEQIETILLEISNTVNSEDFPDDIKHNIKLLDSITGIDFISAVSLISEIGDYKRFSKPKKLVAHLGVDVSVNQSGKFKGTNNKMSKRGSKVARRVLFSAAIASIRNKSNGEPVNKVLKDYYEENQGNKAKKVALGAIMHKIVNYIFAVLRDQNEYIERSPKIHKQMYLLNLEKTA

SEQ ID NO: 450921 - protein, 387 aa, unidentified
MQIVVDRPQAPTAIRTDLGAIFISLELSRSTWLITSLSPGGGERMSKHSVRGGDVAGLLGRFAQIQEKARARTGRSFPIIMLQEAGLDGFWIHRMMQAQGIESHVVDPASIATSRRRRRAKTDKIDGEALVRALLAYKRGEPRVCAMVKAPTPEEEDRRRLCRERKVLTAERVRHVNRVKGLLFSQGIVGYEPLRRDRRARLEELQTGDGRPLPKHLKAQIRRELDRLELLLGQVKAVEAERDALLAAEHTVTPAPAAMLLDIKGIGPEFTAILWSEGFYRHFENRRQVAAYAGLAPTPWQSGSVDREQGVSKAGNPRLRTTLIQLAWLWLRHQPDSALARWFHERVNLNGGRLRKTTIVLARKLLVALWKYVTAGVVIEGAVIKNA

SEQ ID NO: 450922 - protein, 338 aa, unidentified
MVYGAIDLHMRYSQVRIVDESGTVLRDQRIVTTGERLVKAFDAFRPVRIVLEAGSESEWVAQALEAAGHAVIIADPNYAPMYGALRRKVKTDRRDAAALAEANRRGWYRPAHRRSATQRATQQLLRTRRQIGRMRSGAAALVRSLLKQEGCRIGTCAAEHLPTRVAALALPAGVGAAVQPMTRMIATTTKEIAALDEQLRRRAARDPIVQGLQTVPGVGVVVALTFRAQLDRIERFAHAGQVSAAIGLVPHEDSSAERRHRGHTTKAGSSELRCLLVQAAWSCWRSKRSGGLRAWAEQLAARRGRWIAVVGLARRLSRILYALWRDGAAFDLTKLAAA

SEQ ID NO: 450923 - protein, 391 aa, unidentified
MPEDAPRPAQAAIRTDLGAIFVSLELSRRAWLITSLSPGGGEKMSKHSVPASDVSGLLRRFAELRRKATARTGRDFPIIVIQEAGLDGFWIHRVLQSEGIESHVVDAASILTSRRRRRVKTDRIDGETLVRTLMAFKRGEPRVCSMARAPTPQEEDRRRVCRERRTLVGERVTHVNRIKGLLFAQGIFGYEPLRKGRRERLEDLRTGDGRPLPVHLKAQIMRELDRLEVLLEQLKTVEAERDALLKPASDEAASPPAMLARLKGIGPQTAAVLWSEGLFRQFDNRRQVAAYAGLAPTPWQSGSIDHEQGVSKAGNPRLRTTMVELAWLWLQNQPTSALSLWFHERVRRLGGRMRKTTIVALARKLLIALWRYTTTGVVIEGAAMKAAPTTI

SEQ ID NO: 450924 - protein, 373 aa, unidentified
MFHFTTLFIGMDVHKESFSLCYYDMMTNQFKHSTKVGPNVSYIVNYVNELRRLYGQDAEVLCGYEAGCLGFTLYHQLQAHGLPCIVMAPTTVMKEGSKRVKTDKKDAAQLAKALAFRSYRPVHIPTAEDEQVKEYIRMRTDHKVALKKIKQQVLAFCLRHDFRYTEGSSNWTQKHVRWLHSLNLDGLYAEILTEYLLTYEKLVDQIERYDARIEQLGQSDSYQEKVSQLFCFIGIKTLTALSIVTEIGDFNRFATAQHFASYLGLTPSENSSGDKERRGAITKDGNSHVRRLLIEAAQSLAKGTIGYKSKELKRRQSGNRVEVIAYADKANERLRRRYRTLVLGKNKKQNVAKAAIARELSGFIWGMMTGRIA

SEQ ID NO: 450925 - protein, 428 aa, unidentified
MNETDRIRLGEFRQFKKEVRGSGEYLIVGIDVAKDKHHAFFGMAMGKTLLRRLVFENNLEGFEKLLVQVEALKVQQGLRQVVFGLEPTANYHKPLGEHLIKCGHRVVFVSGVAVKENRKSLDGRWDKHDVKDAANVADLVSQGKCLFYEYPEMALRDLRDLLSLKRRLRRIEHGHRVRIRNHLVAEYFPELDRYYEQSQKVSLAVVRWCLDPSVIAGMEYGKFEQLVAPGRERLYQGRRLELIWKMAVDSVGCEVGEGAEFEAKVMVEGLRQIRESLRALDEKIQEICSGFAEYEFLLSIPGFGPDVSSKVLGAIGDPFRFQSGPQVLKLAGYDLSAERSGKSAEVAPAVISKKGKADLRYALYQAALIASVRDRHFMVYFSNRLRGREREPGIKTKMRVKLAAKLLIIAWTLMKKKEPFNPDYLKTA

SEQ ID NO: 450926 - protein, 465 aa, unidentified
MTPRQGKRFRTSDPVEDLTVTQRHAAGIDVHAAVHFVAVAPADVPADFVNPDAKLPAGVRKFGATTGDLETLAAWLKACGVTTVAMESTGVYWIPLYELLASRGLDVILVDPRQTKHAPGRPKSDVLDCRWIRRLHSYGLLTASFRPADEIVVWRGFQRQRDMLVRYAAQHVQHLQKALEEMHVKLTEVVSDIVGQTGMKIIKDIVRGQRDALQLAKHRHEKCQATAAAIAAALYGTWRKEHLFALKQALQMYEFYQRQLRACDQEIEACLRGFADKSGGAALPPSPRRQQPRGHAPRFGARALLFRMAGVDLTVIEGISETTALVILSEIGLDLSRFPTAKNFVSWLGLCPQHRGSAGKIFSRRLRRGANRAARALRMAAQGCHHAKNALGAFYRRIQARCGGAKAVVATARKIAERVYRLLKYGQEYVRQGEQAYAEAYRQRTLKGLARKAESLGYKLVAVTE

SEQ ID NO: 450927 - protein, 383 aa, unidentified
MKKNIKTTGMKTASVVDVAAAQSTPSDAGAAAVTPQYHAVVGLDVGDRQSHYCVLDLNGGVVAEGAVKTTAASLRVLFEGKGRMRIALEAGTHSPWISRLLIALGHEALVANPRKLRLIAESDAKHDRADAQLLARLAHVGPALLSPIHTRSAQTQIDLTLIRAREVAVQTRTKIVNAVRGMVKSTGHRLPASPTLTFARKATEACPETLEAALLPLLRLVATLTDDIAAYDRLVVEKARAYPETEAIQTIHGVGALTAVAFVLVLNNDRARFKRSRDVGCYLGLKPKQRDSGMRSPQLGITKAGDPLIRRLATQSALYVLGPFGRDSALRRWGLVLASRGGKNAKKRAVVAVARKLVVLMHRIWITQEAYDPMRGVRVRPAA

SEQ ID NO: 450928 - protein, 397 aa, unidentified
MYIVGIDIAKRKHEAAVIDGEGTVIIKPFSFTNNCSGYNRLLAMLTKAKLPLDEVSFAMEATGHYWLALFTRLQKEGFRVQVINPVQTNSIRNFYIRQAKTDPRDALLIAEVIRFGHFSESTLHPENIYELRELCRGRHAIVSMQADVKRKVVALLDQVFPEYETAFTNLFSDTSMAILQTCPTPKELSEMPLEELCHLIEVSSHKRFRMAKARELQELARNSFGFAMAGDVFSTMIRLYAKHLDFLKQQVREMDRKIAEIMETLDTPITTITGIGPTLGAYILSEIGDISRFSSAAKLAAYAGIDPTMRQSGEYNGVRNRMSKRGSPYLRHAIWLAASSAVLHDPALKLYFQKKRDEGKPYMASVGHACRKMVSIIYAVMRDNKAYTPYIPNEISA

SEQ ID NO: 450929 - protein, 462 aa, unidentified
MQEKRESEAGRNRRRQLQGLPLMRADVAGIDIGSERHWVCAPTTDGSGREIADFGATTAELIRMAEWLQARGVRSVAMESTGVYWIPPHEVLEAHGLEVLLVDTRQLAQVPGRDKKTDPTDCEWIQRLHSCGLLRGSFRPAEAICMLRTLVRDKATLVAESADWMRRMQKSLDQMNVRVHRAVSDIDGTTGMAMVRAIVEGERDARKLAQLRDPHCRKSEAEMAEQLNGHWREDHLFSLSQAWKMYEAIQQRMADYDDEILRKLGEMEQEGQRGKQAPPLSNTNKARKIKNRGQEPKRQALYRMSGVDGTQIDAIGVETVEVILSEYGPDLSRFPTEKQFVSHATLAPHVPKSGGRPLKKKKRHSASARVANVLRMAAQSLRHSDTALGAYYRSMAQRKGADIATFGAARKLATLAYRLLRWGQPYVDEGAEAYEKRYQQQRIRGLQSRAKQLGYQLTPLTT

SEQ ID NO: 450930 - protein, 424 aa, unidentified
MNLTQNDRLNQVTADTLVVGVDIGSQDHFARAFDWRGFEFSKRAFRFRNTNVGFLSFLRWLYELQSKTDTNKVIVGCEPTGCYWLTFQKFLKDHGVLLVTVNPHSVKKCKELDDNSPEKSDLKDPKTIAGLVKDGRFSTSYLPSGVYAEIREASVCRDMIMKQHVRLANQIQGWLQKYFPEYFECYKDWDSTSGLMVLKNAPLPQDIIKLGAGGINQIWREAKVRAAGIKRATTLVEAAQNSVGLEGGEAARLEIWILVNDYASKVEQLDRLDAFLKEKIMEVPNVEKLLAIKGVGLSTVIGFVAEVGDIGRFTDPRQVQKLAGLEITKISSGKRKGQPGISKRGRRKLRRTMYESARALINWNPAFLDVFLYYRNRERRPLGSMQAKIAVACKAIRVFFVIMQTGCDFDEERFRKDILRPEAA

SEQ ID NO: 450931 - protein, 406 aa, unidentified
MEDNSATNFIQEVLPMSLYFVGIDISKYKHDCCILSAADQKVVSKFTFKNDLQGFEQFLSALSSLSSPEDIRIGFESTAHYALNLELFLENAHHSFMEINPVLIKEYKKSTSLRRTKTDSVDCESIAHWLMTVEYKPHSKGFYHAYSLKSLTRLRDKLVRQRSFYLVKITNVLDHTFPEFKPFFHERLSKTALYLLETYGSAERMSRMDSASYDKLRSLSRGKFSPQQFLRLKELAANTVGVNNSIFDTELNSLLTLYKSLVKEICILEEEINRLIREVHPHYMSVPGIGTISAAVIYSEYGDISNFSSPAQMLAFAGIEPGINDSGTESHKGRMVKHGSSQLRYVLINCCLPLIRFDMTFAAYYAKKRAEGKPHRVAITHVAKKLVRVIYALEKQGIDFNAQKLR

SEQ ID NO: 450932 - protein, 325 aa, unidentified
MLFDIVMSSFWKWRSKTILNLSLNLLKEILAISKKYANENFHPSLIEFVMEHTGIYNTLLIACLAEHHIVTYVVPGLEIKNSLGINRGKNDRIDARRIAEYGVRFSDKLKPYSLPDKSLEKLKMLNTKRAQLVKIMSQLIQSDEDTKKFLGEESYRNMRFYINPVIKELSASIKMIEEEMLSIIKIDEQLFENYQFAVSVPGVGKVIAIAFICATNNFTKFETAKALGSYCGVVPFGRESGKYRGKEMVSPIANKKLKTLLHLGARATISGNNQFTKYYQRKIMDDKKNKMLALNNLANKIVKTLFACVKNKEMYKPDYVHTLAA

SEQ ID NO: 450933 - protein, 311 aa, unidentified
MNTKNDPIHYVAIDVSKSTLQVQDDRRAFAVGNDPNGHRKLLDYLKACANPLVVFEASGGYERDLLRFLHEAGIPLAMVNPARVRDFARSEGVRAKTDPIDGKMILAFAKSKALRPVEAPSEACVKLAALLDRRGHLVEQLAREKNRLQNSEAFIHRSIKRMMRILEKEITAIQEANEKLVGSDPGLKSRSEIIQSVKGVGQVTAWTLLAYLSEIEELNRNRLVALAGIAPFNRDSGKFSGKRSILGGRAKVRKCLYMAAHTAATSNPVIAAYVQGLRDRGKPYKCAIVAAMRKLLIHIQSLMKKAQLSPC

SEQ ID NO: 450934 - protein, 392 aa, unidentified
MIVLGADMHKGSHTIAAVAAATGEVLGEKTVAVSERGFVALLDWARSVGEQRVWALEDCRHVSGSLERFLLRSGERVIRVATKLMADARRGARSRGKSDAIDALAVARAALREGLDGLPAAQLAGPELDLRLLVDHRERLVRSRVAINNDLLWHLHDLWPELKLPGSGLVAKKWSGAVGRRLARAEQTARVRIARDELGRLRELTVAVDALEAEISDLVAQLAPQLLAEVGFGPLTAGKLIGEIAGAHRFASDAKLARAGGIAPIPVSSGNTNRHRLDRGGNRQINAAIHRVAITRARCHPETRAYLDRKRAEGKSTPKRSAASSATSPGASGTCSSGPTRSEKHRHHHQFLDIGAARGTALRVGVRRARCRATRQWGCGRALLRGGRWRLK

SEQ ID NO: 450935 - protein, 352 aa, unidentified
MQYLGLDWAYRRAAWCAVGDGGAVSGEGVVAADEDGLARLVLAVGVEVRACVEMMSGAVWVRDRLEAAGWEVQVAHPRKVRDVAPLACKTDKVDARVLAELCRRDLVPALWIPSIDDRALRERLRRRMHLVRMRASAQNRIFGLLTQWGLRVSLKRLREPDAMVLLEGRGVPEPWRASIAEALAVIDLLDARAAPFERELRALAAADRRVMLLRTIPGIGDLLGLTIVSEIGDVSRFSSPRKLIGYAGLAPRVSQSGDRSRTGALSKAGSRTLRWAAVEAAHQSWRPNNPWHELYADITKRAGKNPAKSAVARKVLIAAWHVLSREQPFRAPRPRSPDSTTVSASSRCFLAA

SEQ ID NO: 450936 - protein, 505 aa, unidentified
MLGWSREPAATPLVTGNPLIPFGRVLQSRYSRARCRFALFGIVEAAMAQRKQKTSQSTPPLPPQLAAVNLHAAGIDIGAEGHFVAVPPSDDPQPVRGFGAYTGDLEALADWLTTCGITTIAMESTGVYWIPLFELLETRGFAVLLVDPQQVQKIKGRPKSDVHDCQWIQRLHTFGLLAGAFRPDDQVCVLRSYLRQRAMLLTYAAQHIQHMQKALTQMNIKLQHVVSAITGVTGLAILRAILAGERDPAKLAQLRDYRCKHDEATIARALQGTWRDEHLFALAQAVALYDVYHQKITECDRHIEAYLQTFADRSEGQPLPPPPRPRKRGGNQPAFAVREPLYRISGVDLTQIEGIDETTSLIILSEIGLDMTRWPTVKHFTSWLGLCPHHRVSGGKVLSRRTKPCANRAATALRLAAAALHHRQSALGAFFRRMKARLGAPKAITATAHKLARLIYTMLKHGTAYVRQGMDEYEQQYHDRTVKNLIRRAKILGYTLVQAPEGAPG

SEQ ID NO: 450937 - protein, 325 aa, unidentified
MDKFSDYYGIDISKDVFDVMDSNGKHVQYSNNQAGFKSFLRAMNKNGCAVMEATGVYHTQLADYLFSKSVFVSVVNPLVIKRFIQMNLRRIKTDKADAEMICTYAQSHDLKAYKPSPVYVKESRIICEKIDLLLKSRTMFKNRLHALAHKSDKQRSILITPLKMTIASLTKQIEKLEKELKKLMEENDSDLFTRLQTIPGIGKSTAMFMIVLSDGFKKFESAKQFTCYIGMSPVEKRSGSSVRGRSGISKQGNPKLRNLLFMCSFNACTTNKACRELYERIVAKGKSKKLALIAVANKLIKQAFAIAKSGLVYDPEFRSVQPKLN

SEQ ID NO: 450938 - protein, 411 aa, unidentified
MQVVYERCAAIDVHQETAVTTILITQANGHVQKETRTFTTMTSDLLRLDDWLQERGVTVVAMESTGVFWHPIFNILEEGREIILVNAQHMKAVPGRKTDVKDSEWLADLLRHGLLQASFIPPKPIRELRELTRYRKTLVQERNREVNRLQKVLEGANIKLAVVATDVLGKSGRDMLEAMMGGEQDAEVLAALARGRLRAKLADLRLALEGRMQPHHRFLLQRILAHIDFLDQSIAQVEQEIEQRLRPFEEAVKLVQTITGLQATTTAGILAEIGIDMTRFPSDKHLASWAGVCPGNKQSAGKRLSGKTTQGNTHLRALLGEAAWVAARTKGSYLSAFYHRLARRRGKKKALVAVEHKLLIIIYHVLRTKKPYSDLGAEYFDHLEKGRLERQHIHRLEQLGYTVTLTPKEAA

SEQ ID NO: 450939 - protein, 352 aa, unidentified
MEIISMDSHKRYSQVCVQDSKGRFLCEQRISHGKGNILNFLSKWRQGDSVAVETIGNWYWIVDEIEAAGMLPQLVHAHKAKLMLGSVNKTDKLDARGLNKLQFAGTLPTVWIPPADIRDMRELPRTRMVFANLRTRLKNRIHSVIDKYGLHTDFADISDIFGGKGQEQMAVTIKKLPSQTAYTLRCLLKELDEVAEQIERIEKRMKKTFGETEEVKRLMTLPGIGFILAVVIALELGDIKRFSSPERLASYSGMVPRVHSSGGKTRYGQLRSDVNHYLKWAYSEAGNSIAVNHKRLADRHVSKLYSRIRSKSGHAKAVGAVGRHLAEASFWILTKNVDYKEPKLKSFSSTAV

SEQ ID NO: 450940 - protein, 353 aa, unidentified
MRKRYNTVSFKNQTVFVGIDVHKKQWTVTIRHCGLAQKTFSMDPEPEKLADYLKRNYPDAEYRSVYEAGFCGFEAHRALCKLGVQNIVINPADVPTSGKEREKKNDNCDSRKLARELENGSLESIYIPTPENLMLRNLKRREDQLVQNLTRVKNRIKGHMYFNGIKFISWAGGSLKSMEEEAQKRNDWTLLSDLRELRFLRTERLQVIRDQRACLKLLDRGEIQENIQSVPGIGFRTGFALQAELWDMNRFKSKDHLNSYVGLAPHVFGSGEDVVVKCGNRKKKQLHYLMIEAAWRAVRHNLEYRARYGALLGRGMSSQKAIVVIAKKLMETIRVIWLQDRKYINFLEASKVK

SEQ ID NO: 450941 - protein, 372 aa, unidentified
MSKVIMIGCDLHEESMILKIAEDRQTPETRTVKNTASGRRAMIGDLRRRAKAAGEARVIFAYEASGQGFGLYDQLTAAGIECHVVAPTRIARSPRGQKEKTDEKDALDLLELLRGHVLAGNRLPSVWIPDAQTRDDRELVRMRLDVGEKITALKAQVQSLLKRCQLRRGPGLGKGWTKAFRGWLQRELAGPTIAGRSPLGTGGQAALASLLRQLQSLEEEEERLNQQVAALACSPRYEARLREVTKLCGVGALTAIVFLSELGDLSRFANRRQIAAYLGLVPSSNESGQRNDRKGHITHQGSSRVRKVLCQATWARVRYNESEKAIYERIKAKNPKKKKIAVVASMRRLAVRMWHLGRAELDSAACGIAASG

SEQ ID NO: 450942 - protein, 367 aa, unidentified
MFKNSTAFVGLDLGDKRSNVFILDQEGEPIEETRIPTTEPAFRRKFASLPPCRVAMEAGTHSRWASRLLEQLGHEVLVANPRRLRLIYENSRKADEADAEHLARLARLDPQLLSPIRHRGPEAQAHLTVIRSRDSLVRARTLLINHVRGSVKGTGARLRACSADSFHHRVAPTIPTELAPALMPVLETIASLTAQIHAYNRQIEQLCQEHYPEARHLRQVSGVGAITALAYVLTLDDPDRFRKSREVAPSLGLVPKRDQSGSRDPQLRITKTGDSYLRRLLVGSAQYILGPFGPDCDLRRWGLKLAERGGKNAKKRAVVAVARKLAILLHRLWVTGEVYDPFYHSHPDQTSLTQTDLRVRQPEAVCA

SEQ ID NO: 450943 - protein, 353 aa, unidentified
MSSLFGTGKGPVMQKNFYFIGIDIAKETFVASIYHKPDEPVLTKEDIPNNPKGYDQLIIWLGENRINKDNCQICTEATGVYSQGIAYYLLVQGYQVSVESPLKVKRAFHPAGHKTDPVDSRQIAEYAYRFCDQLIPWQPKEELLEKIRQLLSVREQFTKQKVAIKNAMGAYSQQKVQVKLINKAHKETLAQLEKQIARIDKELDKLIREDPDILSKFNKLDSIPGYGMLLSAHLLVMTESFSKISDYKRLAAFIGIVPYKYQSGTSIHRKDSIRHYGPMASRRLLRLAAQSVATHDSSFRQYYLRKLAQGKAKALVLNNIANKLLKVSCAMIRNNAGYIKDHHSVHPMYVKSA

SEQ ID NO: 450944 - protein, 343 aa, unidentified
MIIGCDFHPSWQMISWLDTESGETGERKLVHASGEAEQFYAGLTGTVRVGLESTGNSHWFVDMLIEMGHEVWVGDAAKIRAMQVRKQKTDRRDAAHILDLMISNGFPRIWTPSKQERDQRQLLIHRYKLVTLRARVKNELQHLALNKGMQKGRSLWSKEGQKLLLEMPLDYWAGARRENLLELLKSMDQKITVLDQAVKKAAEENEKSRLLMTQPGVGPITSLAYVLTMGDVTRFKRGKKVASYLGLIPREYSSAGKQRLGAITKQGNRFMRMLLVEASQVVVRYDPGFRSEYLHLCHHKPKAVAKVAAARKLAIRLFWMLRTNTPYPEVVRIESSSRVPLDE

SEQ ID NO: 450945 - protein, 410 aa, unidentified
MRHYLGVDWADQTHAVWVVDESGTKITARTVTHTAEGWGEWGRELDAGRAQGIAVWAAIERPDGRVVDLLLDHGVVVYPVNPKALDRARDRFRQSGAKSDPFDARVLADFLRTDHGHIRPLQPSSEAAQELKLLTEDCQRHIRQQTRLVNQLTATLKAYYPRALEIAELTSALAREFLPAYPTPAALTALTERQWQRWARAHRLTEARTGELWAVLRQPQLPVPAHVVRAKARLMRALMEQLMPVMAAVAQYRKAIDDFFASIPAAQWARTLPIGKHGITAPTLWARLGDAPGRWESFRHLQAHAGTVPVTKRSGKQQRVVQFRFACDKALRYVVDQVAFLSLLSSAWARAYYDQQRARGHSHRQALRALGAKWLKIIFVMWERHVPYDEQYHLATMTRQQLRPRQKQIA

SEQ ID NO: 450946 - protein, 455 aa, unidentified
MPSKKGSPAFSVVHPQAAGIDIGATFHIVAVSPDCDPEPVRQFQSFTTNLHSLSRWLRTVGVTSVAMESTGVYWIPVFEILESDGFEVILVNAREVKQVPGRKTDYNDAQWLQKLHQFGLLRASFRPSEHIASLRAYLRHRERLIEYSAAHIQHMQKALMQMNLRLHHVVSDITGATGMRILRGIINGERCAAKLATYRDIRCKESEKTITAALTGNYRNEHIFALKQAVELWEFYQERVRECDTRIEKAMEKLNQKKVTPDTPLPKARHRTKQHHEPAFGVRNALYTLTGVDLTQINGFGPYTALRLIGECGDDMSKWATEKHFVSWLSLSPGNKLSGGKVLSSKSRRTKNRATTLLRIAAVNVGKTETALGAFYRRLSGRIGKAKAVTATARKLAVLFYSTMKHGMNYVEPGAQYYEAQYRNRVLLNLKKRAKRLGYQLIAEPAPESCAVEVS

SEQ ID NO: 450947 - protein, 369 aa, unidentified
MSKQRNKAVSLPVIEPNAAGIDIGATEIFVAVPADRDPEPIRSFPTFTVDLERLADWLQQCQIRTVAMESTGVYWIPLFQILEKRKIDVRLVNAHHVKNVPGRKTDVQDCQWIQQLHSVGLLRGSFRPDDEICAIRSLWRHRDNLIQLATLHLQHMQEALDQMNLQIHHVISDLDGTTGLAIMDAILAGERDPHKLAQLRHPRVRASQETIMKSLVGDYREEHLFTLRQSLNAYRYYQQLIQEVDLQVKQMMHRLPSNVADGEKPPKGDKPRPRKIPWRNEPPQLRDDLYRAFGVDLTEVPGINTLTAQMLLTEIGPNLARFPTAVAFCSWLRLCPDPKISGGQVLSSRTRPTKNRAALALRMATQGLH

SEQ ID NO: 450948 - protein, 373 aa, unidentified
MRKHTIFVGLDVHKDTIDIAFAEGGRDGEVRYYGTIKNDIKSLEIVIRKLRSKDRDLRFIYEAGPCGYELYRYLVGNGLDCSVAAPSMIPRKSGSRVKNDRRDSMSLARLHRSGELTAVYVPRPEDEAIRDMTRGRADAVKAARVAKQQLLAFLLRHGKCYEGRTYWSKAYWHWLATVKMEHRSQQIVLHEYMHVVREASERVQRFTDQIKELVSSWRLVPLVTALQSLRGVSLIVAVTTVAELGDLTRFESARQLMAYLGLVPSEHSSGTSVRRGGITKTGNSHVRRALVEAAQAYRLPAREGVVLKARLQNVEQEVRQISWQAQVRLCSRFRRLMQRGKEQNKVIIATARELAGFMWAISLTLTNGSKPSL

SEQ ID NO: 450949 - protein, 321 aa, unidentified
MSNIIGIDVSKVDFYASFNEQDQSKLFQNDKRGIKIFEKYLNKNNFKKDQTIIGLESTGIYHLPLSHKLTQAGFTVKVINPLITKKQNQTTLRRVKNDYKDASLVRYCTLNGAGYEFIDTPEMLTLKSLVRLRDNLSNMKNVLNLQQKSLEYKEKNLDISVSKANHRLNKSVSVEIEKLEKELKEYRKAEQKLLQTIPGVGPITAVSFISEVGNVSRFPFSQKLIAYIGLDSRVHKSGTSINGKGYISKRGNKILRTRLYNACSVTVLRPNIFQDFFQKKRSEGKPYKVALVATMHKMANVIYAVWKNNTPFQDRRGLTGI

SEQ ID NO: 450950 - protein, 357 aa, unidentified
MKIIGVDLHTRQQTIAMLDDQTGELVEKQLSHEGEQVREFYAGLPKPVLVGLEATGSMHWFLRLLEELAIEFRVGHPAKIRAAEPRKQKNDRRDARLLLTLLKENRFPAIWMPSREQHDLQILLRHRDQFVRIRTRVQLSLQALALSHGLRRGHSLWTCGGQHTLRALPLAAHASEQRDTLLALYPQLQGPINDLDRQVEREAQQRSPSRRLMTHPGVGPITALATEVFLGDPQRFADGKAVASYIGMIPRERSSGGRQRFGRISKQGNSLLRFLWGEAAIHAVRRDPELRRFYRRKLVQKGMGKARVAAARKLGIRLWIMLRDEIDYTEFCRRGHQRRQGSGAACAGMLHGDSGLN

SEQ ID NO: 450951 - protein, 387 aa, unidentified
MTARTVSNPPATSHDEAVRCLFAIELSKDSWIVAYSTPSSDKISRYTLKPCDWKGLLELIERVRSRVVHELQRPVEVISCYEAGYDGFWLHRLLQAHGVHSHVIDPASLQVNRRARRAKTDRIDAEQLLRSLMAYLRGEPKVWSVVRVPSVAEEDARRLHRERDRLITERVSHVNRIKGLCAIHGIYDYNPLRSDRLQQLDHLRTVQGQPLPQALKAELWRELLRLELLLKMIAGVEKERDAIVTDNGSAHHNASKIKELCRLRAIGPEFASVLVGEVFYRSFNNRRQVGSYIGMPPSPFSSGNTVREQGISKAGNPKARKTMIELAWLWLRYQPDSALSIWFCQRVGTTKGRIRRIMIVAMARKLAVALWRYLETGMIPQGAVLKG

SEQ ID NO: 450952 - protein, 290 aa, unidentified
MNSSSKKPSYTGKDIFIEIDVHKRTYSVVSVVEGIVVKKWQTAAVPEQLARQLKSYFPKANLYSAYEAGFILHRRLEEVGIKNIVVNAASIETTVHNRVKTDKRDALKIASLLEVGRLKGIRIPSEKEEAQRLLTRTRQQLIEERTAVKNKIRMKCHQIGLIAADEQRKMSYQLVQELLEKSPFQKLNLVIEAYWQVWKALDAQIKKLDEELKQQAEEDPNEKIYRSAPGIGPLGARILSNELGDMSQFNKERQLFSYTGLTPCEHSSGDSTRKGHITRQGNSRVRACVV

SEQ ID NO: 450953 - protein, 336 aa, unidentified
MRFIGVDLHTTQITVCYLRAAAEYQFKKYRLDEIENFLAGLEETDQLAVEATGNTRWLVGLVKEKVRRVIIVNPREFQVIKKSVKKTDQRDALNLARFLAVDMLPEVPAKSEEAEQVQRLNETRQKFIRLKTSLLNKIHALAVGRGRKLKKESLGSERALEGVLEQEWTAGERLELEIIIEQIGSLKQSIKRLDAALAEAAKNLVGFENLISLTGIGARSAGVLLSVIGEVEDFPDENKLASYFGIVPKVTNSNERVNHGRITKRGSKMGRTTLVQCTLVAIRYNSYLKKYYEQIKQRRGHGKAKIATARKYLGIIYNTLKNNWVFEDFNNFVLAE

SEQ ID NO: 450954 - protein, 368 aa, unidentified
MTTNQIPPTSSAEDSSTLGEVIKLGIDVHIEKYVVVMKIDGSAPQRAKRFTPEQFMVWAEELTEKCEQLHSCYEAGPFGYTLHRRLTKMGVTNHVIRPINWDEHGKNVKTDARDATQMVLCLDGYLRGNHRSFSTVRIPSETEEQHRSTTRQRQSLIKERKRLAAKARGHVMYYGGRLQGEWWKPRRWLGLSEQLEPHLLELLSALRTIIVVVEEQIVRLEKCLEEMTEVALPKGMGSVIFQQMEREVCDWSRFETRKQVGGYTGLCPSEDTSDKRRFQGSITKHGNPRLRHMLIECVWLLIHWNPDYRGIVKWRDRLLEAKLTKASKKKIVVAIARQFAVDWWRIRTGRITPDQLGLTMKALPATSA

SEQ ID NO: 450955 - protein, 346 aa, unidentified
MCQYVGLDVSLKEVSICVVDGSGNVLARGCVATDPDALTKYLATAAPDAERVVHESGQLSTWLTRELAKRGVPVVCIDARSAHKVLSARLNKSDRADAEGLAHLARTGWFVEVHVRSETSDRVRTLIGARERLLRMRKELEAHIRGVLKTFGFRMGPVGHARSRQSFRDQLAEATSNDPVLGLIAERMIPIHRTLCVSVETLEDELVALARKSDTARRLMTVPGVGAITALAFIATVDNPQRFRRSTDVGAFLGLTPRRYQSGEIDRSGRISKCGDAEMRRLLVSAATTLMTQVRRFSPLRSWAVRLSGRKGFKKAAVATARKIAVILHAIWRNGTEFKWTKEPVT

SEQ ID NO: 450956 - protein, 312 aa, unidentified
MENKVYVGIDVSKDKLDLAIRPDGQEWSEGQDDASLERLVRKLKDIAPALVVLEATGGYEARVAALLATAGVAVSVVNPRQVRDFAKATGKLAKTDRLDAHAIAHFAEAIQPQVRYVSDEEGREMAALMSRRKQLIEMMVAEKNRMHTCLPKLLPNLKAHIAWLEQCLEELDKDVQDKIQNSAIWHEKDDLLRTVPGVGKVVSFSLLAGLPELGVLDRKKIAALVGVAPLNRDSGKYSGRRGIWGGRGDVRSALYMATLSATRCNPVIKSFYQAMVARGKLKAVALTAAMHKLLTILNAMVAQSKPWCPPIA

SEQ ID NO: 450957 - protein, 303 aa, unidentified
MISSSNSRDYAGKKVFVGIDVHKRTYSIVAICEDAIVKRWSMTADVEACRKSLLKFFAGALIRSVYEAGFSGYRLHRELSSHGISNIVISPSSVQKAPNDRVKTDTLDAQKMAAQLSKGFLRGIEVPTEERELQREVTRLRSQLVEHRVAITLQIKSKLFYYGITGPEDCRKISEKFIDYLEQLDLRAELKLSFKILVEQWRHVTSQIKEVEKKIREQSRTDEKVTEIYESVPGVGLITARVLANELGDLRLRFKNERELFSYTGLTPSEYSSGDSIRKGSISRCGPSRVRWILTEAAWVCIR

SEQ ID NO: 450958 - protein, 509 aa, unidentified
MVPDAGVCVIGEDLIGSVSIPFRRVTNERLRAATHPTSTCEDAMTKTVKKQQGRRQPSGKVNREMPMINANAAGIDVGANQHYVAVPPDRDEQPVRCFGAFTEDLHALAKWLQQCGITTVAMESTGVYWIPLYQILESYGFRVKLVNARQVKHVPGRKSDVQDCQWLQQLESFGLLTASFRPEDRICVLRSYMRQRQMLIEYGSRHVQQMQKALTEMNIKLQHVISELTGVTGLAIIRAILDGERDRLKLAALKQRQIKSDVTTIAKALEGDYRPEHLFGLRQALQLYDYFQQKIAECDDEIMKAMQTLESDATASLPATSQSPRKARSKHHPFPVASEQKLQRIMGVDLTRIDGINETTAQLVLSELGLDICHKWPTEGQFSSWLGLCPNNEISGGKVLRRGKRKVVNRLANALRMGAQSLLKSKSALGAYARRMRAKRGTPTAINATAHKLARLIYRTLKYGQEYVDIGQQQYEQRYKENTLKALQRKARQLGYQLTVTVHPSSVVP

SEQ ID NO: 450959 - protein, 408 aa, unidentified
MMLFVGDDWAEDHHDVYLMNDAGSHLASRRLPEGLTGIGELHDLIAEHAQRADEVVLGIEKDHGLWVTALATSGYQVYAINPMAVARYRDRHSVSGAKSDAADAKLLADLVRTDRHNHRLLAGDSVQAESIKVLARTHQNLIWMRARQISTLRASLLEYYPAALRAFPNLGDRDRDKDALAVLGRAPTPEDGARLSLSKIVAALKAGGRQYAVDKRAREIQPLLRGQHLRAPAAVNAAYGATTRATVAIVVELTNQIAAVETELAEHFRKHPDADIYLSLPGIGVILGARVLGEFGDDPNRFTTAKCRKNYAGTSPVTVASGRKRAVLARHVRNDRLYDALDRWAFATLKCSPGSRAFYDQHRAAGDTHHQALRALANRLVAILHGCLRHHRAYNEDTAWAHRTPTAA

SEQ ID NO: 450960 - protein, 287 aa, unidentified
MNPFSYYVGLDIHRKSTSYCVLLPDGKLVREGKVASTREDLEAWARTVPGPWCGGLEATICSHWIYWRLKPYAAEMKMGQPAKLKAISEAKRKNDTLDARTLANLLRCDLFPACYVLSPEHEMLRRHLRYRSFLVRMEVMLKNKAAGMLIESGVLYDTRRLHGKKYFHALLDELDTTQLLDRELKQLIEFGRAELERLKAVDRGILGRLLSDPLLSERVARLRSIGGVGEVTALLWALETGDPARFPNEKHAISYCGLCSAQRESAGKIQRGPLSKQRNKFLQKLRS

SEQ ID NO: 450961 - protein, 341 aa, unidentified
MEKFIRTAIDLGKNYFQVHGLESEGGRSISRKVKRSKMHEFYSQIEPCRVGMEACGSAHYWARQLTAMGHEVVLIPPAYIKPYVKRGKNDAIDAAAICEAMSRPDMRFVPIKSADQQAVLMLHKTRELLVKQRTMAVNALRGHLAEFGIVAAKGIGRVDELLALAKADAALPHIAGAAVACMAQHLEGLDLSIETVDEEIAKAHRQNPTSRLLDEIPGVGTLIASVIAASVPDPGVFKSGRDFAAWLGLTPRQNSSGGKEKLGAITKQGNRYIRKMLVTGATSVLRVAGKRKGALADWINALRARKPERLVAVALANKLARICWAIMTTGEGFRTDTYVKA

SEQ ID NO: 450962 - protein, 446 aa, unidentified
MANLPILDAHAAFIDVGSEQMHGSVAGGAPRVFGTVTAQLHALRDWLKAQDVRSVAMEATGVYWLPLYGVLEAAGFEVCMVNGRQTRNLPGRKSDMQDCQWGATLHAHGLLRAGFVPPADIRRLQDYMRLRADHIEMAAAHVQHMQQALERMNIKLHDVIAKLTGVSGLAVVRSILDGERDPQRLLLLCDTQIQRAKAERVKQSLLGTWTEEHLFALRQALQSWEHYQDQIAECDRRIETLLHDIDPGDPNHTTALAARPSRPGVNAPDIADLRVMLAHMCGGQDLTQLPANTEYSVLQVVAEVGTDLTKWRTEKHFISWMGLAPGSHQSGKRKRSVKRNRNRAGRIFCVIARSLARSKDIALGGFYRRLAARRGGLVANIALARKLAVLFWRVMVRGMDYVEHGLQQYEAKVLETKQKSLRRLARQLGQQLVPIAIQMPPASPKT

SEQ ID NO: 450963 - protein, 350 aa, unidentified
MAIVGGFDVHRKQITFDYVDNDGLVQWGQIRPATRKTLRSWLAKHCPEGAGEFALEGCTGWRYVSEELTAAGVGVHLGDPAEIAALRGPKKRAKTDRADARLLRTLLVEGRFPESWIPPAHVAEIRALGRLYCALMEERRGWQQRIHAQLFHQGCPPVKALLSEPGREVLVAAELSAAGRQYVDTALRRIDELTAEIDPLRMQLVRFARRQSGCRVLQRHYGVGWLCAAIIWAEVGDPRRFSSSDQLVRFAGLDVTVYSSDGKRAPGHLSRQGSPELRWAAFEAAKCAARRGSPDYAYYHNLAAKHEGRNGKNPTLAVERKILRRCYHTLRELGDAVLAMPIAEAEEVAA

SEQ ID NO: 450964 - protein, 341 aa, unidentified
METTRHIGIDLHRNKFTCCMQLANGRNYLSEWRLENLPVFVKKLRPTDEVAVEVTGNTRLFYDAVAPHVARVVAVDPNQFRVISHSVKKTDPNDARNLALYLSKGLLPEVRMKEKTQAQIASLTQTRDTLVKLRTALKNKVNNILSAHGINLAKEALSSEKQLTEVLTVKFDPMIRIELKVIVEQIRSLNQSIAELEKTITQEGQKLEGHKNLTSIKGIGPLTGSILLSVIGNIHDFADEGKLAAYFGIVPRVNNSNETERSGHITKRGSKLGRTALVQCALIAQRYSPYLKKFYEKTKARRGTGKAIIALARKLLGIVYRTLKNNWVFKDFPNFVLAEES

SEQ ID NO: 450965 - protein, 401 aa, unidentified
MNAVGIDVSKGKSMIAILRPYGEIVSTPFEIHHTSSEISSLIEQIKSIEGESRIVMEHTGRYYEPLAHELSLANLFVSAVNPKLIKDFGDNSLRKVKSDKADSIKIARYALDSWTNLKQYCLMDEIRNQLKTMNRQFGFYVKHKTAMKNNFIGILDQTYPGVNTYFDSPARDDGSQKWVDFATTYWHVDCVRKMSLNAFTDHYQKWCKRRKFNFSKSKAEEIYGAAKELVPVLPKNDLTKLIVKQAVEQLNTASKTVEELRALMKETASKLPEYSIVMEMTGVGPSLGPQLMAEIGDVTRFTHKGAITAFAGVDPGVNQSGTYEQKSVHASKRGSSTLRKTLFQVMDALIKNKPHDDAVYRFMDKKRTQGKPYYVYMTAGANKFLRIYYGRVKEYLASLSQ

SEQ ID NO: 450966 - protein, 354 aa, unidentified
MNSTQVFEKRKIAVAIGIDLAKDHCDVVAYNADNKICFTKANMTYPKLMEWLANAQPAVVLMESCKGCHVRARDIADLGHDTRLVKGADVKALRNVCQKNDIRDADYIARLLYVPGTKFVFVKNQRQQSLQFLQNEYKSFQELRIRVGNQIHAGLEEFGCPAPKSQQFVQSRMMAHLEKNAELIPEEVMASFLRRREMWLNLFKQEEDAKKRMEEIAKTDDDTKRMMTVPGVGAQTAVGMLVHIGGDIGRFKNSGQFAASIGLVPKQNSTGGNTTLNGITKRGPKRLRSNLVQCGQVILMHADKLKGNFGDWVRKMRDSGKKRGVIACAIAAKIARIVYRLMKDKVDYTPVPSR

SEQ ID NO: 450967 - protein, 345 aa, unidentified
MNTTTYGLDIAKAVFQMYWVDGQSGEICNRKFRRDQLIQFLATRAPGRVALEACGGAHWWARKIESLGHQVVLLHAKYVRPFVKTNKTDSADAQAIWTASQQPGMRTVAIKSVEQQAILSLHRIRSGLVATRTRETNQIRGLLAEYGLSFRYGRKALLKELKARMAEIEEAVPELVWRALLRQLEQLEQVERGINEAERENLLWLKSSAQAKTLDEIAGVGPLTATATVAVMGSPNAFRSGRAFAASLGLVPRQSGTGGKVRLGGISKRGDPYLRQLLIHGARMVVTHSRQRPQWVEDLLKRRPVNVVVVALANKMARTAWALLAHNRSYEREFVSERPAVARVD

SEQ ID NO: 450968 - protein, 315 aa, unidentified
MNSLEEIFVGIDVSKASLDVAVWQPEQSWQVGNDVEGIGKLLKRLKELGPKLVVIEATGGYEKLIVAELVLAKVAVSVVNPKRVRDFARSVGQLAKTDKIDARILARFAQAVHPTPRPLRSEEEERLSALVSRRRQIIDMLTAEKNRLATAHLTTRKRMEKHIAWLQEELADMEGEIDQFIQNTPLWKQKDELLRSVPGVGEVTAYTLLADLPELGTLDRQGIAALVGVAPLNKDSGIKRGKRRVFGGRETVRNVLYMAALSAARFNPQIKTFYDRLINAGKEKKVAIVACMRKLLVMLNSIIRHRRSWQANFHA

SEQ ID NO: 450969 - protein, 336 aa, unidentified
MEHCAIDLGGRKSQVCVRASDGTIVHESRPETLALKEFLQGRPKSRVIVETCAEAFGVADAALALGHEVRVVSATLVRTLGVGARRTKTDRRDAQTLSEVSCRIDLPSVHVPGQRSREVKTICGMRDGLVTARAKLINTVRGWLRGQAVRISSGATPGFTARVREIGDLPDHLGAQLRAIDSLSREIKIADERVEGLAGADPVCRRLMTVPGIGAQTALRYTAALDDITRFHDSHRVEAYLGLVPGERSSSEREQRLSITKAGATSVRWLLVQAAWALRRCKTVEARPLQLWTLEIEKRRGKQIATVALARKLTGILYAIWRNGTSYDPTRTTQTH

SEQ ID NO: 450970 - protein, 346 aa, unidentified
MTNVTIGMDLGDKNHEVCVLDQKGHLMDRFAVGNTRKQLRKVFQPYAGALVAMENGTHSPWISRDLEALGCKVLVGNARKLRMIWARSQKTDVKDAEMLARIARFDRQLLYPIRHRSQQAQIDLEQIKARDLLVRLRTDLINHVRSTVKAIGERLPACSADCFGKRAQTSMPDSLHTVLMPLVEQIASLTQQIRGYNCKIEQLALTVYPETACLRQIQGVGLITSLAFILTLESPDRFDKSRAVGPHLGLTPRQDQSGSCDKKLRISKEGNVYLRRLLVSCAQYILGRYGQDSDLRRYGERLIARGGRGAKRKAVVAVARKLAVLLHRLWSTGEVYQPLYNAGKAA

SEQ ID NO: 450971 - protein, 404 aa, unidentified
MTTFIGIDWGEKHHHVHILNAHGATVAQFMIPHSLAGVEAFEQQRTKLGLPPTDCAIALETAYNLLVDFCWDHQYPLYVIAPHITHSRRASYRASRAHDDTSDAFLLADLLRTDRDRFLPWQPDGALVRQLRVQLESIAQLTHTIVAYHNRLRAVLLRYYPTALGLFQDLHSQISLRFLLHYPTPQAAQALSYPEFVSFCKAQRYTWDKLLPEHFAYLQRPALTADPVVVQACQAETVFLAEVLLNLVQRKEALLRTVQQSFQEHPDSYIYSSLPAAGDLLAPQLLVMFGDRRERCPDPAIIQALAGTCPVTHRSGKSRQVRFRHACDHAYRQTAQQFAQASVRQADWAAAYYAQCRARGHTKSHAYRCLANRWPTIIWTLWQRREAYNETYHTQQIRQHRRPA

SEQ ID NO: 450972 - protein, 412 aa, unidentified
MIAVGIDIGKEKHAAAILDADGRLLAKPAFFDNTHDGARRLWALIARHAPGGHVRVGMEATGNCWKPFHDFLAAKGAEVDVMNPIVSSASMAGDVRGRKTDKRDAVVIAGIVARGERPSYRPEGEAERALKCLTRQRRLLVDGRSGMKNRLRDQLLESFPEFPALFKGLFSKLPLALLDKWPGAAELARARRDSVAKVVKANSRGKDAAKEAGRIIAAAKDSICFAHPPPKSAALCIRSTLRALRDLDAGIEEVDAEIQRCERPEMARLLDGIKGAGQALPMVIASEFGGLGRFERSPTTGARAGMAKRMLAFAGCEPRIRESGKWKGQSKVSKRGSGQLRLALYLIANTIRMNDDYFRAVYDEKIKTKHHSVALFYVIRKLLEVLCSLHRSGRKYSPTCAGRSCEQPVSLG

SEQ ID NO: 450973 - protein, 392 aa, unidentified
MIYVGIDISKEKHDCFITNSDGEVLFKSFTISNSKEGFETLFQRIESVAENLNRVKVGLEATGHYSYNLLGFLLDKGLPTYVINPLHTNLYRKSLSLRKTKTDRVDSRTIATMMMSDMNLKSYSDTSYHNEELKSLTRYRFDKVKERAKLKSSISRLVTILFPELEKLIPTLHMASVYTMLSEFPGASHVASAHLTKLANLLSQSSKGHYGKDTATLFREAARNSIGSVMPAKSLELKHTIKLIQELTAEIDEIEAAIKQIMDNEIKSPILTIPGISYRMGAMILAEIGDFSRFDSADKILAYAGMSPSTYQSGKLDNCYSHMEKRGSRYLRYALYNATKYVCHWDESFGAYLEKKRSEGKHYNVALSHATKKLVRLIFAMEKSGQAYMPVA

SEQ ID NO: 450974 - protein, 316 aa, unidentified
MAVESLYVGIDVCKRTLDIAVRPTGQQWAVSNDDAGITSLVADLRALGPVLVVLEATGGYEVPVAAALAAAGLPLAVSNPRQVRDFAKATGTLAKTDKIDARVLAHFAQAVQPTPRAVPDEQQRAFADLLARRRQLIEMLTAEKNRLKISLRALRPRIQAHIDWLQRELDEIEKDLLNQVRQSPVWRERDEILQSTPGVGPICSFTLLAELPELGTLDRKKIAALVGVAPLNRDSGKHRGHRIVWGGRAQVRAALYMATLSATRYNPVVRDFYERLIAAGKVKKVALVASMHKLLIILNAMLKKRTFWHYNRPCAA

SEQ ID NO: 450975 - protein, 337 aa, unidentified
MKYSGIDLHSNNSVVTVTDEEDRVIAEKRLPNDLTKIVGFLLPWREELKAVVVESTYNWYWLVDGLQEAGFMVKLANTGAIKKYDGLKHSGDESDTRQLAHLLRLVILPTGTILPPEQHAQRDLARKRMQLVRSRTSHILAIENIVARQRAIKINSNQVKQLTDDEVDQIGLPEDVALAVKSNLAVTLTLSAQIDILEKRLQERVGKRKEFVLLNSVPGIGNILATIILLEMGSVERFASVGNFASYARCVDSQHMSNGKKKGEGNTKNGNKFLAWAFVEAAHFALRFNAEAKRFYERKKSKTNTAVATKALAHKLARACYHMLKENKPFDVTRCFA

SEQ ID NO: 450976 - protein, 354 aa, unidentified
MNTTQVFEKRKIAVAIGIDLAKDHCDVVAYNADNKICFTKSNWAYPQLMEWLANAQPAVVLMESCKGSMVRARDIADLGHDSRLVKGADVKALRNVTQKNDIRDADYIARLFYVPGTKYVFVKNQRQQSLQFLQNEYKSLQELRIRVGNQIHAGLEEFGCPGSKSKKFIQSRMMAHLEKNAELIPDEVMASFLRRRDMWLNLFEQEEQAKTRMEEIAMTDDDAKRIMTVPGVGAQTAVGMLVHIGGDIGRFKNSGQFAASIGLVPKQNSTGGNITLNGITKCGPKRLRANLVQCGQVILMHADKLKGNFGDWVRKMRDSGKKRGVIACAIAAKLARIIYRLMKDKVDYTPVPSR

SEQ ID NO: 450977 - protein, 346 aa, unidentified
MIIVGCDFHPSWQQVAIFDSLTGEIVESKLVNGNGEAERLYRSLPVPSLIGMESCGNSQWFIELVEQLGHTIWIGDAAQIRASYVRKQKTDRRDAAHILKLLMEGRFPRLWAPDAEVRDLRQLLIHRHKLVEIRTRVKNGLQHLALNRGLQRKSRLWSEAGQKALRELPLKGWAACRREDLQRLRTVLDEQIGQLDEAVKHAADGNQQAQLLMTQPGVGPITSLAFVLTIGDVARFKRGKQVASYLGLIPREHSSGGKQHLGAISKQGNRLARTLLVEAAQSANRLDEGFRKQYQHRCHSKPKGVAKVAAARRLAVRLYWMLRSNMPYPEIVRIEGSSRSPMAGES

SEQ ID NO: 450978 - protein, 375 aa, unidentified
MPTVAHFCEPMPTVAHFVDAVVGGDTHVDTTSLCVVSPVGAMLAEITIDNDEDGYAQAVTWVLQVVPSERFLVGLEGTRSYGAGLCRALQAVGIRVVEVERPSRGERGRRGKSDAGDALLAANKVLAMPVDRVPQPRTGDGVREALRLLTIDREQMTTQRTRLVNQLLADLLTGTAEQQALRKKDLTSGTLRKLAGARGRPGRPIDEQARLVVLRRKAQDIVRLDQQIRENERQLRTILGEVAPQLLEQVGVGPVVAAQLIVSYSHHGRCRDEAAFAALAGVSPVEASSGRITRHRLNRGGDRRLNRALHVVAVTRVKHDPRTRDYIQRRRKDLTDREIRRMLKRYIARTMFKILQTIDALNPTNNTGNTAVRAA

SEQ ID NO: 450979 - protein, 429 aa, unidentified
MALTWPAVSPDTARGEAGKGFVLLEVAVPSLLNITAMGEEEALGVIIGMDPHKRSATIEVVDDRGVVMAKGRFGTDKVGYREMLAEGRRFADRVWAVEGCNGIGKHIAHRLVHDGETVLDVPPKLSAQVRVFATGNGRKTDPVDAHSVAMVALRTPNLVRVEVDDDLVVMGMLADRRDVLGRARTQTINRVHRLLLELFPGGAKQFLSAQQARALIATIKPRDLPGKTRRRLAVELITELETTDRKIKALKKELTALVTARGSTLLQLHGIGPSTAARLLADVGDIHRFADRDRFASWNGTAPLDASSGNQQRHRLSRAGNHRINRALHIMAVVQLRNQTEGRAYFDTRKAGGMPSMMAMRALKRRLSNVVYARMLADQNRRETAGPGGHSGTTLQSSATDLTPHIGSSDKPHPGPANHETRTSTLAAS

SEQ ID NO: 450980 - protein, 406 aa, unidentified
MLLVGDDWAEDHHDVEIMDPAGRTLAKARLPEGIAGLARLHALIAGQRGDDAEQVEVRIGIETDRGPWVAALTAAGYTVYPVNPLQAARYRDRHSVSGAKSDAADAHTLADMVRTDAHQLRPIAGDSPDSDAVKVVARAHKTLIWERTRQTQRLRHALREYFPAALDAFDDLDAADTLELLAKAPDPTAAVRLTRAQIAAALRRARRRDVDTKTTAIRAALRTPQLGRPAVVVAAYAATTRAAVAVLATLNAQITALEAQVGAHFRRHPDAEIILSQPGMGPVLGARVLGEFGDAPGRYADAKARKNSAGTSPITRASGRRKTVHARHVHNDRLVDALMLQAQSALQASPGARAYYDRQRARRLDHNPALRQLANRLVGILHGCLKTRTRYDEATAWSHHNQQTAA

SEQ ID NO: 450981 - protein, 389 aa, unidentified
MIVIGTDTHKYKHALAAVDEGTGRVCGSREIDADDAGHLAAVKWARGLDGERVWAIEDCRHVSRRLEQALIAAGERVVRVAPHRMGVSRKGEREPGKSDEIDSLAVARAVVKDGVERFPAAFLDERAMEVRLLADHRNDLVAERTRGQNRLRWHLVALCPELEASLKKRSLDLTKVLDGVDRRLRRLPASTRVRVAGEEVAQIRRLTRQANTIEKELLSLIKAQRPQLLEELGCGPLTAAILIGRTAGAERFQTDASFALQTGTAPIKCSSGQRQQHRLNRGGDRQLNHALHIIAITRARIDPATREYLERKQAEGNTKKGALRCLKRHLARRFWRLLAQPPLPADHAVAREQTAEPADPQPLTIPERPVPHREVDRTITGPIPMVCIT

SEQ ID NO: 450982 - protein, 365 aa, unidentified
MWEAPVEFQRTSVGLDVHARSVLGCGLDRDTGEIFERRLCPDHREILDWIGGLPAPVAVTYEAGPTGFGLARALQVAGFSCLVAAPSKLIRPPGDRVKTDARDARHLARLLHLGQIVQVAVPGVAQEAARDLVRAREDCRADLMRVRHRLSKLLLRQGVVYYGGKAWTRDHERWLGRQHFDQLGLTVAYREAFDAMLVTRDRRDRLDTAITAMAADSEFTPIVQRLGCLRGVATLTAFGLAVEIGDWHRFTGRSIGAYLGLVPVEYSSGATRSQGGLTKTGNGHARRLLVEAAWHHRKPYRPVKALRQRWDAATPAARARGQAANRRLHQRWQHFDERDKRPVIANAAIARELAGWCWSLATLDE

SEQ ID NO: 450983 - protein, 344 aa, unidentified
MWIIGCDFHPSFQQIAFVDQSTGEYGCRRLEHKSGEAERFYRGLAGQAVRVGVEATGGLRWWERLLQELGFELWVGDPVKVRAAAAGKAKTDKRDAKLLLRLLLENRFPQIWMPTAEQRDARQLVLHRHRLVQTRTRAKNQLHAMAVNEGLHSKWRVWTQAGQTELMGLSLSPWASVRRQDWRELLQELNRRIYPLDQALVQQAEQRPEVQLLMTHPGVGPVVAMTFVLTLCQPGRFQTSKQVAAYLGLVPRENSSGQSRQRLGHITKQGNSLLRALLVEAAHVAVRSEPQWRRKYTRLSLKKNRSIAAVALARCLAVRLWWMWKLGLNYGQIKESRSHAEQLA

SEQ ID NO: 450984 - protein, 427 aa, unidentified
MSSKAYRATRVNEVNWEQIARGKEGLGVTLGIDVGKFDLWVVCRWADGRFERPWRVKNPWEIPTFLGLVRQVQAGRKLVVALEPSGTYGEALRQVLGDNGIDVQRVGTKASHDYAEVFDGVPSQHDGKDAAVVAELAALGKAKPWAYQAADPWEEELAYWVEEMVAQRQMLTPWQGRLEGLLARHWPEASQVLKLSSGTLLRILKRYGTPQALAADADAATQLARWGRSLLSAAKIEELLAGARSSVGVRAGPWQQRQIQEYAERVLAARQQANRAQRRLRQLAAGHPILQAQGKVVGVPTACVLWTSTGDPRHFDSAGAYRKAMGLNLAERSSGTYQGRLRISKRGSARTRQWLYFAALRLVQQCGVRPWYEAKKARHEGEARRVLVAVMRKLAVALYHVGVRNEGFQPRRLFGRIGRSAARSQRA

SEQ ID NO: 450985 - protein, 488 aa, unidentified
MPLTRHHQRMKMVVCPPYNTLAAGEARSLYLGALSPTLRQTPTTRCTTDCRSLTGSTRDRMTGDGRCTSLRNSCRKECFGMDVVYSHVCGLDVHKKNVVACIITPDHKEIRTFSTMTEDLLALIDWIKSHGCTHVAMESTGSYWKPIYNLLEMEQIETLVVNARHIKNVPGRKTDVKDAEWIAGLLRHGLLKGSYIPSRPQRELRELIRYRRSLMDERAREIQRIQKVLEGANIKLSSVASDIMGKSCRLMIEAIIAGETDAAVLSELAQRRLKAKKADLQKALHGLIGPHQRLMLKTQLRHIDELDKLIEQIDAEVKKRMDPFEEDLERLDTIPGVGRRSAEHILAEIGTDMDQFPSAAHLCSWAGLAPGNNESAGKRKSGKTTKGNQKLRTALIESARAAARCKDTYLSSLYHRIAARRGANRAAVAVAHRILTICYHLLKNKQTYIELGPHYYEERKRTHVARQAIRKLEILGYKVVVEEMDQTA

SEQ ID NO: 450986 - protein, 422 aa, unidentified
MVEEIIEEAAELVARVAALDVGKASLTACVRVPHEDKPGRRRQEVRTFATTTRSLLELQDWLVCQGVTLCVMEATSAYWKPPFYLLEDAIECWVVNARDVKNVPGRPKTDRLDAVWLCKLAERGMLRPSFVPPPWQRELRDLCRYRRTLIRERTREKQRVEKLLEDAQIKLSVVISDIFGVSGRDMLEALIGGQRDPYVLADLARTSMRGKKSVLAEALTGHFRDHHGYLLRMMLDRADALTAQAEALTGRIEQAIAPFAAQVAQLDEVPGIGRTGAQELIAEIGVDMTRFPTAAHLVSWAKYAPKARQSAGRHKPGTTGKGNPWLGGALGEAVIGASRTKTFLGSRYRRLARRRGKQRALVAVGNSILTIAYYLLSDPDARFTDLGPDWHDRIAPIRRKRQLISELERLSGKKVLLQEEAA

SEQ ID NO: 450987 - protein, 366 aa, unidentified
MVRCSISGASVLYEAIGIDLAKNCVSAALLTTDGEVVCIDRLDYSELEKSAQALSSTTFAMEPCTEMNYLVQKLEAWGHRCLVIGGKNVQNYVENHFSGQKTDLNDAQALAFLAQDTQLRTIKAKDVEQQKYASLTTLREQYIKQYRQTIVSLKGICQAWGLNISKGISGKARLKDLIENHAAFPEELKESLVDMVTHAQTAQKALNKITKTLEELAKSDKVCQLIQTIPGLGSICSCRLRATVGDIKRFKSPKDFPAYYGLVPRSIATGHNERKGKITHRGDRTMRSLMVQAAGSLVNMATKGKLKSKQLTKWILKKQKEKMPWGKLVCAVAAKLLRIVRAVLISNKPYNSKIAGVAKCSLPKGS

SEQ ID NO: 450988 - protein, 412 aa, unidentified
MTSISFGWYVGIDWATQAHQVTVLDAERRVLGERSVAHTGSALAELASWLTEICGGEVDRVAVAIEIPRGTVVETLLERGFAVFALNPKQLDRFRDRYTVAGATDDRRDAFVLAASLATDQPAFRRVRLDEPLVIRLRELSRLEAELHQEEGRLTNRLRDLLHRIYPQVLRLAPAADEPWVWELLELAPTPAAAQRLTRPALSKLLRAHRIRRLAADAVLAHLHAPPVSVAPGTVEAVSEHIELLLPRVRLVHAQRVRCLGRIERVLQAMAGAPPGQGEHRDVEILRSLPGVGRLVAATMLAEASQLLAQRDYHALRAQGGIAPVTRQSGTRARVDMRYHCNHRLRNALYHWGRVSAQCDLLSRQHYEALRRRGHSHGRAVRGLIDRLLVILMAMLRSQTVYDPTRRRAYAA

SEQ ID NO: 450989 - protein, 355 aa, unidentified
MNAIKYIGMDVHLATISIAVLDVNGKLTMEVTIATQSSALLDFIRGLSGTLNVTFEEGTAAQWLYTLLEPHVAKVVVCDPRQNPRRLGEKKSDRLDARKLAEGLRLGTLKPVYHGNALGPALKEVSRSYRTLVSDTTRVMSRLKALYRARGIRCAGSRVYSPRFRDQWLQQLREPGVRGRAERLYKQLDLLLPLRQEARAALLSESRKHPAQKILRSIPTLGPVRVALLLALLQTPYRFRGKRQLWTYAGLALVTRTTADYQVLDGQVTRSRKPALVLGLNANHNHFLKALFKDAAVTALTRPGPFRDFYTTRVAQGMEPELARLTLARKIASIALTLWKKGECFNAEHLKTQAA

SEQ ID NO: 450990 - protein, 349 aa, unidentified
MLYAGLDLSRKRLDFHLLDVEGETVEVGAAPPDADGLRGLTERLDRHRAPIRAAIESMNGARFVHDRLELAGWQVEIADAQKVKGLAPLACKTDRIDAWVLAELSRRDLVPAIWLPEPLVRAERERARWRLHLVRHRSSLKQRVHAVLLTHGKPCPVSDLFGVRGRQLLASLALPEPWQSTIEASLRLIDELDREIGDCERELRRLGADHRYVPLLCTVPGISWVLAYTIAAELGDISRFPTPRKLAGYTGLCPRVYQSGERDLRGPLAKQGPRYLRWALVEAATHACTHPAYRDRYQHTKARIGKQRGAKVAQVDLARRLTEAIWHMLTRNQPLLPKAPPTPWPPDGP

SEQ ID NO: 450991 - protein, 404 aa, unidentified
MLFVGLDWAETHHDVAVMDEGGQVVTARRVAEGLAGLTALHELLAGLVADPAEVVIGTETDRGLFVGALVVAGYQVYAVNPLAANRYRDRHTVSGAKSDAGDAKVLADLVRTDRHNHRPVAGDSELAEAVKVLARTHQSLVWTRRRQVNQLRSLLREFYPGALAAFGTEVGSRDALAVLQMAPTPTLGRQLSRAKLAAALARAGRQRGAPARAVQLQAALRAPQLQAPTIVADAYGAAALALVGVITTLNLQLIQLTEQLEHHFEIHPDAEIVRSLPGLGVVLGARVVAEFGDDPTRYANPKARKNYAGTAPITRASGKRQVVVARLARNRRLADACYLWAFSALTASPGARAYYDRLRAAGTTHQQALRALANRLVGVLHGCLRHRTASNEMQAWPATTQHAA

SEQ ID NO: 450992 - protein, 334 aa, unidentified
MSEPYTVGIDVSMDRLDVAILPGGQRLFVANDAAGWAELVGRLQRCAIAAIGLEPSGGYERGVVRALLAAGFSVRRINPNKLRQFARARGVLAKNDRLNAQLIAEYVAIMPTRPVQSDPAAERLAEIVTMRRQLCDAHVAAENQASHLEDAMLRRIAKRRLARIEADIRLLDKRLAELVAAELGLARRSPARPRPDLVLARRFRLLCSMPGVGATLAYTLLALLPELGAIGRKQIAALVGLAPYDFDSSKFRGQRHIYGGRMAVRNVLYMAALAAFRFNPALKAFHRRLLAAGKKPKVAIVAVMRKMTGVLNAMLRDKTDWVDHTTGRHIVPAT

SEQ ID NO: 450993 - protein, 422 aa, unidentified
MLAESHDEEQIIARVAALDIGKAELVCCVRVPAPTGGKRRLQDVWTHSTMTKALTELANRLVEMRIERVVMEATSSYWKPVFYLLEAHGLDPWLVNARDVKHLPGRPKTDVLDAVWLCKVAERQMLRPSFVPPWPIRRLRDLTRYRTDLVAARTAEKNRVEKLLEDACIKLSVVASDIFGVSGRAMLGALVAGERDPKVLAQLSRARMRGKIDRLEQAFDGHFADHHRFLLSRMLSRIEALDADIAAVDAQIEAQLAPFAEAAAHLDEIPGIGPVAAAAIIAEIGVDMSRFPTAGHLCSWAKFAPGINSSAGKSKGSASSGHGNPYLARVLGEAAVGTSKTNTFLAARYRRIARRRGQPRAVVAVGRSVLVIIWHLLHDPDARYQDLGADHYNRHVDPSAKKRSHIRQLEALGYTVTLTPAA

SEQ ID NO: 450994 - protein, 465 aa, unidentified
MARQKQKRISAQVVEDEDYQLRYEIVAGLDVAKDSAVVCVRMPAAEGKKQRRSQLHSVPATVPAITELAALLKEQGVQMASMEATSDYWRVWFAVLEDAGLQVQLVNSSQARNLPGRPKTDKEDARWIARLTEMGMLRPSFVPPPEIRALRVHTRLVFDLTADRTRCWQRLEKLLEDALCKLSSAVSKLAGHVTARAVIEAMIEGERDPRALVALGRGKMSVQRLDVLEDSLAGMQFWPQHAHAAASLLRQIDLLEQEIQDAGNAVTAHLASIRRAWGVDADGVTGPDAGHGEDAAVLPAAGRLDEIPGMGRQAAAALIAEIGLDMLRFPTPEALVSWAGLTPTARQSGPRKGRGKKGHGNTYAKRICVLAACAAANTDTFLGERFRRLASRPGGGGRKKAGCAVGRSVLIIVWHLLNDPAARYRDLGSDWHARHTDRNRKARNARRQLEALGFDVVITLREDAA

SEQ ID NO: 450995 - protein, 350 aa, unidentified
MRYIGVDVGKKRCQACIMDEDGEILEELPFANDGEGIQRLLECIDGECKAVIESTGNLWLRIYEALESRGVEVKLANPYKTKAIASARIKTDKLSARILAHLLRADLIAECYVAPREVRQVRALLRQRASLVKMRTMVKNRVHSHLDRYGLSSPWSDAFGVGGMAWLRGLELEPVDRCILDTHLRHLECLGGEIGFLDCRIAGQALESVDALLLMTLTGVDYHSATLLACEIGDISRFPSPKHLVSWIGLCPSLYQSGNTLVLGRMKKDSNKRARWVLVQAARTAARTDPRMRELYLRVAARKGTGKAAVRVANKMAVIMWHMLTEGKPYMQVKEGLYRSKLKGVKRLAS

SEQ ID NO: 450996 - protein, 363 aa, unidentified
MIVIGTDTHKSTHTCGAVDAATARALTERTAKARRQGFDELLRWARKLGPELVWAIEDCRHVSGGFERFLIARGERIVRVAPKHMAGARKSARERGKSDSIDAFAVARAALKEGIETLPTAHLDERALAIRLLLDHHDDLVSERSRDQKRLRWHLHDLWPELEIPSGALDRYKWLAKVAGRLARAQQGARVRVARELVRQVKERTCRIRALERELEPLVTAYAPQLLEERGCGPLTAAKLIGEVAGVERFSSDAKLARMGGVAPIPASSGKTSRHRLDPGGNRQLNLALHRLAVNKGKYCPESAAYLQRKEAEGKSRKEALRCLKRHLARRVWRLLRTPIEGSDPLALTTIRTATKPQLAAVT

SEQ ID NO: 450997 - protein, 430 aa, unidentified
MDEVNRNRLEEFRQLRGEIRHSEEYLIVGMDIAKDRHYAFFGTATGETLLKRIVFSNDHEGFRKLLDQTEALRVQHGLKKVVYGMEPTANYHKPLGEYLINLGKTVVLVSGVTVARNRESLDGRWDKHDGKDSANVADLISQGKCLYYEHPSAELRGLRGLLSLKRRLKKQEQGYRVRIRNQLIAQYYPEMDRDYERLGAEGLSIVRWCLAASEIAQLDVDPFIERVTSRRITMEKRRRLEEIWEKAAGSIGCDEVPGVDHEAKMMVEGLRQIREMIKETEQKIEGLCKAFSEYPYLLTIPGFGPDVSAKVLGAVGDPDRFQNGKQVLKMGGLDLSADRSGKNSDRATPEISKRGKTDLRYALYQAALIASYKNRDVMIYYTNKIRGREKEKGIHTKMRVKLAAKLLVIAWTLMKKKEPFNPVYLKAELN

SEQ ID NO: 450998 - protein, 475 aa, unidentified
MNIKGSKKKNQVLSVNIFEQQEIIAKAEAIKAELKASTWHELETKGKFDKNDKLSFVSDDMLILGCDIGSETHYVRAIDTRGRELSKSAFGFSNTAEGFESMLDWSTKLAAANDKKQIVLGLEPTGHYWFCLTTWLVVKGISVVQVNPYAVKQTKEVEDNSQLKDDKKDPKLIANLVKDGNFGMPYLPEKLYADIRRLSMFRDQLNEDRIRNLNRLHREMKIYFPEYKDAFGKIDGAFSLELLKAAPFPDELAALGTEGMKQIWHEAKLRGRGYANASSILEYARKSVGIKDGADASRQAVKWFVSRIIELDEQLSDIENQLNQRCNEIPYAKNILAISGIGENILSGILAEMGDISRFDNVKEIQKLSGLGLVACSSGKHTGETKISHRGRKRLRYWLFQAAKSAVAHSEEFKELHVYYTTRKQNPLKKMQSLIVIACKILRVIFTILTKGTTYDPKKLLGDIVRPDQSIPQAA

SEQ ID NO: 450999 - protein, 356 aa, unidentified
MSQKLNSKVAVIGIDIGKNSFHIVGQDRRGALVLRQKWSRGQVEARLANLPPCLIGMEACTGAHHLSRKLQALGHDARLMPAKYVRPYCKGEKNDYRDAEAIAEAVQRPTMKFVATKTAEQLDLQALHRVRERLVSQRTGIINQIRAFLLERGIAVRQGLHFLRAELPGILAKRTDVLSPRMLRVIEDLAGDWRRLDERIESLSGEIDALARHDKGCERLMTVPGIGPIISSAIVAAIGSGDAFSKGRDFGAWLGLVPKQMSTGDRTILGSISRRGNRYLRKLFVQAAWVVLVKLGPEQWERYGLKSWIEAAKKRLHHNVLAIALANKLARIAWAVLHKGRAFECVKTNATASRPV

SEQ ID NO: 451000 - protein, 388 aa, unidentified
MEPASIHPTAVRIDLGAIFVSLELSRSTWLITSLSPGSGEKMSKHVVAGGNIAELLDRFEQLQQKARLRTGKLFPIVTIQEAGLDGFWIHRVLESYGIESYVVDAASIATSRRRRRAKTDKIDGEALTRTLLAFKRGEPRVCAMVRAPDPKDEDRRRICRERKVLIAERVRHVNRVKGLLFAQGVSGYQPLRKDRRQRLEELQTGDGRELPKHLKAQINRELDRLELLLEQIAAVESERNALLSMDEQPAVEATSPAAMLLSLKGVGAEFAAVLWTEALSRHFDNRRQIAAYAGLTPTPWMSGTIDHEQGVSKAGNPRLRTTMIQLSWLWLRNQPASALSRWFVDRVQSNGGRLKKAAIVALARKLLIALWKFVTAGVVIEGAVMKTA

SEQ ID NO: 451001 - protein, 408 aa, unidentified
MKTLHRRCAGLDVHSDSVVACARVTVRTKVTHEVRRFSTATRDLLEMADWLAAQGITHVAMEATGVYWKPIWHILEGRFELILANAAHIRNVPGRKSDVNDAVWISDLLAHGLIRASFVPPAQIQDVRDLTRTRTQLAREIAQHIQRIQKTLEDANIKLTSVISDIVGMSGRRILKAMIAGETNAAKLAELGSTRLKCPRAELTAALDGRVTAQHRFLIAHHLSLIEDMERHIAAFDARIEELLVPLRDALAQLITIPGVSRVSAQVILAEIGADMTPFSTSGHLLSWAGLVPRLDESAGKRRSTRIRKGAPWLKPVLVQCAWGAARTKGTYYQAQFFRLKARRGPKKAAIAVAASLLTAVYHMLKNGTFHQDLGADFLVKRDKARIATKLANRIKDLGYDVSFTPAA

SEQ ID NO: 451002 - protein, 352 aa, unidentified
MMIIGCDFHPRFQQISFILEETGECGQRRLMHPAEAEKYYRSLRGTKVRIGIEATGSYGWFRRLLTELGHELVVGDATRIRASNPRRQKTDKRDAEHILGLLVADRFPAIWQPPAENEQLRQLLLHRSRLVRLRTRVTNQLDGMAKNEGLILPGGWSGKRRKVIEALLLPAWYGERRKDLLALLDRVEERIAPLNKAVSQAAANNAEACLLMTHPGVGPVVSLAYVLTIGDWQRFPRGKQVGSYLGLIPSEDSSSDKRRLGHISKQGSTLLRWLLVEAASTAQKYDPSWHRQYLRLSMTKHHGVAKVAIAHKLAVRLYWMLRSGEDYQHVRERGSHARQSECPVGRNKRPIE

SEQ ID NO: 451003 - protein, 344 aa, unidentified
MKSIVKQVVATDVAQKELVVCLGRMYDDWIPELYANKTFANTEKGFAALILWVNKLMDESIPVRYVMEATGVYHEAFAYFLDGKGVEVSIVLPNKISNYVRTLEVKTVTDKTASEAIARFGLERNLDRWKRPEEIFRKLKQKSREYDQLVAERTLVKNQLHAEQTEAYPAKESIARMRTRITLLNKQVRQIKEEMNGLVKQDKAVSSSVERITTIPGVGILTAVSVLAETNGFELIRNKRQLTSYAGLDVKEKLSGTSVKGKPRISKKGNRYLRKAMYMPALTAIRYEGRFKTLFTRLVSKHGIKMKAAVAVQRKLLEMIYTLYKTDAVFDKNYLKEGAILSAV

SEQ ID NO: 451004 - protein, 402 aa, unidentified
MNCVGIDVSKGKSMITVMRPFGEVVVSPFEVRHTANELSELAGLLKSLDGETRVVMESTGNYHAPVAWLLHDAGLYVSVVNAMLVHDYGNNSLRRAKTDKKDAIKLANYGLDHWLTLPRYVPEEDTRLMLKACYRQYQQYSKVQTMLKNNLISLLDTTFPDANRLFTSPPRDDGREKWIDFVATFWHRECVCDLSEKAFAAKYQKWCKKYGYNFSEGKALDIYAAARGHFGVMPKTDTAKLLVEQAISQLRATSSALAALKQEMQSLAASLPEYPVVMEMFGVGPALGPQLIAEIGDVRRFHSKKALVAFAGIDAPPYQSGQMDVRSRSISKRGSASLRRTLFLVMSVILQHAPMNEPVYQFMNKKRSEGKPYRVYMMASANKFLRIYYASVKSYLDSLEHD

SEQ ID NO: 451005 - protein, 420 aa, unidentified
MVYLERGYNLKELPWSKTVSNSFLFKEACMILVGVDVAKDKHDCYIMTSEGEVLFKSFTIANNMEGFNQLYEKILSVIDNFDNVKIGLEATGHYSYNILGYLLDKGLTPYVINPLHSNLYRKSLSLRKTKTDKVDSRIIASMLMSDVSLKPYSNTLYHNEELKSLTRYRFTKVQERAKLKISISRLVTILFPELEKLVPTLQMNSIYALLYEFPSAHAISKAHLTRLTNLLNTTSKGHYTKDKAVLIREAAKNSIGSNMPAKSLELKHTIKLIKELTSEINEIEEEIKIIMNKINSPILTIPGIGLSTGAQILAEIGDFKNFSSPNKLLAFAGLSPSTYQSGNMYSSNAKMEKRGSKYLRFALFNAAIYVSYWEPTFSQCLKKKRVEGKHYYVAISHVVKKLVRLIFHLEKTNERYSTVV

SEQ ID NO: 451006 - protein, 386 aa, unidentified
MKKNTTTKKKSVKQAKGQKVHLRQLAANQRLTVGIDLGDKSSRYCVLDEAGEVVSENQVPTTKPGFASLFAKMPPSRIALEVGTHSPWVSRHLESMGHEVIVANAHKVKLITQSVRKNDQIDARQLARLARVDPKLLSPIRHRGEQAQRDLAVIRARAELMEARTKLINSARGLVKPMGERLKQCDADQVAVGLGESLSEGAKAVIGPLLQTVEAIGEQIGKYDEQIEGIAERYPEVKLLRQVYGVGPLIAMTYVLTLEDAERFAHSRDVGPYLGLTPKQRDSGDSQPELGITKAGDGLLRSLLVQGAHCILRKGAPDSDLRAWGLGKMGSGGKRAKKRAVVAVARRLAVLLHHLWATGEVYDPQYNRKAAEAAAAKAQGKAKVAA

SEQ ID NO: 451007 - protein, 344 aa, unidentified
MDNHTQYLGFAGVDLAKKVMQIHFVTADGEITDKSAKRAEFLDFFRNRGKCLIGMEACGSSQDWARKLEAMGHEVHLLPPKAVKPFVSGQKNDLNDAIGIYKAMFNGVRRVPVKSTEIRDLQTLRRIRSQVTKDKVKEINHVRGLLAEYGIVMGKSLNAFNKDISSALGILTERGDVSPLVAEELRTTVEAIKAKIERQKKLDQEIEQLARGCKNYENFLKTPGVGPFTAAMLCVLLCDPSIFANGRQFAAYIGLAPRSRGSGGKNYVTGIPSKFNCDSESRAVLVECAQAIARCKNKSLWVEEILRRKPKKVALIAIANKLARQVWAMANKGESFKQMAVLTA

SEQ ID NO: 451008 - protein, 419 aa, unidentified
MKPPKSASKGQRNPSKIEERDLESLPPLHLNAAGIDVGSAEHYVAVPAARDPQPVQKFGSFTGDLHRLAGWLKACRVDTVVMQATGVYWIGLYQVLEDYGFDVQVVNARHTKTLPGRKTDVQECQWLQQLHTFGLLNHSFRPAEQIRILRSYLRQRENLVAAGSTCIQHLQKALTEMNVQLANVISDLSGTTGMAILHAIVKGERDAYKLADLKHSLIRASREEIAQSLQGNWREELLFVLQQNLELYEVYQKKVRECDQQIEAHLKTMPAMVNVSEHPIPPPRRVSWSRKRQPGFDLRGELYRLTGVDLTQVDGLDVQTIQTVLSEVGLDMSAWKTEKHFGSWLGLSPDNRISGGKVLKRGTRKVVNRAATALRLAAWNLIPARALWEPNSAACALASGLPKLSPPWPIIWPGWSTAC

SEQ ID NO: 451009 - protein, 320 aa, unidentified
MSASSVVVGIDVAKAHVDVAVLGAQFDAQRFDNQAEGHSALIAALKPLEVALVVMEATGGYETELACALQAAGLPVAVVNPRQARDFAKSMGRLAKTDAADARMLAEFAAVLLRRDDLARFLRPLADPQQQWLAALVTRRRQLLAMLLAERQRLQITPKALHPSIEAIIAAIQAQLDDIEGQMVGHVREHFAELDRLLQSASGIGPVASATLIAELPELGRLNRREIAALVGVAPMANDSGASRGRRRIQGGRFDVRRVLYMAALTASRRNPVIKAFYERLIAAGKLPKVALVACMRKLLTVLNAMVRTNKPWDNALHGA

SEQ ID NO: 451010 - protein, 337 aa, unidentified
MTGEYVGIDLHRRRSVIVRKNSDGELLSKVHIDNDPIALAAAVSAAGPNPEVVLEATFGWYWAADVLADLGANVHLAHPLGNNWGNRRVKNDERDANDLVDLLRLGRLAEAWIPPPAIRELREMVRYRLKLSQLRSGLKAQVHSVMGKNGVLPAWSSMWGPAGTAQLDELELPMAYSLRLESLRDLIEFYGREIEILDRRIRMTLKDDRGYNAIQAIHGVGPVLGAVFVAEVGDASRFRTPDQLCSWAGLTPRHRESDTKVRRGSITKQGSRIVRWAAVEAVSRNHGGDKIKVDYRRIAERRGRNIARVAAARKCLSLVFYGLRDGEIRCLAQAGEG

SEQ ID NO: 451011 - protein, 386 aa, unidentified
MYFVGIDISKYKHDCFICTETGEVIEENLSFTNTNEGFIQLLNLLKSLDNSQKIRIGFEATGHYGMNLKLFLEKNNYSFMEFNPALVKRFISTLTLRRTKTDKKDAMLITKYLISVDYKPHPKQFYHKYSLKSLSRMREKLVKQRSYYEVQITNVLDIIFPEYKPFFNNDFSKTSLYILNKYKTPDKIKNMKDFDSIRKVSRGKFTSANFIKLKELAKYSIGISNDMFETELESLLILHSGIEVEINKLETKIESIIKELNPPILSIKGIGTISCAGIISEFGDLSRFKSADACVAFAGIEPSISQSGTESHIGHMVKHGSGHLRYFLMNAADYVFLHEPIFTEFYYKKRSEGKSHRVALTHVAKKLVRVIYKLESENITFNSNIN

SEQ ID NO: 451012 - protein, 318 aa, unidentified
MKRRCIIGIDVSKHSLDCFYYPEETIHQEINTNRGIDTLIRNLKNISPDIIIVEATGQYHRLLVEKLHHSLLPVKVVNPRQVRDFARSLNKLCKTDAIDAKILVEFALSRCIIPDTPKSEHGTKLSALLVRREQLQFLITQEKCHIESTEGQYAHYIEAILDTLKAQLKEIDASISQVVKKDEKFAQDNKIIQSIPGIGPIVSATILAECPEITRIGRKQLASLVGVAPFNRDSGRFRGQRHIAAGRAKIRKVLYCAMRPCLRWNSTVRNWFEHFLSSGKPYKVAVVACMRKLLMVLRAMLISQRRWHPSLKEDAETI

SEQ ID NO: 451013 - protein, 426 aa, unidentified
MRSVGRAIGLDVHRDFCEVAIAENGQIRSCGRIVTVPEQLELFAASLGPRDRVALEVTGSAWEVARILEPHVARVVVVSPADTGIRQARAKTDRLDARALARLLAAGQLDAVWSPDERCRVMRRRLSRREQLVRSRSRAKNEIHAILVRRLKGKPPMSDLFGVKGLKWLTELELPLEETETREACMRHIEFLDREIAAVERQIATEALHSPEIRRLMTVPGVNVICTATFMAAVGDIRRFPTSRKLVGYLGLDPKVYQSGSAPATGGRISKQGSPSARWALVEAAWNVVRQPGPMHAFYARIRARRCGQVAAVAVARKLGCLFWCLLTRGEDYAHQQPTLTAKKLRLLEVRAGAPTLKGKQTGVWANRAALRDAERKLAEQAEASYKRVVSDWHAATPKKVGASVTPGRASQKPTKGKVARQTASP

SEQ ID NO: 451014 - protein, 371 aa, unidentified
MADYTDVFVGIDVAKMRNAIAIADGERGGEVRFLGEVDASEESMRRAVKRIAAQHKRAYFCYEAGPTGYGLHRLITDLGHSCIVVAPSLIPRKPGDQVKTNRRDALALAKLLRAGELTAVWVPDEGHEAMRDLVRARAAAVETLRVHRQQVSAFMLKHGRIFPRKKGWTMRYLRWLQEQEFDHPAHQIALQEMVEAVRLSKERVERLEQAIEEFVPSWSLAPIVRALQSLRGVDLIVAVTFATEVGDIRRFENPRQLMGFLGLVPSERSTGATVRRGGITKAGNRRVRHMLIESAWTYRHPPRIGTKKLYRLAQVPPSVRDIAWKAQTRLTGRYRALSGRGKKTTVVCTAIARELVGFMWSVAREAQTTST

SEQ ID NO: 451015 - protein, 355 aa, unidentified
MEGVFLGVDFHARTQTVSWCDTANGVVERRTLDHRTDDVRAFYQQFHVPAVVGLEATGYARWFHRLVEETGHRLVIGDALRIRQFAARRQKNDRRDSELLLDLLLRGDFPAIHIPSIASQEVLRLLRYRHRLVGMRTMLKNGLQAVMLSNRVLRTSRMRTLLWRHQLEHLPLTGADAIRREHSLPLMDELSARIEALENELHRRSHDDQAVGLLQTHPGVGLLTALAVAHTLQPLSRFRRARCVAAYCGLDPVERSSGDTVRFGHISKQGNRLLRFLLIEAGRSAVRPEGDPDLRRFYYQLALKRNGSIAAVAVARKLLLRMFCMLRDQIDYEEFRRRGRDARRARGKASSPKDG

SEQ ID NO: 451016 - protein, 389 aa, unidentified
MEARSVNRLPPAGTHDDAVRCVLAIELSKKSWIVAVNTPLAEKISRHTLKPCDGKELLDLCERIRTRVARETKKRVEIVSCYEAGYDGFWLHRLLETHGIRNYVIDPASLQVDRRARRAKTDRVDVERLLRSLMAYLRGEPKVWSVVRVPSVAEEDDRRLHRERGRLISERIQHVNRIKGLLAIHGIYNYQPLRRDRMQQLERLRSADGQRLPPRLKAEILRELKRLELIIGMIKTIEAERDAIASAKTETEHGSAKKIQELAKIKCIGSEFATTLVGEVFYRSFDNRRQLASYVGLTPAHFQSGSMCRDQGISKAGNAKARTVMIELAWLWLRHQPDSPLSVWFRERVGKLKGRIRRITIVAVARKLLIGLWRYLETGLVPESAALKV

SEQ ID NO: 451017 - protein, 307 aa, unidentified
MIIHPGFVGIDVSKHFLDVFDSGRTERVANTAETAAALARRWHGSFVLFEATGRYDARLRKALEAEGISFARVNPARARDFARATGRLAKTDAIDARMLAAMAQSLSVARERASDGDREALARAHKRRDQLVHMRKQERTRCSECDDAELRADYETHIQWLSVQIKRRDREIEALVKRSEALARAANLLRSIPGVGAVTVTTLLALMPELGSLSAKAVSALAGLAPFNVDSGMFRGLRRIKGGRKRVRDALYMAAVTATRRAPLLRAFYQRLRSAGKSAKVALIAVARKILVIANAIMRDKAQFRAA

SEQ ID NO: 451018 - protein, 335 aa, unidentified
MHYLGIDVHKDESHVAVLDDDGEVTEEIRVENANLDDVAQQYAGSQAAIEATSNYYTIYDTLDEHVDVVVADPQQTKAIGIAEVKNDRLDAKLLAQLRRAGMIAKSYVPSEELRERRALVRGRKQLVEKRTDFKNEVHALLDKHGISYDWDPFSVEGRDRLAGEAVSLGVVGDALMESFLSVIDELTAQIEQLEDLIEETAASLEETQLLMTIPGVSFYSSLLITAEIGEIDRFDRAEEVVSYAGLDPVVRESGDSRTEGGISKRGSGDLRWILVQCVQTAVHRCDDPYLGRFYARLKRRKNHQIAIVATARKLLVSIFHMLKRKEVYDPPGVSS

SEQ ID NO: 451019 - protein, 391 aa, unidentified
MIYVGIDVAKDKHDCFITDSDGEILFPVFTIQNNRDGFDDLFAKILSISSDFSNIKVGLEATGHYSYNLLGYLLDKGLHTFVINPLHTNLYRKSLSLRKTKTDKVDARTIAMMLMSDVNLKSYSDISYHNEELKSLTRYRFDKVQERARLKQSVSRLVTILFPELEKLVPTLHIASVYALLSELPSTGKIASCHLTHLTKLLENASKGRYSKEKAIEIREAARVSIGSNMPAKSLELKHTLHLISELDSEISEIESEIKQIMDQISSPILTIPGIGYRMGAMILAEIGDFSRFDSPDKILAYAGASPSTYQSGQLESSYSHMEKRGSRYLRFALINAAKYVCHWDETFGAYLQKKISEGKHYNVAITHATKKLVRLIYAMEKSGKPYIKTA

SEQ ID NO: 451020 - protein, 392 aa, unidentified
MSEQVPRVVIGMDPHKRSVTIEVMLADESVVGGGRFDTTVEGYQALLEFVAAWPQRVWAIEGCEGIGRHIAHRLLADEQDIVDVPAKLSARARVFATGQGRKTDATDAHSVALVGTRMAGLRPVVSDEQLEVLQLLVDRRRSIGEEHTRKISQLHRLLLELVPGGAKKYLSAAQARTILAGVRPRDAAGKTRKRVAAELVVDLERIYRRKKAADKELKTLVAATGTSLLDLHGIGPSGAARLLVEVGDLARFPDRNHFASWTGTAPIDASSGDHVRHRLSRGGNRQINRVLHIMATVQLRTPTEGRAYYDRKKAASKTSMEAMRCVKRRLSDIVYRTMLGDYVTGKVTGPGGQRGNDSDSSATGSQPHTGTSDKPHPGPATSKPRTPLRKAG

SEQ ID NO: 451021 - protein, 368 aa, unidentified
MKEVTTRYVGMDVHKATITVAVADDGAQPVIFGTMANDPGAVRKLVSQLKRGGKLVTAYEAGPTGYGLHRQLVQLGVECVVVAPALIPRRAGDRVKTDNRDAITLARLLRSGDLTPVWVPGPEDEALRDLVRIRFDAKDDLRRAQHRLSKFLLRQSIQAPPAIKAWSARYNSWLDTLQLERPTSQLVLDDYRVAVHAARERIRRLEADLECAAEQSPRLGLILALQALRGIAFLSAVTIVAEVGDFRRFADAPRFMSFTGLTVSEHSTGQSRHQGGITRAGNRYLRHILVQAAHNARFAPSLEGELKRRLQGVPPDLVNLSLKAQTRLHRRYRHLDRRIGRPKAVTAVARELAGFVWAIGQRMEASAA

SEQ ID NO: 451022 - protein, 346 aa, unidentified
MLHAGLDLSRKRLDFCLVDDAGTTLERGAAPPDGDGLRALALRLARYREPVRAAIESMNGARFVHDELERQGWEVVIADALRVKGLAPLACKTDRIDAWVLAELCRRELVPAIWLPTPSVRAERERARFRLHLARHRTALKNRVHQTLVAFGAPCPVSDLFGPSGRALLERIVLPEPWRGTVEASLRLLDELQAEIAACERELRRLGAEHRYVPLLMTCPGIGWVLAFTIAAEIGDIARFPSPVKLAGYPGLCPRVYQSGESDRRGPLSKHGPRYLRWALVEAAMHASRHPVYRERYERTKRRLGRQRGARVAQVDLARRLAEAIWYMLTRGQPFAPAGASLVLAP

SEQ ID NO: 451023 - protein, 360 aa, unidentified
MAPVSMTERTNNDIGVTTGVDTHADAHVAAAFGDDGRRLGHLTVATTPEGYARLLAWAQGLGTVRAFGVEGTSSFGAGLATFLTEAGCVVLEVNRPSRQARRGRGKSDLLDAEAAARAVLAGDVTAVAKNQNGRVGMIKVLRVARRSAMAMRTQVANQMHSLVVTAPAGLREQVRDFALGELVAVAARFRPGKVTTPEAATKLTLRGLAMRHQSLSAELETLDAELARLTAETAPALMNRKGVGPDVAGALLVAAGDNPERLRSEAAFAALCGVSPLPASSGKTTRHRLNRGGDRIANNALWRIVMVRLSCDEPTQRYLQRRIAEGRTKREVIRCLKRYVAREVLPLIAPIAASHSQVAA

SEQ ID NO: 451024 - protein, 333 aa, unidentified
MSRIGNLLEVGIDVSARELMVAASRDRQLLGRCSFENTAEGRAALCRWLGSRGKTVRVCLEATGIYGLELCLAVERSGGEVMLLNPRVSADYAKARMQRSKTDATDADVLLDYLQRMPFVRWVVPAPERLKLRAMLRRISAIKRMVVEEKNRLAAAEAVDEMTDLVRNDIEVTIGHLERRIALMDRQALELVRAEPSLLRCYELLLTVSGIGHVTALLLTAELMMLPADLTARQLVAHAGLDPRRFESGSSVHKAPRISKAGNRHIRAGLFLPALAAIRHDAYVRAFHDRLVARGKKPISATVAVMRKLLHAIHGVLASQTPFDSTRFTPMPT

SEQ ID NO: 451025 - protein, 317 aa, unidentified
MSLLRWVGRAIGLDVHRDFCVIAICEDGVVRSAGRVPSTPEALQLLAESLLPSDRVALEVTGSAWEVARILEPHVERVVVVSPDDTGIAQARAKTDRLDARALARLLWKGELEPVWMADERSRVLRRRLARREQLVRARTSSTNEIHAALQRRLQSRPPATDLFGVKGRRWLAGLELPVEERESVDAALRHVEFLEAEIAQVERLIAQQALSWPEIRRLMTVPGVNLICAATFMAAIGDVNRFFTSRKLVAYLGLDPKVRQSGEAPARSGRISKRGSASTRWALVESAWIAVRQPRSTARLLRANPRTARTRKGDRC

SEQ ID NO: 451026 - protein, 335 aa, unidentified
MQIYGIDLAKEKFDVSFFDLTSKKVSKHPSHKVVKNNFKSIGRFLETLPSDAVLVAEHTGVYGDTLLKCCMDSNVKIAFVGGYVIHRYRATPDRAKTDVLDCALLRDFGERYPDKLKYKTFPEEALYELRQLARHREMLVEQRKQLITADRSEDCRPIRSLAVKRSMDRIKEMLDTEIAETEKEMLKVINGHVSIRHNYELVKSVDGVGLITAVELLVKTENFTKITTARQYAAYAGTAPYEKSSGKMDKGAHISKIGNRRSKTLLYICAESARLHNKEIKLYYERRTLIDKKPRHYVLNAIANKLLRIIFTLVEKGEYYDANFIRQDPRVVKYN

SEQ ID NO: 451027 - protein, 322 aa, unidentified
MAVLSVGGIDVSKDRLDVMILPEQRCSSVSNDPVGWSELVNQLGGGSISAIGIEASGGYERGVMRALLAAGVSVRQINPFKLRQFARASGVLAKNDPIDARLIASFVAIMPTRPAAPRVPAIERLVEMLAVRRQLSAEKVAAENAARLLEDAMLRRLSRRRIARLAADIDMLDARLVEIVAADAMLAHRYRLLTSMPGVGPLLGGTLVALLPELGSMSRKQVAALVGVAPYAFESGKFKGRRCIWGGRSHVRQVLFMAAMSASNWNPVLKRFHDRLEAAGKLPKVAIVAVMRKMITMLNAMVRDDVVWADRHRGRHTVPTAR

SEQ ID NO: 451028 - protein, 387 aa, unidentified
MPQPNDLSRSLVALDQNSTIIAVIEMSQSSWLVAGMLPGIERQPRKKLDPSPERLLGLLHRWRDEAVRAGRTITRIALAFEAGRDGFWLARWLAAHGVEAHVIHASSVAVSREHRRAKTDRLDTELLKRGFLGWLRGERGHCSMARVPTIAEEDAKRPNRERECLVGERTRIVNRIKSTLARLGIRNFKPTLRKAAERLATVNTPEGMPLPPNTLAELQRDMARLGLVVSQIRQIEDARQKRLEQQPETGPNAMVRRLARIVGVGVETADMLVHEVLSRPMRDRRAVARYAGLTGSPDESGAQRREQGLAKAGNARVRRGMIQLAWRFLMFQKESALAIWYWARTADSRMGTRKTMIVALARKLIIALWRFVTTGEPLEGVVLRPAS

SEQ ID NO: 451029 - protein, 419 aa, unidentified
MKRTKHKNSTLVNEKTLIVSVDIGKEIHYGYMRAPGGVEVKPFPFRNTGGGFSEFMKKIRTFQRSRKLDEVVVGFESSGCYAEPLCHYMRKRGVRLVQTNPMHTKRLKELTGNSPNKTDRKDPRVIADIIFLGHALSVIVPEGAAAELRRLTQARESAVKRNTAVLNQLHMCMFLLFPEFIEVMNSISSASSLYLIERYPTPKEIIALGIDSLAAVLRKVSHGKLRRERACELFAAARESVGITEGTAGIIMEIAHLVEIIRNTQRFIRNAEDQMAICLTAIPYNHCILSIKGIGVVTAAGLIGEVGNFRQYGTVREITKLAGFDLYEVSSGRHKGQRRISKRGRSAMRRLLYYAALNTVKSDGIMYEVYHRMLNRGMPSTKALVAVARKLLALIYALARDNTVFIEQYTHISTSITAA

SEQ ID NO: 451030 - protein, 407 aa, unidentified
MNENGKRYIGLDVHKHYLIALGVDANLEVVMPARRVELSHLENWMKKNLTRQDEVVLEMTTNTWQLYDELVEYAGSVMVVHPPHVALITRSQVMNDKIAASILARLLAKGLLVGIWVPPQEVRELRGLVAQRRKMTRLATQAKNRLHAVIQRHHLKPPAGNPFAKTNNGWWQALPLGKLEKMNLQSDLETLQFAEQQAARIQKEMTGIAAEDEEIGRLLHISGFGVITAVTVYAAIGDIGRFVEPKKLVGYAGLGARVHDSGMTTRTGKITKAGRRDLRVALVEAAHVVANSHPHWKAELARLQPRLGYNKAIVAIARKLLVTVWHVLARKVADRFAEPKKVSQKMLRFAYAVGKENRAGKSAAQFARARLDILNLGEELTSIPWGAKKPIPLPPSKLKERSAVPNK

SEQ ID NO: 451031 - protein, 387 aa, unidentified
MPQVDDLSRSLAPFNQDATLTVVVEMSEASWLVAGMVPGVDRQPLKKLRPDPDALLRLVERWRDEAVKAGKRIERIALAFEAGRDGFRLARWLQARGIEVHVIHSTSVAVSREHRRAKTDRLDTAMLMRVFLGWLRGERGHCGMVAIPTLEDEDARRPSRERESLVGERTRIINRMKAILAWLGIRGFNPKLRKAPQRLDALRTPEDLPLPPNTVDELRRDMARLAMVCEQIKALEQARLAHLEQAPGTRPHAMVRLIANVIGVGIETADMLVQEVLSRDLRGRRAVARYAGLTGAPNESGSRRREKGLAKSGNARVRRGLIQLAWRFLRFQKDSALAQWYRVRTEGPAAARKTKMIVALARKLLIAFWRMVTVGEIPAGFALRQPA

SEQ ID NO: 451032 - protein, 412 aa, unidentified
MEVLYPHCAGLDVHKDTVVACVRHMVNGTVKREVRTFKTTTKELLALSEWLAAEGCTHIAMEATGVYWKPVWHILSDGDFALVLANAAHVKNVPGRKTDVNDATWLADLLAHGLIRGSFVPDQQTQEMRALLRTRKQLVREASRHIQRLQKTLEDANIKLDSVISDVMGLSGRRMIEALIAGQSDPEQLAQLAHRRIKATPEELCEALRGRVTRHHRFLLSLHLQQIDAIDAAINTIDQEVDAHVEPFRTTVHLLTTIPGVDELSACVILAEIGRDMSRFPTAGHLISWAGLCPRNDESAGKRRSTRMRKAAAWLKTTLVQCAWAAARKKASYLQAQFHRLRARRGAKKAIGAVAASILTAVYEMLKTGALYEDLGSHHFDRCGKGKQIHRLVSRLQNLGFAVQITPVPAVA

SEQ ID NO: 451033 - protein, 457 aa, unidentified
MKSKRKSKEKGKEKFVSLPVIHEHAAGVDVGSRSHFVAVGQSLEDVREFGVFDQDLRECALWLKSHGIDTVAMESTGSYWQNLYDVLIESDIDVLLVTGRQTKNMAGKTDVKDCRWIQFLHSVGLLTSSFLPDIDTEELRTLYRHRDFLLKQASKYICKMQKCLRLMNFRLDVVLNDITGVSGQAIIEAIIAGETNPQALAALAHYSVKASKEEIARALSYNGRKDYLYELADSFAIYQSYVKRIDACDKKIEEFMRHQILKLCRPQTTPPPLEKPKKQNKNSPKIPLRELSWQWNGEIDLMSIKGVSHSTVLTINSEVGLSIDKFPTAKSFTSWLGLSPDNRISGGKILSNHVRKGSNRVAAALRHAAESIGKQKDAPLYPFFQRILCRKGRCAAIIATARKLAVIIWNMLAKKEIYRPYNTAKIESQIRDKQIKKINKLMRLFDVKASEINLAIN

SEQ ID NO: 451034 - protein, 320 aa, unidentified
MTEAQSYVGIDVSKGYVDVAARPPGEQWRLSNTEEGLSQLVGRLQGLSPALVVLEATGGLEVPVTAALGAAGFPVAVVNPRQVRDFARATGKLAKTDKLDAQVLALFAERVRPAPHPLPDPQTQELNALLARRRQMVAMLVTEQNRLGTALPNVRPGIQEHIAWLEERLEGLNDGIAKLLRESPLWREREDLLRGVPGIGPTVAATLLAELPELGTLDRRQVAALVGVAPLNRDSGTLRGRRTVWGGRATVRAALYMAALVATRFNPVVRPFYQRLLAAGKPKKVALTACMRKLLTILNAMLKHRAPWQPCTFQATDPCS

SEQ ID NO: 451035 - protein, 309 aa, unidentified
MPAVGIDTAKNKIDVAYRGSVRTIARNESSVMQVLDALPRPCQIVIEPTSRYHRMVVEVARGCGHEVRLVETCKFSKYKDSLDLRCSNDKKVALALERYAEKEWDAIPARVPAPKAMEQLRDLISLRESQLRLKIAFESAQSEFGKAPAKSNLALKAMEASIADLDKKITRIASKNPLYKVLLNMDGVGPVSAPVLVWLFEAHDFKDVDELIAFVGLDVRIRESGKFKGHRKLSKRGWPVIRKYGYCMANAMRSIDDLKPLFEKYEKRGMRAKATNMIVFRKLLRAAFAIAKHGEQYDRATFLKPRKTS

SEQ ID NO: 451036 - protein, 372 aa, unidentified
MKKRSSSRQNPKPVAKAKRAQQPVTMGMDLGDKKSRYCVLSEEGEILREGQVATTKAGMTETFGALGRARIAIEVGTHSPWVSRLLRSFGHAVIGANPRQVKLITESSRKDDRLDAQTLARLARIDPQLLRPIQHRSEKAQMALMTIRVRAALMSARTSLVNAARGLAKALGERLPNCDADQMGVPQGESLPPNVQGVLEPLLKEVESLTEKIQDSDRKIEQIAREDYPETTLLQQVGGVGTLIALTFVLTVENKDRFQKSRDIGCYLGLRPKRSDSGQRPPPLRITQEGDPYLRTMLVQGAHYIISRRGPDTDLKRWGLRLAERGGKRGKKKAVVAVARKLGILLHRLWVTGEVYEPWRNQNLRKGRKKAA

SEQ ID NO: 451037 - protein, 348 aa, unidentified
MDIIGLDLHKRESQLSIKAEDGTITDRRIVTSRERFTAVLGDRPRARILLEASTESEWVARHLESLGHEVIVADPNYAPMYANRSRRTKTDKRDARTLLDACETNAYRPAHRLSEARRHVRAELAVRDALVRTRTRYIALAKALVRRDGLRVPASASSWVPTRIAALDLSPALATELTPLFAVYAPLNEQIAAADRRIGAVAVTDPIVARLATAPGIGPVTASAFVATVDDITRFPSAHQLEAYLGVVPSERSSGEKRQLGRITKAGNGRMRWLLVEAAWRILRSKSPETAALRAWTLTIAQRRGKRIAAVALARRLAGVLYAMWRDGVPYDAQRIRPLAVTVHERAG

SEQ ID NO: 451038 - protein, 342 aa, unidentified
MRWSLPPSRYYAEDRLSFGELSWKTLRSLVSIWVKTLSIFIARIVAGRLFTVKKFTRPKLIEFLATCPATTIAMEACGGSHFMARKLEELGHSPKLISPQFVRPFVKSNKNDFVDAEAICEAASRPSMRFVQPRTESQQAMRALHRVRESLVQDKVKTTNQMHAFLLEFGISVPRGAAVISRLSTILEDNSLPLYLSQLLLKLQQHYHYLVEQIKDLESQLKRKLDEDEVGQRLLSIPCVGTLTASTISTEIGDGKQYASSRDFAAATGLVPRQYSTGGRTTLLGISKRGNKRSELCWFNVPGYSYKNWNTSLANWPIGSGIYCAGKATLSSLVLWQTSWPE

SEQ ID NO: 451039 - protein, 368 aa, unidentified
MNDCIYVGLDVHVQTVSMATAGWDQEPVFVGTFPNKPAKILEHLAALGDPAALRVCYEAGPTGYGLARMLLAHHIACTVVAPSLIPITPGRQVKTDRIDALKLARLLRSGDLTAVVIPTPELEAVRAVSRAREAIRRDTHRAMMRLVTFLRQRAIGEPTGTRWTKKWWRWLDELALPYQADQIVLTQLAAQIRFLGTQNASLVTALETTAGASASFGAGIDALQRMHGVGLITATGIVAELGDLTRFATAPQLFAYAGLVPREHSSGGRQKQGAITKTGNKHVRYLLVEAAWRIVRPFKPDTLTADDPIGQIAATARRRLHKRFWRLIAKGKNRNQAIVAIARELLGFLWSMACTVAAAPAAPAALAA

SEQ ID NO: 451040 - protein, 457 aa, unidentified
MPQPKRSRSRASLSAVHPAAAAIDIGATMHVAAVGPDRDTESVRTFRTFTDDLHRLADWFARCGVKTVAMESTGVYWIPVFEILEQRGFEVMVVNARDAKHVPGRKTDVSDAEWLQRLHEYGLLRPSFRPQAEIAGLRAYLRQRERLLDYAAAHIQHMQKALMQMNFQLHHVVSDITGVTGMNIIRAIVAGERDPNVLASHRERGCHASVETICQALVGNYREEHVFALSQAIELYDVYQTKVAACDKQIETILKRLKESATPPASKLLPPKHRSRQPNAPSFDARAALHAILGVDLTQIHGLGPYLALKLVAECGTNLTAWPTAKHFTSWLGLAPHNKISGGKVLSSKTRRTSNRAASLLRLAAVSVGRTDTALGAFYRRLAARAGKAKAITATARKIAVLFYNTLRHGMSYADPGATYYEERYRRRVLGNLQRRAKSLGYVLHQADRDPTQVAVS

SEQ ID NO: 451041 - protein, 311 aa, unidentified
MAMRTKLESLGVDVAKNWLDIFNGEEVVRVDNNIKAIRVFLKSLTQSIPIAVEATNVFHELFVRLALAADHRVYLVDAYRVSRYREAVGVRVKTDDVDARLLFRYLNAEIDHLRPYQPPPKAVKRLMTLLRVRAKLAHSKTALKQSLAGVGELAQTRKALLGHIDQAVKLINNKLVDCISQSGYIDDYRRCQTINGIGPINAAALVAFYHRGEFRKADSFVSFMGLDVRVRESGKFKGKRKLTKKGNPEIRRLLFNAARAGARTAQWKPYYDSLRERGLTTTAAAVAVARKLAKLAFALMRDQTEYQEKMA

SEQ ID NO: 451042 - protein, 326 aa, unidentified
MTQDSTLTAGIDTSKSKLDVAIHGQAGTISVVNALAGWKDLARHFAAHRVQRVGIEATGGYERGVVRHLQAAGVRVILFQPLQVKAFAAARLQRAKNDRLDATLIAACAFMLDDPGRIALDPRFDALADQLTFIEQVEEDIARCKTRLEHTPAGRLARIVAADIKRLETRRKEQLRLLRAAVDAHADLARRLQLLLSIPGIGERTALSLLVRMPELGQVSREQAAALAGLAPFVRQSGTSDGRRHIGGGRERLRRALYAATLPAAFHWNSALKAFYARLVAAGKGHKVAMVACARKLLMFANTVVQRGTPWVAAGTAAPAEPGFVT

SEQ ID NO: 451043 - protein, 401 aa, unidentified
MTESSDYESAQVFIGVDVGKDTHHAVAVNRSGKRLFDKVLPNDENKLRSLISDLKQHGQILLVVDQPATIGALPVAVARSEGVFVGYLPGLAMHRIADLHGGEAKTDARDAAIIAEAARTLPHVLRTLKLADEHIAELSMLCGFDDNLAAQATQASNRICGLLTRIYPALERVLGPRLDHPAVLDLLQRYPSPEKLASLGEKRLASQLCKLAPRPGKRLAADITQALAEQTVVVPGTNVAVVVLPRLALQLITLRKQRDEVAMEVELRVLTPPLYPVLTSMPGVGVRTAVRLLTEVTCRAFASAAHLVAYAGLAPVTRRSGSSIRGEHPSRRGNKTLKRSLFLPAFAALRDPISRAYYTRKMSQGKRHNQALIALARRRCDVLFAMMRDGTFIPLRRHKYA

SEQ ID NO: 451044 - protein, 428 aa, unidentified
MLKINPLSSLYVGIDVSSKSNYVCALDFYKNKYINSSFANNQPGAEELAQKLLECLKKHPDLNTVVAALESTSVYSIHIANYLSSCEELMPFKPYVFVLNPKCTANYKKSYIGLGKSDPIDAFVIADYARAGNIETEPWRGSQFLALKRLTRHRLHLVECITREKTYLVSNLYLKFSELQMLDKDDQPFCDIYGATSSSVLTEYLSPEEIIEASEEDLVSFLANKSRNRIKDISKTAELLKKAARDSYRLDKALYEPLNVSIASSFNCIETFKKEIKAIDAAIEREIKGLNPNAFIILQSINGIGPVFAGGIVAEIGDISAFTSSDALAKYAGLCWRSNQSGDFDGEDTPMIKAGNRYLRYYLGEAANSMRKHNVEYGAYYRKKFNEVPKHQHKRALALTSRKFVRLVYGLLARNQLYSGVSLDTSNE

SEQ ID NO: 451045 - protein, 345 aa, unidentified
MRPRSRFQVVVSHSRLFFHKSVLMNKYNEIFGVDISKDVFDVYGSKSGHDQFTNDASGFKSFLKSLPKESLVIMEATGYYHYRLAQFLFKQSVLVSVVNPLSVKRFIQMKLAKVKTDKSDAKAICEYGKINEVPLYTALTNVQSECLQLFRLMDSFLKKRTATKNKLHGEEVLGIPSSWVYRSLKRDRKHLDKELLGIEKRLISLVKQDQQVQLTLLQSIPGIGLKTALFLIVVTDGFSKFETASQLCSYVGITPTIRESGSSVRGRSRISKVGNRKLRNLLFLCSFTACKHNKGCREVYERILNKGKSKKLALIAVSNKLIKQSFAIAKSGLPYDETYVSVLSK

SEQ ID NO: 451046 - protein, 420 aa, unidentified
MPNIEIGVDSMVKENFIYVGIDLHKETHTAVMIDCYNQKLGEITFPNRPADFPKLVTKVKKCNTDAKEVVYGLENAYGYGRPLAVWLIDKGYFVKDVNTAISHRQAKHRGAMYRKSDSDDAEAIALATLNMLDRLPDAGPNDTYWSLGQLVHRRDNIMKQRTRLVNQLHEQLCIAYPSYKQFFNDISRPTAVYFWEHYPSRKYLKGKSVEDLRAELVPVSHNKCSTKTCEKILDAVASDKVKNNAYQDARDMVTLSIVSDLQHYDSQLAEVDKMLEQMYKMLGCTLTTIPGVNVITAVKILAEIGDIKRFSNANKLAQFAGIAPLHLSSSGKGKDVATKQGNRRLQATIYFLAIQMVQISSKGTPRNPVVRAYYEKRKAEGKTSQQALICISRRLISVIYGMLKNGTEYRMPVVENAGEK

SEQ ID NO: 451047 - protein, 401 aa, unidentified
MAEPDRVWVGIDVGKSTHHACAIDDTGKVVWSKKIPNEQAAIEDLIAQGGRIANHVVWAIDLTSPPAALLIAVLLSAKAEVVYVPGRTVNTMSHAFRGEGKTDAKDARVIAETARHRRDLSPVVPGEDLVAELRSLTAYRSDLMADWVRGVNRLRSMLTAIFPALEAAFDYSTRAPLILVSAMCTPGEIRSAKRAGVIKHLRKNRAWPNNIDTIADKALAAAAGQIITLPGEAGTAALIKQLAARLLDLDRQIKDIDKQITNKFREHPSAAIVESMPGMGPHLGAEFLVITGGNMAAFTNPGRLASFAGLVPVPRDSGRITGNLHRPKRYNRRLRRVFYLAALSSLKIEGPSRAFYDRKRSENHIHTQALLALARRHVDVLWALLRDNRTWQPQQPTVAAA

SEQ ID NO: 451048 - protein, 407 aa, unidentified
MTVARPGLNVAGIDTHKDSLHIGIISPVGIPIIDHEFACTADGYSAAVTFITDHGPVGLVGVEGTSSYGTGISRRLQTAGYTVVEVYGGRPSSRRNNGKSDPLDAYEAARAALADDGTSTPKDERTNILRGLHLAARSAVKARTTAINQMRAILISAPEAIREKYRHLDSTHLVTALAVCRPATQNDLIAVTTLTTLRTLAKRARFLTDQHDDLTAQVWDLAREMNPALCAAFGVGPDVAAQLMITAGANPNRLSSEAAFAALCGVIPIPVSSGKTNRHRLSRGGDRQGNSALHTIALSRMRYHPKTKAYLARQLAAGRTKKDILRMLKRAIAREMFKLLTRQIELEDFSDLRPARQAAGLPLTVVAAAFGTSETEISRLERNLKRDDHLAHKYRQWLADHHPANAA

SEQ ID NO: 451049 - protein, 362 aa, unidentified
MRIIGCDLHARQQTLATLDTTTGEVVAMILTHEGDNVREFYSALPRPVRVGIEATGSMQWFVNLMEELGMECLVGHPAQIRAAEPRKQKHDRRDADLILKLLMENRFPAIWLPSKELQDLRSLLRHRHQWVRMRTRIQNALQSIALANGLRRGPALWSHDGQSRIASLSLAPHTAYRRSELQAMYKQFEAEIEKLNQRVEQQACQRPGARLWMTHPGVGPITALATEVFLGNPARFADSKALASYVGMIPREYSSGGRQRLGGLSKQGNPLLRFLWGEAGAHAARKDPELQRFYRRKLVQKGLGKASVAVARKLGIRLWIMLRDQIEYHEFCRRGQKQQKSSGACAGMPETPYGAKSHRPVD

SEQ ID NO: 451050 - protein, 386 aa, unidentified
MKRNDLSRSLVAFDQASTMVAVVELSFRSWLVAGLVPGLTRQPLKKLGPDAQALLTLLRRWQHEATKAGSIINRIVVAFEAGRDGFWLARWLRARGIEVYVIHPTSIPVSREHRRAKTDRLDTGLLMRAVLGWLRGEPKHCSMAAIPTIAEEDARRPNREHQTLVQEQTRVVNRIKSTLIRFGIRNFKVKLRKAADRLATLRGLEDEPLPPNTVAELRRDMARLQLIRAQIKAIEKARLEQLKRATRKGTHPMLLMLAQIMGIGVETADMLVHEVLSRNLRDQRAVARYGGLTGAPNESGTKRREKGLARAGNARVRHGMIQLAWRWLMHQKNSELAQWYQTRTTGAKPSVRKTMVVALARKLLIALWRYVTTGVVPAGAVLRAAT

SEQ ID NO: 451051 - protein, 323 aa, unidentified
MTTPPLGIDISKLKFDLCLIREGGKLRHRVFPNSPAGFSLLSAGLLQHGVERVHACLEATGSYGEALTAYLHHAGHVVSVVNPASIKAYGRSCLSRTKTDKADAALIAQFCHERRPPAWQPLPAEIRELQALARRLDSLLEMRQLEANRLEVAPGAAAVKESLVGHLAFLDEEIARTEGLIRSHIGSHPGLREQRDLLLSIPGIGSTTAAKLLGEILDVKRYESARQLAAFAGLAPRLHESGSSVRRRARLSKTGAPRLRKALYFPAIVAMRHNPHVRAMSERLKERGKCPMQIIGAAMRKLVHLAYGVLKSGQPFDPAMKTA

SEQ ID NO: 451052 - protein, 352 aa, unidentified
MLRPLLFDLAKDVFELAFADANHRVVERKRLTRNAFARVLENREPLHVVVEACGSAHYWGRRFERLGHRVTLLPAHQVRPYVLRRKTDRTDADGLLEAMRCSQNRAVPIKTPEQQGVQGLHRIREHHKAQRTAAINLIRGLLREFGITIPAGADKVRPAVLTALEDGENELPMALRDGLAEMLDQVTHAEAAMTAIEAHLNDFLRRDARSQRLQQAGGVGLITATAMSASVGDLNRFASGRHLPSALGVTPREHSSGNQRRLGRITKRGDVYLRTLLIHGARSMLVAAKAARKKGASLDRTQQWALDLADRPGHNKAAVALANKTARRLWAAEHHGSRFDPNHQSSRVVTTH

SEQ ID NO: 451053 - protein, 367 aa, unidentified
MKKVSTVVTKRSRNISRQKLTIGLDLGDRNSWYCVLDETGQIQLEQRVRTTAKALQEVFGAMPHSRIALEIGTHSPWISRLLSELGHEVIVANARKVRLIGESRKKDDQLDAQTLARLARIDPELLYPVKHRSAKAQADLMMIRARAGLVRARTGLVNTARGLAKSYGERLRGCNVRDMDPEKAEGLSPELQRALEPLLAAIEELSERIVEYNDRIEALAQANYPQVELLKQIKGVGTLIALTFLLTLEDPHRFRKSRDVGGYLGLQPGRRNSGESEPQLHISKEGDPYLRTLLVQGAQHILGPFGIDCDLRRWGLKLAERGGRNAKKRAIIATARKLAVLLHHLWVSGEVYEPLHNSSRITVAAAA

SEQ ID NO: 451054 - protein, 412 aa, unidentified
MEVLYPRCCGLDVHKSSITACVLIAQSGKPLKHIRRFGCTTRELRELVVWLQEFGVEHVAMESTGVYWKPVWNVLESHFQIVLANAQHIKAVPGRKTDTKDCQWIAELLQHGLLRGSFIPPLVIRDLRDLTRARTSLSQEHSRIASRIQKVLEDANLKLASVASNTLGKSGRAILAAIIGGEESCERLADLALGHLRAKIPQLQAALEGQVRDHHRFLLQSLLRQLYFIETEIELLDARLDQLGQQHPDLAEALNRWVTVPGVDRVAAWSFIAEMGADVSQFPTAAHLASWAGVCPGNNESAGKRISSKIRKGSPWLRRMACQSAWAAARTKNTYLSAQFKKLAARRGRKCAIIAVAHSILVIGYHLQGKRCAYTDLGGNYFDRLHAEGLKRYLVKRLESLGHSVTLQPRIA

SEQ ID NO: 451055 - protein, 411 aa, unidentified
MDKVYDKCCGIDVHKKLIVACFRKGNKQEVRDFGATTRELLELAEWLKEGGCEMVAMESTASYWKPLYNILESSDLNATIVNARHMKAVPGRKTDVKDAEWIADLLQHGLLQASYIPAKDQRELRELVRYRKSLVGERGRELNRLQKMLEGANIKLSGTVSDINGKSARSILEYLITGASIDGKKYDEMYEQKVIAHNLKASKDQIIDDLNGIMTPLQRRMMKELLIHLDELNAHIRNLDDEIDNFMKPEEKQAVSAIEDVAGIGHTSAQAVISVIGTDMTRFPDDAHISSWAGLCPGDNESAGKRKSGKTRKGNALLRSTLVTCAHAATRNKGSYFYAQFMRVSAHRGRKRAYVAVAHSMLVAIYHILKDGVVFKDLGADYYNQFNKERKINAYLKKLKALGWEGSVVAA

SEQ ID NO: 451056 - protein, 343 aa, unidentified
MYFSGIDLHWDNSYITTVDEQGVLVKQQRIENVPELILDHFRSLGSEHQAVVESTTGWYWLNDLLEDHHIPLTLAHAKYLKAISYAKVKTDKVDSHTLATLLRLNLIPAAHKISRELRGLRDTMRLRLRLVQQRTACLRRLESIRVKFNLSAKALASADGTVPDPYRFQQQTLEQLRENFTEQILALEKSLHPVLVPNDDIQHLLAVPGVGKISAFTIYLEIDGIERFADAKHFVSYCRLVPAAENSNRRTHHRSSKDGNKYLKIAFSDAAVHAVQYYPEFKTFYKRIARRTNPAIARTIVAKELAKIVYHILQNNEPYRGLKGQPPSRHKSLQWPRLPSPDA

SEQ ID NO: 451057 - protein, 458 aa, unidentified
MNRNRSKAKIDRTMPMVHPNAAAIDIGATMHMAAVRADRTPEPVRSFGTFTTDLHRLVDWFKECGVETVVMESTSVYWIPIFELLDASGFTVFLVNARDAKHVPGRKTDVSDAQWLQRLHSFGLLRASFRPKGQIAELRAYVRQRERLLEYAASHIQHMQKALTEMNLQLHHVVADITGATGLRIIRAILAGERDPKVLTRLRDYRCHSSAETIEKALTGSYRAEHLFALEQALALYNVYHEKASACDTRIEAVLKELSIDRGRRSDSLPSSGRPRSDQANALAFDVRAALFALLGKDITQIDGLGPYLSLKLIAECGDDLSAWPSAKHFTSWLGLAPSNKISGGKILSSRTRRCGSRASALLRLAAVTIGRTDTALGAFYRRLSARIGKAKAVTATARKIAVLFYNAVRHGMEYVDPGASYYETRYRTRVVNNLHRRAKAFGFVLQPMEPAPGVVVS

SEQ ID NO: 451058 - protein, 387 aa, unidentified
MQAPSVSTPITGGINTIFVAIELSQKTWLVTMHSPDRDKISRHKVPGGDHASLLALIDRVRDRAARKLGAVPAVVSCYEAGYDGFWLHRLLMAAGITNYVFDPSSIAVDQRARRVKTDRIDGEKMLRTLMAYLRGEPRVVRIVRVPTPEQEDARRDTRERHRLTKEQTAHTNRIKALLRLHGFAVGQPRRRDWLGWLAAQRDWQGQGVPPRVLSEIENEHARLMLVRKQLDALARTPAAADLAPAVAEMVRRSELLQRLKSLGPAFATTLTQEVFYKDFRNRREVASYFGLAPSPWKSGGIDRDQGISKAGNPRARCSAVELSWLWLRHQPGSELSQWFRQRTLNAGPRIRRIAIVALARKLVVALWRYLTTGLVPAGAVLKSAEAQ

SEQ ID NO: 451059 - protein, 338 aa, unidentified
MTIVMGLDQHRAQVTADWLDTETGEVSRARVMPADRAGVRRFLARFAGQQLEVALEATTGWRFVVEELRAIGAEPHLAEPAEASALKGNKRRAKTDRGDARHLRELLMTGRLPESYIAPEHLLDLRARVRLRHALVDQRGEWQQRIHAVLYHHGHPQKAGLLTAANRAWLERLALPDAAREQVTVALAMIDALDNQSAGITAELRRYARRQAGCRALMGLYGVGELTAVAILAELGDTRRFSSSRQAVRYAGLDITVHQSDQRRAPGHLSRQGPPALRWALYDAAQAARRPGSPDRAYYDQAAERLGGNRACLALARKLLKRSFHVLRELGDQALQPA

SEQ ID NO: 451060 - protein, 354 aa, unidentified
MSEKLNSEIAVIGIDIGKNSFHLVGQDRRGRIVLRQKWSRGQVEARLANLPPCLIGMEACVGAHHLSRKLKAFGHDARLMPAKYVRPYSKGEKNDYRDADAIAEAVQRPTMKFVATKSADQLDLQALHRVRERLVGQRTGIINQIRAFLLERSIAVRQGLHFLRAELPGILAKRTDVLSPRMLRVIEDLAGDWRRLDERIDALSDEIMTLARQDKGCERLMTVPGIGPIISSAMMAAIGSGDAFSKGRDFGAWLGLVPKQMSTGDRTILGSISKRGNRYLRTLFVQAAWVVLVKIKPEGWERYGLKSWIEAAQQRLHRNVLAIALANKLARIAWAVLHKGRAFECVKTNASQPV

SEQ ID NO: 451061 - protein, 429 aa, unidentified
MDPSASLAPAIVAWVGLDWADQKHDVCLQASRSADVEHTVVEHQPEALHSWVADLRRRFPQGQVAIALEQSRGSLFYALMNYEFLRLYPLPPKALADYRRALYPGGSKDDPTDAQLLLEFLRKHPERFRPWVADDVETRQIALLSEHRRHWVDDRTALTNHLTALLKGYFPEALRWAGDLDAPLAWDFLAQFPSLERAQRASRVEILKLYRAHTRRTPEQLEELCQQIRTARPLTTDRAILESSMLVVQILVAQLRVLQAGVEGLERKLRDLFAAHPDHVIFQSFPGAGKALAPRLLAAWGSDRQRFPEPDSMQCFAGPAPVTVRSGKSKWVHRRFACPTFLCQTFHEFAAQSRLQSPWAKAYYQQQRAKGADHHPAVRALAFKWIRIMFRCWKDRTPYDEARYQQALKRRGSPLATTLSRLAAPPARA

SEQ ID NO: 451062 - protein, 317 aa, unidentified
MVRSAVVGIDVSKAFLDVAWWAADHAARYANSPQGLAELTRALTQQAPELVVLEATGGYEIAAVEALQAAKIAVAVVNPRQVRDFARASGKLAKTDALDAKVLAWFGATMRPAPLPPIDPSHSAIANLVARRRQVIEMLIAERNRLEHAGAAVRRWIEEHILTLKTQLAQLDAAVALAVEASPSLHRRNEILTSVIGIGRLTAAVLIAELPELGSIGNKQVAALVGVAPFNQDSGNRRGERHIAGGRYSVRCALYMATLVAVRFNPALQSFYRRLRDAGKPAKVALVAAMRKLIIILNALVRDDILWQPNHALQDGC

SEQ ID NO: 451063 - protein, 373 aa, unidentified
MDAISFKNGYRYLKNYIKHLDSLFILFESTGIYSRGMKRFCEIHKIDYLEMNPLEAKFKTSSLRSWKTDKSDAHKLALLAFRMKDSKVQRHPEEIYFELRERARFHLEMEINQNRLKVELVETLHQTFPGLEKLFTNRYSKIALNIAQAFPHPDFVSTLTHDELVEKVLHSTDKGLSVNKAHKYVQKLIEIQINSFPNVDKSSFLLQKVQYLCDKLLIGIEEMKEFDQEMIDLAKNTTEFENIISIPGIGELTAALLIGELGNIREFKTNKQLNAFVGIDIKRYQSGTSKSRDTINKRGNKKARRLLYLIIMNIIRGRNHYQSHIVDYYYKLREQPHGKPHKTAVIASINRLLKTIHYLIVNDKLYDYQKAPH

SEQ ID NO: 451064 - protein, 409 aa, unidentified
MQVMHERCAGLDVHKKTVVPCVILTLPDGRVEKHTVTFSTMTSQILAMADWLKSCGVTHVAMESTGVYWRPIYQLLEGQFTLLVANAQKIHRLPGRKTDLTDAEWLADLLRHGLIAPSFVPPQAQRQLRELTRHRSNVTGRRTQCINELHKTLEGTNIKLSSVATDITGVSAMDMLQHLLAGQTDPNFLAELARGVLRKKIPELRQALQGVVGEHQKLILNQLLGDIERFDQQIEDLNAEIARRLAQEQSVIQRLDEIPGVDRKVAEVMVAELGTDMSRFGSAQRAAAWSGMCPANRQSGGRRYAARSRFGNKHLKGTLAEAGWAAGRSKQTYLGAQFRRLAARKGSRRAALAVGHSILTISYHMMDRGTPFTELGADYFDRRNPERVKDRLVSRLEKLGYRVSLEKAA

SEQ ID NO: 451065 - protein, 344 aa, unidentified
MKITTIGLDLSKNVFQVHGVDENGALVLTKRLHRKQMEPFFAKLPSCLIGIEACGTAHHWARVLVRFGHEVKLMPPAYVKAYVKRGKTDAADAEAICEAVRRPTMRFVPIKSPEQQSILMVHRARSLVVRQRTMAANALRAHLAEFGRVANPGVRNLLKLVRSVFDETEENRMLPDLARAALAVLVRRLVELEEELQTLDRTLLAWHKENEASRRLATVPGIGIVTATAIAATIDDPQRFRSGRQFAAWLGLVPKPHSSGNKVHLGGISKQGDRYLRRLLVVGATAVIRHCRDKDTPMAAWLRELLANKPMRVVSVALANKLARIAWALLSRQDVYRPYRRAQA

SEQ ID NO: 451066 - protein, 378 aa, unidentified
MHHPTTCMITNSIDGVRESEKSTGPAKAATVLSEIFLGIDTSAAKHVVTRLIPGEGPKPAEAMSTEPLVAKVAKWVNAGVAVHCVYEAGPTGFALYRRLVKTGATCLVVRPKRLEQHQRRRKNDPQDSRLLAEQLAAHHFGYSRLLVPVRVPTEQEELNRLAVRERETINRARHQILNSAKGRALALGYPLPKQWWRPRVWPKIKDAFPPELARLLERTAQTAAAMKLQLTAAEAELKATAPAAPVGVGQVTAAVLEREVCSWDRFPSERKLSSFFGLCPCEDSSAERHHLGAIDKHGSPRLRFWCQEAAWRLFKHQPDYHVIIWARRKMAGANSHRLKQIAVAVARRFLVDWWKVRTGQTTFAALGLRCAESTATTR

SEQ ID NO: 451067 - protein, 411 aa, unidentified
MEGLSPLHRRVAGIDVHRMLHVGTALIENDDGTIDKHQREFGGFKRDMKAMAAWLLELKVTLVVMESTGIYWKSAHAHLERAGIQVMIVNAHFIKYVPGRKTDMGDSEWLAVLARFGLVRGSFIPPKDLRELRLISRYRRKLSQMLSGETNRMHKTLDDGGIKLGAVVSDIKGVSARAMVAGLIEGRPMCEMLGMARGSLKNKREDLAASLDGDLSPRHLFILAELHDNVNLLEQKLARIDAYLIEAMKPYQWAWELLQTIPGIDAIASAMILIEIGDDMSRFGDADRLASWAALCPGNNESAGKRKTGKTRKGNAIIRYILCECANAARMTKSSLSSKYHNLKVRKSHKKCIVAIAHKLIRIVYFMLSRCEPYRDPGVNYEAMSAQKNAPRWIKALKKLGMLPTAKPASA

SEQ ID NO: 451068 - protein, 436 aa, unidentified
MNKLQQIHPNCGGADVGSTKIFIGLEDEPVRSFATYTNSLNQAVDYLLQQSITELAMEATGIYWITFYDMLTAVGIKVHVVNGRDVKHVPGRKSDVADCMWIQQVHSYGLLRNSFIPDDNIRELRTYMRVRQDAIEMQTTHVHHMQKALTQMNIRLTEAISEVHGVSGLRMIQAILQGERDPEKLVALCDAQIIKRKRLIVLEALKGFYKPEHLFELDIAYKGYRFYEVQIAHCDKQINKWLQKNLADKQKQVVKNPTKKIRHHAPQIKQLHGKMVQLFTGKDVTGIPGITHYTWLQLTAETGLDLSPWPTAKHFVSWLGLSPQKYSSGKMNRNKKRKCSTRAGQIIKEVSVSVLNSKHHFLGAFGRKIRSRRGPNVAIKAIARKIAIMYYNTLMKGIDYVEKGIQEYENNYRQMQQKLLEKKAKQLNLQLIPIDN

SEQ ID NO: 451069 - protein, 358 aa, unidentified
MQSVTRVGIDLAKMFIQVHAVDAVGKVVCNKQLSRDKFIAWCNQLPAGCLVAMEACSGSHAWARKLIALGLDAKIIAANHVAPYRLEGKGGKNDANDAAAICEAASRPSMRFVPVKTLSQQGMLCVHRYREGVKEERTANINRIRGLLAEFGIIAPQSPNKLRERLAEIIEDADNDLCGIARLVIQEAFSHWDEIDKQLGWCTQRISAHVKENQQAQTAVQLMGVGPVTASAAVVTVGDFKQFKNGAQFGAWLGLTPRQNSSGGKTKLGRITKRGDVYLRMLLIQAAKAAVMTAHKRDDPISRWLLQLREKSGWQKAAVAMANKNARILWAVMTKGCDFDPRYVSVKPSGGGSIAAAI

SEQ ID NO: 451070 - protein, 403 aa, unidentified
MKYFAGLDWGSVEHAACIVDEQGAVVARLDVKHTAEGLKALLKQLARIAPPEELSVAIERPSGLVVDTLVDAGHPVVPIHPNALKACRPRYRAAGGKSDPGDAYILADVLRTDGHRFRRLQPLSDEVRALRAMVRTRDDLVAERVAVANQLRSLLDGFWPGAVAIFRDIDSPIALDFLDSYPTPARAKSLGPKRMARFLARNGYSGRRSPAELLKRLRCAPVGLAGPLEQEAKGLAVLDLVAVLRTLVGRIRRLTSAIDHAVAQLPAGQVVMSFPRAGKLNAAQIVAELGDDPTRFQTEDQLAAEAGVAPVTHASGKSRGVVFRYACNKRLRRAITTWAGNSRHSSPWAASVYARARARGCDHPHAVRILARAWVRVLWRCWRDGAPYEAARHGAAKPFLEAA

SEQ ID NO: 451071 - protein, 323 aa, unidentified
MTRIICGVDIASSSLEARLGRQGALTSFANNAEGIAALAAFCHAHQVELVAMEATGGYEQLAFAGLCEQALPVAILNPRAVRRFAESMGRLEKTDAIDAGMIAWYAEVKQSPPLCLAPASQQHLRALVTRLRQLTEIRTAQRNQRRLVTDPAVQASFAELLAVVAAQIDALEQNIATLIDADPLWRELDHAFRSIKGVADRTVARLMAEMPEIGALSNKTISKLAGLAPLARDSGKHQGRRRVRGGRASVREILFIVASVVGRYEPDFIAFRQRLAAAGKPPKVVRIALAHKLLVRLNAKARQVRQRITKTPCPGPGALAVTA

SEQ ID NO: 451072 - protein, 314 aa, unidentified
MQQQPSPQWVGIDVSKGTLDVYLRPSGEQFQLSNQASGIAELVKRLQTFKIQQVIVESTGGLELDVAHALQEAGIALSIINPRQGRDFAKASGKLAKTDRIDAAVLAHFGEAIQPPITVLASDQDRALQDAVTRRRQLVEMLSAEKNRRASLREKMRQNIERHIKWLEEEIEQLDEEIEQLSQAQAEWQSRIALLRSVPGIGSVIATTLIAALPELGHVSDKRISALVGVAPFNRDSGKFRGSRMIWGGRANVRAVLYMGTLTAVRCNPALKAFYERLLSQGKAKKVALIACMHKLLRILNAIIRDRKPWQVPA

SEQ ID NO: 451073 - protein, 359 aa, unidentified
MLVERTSVGLDVHARSVAAAAIDGVTGELKRARLTPSQDHIRSWLGELAGPVAVAYEAGPTGFGLYRSLTALGIRCVVAAPSKLQRPSGDRVKTDARDAVHLARLLRLGELTAVCVPSVDQEAARDLVRAREDCRGDLMRARHRLSKLLLRQGIVYCGGNAWTDAHDRWLRRQRFDSPATTTAFESDYDTILTVAARRDRLDTTIAELAADSEFTPVVRRLACLRGISTLTAFALAVEIGDWHRFTGNTIGSFIGLVPSEHSSGASRVHGSITKTGNTHARRLLVEAAWHHRASYRPGKTMHQRWELAPAAARARGDAGNRRLHARWITFNLRRKRPVIANLAIARELAGWCWSLAVMD

SEQ ID NO: 451074 - protein, 313 aa, unidentified
MLYVGIDIAKNKHDVTALNVPGKTVLKPLTFSNNKAGFELLDLSLRQLNQDCLIALEDTGHYAFNLLNFLHEQGYKVYTYTPLLIKEFAKSLSLRKTKTDKKDAHGIALKLLSDPNREQFQHDNRQVELKILARHIHRLKRKQSDWKVQYTRCLDIIFPELDKIVGKHAECTYQLLTRYPNPQKRLEAGFDKLIEIKRLTASKIQDILSVAPRSIGTTSPAREFEIIKHYKRLIDKAEKCVNDLMAEFNSVITTVTGIGNRLEAVILAEIRNIHAFDNPAQLQAFAGLDSSIYQSGQIDLAGRMIKRGSPHLR

SEQ ID NO: 451075 - protein, 360 aa, unidentified
MGTMTCAGLDVHARSVQAAAIDLVTGEVWRRGFGPGVQEPIAWLAALPGPVRACYEAGPSGFGLYRAARAAGIEMLVIAPGKTPRGPSDRVKTDRKDAELLARQLLAGALTEVVVPPVEVEAARELVRAHDACRQDLMRLRHRVSKMLLRHGRVYPSPSTWTQEHRRWLSRQQFDQSASALVFADLLAAVDGVSARKAALAERLSHLAAEKQWCPTVARLRCFRGVDTLTALGLHLELGGDWQRFQKATALGAWLGLTPSLNQSGESSRQGAITKTGSTLARRLLVEAAWHYGRDPRIGATLQNRQQGQPDHILQIANRAQQRLHRLYHRMRSRGKPHNVTVVACARELACFLWAAATAD

SEQ ID NO: 451076 - protein, 399 aa, unidentified
MDRNRTVAGLDVHKDSVYLCIMGHDEAIIFEKTYGVLTPDLRQMCNDMVARGVTEAAMESTAVYWVPVWNELCDSMGLKLVNPYFIKQLPGRKSDVKDAQWIAECLLKNLIKGSFVPGPIVQDMRKLNRRIFDLQEDVTYYSNKLDAALHRCGFRLSNYVAKITGKSYRKAVEAIASGVTDPNELIRRVHGRVINKHGRETMLAAMTGSFSTTDITVIRQYWELLATYARQSEECRSELAALCESHFPTEYKRLQTIPGVRERAATAIIAETGVDMKMFATAAALVGWCGLKPRNDVSNGRYKSRKITHGNKYLRRMLIEISWTASRTRNCFFSNFSHIQVTQKHKNKMKIQVAIARKILVAVWHMLSKKEDFIDLYLKRLEEQRLMEEKIRQLESKMA

SEQ ID NO: 451077 - protein, 384 aa, unidentified
MSVSSHATISTQLNAIFVSLELSRSTWLVTSLAPGNGERMSRHTVPGGDIVALLARFCQLETKVRERTGISYSLVVIQEAGLDGFWIHRCLVNEGIESHVVDAASIATSRRSRRAKTDRLDGEALVRALLAYKRGEPRVCAMVAVPSVEDEDRRRIGRERRVLVGERIQHVNRIKGLLFAQGITGYEPVGANRRALLEELRTGDGRPLPNHISRQIERELDRLEMVIAQIDEVNKVRDAMLPTVEAVGTANAPGLLLQLRGIGHEFAGTLYSEGFYRHFANRRQVAAYAGLAPSPWRSGTIDREQGVSKAGNKRLRTTMIQVAWLWLRHQPGSELSQWFNQRVQDGGGRIRRVMIVAMARKLLIALWQFSTAGVVPKGAILKAA

SEQ ID NO: 451078 - protein, 340 aa, unidentified
MPLYGGIDLHANNSVVVLLNDQDQVIYQKRLPNHLPVILEPLSLYHREIEGVVVESTYNWYWLVDGLMEAGYHVHLANPAAMQQYNGLKYTDDRSDARWLAHLLRLGVLPEGYIYPKAERAVRDVLRKRAHLVRQHTANVLSVQNILARNTGGRFSLKRIHEFTQQELEALLPEADQVLAVTSSLAVLDCLRHQIKALEQSVHQRLHHTPVYEQLLTVKGIGPILAQTIALETGDSRRFPTVGHYASYCRCVDSTKLSNGKRKGQGNVKNGNPYLAWAYMEAAQFALRFQPAAQRFYQRKLAKTNNNTILARKAIAHKLARACYYIMRDLVPFDAMKAFG

SEQ ID NO: 451079 - protein, 457 aa, unidentified
MRFERGLFFLAAPATCPDCAESTYRSVSFARWFSALSYDGRCEVSQLLRWVGRAIGLDLHRDFCEIAICEDGVVRSAGRVSITPEALEAFAASLESTDRVALEVSGGAWEVARILEGHVQRVIVVSPDDTGIAQARTKTDRLDARALATLLWRGELDAVWMPDERCRVLRRRLARREQLVRSRTRVKNEVHAVLMRRLQGKPPCSDLFGVKGRKWLRSLQLPIEEAETVQSALRQIAFLDREIADVERLIAKQMLHSPDAKRLMTVPGVNLVATAAFLAAIGDIGRFSSSRRLVAYLGLDPKVRQSGEQPARSGRITKRGSASARWALVEAAWSVVNQPGPLRAYYRRIRARRGHGKAIVAAARKLAVLFWCLLTRGEDYAHQQPSLTAQKLRRLELTAGAPVRKGKPSGVWVTHARMRQAEKQLAAQAQASYERTVRDWQAGKGKKAGASVTAERA

SEQ ID NO: 451080 - protein, 346 aa, unidentified
MTIVETRPVTGGLDTHLDTHVAAALDANGGVLGIESFATTPQGFSALHGWLAGFGPVARVGVEGTGAYGAGLARHLRGEGLEVIEVDRPNRQLRRILGKSDTVDAVEAARAVLSGRARGVAKTADGNVEAMRALLIAKRSGREARITCLNQLRHLGFCAPDELRERFRGVPRDQLAGAAAALRPRTDSDPVTYATKLAMRTLARRVLTLVEDNNALDGILAELVAATAPRLLELYGVGIDTAAILLVAAGDNADRLHSEAAWAHLCGVAPLPATSGKVTQRHRLNRGGNRQANHALWRIVFTRMASEPRTRIYVQRRLDEGLSKAEIIRILKRYVARETYRHLPRT

SEQ ID NO: 451081 - protein, 487 aa, unidentified
MAKRKMSTFERLQSGKWNREQRKELAQKLHAADPGLTIVHPDAAGIDVGNNSHFVAVPAGRDAQPVREFGSWTDGLQRMAAWLKACGIRSVAMQSTGVYWIAVQEVLEEAGLEVYLVNARGTKNLPGRKSDVQECQWLMKLHTYGLLANSFRPPEEIRAVRTIWRQRDRLVQDAGRSIQQIQKALTTMNIRLANAISDVSGVTGLAIIRAMLKGERDPRELAKLRHRCIQASEEEVVRSLEGHWREDVLFELKQVVEGYDFYQRQMEACDQELQKYLAVLPDRRQESAAVEVDAAPTKTSKKRRRNKAERKGKTRRKNQPGFDLREALHRSFGVDLTRIDGIDIMTGQVILSEVGPDLRDFKDEDHFASWLELVPRKNITGGKVISQRSRESKNRVANALRMAAEALSRSDSYLGARYRRLRGRMEGPKAVKAMARYLACLVYRLLTKGQDYVDRGAAYFEKKRTERELVGLQRKAAEHGMRLVPEA

SEQ ID NO: 451082 - protein, 465 aa, unidentified
MRTYKKLWQNRKARKELARRLQSENPGLEVVHPHAAGIDVGNGAHYVAVRPDRDAQPVRRFECFTADLYRLAEWLHSCGVKTVALQSTGVYWIPLYDILEERGFEVYLVNAQHTKNLPGRKSDVQESQWLLKLHTYGLLGNSFHPPSKIRTLRTYWRQRLQHVTGAATCVQRMQKALTQMNIQLANVISDLSGVTGQLIVRAIIAGERDSWRLAELSHPRIQASRAEIAKSLEGTWRPELVFVLQQELEMYDTYQRRIAECDQQLQKYLAAFADTGTPPAKQELPPKKKKKQNKNNPHFHLADELQRITGVDLTRIDGVDVFVAQTLISEVGLDMSRWKTEAHFASWLGLCPDNRISGDKVLARGTRHVLNRAATALRLGASTLLKSQTYLGAQYRRLRSKLGAPKAITAMAHRLARLVYRMLKYGQQYVDKGAEYYERRNRQQQIEFLRKRAARLGLQLAPTQP

SEQ ID NO: 451083 - protein, 344 aa, unidentified
MNKNWFIGIDVSKKTLDASIFVAGEVINKFPHVQVRNDKQGFKDLFRWAKEQGVKTKDSLFGLEFTGYYSDALEQFLAKKQISYTMLPTTVVKHYQRGPHDKNDKIDSAKIADYLFRFNGTECIKLRVLPSKALQQLKDLKSERKFLVQQRVACENRQKVAKSKSEEKHLQKLIDLYKTEIELVEQQIADVIVQDEEIYATYRLLNSIPGIGFVNAVNTIANTQNFTAFETARQYAKYVGVAPSEHSSGTSVQWRRRPSPHADLQAKADLSMAALHAIELSREMRQLYERKLGNKPKDKDMQKKALNVVKFKLIREMFSVTKQARNFELRGLDKAQAEAHSTEE

SEQ ID NO: 451084 - protein, 456 aa, unidentified
MRTVGIDLSINTWHKAIVANAEGQFITPLLKFRTDPGDLAQLLARASEGTDATQLQAVMEPTGMAWFPIAVYLIRQGVTVYVVKPQQVADLRRFYSCHAKSDLVDAQVLAKIPQVNPEHVHKLYLPSREALACQRACKQLDKLTNQITAIHNRIQAADRFAWTGLEQRVFAAPFSPAARWFRHCWYHPGRVVDAGVETIAAAWIASQIDPQDPGTWVEALVALATDVLKLYGTDHVYLDFDQLQREIRCEQDMLLHLENMAHTLRLNTVRPLYRHIHPSRLLETMKGVGQDSAAVYASFIGEATRFPTARAFRGWSGMVPNSEQSADSETKGLHITQAGPSLIKKYAYLDADVARQWDPQIAAIYYDQIVQRGKHHNQAVCTCATHLLDRVHAVLREGQPYELRDVDGTPVTWEQARAIIAERYTVPAQLRQRRNKRGRRENAERRVEGKQRGKAA

SEQ ID NO: 451085 - protein, 338 aa, unidentified
MNKITTIGLDLAKNVFHVVCCDERGKVVSKKMLRRSMVLRYFADLPPCLVGMEACASAHHWGRALGALGHEVKLIPPQYVKPYVRGNKNDYNDALAIAEAVTRPEMRFVAVKTTEQQDVQALHRLREKRLQDRTALCNQLRGLLAEYGLILPQGVNLLRRRLPELLEDGENGLSDLFRQLLAQGYQQLQELDGHIEFYTREMERQSRQDETCGRLQTLPGYGPIVASVFHSVVGSGEAYRRGRDVSASLGLVPRQHSSGGKEVLLRISKRGDRYLRSLLVHGARSVVIRAAKKDDRLSRWINKVRAERGFNKAVVALANKMARMGWAVLVNKTVYQSA

SEQ ID NO: 451086 - protein, 418 aa, unidentified
MSAIAIGIPERPYVRAAKVARPRSKQDTGVAPDGPAPSPRLKRGRTMEKDSELFVGLDTSKLKISVAVADGERNGEVRFFGDISAEPASVVSMVAKLAKRGAKLHFCYEAGPTGYELYRQIIELGHCCEVVAPSLIPKRPGDRVKTNRRDAVSLARLHRAGELTAVWVPDETHEAIRDLVRAREVANDGLRKARQHLQSFLLRHGRVYAGRSPWTRVHSRWLAIQSFAHPAQNIVLAEYIQAIEDAGVRLDRLTKQVAEAMASWSMGPVVKAYQAMRGVALITAVTFVVEIGDVRRFDTAPQLMAYLGLVPSESSTGDRVRRGGITKAGNIRARRVLVEGAWTYRFPARVSRDIEARLDGLPRSVREIAWKAQIRLCARYRKLIMAGKTKTVAVTAIAREMAAFLWAIGREVSPAAQA

SEQ ID NO: 451087 - protein, 354 aa, unidentified
MRERSTKQSVAVVGIDMGGERSQVCMLDGGGNIVLEKKIRTSEAGLKGILGKLPRCRVVLEAGAMARWGSSFVESLGHEVKVVNARKMRRIYENDSKSDVVDARELADAGLYRWDKLPTVKMRGVKVQENLAVLGTRDALVRARTALVNTARSLLKEEGVRVAKCSVEAFASKAAPVVPDGLKMAVEPLLAEIASLTGRVKELDKWCLQAGEKDPAIRALQQVKGVGAVTAAAFVWTLDDPYRFAKSRAVGSYLGLRPKQDQSGETDKQMPITKAGNPFLRRLLVGCSQYILGPFGPDTALRRWGLKLAERGGKRAKRKAVVAVARKLAVLLHHLWVTGEVYEPFPGHPMRQAA

SEQ ID NO: 451088 - protein, 349 aa, unidentified
MEKTEKRYIGLDVHKHYLIALGVDEELNIVLPARRVELSRLEAWMKKTLTRQDEVVLEMTTNTWQLYDELVVYAGSVLVVHPPHVALITRSQVMNDKIAASILARLLAKGLLVGIWVPPQEVREMRGLVAQRRKMTNLATQAKNRLHAVLQRHHLVPPAGNLFGASNQKWWQTLSIGNLEKLNLQSDLETLQFAERQVERMTEIMEGMAAEQEPIGRLLHLAGFGVVTAVTVWAAIGDIQRFAEPGKLVGYAGLGTWVHFSGMTTHSGKITKAGRRDLRTVLIEAAQAAASSHPHWKAELARLEPRLGHNKAIVAIARKLLIAVWHVLAEKQTDRFVEPEKVSQNGMCQ

SEQ ID NO: 451089 - protein, 403 aa, unidentified
MKMERHSFVFVGVDLHKKEHVAVVCNSYEEKLKKLKVKNSPNHFEEFLKKIEDIAEEKKIIFGLEDVDFYGRSLAKYLIEQGFIVKVVNSSYTKRERSIGTNRNKTDEQDAYNICSVLIRKYTQLPLANPQDIFLAIKQVLNARNYYSKTIASIKNGLHSLLVHNYPTYTEFFPDLKGKVARGFFKKFPSPDLLPQEEEDLHTALKQIYKSVSNDKARQVLDSVQTSGWIQNEYQEANNKAIQSYLTSLDELYREKDKLELELEELIEQTGYPLKTMPGIDIILAATFIANIGDIYRFTSSKQLAKLAGVAPYEHSSGQSKRNYSNKLGNRTLHSAFYTLALIHVQEKYNPVMYSYYQNKQQSGKKKKQALTYVMRRLVNIVFRMMKDKTDYKPPAPLEKEAS

SEQ ID NO: 451090 - protein, 315 aa, unidentified
MSDVPCFLGIDVAKAQLDIALRPSGERWAVPNDASGVATLVDRAQALHPTLIVLEATGGLERAVTSALATAGLPVVVVNPRQVRDFARATGQLAKTDALDARALAHFADVIRPTPRPLPDAQTQELRALLGRRQQLIGMRTAEQNRLAGTSERLTKDIAAHITWLNAGIATLDDDLETMLRASPLWREHDDLLQSAKGIGPVCARTLLLELPELGTLTRQQIAALVGVAPLNCDSGTLRGRRTIWGGRAHVRTVLYMGTLVATRFNPQIKVFYERLLAAGKVKKVALTACMHKFLTILNAMLKHRTPWKPQEVQN

SEQ ID NO: 451091 - protein, 348 aa, unidentified
MAHFVGLDVSVKETSVCVVDDVGKVILEQRVPTEPTDIIALLTSLGVTYGRIGIEAGPLSQWLVNALTAADLPVICVETRHMKALLTAQQINKTDRNDARGIAQMMRVGLFKPVHVKTLVAQEQRMLLTSRKLLQRKLLDVESDLRGTLRNFGLRVGAVSGGRYEARVHDLVEGFPRLAAIAEPLLNVRRVMRQQLAVLHKMLLDTVRGDPVCRRLMTAPGVGAVVALTYRATVDQPQRFVHSRAVGAHVGLTPKRYQSGEIDYDGGVSKCGDALLRTMLYEAAQVLLTHGSKWSWLKAWGMRVAQRRGMRRAIVAVARRLAVVLHRMWVNGSEFRWSKDSVAVPAVA

SEQ ID NO: 451092 - protein, 400 aa, unidentified
MNPELQVAVDVGCTRHRVTIGLSEGKLLEEFDIGHDAAGLNEFFSRIERHERQWGLPVAVAMEGYNGYARPLDERVLLHGYRLFNVNNMKLARFKEIFPGPAKSDPVDARKMLEMFSLKDKLPLAREVLQEVAPVAPVNVQLKALTRRRKQLVNERKRVSSRMQTDLQAVCPGLLDITGEADNLWFLNFLTCRADLTKLRTVREASLLALSGVGKGYAGKIRLWQKQATFSDTVAWIGPMIVEDARRMLELRHKIGALQKQIDTLATHSEMACHIDTIPGFGRVCSAELAGEIGSLQRFSGESSLALYVGMAPLNNSSGARSGSKPPRHVNVRAKAAMMIAAAQNAATVPDSRAFYDKKRSQGKTHNQALRALARVLVRIIWSMLKHGRDYQTVSPTKNA

SEQ ID NO: 451093 - protein, 354 aa, unidentified
MADQIVVVGGVDTHTDFHQAAVIDSIGRHLATAPFPTTPDGYRHLWEWMRSHGDVLAVGVEGTGAYGSELARFLLANEVTVVDVDRPDRKARRTNGKSDPVDAYAAATAVLSGRANGRPKTRDGIVEAIRSLRVVRRSAIKARTQTINQIRTLIVSAPAEVRERLRGLSTYQLISQLSRSRPGTDLADPSCAVKTALRRLARRHQNLTEEIAEADAELQPLVAQAASGLLELIGVGTETAAQLLITAGDNPDRLKSEASFAHLCGAAPISASSGRTNRHRLNRGGDRQANHALHTIALVRMRYDARTRLYVARRTAEGMSKKDIFRCLKRFIAREVYKHLTSTNTSQAEPLQTA

SEQ ID NO: 451094 - protein, 410 aa, unidentified
MDAIVERCAGLDVHQATVVACLNVGAADARPTKEVRTFGATLPDLEDLRDWLTANGCALVAMESTGVYWKPVHAVLEDHFEMVVGNAHHIKNVPGRKTDVKDCDWISDLARHGLIAKSFVPPRPIRELRDLTRYRCKLVQATSAERNRLLKLLESANIKLSSVASDVFGVSGWAMLQALVEGKQSPAEMAQLARRRLRRKLPELQRALTGRLEEHHRFLLGVQMRRIEAMEADVAELDRRLREKLAPYSREMRLLRQIPGVDWVIAATIIAEIGVDMSAFHSAEHLASWATMCPGSYESAGKQRGGRTRKGNVHLKTVLVMAANAAGKTKGTYLADKYRRLKARRGAMRAAVAIGHKILVTAYRMMVTGSDYKELGEGYLDQLNTHRTAGNLVRRLRQMGYDVQIAPKAA

SEQ ID NO: 451095 - protein, 338 aa, unidentified
MKLYGGIDLHSNNSVFAIKDENGEIKARKKLPNDLNMIFQFLGSFENELVGLVVESTFNWYWLVDALMDAGFCVHLANTTAIQQYSGLKYADDNSDAAWLAEMLRLNILPEGYIYPKAERAVRDLMRKRMQLVQQATKNLLSIQGLYMRHLSYKLSNNKIKQLSAEDIEKDFLSTNVSQATVCNLAVMNCLKTQIKTIERVILEQVKLRAQFQQLTSIDGIGNILALTIMLETGDINRFDKVGNYASYCRCVSGARYSNGKKKGSTNSKNGNKYLAWVFVEAASFAIRYNKTVKSYYQRKAAKTNQTVAIKTVAHKLARACFYVLRDDVPFEAKKAFC

SEQ ID NO: 451096 - protein, 328 aa, unidentified
MDTVIVGIDVAKEKLDVCLRWAGRQKFGQFENTVAGHQKLMGWVGKQRGTHQVHVCLEATGQYGDGVAEYLYQQGLLVSVVNPARIKHYGRSQLRRNKTDKADAQLIADFCASQKPEPWSPPPAEFKTLQALVRRLEDLMAARLQEGNRLQSGISTDAVVEDIQSHLAYLDQQIQKIKCLIQEHIEQHPRLCEQQQLLVTIPGIGKLTAAKLLGEIRSIHEFEDARQLAAYAGLTPEIAVSGTSVRKQPHLSKTGNANLRKALFMPAISAKRYNPIIAAFCVRLSLAGLLPMQVIGAAMRKLLHIVYGVLKHGRPFDPDYLSKCLIYP

SEQ ID NO: 451097 - protein, 407 aa, unidentified
MISIGIDIAKEKFTVCALEQGSKIIWKPFDVHLKKTKVEEFLKKLDTLNEEVKIVMEATGKYHLPILYELKDKGYFVSVVNPLKMKQFCRVLNFRKSKNDNIDTIQIAEYGLMYWKELQEYKVDSENFRVLKELNRSYQHYMDLRINQMNFIDLTIGQTFPGIKKLIPHGSNDFSKDKLLDFLEIWWHKDIVLEKTEEKFIEDFKNWAKEKRYHPNADKAKSIYKLAEESISTQPSSSSYIKMNIQEGIELIKHINQILHTILSQMIEIAEPLEEYQEAKQFSGISDKLAVQITAEFGDLSKFKNKKSLISFVGIDSPPYESGNFKADQRKITKRGNAILRKVGYQAMKCMMSAKDPENDIYLYMVKKEKDGKAKKVCKFAGLNKFLRIYYAKVMASKQEKMLLKVA

SEQ ID NO: 451098 - protein, 354 aa, unidentified
MVTIGVDLHKRISQVAILTAQGEVTQHRLDNDPRQAEQFFAQIPAPAQVAIEASATWWWLVDLLERLGHRPVLSHPKQTKTIAAARLKNDRVDAERLALLLRGDLLPKVWIPPASLREARELIRHRITLVWLRTRIKNHLQSLVARRNLRPTSTKHWMSAHGQQELAALPLAPVPSAIRENCFASLQLFDQQIRSLDEELTQRWKDDPQVERLRTIPGVGPFIAICLVLELGDIQRFPTAKHLASYVGLTPRVRASADRIRLGHISREGNRLIRWVLVLAAAQAARRPGPLRAWYRSVKRRKGAKIARVALARRLSEIVYQVWKTETDYFTVLTRRAVQGRARKGDMVHQGPRI

SEQ ID NO: 451099 - protein, 324 aa, unidentified
MAYMLCFVGIDVSKNVLDVHLKPQAQRRQFANDAAGIAQLIEALREIVPAQIVLEPSGGYEEQCFRMLHDAGLPIQRVDATRIRLYAFGSGKRAKTDRIDAAVLARVAGAIHLDLMEPAHGKPLDTPRCRLRWAVRERERCVRERAARNVRLQKLDGDDQLRASLERHIAWLSEEIKAYDRLIAERLKATPEIERLSRILQSVPGIGPIVAAVIIARLPELGKIHRRQIASLAGVAPVARDSGTTSGKRRIWGGRADLRRALYWAAVSASRCNDDLSEYYKMKRQQGKETKVALTIVMRKLLTLLNTLVHENREWTKRTVKAAA

SEQ ID NO: 451100 - protein, 346 aa, unidentified
MGSTTIAVDLAKSVFEVAVSRRPGQVAGRHRLSRAQFARFLAEQAPATVVMEACGTAHFWGREARARGHRVVLLPPHAVRPYVLRNKTDGADAKGLLEALRNEAIRPVPVKSVDQHVLAGLHRMRSAWMATRTARLNALRGLLRELGHAIPVGARQVVPRVWALVSDADSGLPDPLRPVLAEAAREIAELETRIRAVERSLEDLADTSPGLERLRTIPGVGLLTATALVAFVGDVARFPSGRHLASYLGLTPREASSGLRRRLGAISKRGDPYLRMLLIHGARSVLLHAKKATASRDRLRTWALERERARGHNKAAVALANKLARIVWAVWRREEPFTASAPGGAR

SEQ ID NO: 451101 - protein, 351 aa, unidentified
MSQILNPAIVVIGIDIGKNSFHVVGLDQRGAIVLRQKWSRGQVNARFANMPPCLIGMEACVGAHHLSRELKAFGHDARLMPARYVRPYSKGQKNDFRDAEAIAEAVQRPTMKFVATKTADQLDLQALHRVRERLVSQRTGIINQIRAFLLERGVAVRQGLRFLRAELPRILATPPDVLSPRMVRVIEDLAGDWRRLDERVESLSSEIETVARQDAGCGRLMSVPGIGPIISSAMVAAIGTGDVFSKGRDFAAWLGLVPKQISTGDRTILGKISKRGNRYLRVLFVQAAWVVLIKPKSWERHGLKHWIEAAKKRLHRNVLAIALANKLARIAWSVLARGQSFEARPAMASAA

SEQ ID NO: 451102 - protein, 356 aa, unidentified
MSSMTITSPRVQAFAGVDTHKSTHHAAVIDAGGTVLGDREFDTDRSGIEALVSWLSQWPVAAVGVEQTGTYGAEVTRVLIRAGHRVAEVNRPDLTVRATVGKSDPIDAIMAADAVRTGRARVIPKDRTGVIESIRVLQAARSSAVKARTATLLQLGDLAVIAPPEIRERVGQGSGSRIARNAIGLRPDRDRLDQPTQAMKLAMRSLATRVRDLEAEIRSLDTALTALVTQVAPRLLARPQVGIHAAAQLLITAGQNPHRIRTDAQFARLTGVAPIPASSGRTNRMRLHRGGDRQANKTIHMIAVGRLRNHQPAIDYIARRQAEGLTKKDAIRAMKRLIARELHGALKADLTTLDEL

SEQ ID NO: 451103 - protein, 322 aa, unidentified
MSQPNPLCVGIDVSKATLDIAASSDVAQFTVSNDSDGFNAIITGLRRHSVALVLMEATGGLEVAVACSLQAGRFEVAVVNPRQARVFARAMGYLAKTDRIDARVLTQMAEVINRHPERKRFIRALPDAERQALAAMVVRRRQLIAMLVAERNRLHPFHPQNKKSINTIIKALEDELVRLEKEMDSHIRNHFKEIAERLSSIKGVGTMTVSAMLAEIPELGTLSRREISALIGVAPVNRDSGTMRGRRTIFGGRAGVRSALYMAALVATRFNPVIKTFYVRLLAAGKAKKVALVACMRKLLTILNAMLRKNEEWDESYHHVAP

SEQ ID NO: 451104 - protein, 379 aa, unidentified
MTEITGGVDAHSDTHHAAALDERGRLLGDAAFAASLEGCRELLAWLESFGPVGCVGVESTGSYAAGLTRFLAARGIAVVEVNQPHAHTRRRRGKSDPLDAEAAARSVLAGEATASPKHTGGIVESIRQLRVAREGAVKATTAALNQLHGLVISAPDELRQQIAARKTSRGKVTLCLRLRPDRTQLHEPLQAAKLALRTIAERVRDLDRQIELLDRHLVHLVATAAPRTTSLLGVSTQHAGQLLTTAGENIERLANDGAFARLCGASPIPASSGRTSRHRLNRGGDRNANRALHLIVVCRLRYCERTRAYATRRTAEGLTKPEIIRCLKRYIARELYHTLRADLADLNPSIPPTGHAVTISCGAGPTGTTRTSRRRRART

SEQ ID NO: 451105 - protein, 360 aa, unidentified
MKYQETCCNNVTTVDFSGKHLFVGMDLHKKKWVVTVRTVDLELRTFSMDPCPEVLDAYLSREYSGGIFHLVYEAGCFGYGTYDYFREKGIDIVVTPPNRLYRERNSIKTDKRDSRQLAMFLSKGMIPAVVVPSKQVRELRQMIRIRDKQKKRKTQIQREIRGMLVFLNYPLGTRHWSKAMLLELKQLIFFEEGLTQALPSLVEEYEFYKEKVIQSERLVKNISEQIPVYRDSLRRLTGIRGIGNLTGFRLVLHLFDRKDRFASAEKLVHYLGLTPSERSSGEKQRKGRSGHRGNPELRAMIIQMAWQVVRWDPVLLDKFERVYHSSGSTQKAIVAVARKLMVRLYTIIQRDENYQIGVAA

SEQ ID NO: 451106 - protein, 351 aa, unidentified
MTNYKLGCDVHKRYSQIAVLDEAGRVCQREKLDHSPEILQEYLSQFPAGTPVAFETVGNWYWIAEAIEAAGCEPLLTHAAKAKVMMGNVNKTDKLDAEGLATLLHLGKLPTVWIPNATLRDERELLRTRMAFGKIRTALKNRVHATLAKYALVIEESDLFVGKGYEQLKSKLMQLPIQTFACIQQELELLEQVQRQIDWLEKRIQQAVRETPAMLLLKTLPGFGFIFSAHVAKETGSTDRFPDTEHYTSYAGCVPKVSSSGGKTYYGHLRKESNHYLKWAFIEAANVIVANRNRPTWRNKHVVRLYERIRQRKGHAVAVGAVARHLAEAAYWMLKKNEPYREPTPALPKPA

SEQ ID NO: 451107 - protein, 352 aa, unidentified
MLIMGCDFLPGFQQVAIFDNETGEYQQKRLNHREEAEQFYRSLAGQTVRVGMEACGHYPWFERLLAELGVELWLGDAAKIRASVVRKQKTDRRDAEHLLHLLLENRFPKIWVPSLEVRDGRQLRVHRHKQVQARTRTKNQLQAMALSQGVQKKWKLWTKLGRAELEQLPLLPYAAERRQRLLETLDGLEADLVELNRQVEEEVRKRPEAMRLRTHPGVGPVTALVMVLTLGPAERFASGKEVGSYFGLIPREDSSGGKQRLGKISKQGSSFLRFLLVEAGPTAARYDPQLKRFYRRLAMRKHRGVAKVAVARKLATRLYLMLREQWTYPQLCQAVMQVSPSHSVVEPEKPTA

SEQ ID NO: 451108 - protein, 355 aa, unidentified
MIMIGADSHKRSHTVVALNEVGRRLGQKTVSTDIDGHLALLQWSAQFDDVQFALEDCRHLTRRLEGDLLAAGQRVVRVPTRLMADARRAGRDRGKSDPIDAEAVALAALRHPDLPVASLDGASREVKLLSDFRRDLVRQRTQVCNKIRWYLHELDPSLHIPSRGLRRRCVVDRIARELDRFDGVVARLARELVARCADLNRQITGLESELRTLVRQLAPSLLAVPGCGVLSAAVLVGETAGVDRFKSKDHFARFTGTAPIPVWSGASQGKVRLNRGGNRLTNTALHMIAVTQSRTDGAGRAYLEKAQARGKTRTEAIRLLRRRISDAVFAALRADAELIKLAVPSTRHHTMPAAA

SEQ ID NO: 451109 - protein, 446 aa, unidentified
MKKSSRMSVIHPHAAGVDIGAEFHVVAVPPDADAAPVRTFQRFTGDLHRMSDWLKTCHITTIAMESTGAYWLPAFEIPEAAGFNVILVNARDAKNVPGRKTDVNDTQWLQKLHSFGLLRASFRPEHDISVLRSYLRQRERLTEYRAAHIQHMQKALMQMNVQLHHAVSDITGVTGLSIVRAIVSGERDPSVLIQYRDVRCKKTPEVLQQALTGNWQPEHLFAPEQSVAFFDFYQEKIRECDDQIETSLLQLSTGTEEPEGVLPSARHRTKQPNQLSFDVRPLLWKITGADLTQIHGFGPYLALKFVAECGTDMNRWPDASHFTSWLCLSPGNKISGGKVLSPKTRRSSSRIAAALRLAATTIGRSDTALGAFYRRLSSRIGKAKAVTATARKLAILFYNALKYGQKYVDPGADYYEERYRNRVLDGLKRRAKSLGYSLQQDPELCV

SEQ ID NO: 451110 - protein, 351 aa, unidentified
MQIIGVDLHTRQQTVAMLNVETGEIVEKTLQHEGDSVREFYSTLTGPTRVGIEATGSMQWFLELMEELGIDCQVGHPAKIRAAEPRKQKHDRRDAALVLQLLVENRFPSIWMPSREQRDVRSLLLYRHQWVRIRTRVQNALQAMALSHGLRRGSSLWSERGQQAIASLSLTRYTAERRTALQSLYRHLEEQIEDLNRKVEELAWQRPQARRLMTHPGVGPITALATETFLGEPKRFVDGKAVASYVGLIPSEHSSGGRQRLGGLSKQGNPLLRFLWCEAVGHAVRKDAELQRFYQHKLVQKGLGKAKVAAARKLGIRLWILLRDQIDYQEFCRRGQLRQKHGGAHAGMPAR

SEQ ID NO: 451111 - protein, 425 aa, unidentified
MQFKWNEKINQVTENTLVVGMDIAKRVHYACFVDERGRVIEKAFAVHQSKEGFEHLYEKIRQTMKEAKKTEVIVGIEPTGHYWMNLANFLDHYGIPLVMVNPMHVKRSKELDDNLPTKNDKKDALVIARLLKDGRFSYPRLLKEVEAELRIGSTLRSKLTEDLASIKNRIIRWLDRYFPEFTQVFPAFGKMALATLEMTPLPQDIDGKSAEELVFLYRKVKGMRAPQLPKAKLLIEAATKSIGLTEGTKMARHEIATLLRQYRLLENEIESVNSQLSEMAQTTMEYELLASVPGLGDATIVDLLSEVGSFSLYENPRQLIKLAGLTLRENSSGQHKGQKHISKRGRKRLRYILFKVIVPLIRHNEGFKQLHEYYTTRQQNPLRGKQSMVVLCGKLLKVLHGICKKKVHFNKQSMMKDLYCLSEAA

SEQ ID NO: 451112 - protein, 343 aa, unidentified
MQTVSTIGLDIAKSVFQVHGVDTNGLVVIRRQLKRRYVLAFFEKLPSCLVGIEACASSHHWSRELRALGHNVRLMPPAYVKPYVKRQKNDMADAEAICEAVTRANMRFVPIKTPEQQSGLVLHRTRHLFIRQQTSVINAIRAHLAEFGVTAPVGRKGIEELLRVIADPSDKRVPDVVRACLAALGSQLLSLKKQILDFDRMILAWHRSNQTSKRLNCIPGVGPLLATALVASVADPKAFRSGRNFSAWIGLVPKQHSSGGRDKLGSISKQGDRYLRSLFVAGALAVIRYAKIHGTKHRPWVTALLTRRPTKVAAIALANKLARMAWAMMASGERYNYPAALKV

SEQ ID NO: 451113 - protein, 338 aa, unidentified
MKKFSGIDLHSNNSLIVVSDEADKIVYQRRHPNDLEEILRALEPHRKELVGIVVESTYNWYWLVDGLMNAGYVVHLANTAAIKKYEGLKYSGDEADAAYLAKLLRLGLLPEGYIFPPEGRATRDLSRKRMQLVRCRTLQILSIESILARQTGSRLKSAQVQRLTAEEIEKLGFSPDVTLALQANAAVMRTLQNQILVLEERLQQRVRLSEEFALLKSVPGIGTILATTIMLEVGTVKRFVKVGNFSSYCRCVQSLRVSNGKKKGEGNSKNGNQYLAWAFVEAAHFALRHCPQAKSFYERKKQQRNAVVATKALAHKLARACYHMLRERKSFEVERCFV

SEQ ID NO: 451114 - protein, 387 aa, unidentified
MPKSYDTRKSLVALDQDSTLIAVIEMSQESWLVAGIVPGIERQPLKKLAPDAGAVIRLVERWRAEGVKAGRRITRLAVAFEAGRDGFWLARHLREHGIEVHVIHAASVAVARTHRRAKTDRLDTNMLKRAFVGWLRGEPDHCTMAAIPTLAAEDARRPGRERDKLTGERTRLVNRMKAALARHGVRNFNPKLKKAPERLADVRMPDGRPLPPHTVAELKRAMTRARLLGDQIKELEADRLARLQQAPEAGTHPMVLILARVIGIGVETADMLVHEVLSRNLRDRRAVARYGGLTGAPDESGKRRREKGLARAGNARVRRGMIQLAWRFLRFQGDSALARWYRARTEDATRGRRKALIVALARKLLIALWRLVTTGETPDGVVLRPAV

SEQ ID NO: 451115 - protein, 405 aa, unidentified
MKVYLGIDWSENKHDICFLHASGEVLLVRQIEHTLAGFRQLDQAGQSLGVGRQEVVIGLETAHNLLVDYLWDQGYAQIYVLPPNVVKSAQTRYRQSGAKDDAWDARLIADLLRTDQKRYAAWQPDQPLTRQIRAEVRFANQLGRELVRDGNRLRSILLRYYPAALEAFPHLDGMVSLAFLQAYPTLRQAQALSFEQLKTFLRAHHHTHSRSWPNIYAGLHGDHPQSNPELEAAYSPLALAQARIVETLVRSRNECLARLGKLYLLHPDHDIYDSLPKAGALLAPALLAKLGDDRARYPNPAVLQAVAGTCPVTNRSGKHVHVYFRTACDHEFRHIAHQWARLTLDASAWAATYYRTVRPHCKTDSDAIRRLANRWLEILWRLWIDRKPYDEAFHLKQHAMRIQAN

SEQ ID NO: 451116 - protein, 365 aa, unidentified
MRVGVDLAKRVIQVHAVDGAGRRVVGRALKREQFMAWCAQLPKGCLVAMEACSSAHHWARKLRALGLDARLIAANFVSPYRMEGKSGKNDMTDAAAICEAASRPSMRFVPIKTSEQQGVMSLHRVREGLKEERTGCINRIRGVLAEFGLVFNKSPKALRAALADVIEDAGNELCTTARLVLQRAYDHWRELDEHMRWCDRQVGLHVRSSPAAKRAARITGIGELGASALTAGVGDFYQFKGGHQLGAWLGLVPKQNSSGGKTSLGRITKRGDDYLRTLLIQGAKSAVMSAAKRDDPISRWLVQLTARVGWQKACVAMANKNARILWAVMTRDVGFDARHVSEKPPAKTPAQPTATPAPTAAYCPA

SEQ ID NO: 451117 - protein, 399 aa, unidentified
MGFTKPIEHFNLQRKKVITMNTLYVGIDVSSKSNVVYLMLPNGDKHSNFSVANSHEGSTLLVKKIYSALTSHSLDTVLIGLEATSVYGDNLVYFLREDATLAPFNRKIHVLNPKQVKKFHDTYNDLPKNDYVDSFVIADCLRFGRINKEVYMGDYRYKALQNLTRARFFAVQNLVKEKQRFMNVLFKKYSTMTQEKVFSDAFSTTALAVYDEFESAEALANMDLHELTDFIIEKGKNRFPDPDAVAKAIQKAARSSYRLPKTVNDSVNQVLSISITSMKALESQIKEFDKAIKALMELLPNVLISIPGIGPVYSAGIMAEIGDINRFDNQASLAKYAGLAWKQHQSGGFEAEVTRLIPSGNRFLKYYLCEAAYTELLNVVISERSEPLTVYIPTSREFS

SEQ ID NO: 451118 - protein, 378 aa, unidentified
MRRGGSQIANDSEGESMKNHTVTKQVMSLTDLSACTTVAVDLAKQFFQVAGEDALGQVRYEERIKSREKFYAFLKGLPAHVEVLVETGPGAQAWARQLQDQGNQVRILPARLVANHSSGAKNDRNDALAILRAGRDSHIAGVPVKSAAALGMQALHRVRQGCIRRRTAIGNQIRGLLLEHGVALAQGDLAISRTLPRILEDATQPLPDMLRELIDELQAEWQQTGIRIDVLTGRLEVAAQADATAKRLMTVRGVGPITATALLAKHTEPERFANARMFAAYFGLVPDQHSSGAKIRLGKMSKRGDGYLRGLMIQGAHAVLRQIKPDSEQPDDRRLLNWLSRVGRKEAAVRLANRNLRILWKLLQNNDIYSRQPDRQAA

SEQ ID NO: 451119 - protein, 363 aa, unidentified
MKSTTLWVGLDVHKETISVAVFEGARSQGRPVVTIPNEPSQIRKLFSRLKKEGEVRACYEAGSCGYEVYRQLAAMGIACDVVAPGLIPVRVSDRVKTDRRDAEKLARLFRAGELTSIRVPTEAEEALRDLMRCREDAREDVLRQRHHVLKVLLRHGRVFRETKHWTLAHWKWLRAQRFDQPLAQTVFTEYLTTLEKTLARVAVLDQEIAKQADKAPYKELVGRLRCLRGIDTLSAMALIAEICDFARFAHPRELMAYLGLVPSERSSGGKQRRGSITKTGNSHARRVFVEAAWHYRHAAARSATMKARWKDQPPTVVDHAYKAQERLHRRYFRLTSRGKPSQVAVVAVARELVGFVWAVARAA

SEQ ID NO: 451120 - protein, 356 aa, unidentified
MDKDIVLVADYHAENVEFRWFNEATGEERTGNFATTRSGILRLVEQAAQQVQPGGRVVWIMESTTGWSRVKDLLGERVKFLLVNVLQMPLPPKARRRKTDKIDTGRVLREYLQGKLPQSYQPAAWWRQVRRVVDGRQDLVERQTAIKNWIGSLLHHETWEDRENLWSGPGLRRLRGMRLSPSDRALVAGKLEQLELLDEQVKEIEARMQAIYDGWPEAQWVDEVRGIGMVTAVSVLAHIGPIDRFPTPEDLISYAGLAPGVRQSDQRCYHGRIGGGGTDSHLRYLLIEATTWLRQIPRYRPAYERVKKARGKKIARLVVARLLLRSVHKMLTAGVRFNPSPRPARTEATATAGCSR

SEQ ID NO: 451121 - protein, 413 aa, unidentified
MAEETISWFAGVDWGSERHQVCLLDARGTTVGEREFPHSGEGLAELGDWLLSMASAASTVAVAIEVPHGPVVDALIDRGFVVYAINPKQLDRLRDRFSVAGAKDDRRDAYVQADSLRTDRRLFRRLQVADPRLIELRAWSRLAEELRAERVRLSNRVRHQLWRYYPQMQKLTKDLATPWFLELWAIASTPAKAGRLRKSTVERLLKQHRIRRMDAETVLRILREPAIKVAQGVAEAASIHMRSLVARLRIVNRELREAERKLDELCTTIGEIEQTSGEGLQRRDVAILRSMPGIGRINLGTLLSEASGPLSRRDYEGLRTLSGAAPVTKRSGKSLIVVRRYAAHVRLRDTVYHWARVATQRDPKCRARYTALRKRGHSHGRALRGVADRLLALACVLLQRQTLFDPYFGGSTA

SEQ ID NO: 451122 - protein, 401 aa, unidentified
MSGLQGGFESFVGIDVSKDKFDACGIARDEAKILQLSATMDRKGFEKLKGHLAVCSVSSVLIGMESTASYHVNLFSYLVSEGYNVMIINPLLISNYVKMQLRKTKTDKKDAVVIAQFLLAKGNSLIQRVTPSLISDLRDLSRQRESLVDEMTALKINIKRLLNITFPELEHMTLVFTKSMLRLLQQYPSAFSLRSADPVQLSQMLMADSYGHKREAFAAELMKAACSSVGTNSIAKEIILKQQVTLLLHFEEALQEITGILIEMSRELMEEDINILTSIKGIGDKSAVNFLIEMGGDINQYDGSGRIIAMAGLDPAVYQSGKHEGKGRITKRGNRHLRRIIWMMATRVIHYTDIFKVYYLKRRKEGLPYKMAVLATAHKLIRVIYAMLTQRTTFCPQANSL

SEQ ID NO: 451123 - protein, 351 aa, unidentified
MTVIGIDAHKASHTMVAVSQQGRKLGEKTVPATDAGHARAIRWARTTYDCDDLIWGVEDVRNVTARLERDLMDTGAVVVRVPPYLMARVRGSHRVAGKSDPIDALAVARAVLQEPNLPYARHDPQSLACKLMVDRRDSLVRYRSATMTRLQWRVHQLDPTRNIGQGKLVRRKHRDELMHWLAKKDGLLAEFSRDEVLELAQLSEKILILERRMAAYIDNVAPSLLALPGCGVLMAAKIVGETADVTRFRSESAFARFAGVGPLPNWSGNTAGTMRSHRSGNRQVNTALHRIALVQIRRGGPGATYYQMRTEAGDQPSRARRCLKRHLARAVYRALKADRQGREDTVSVGMR

SEQ ID NO: 451124 - protein, 311 aa, unidentified
MKKEIQFHQVIGVGCGLDVHKDTIVATIRSSSSDYETKEFSSFTSSLTELRDWCKQQGVTHIAMESTGIYWKPVFNILEDDAFEIILVNARHVKNIPGHKTDKKDSAWLSKLLLSGLLKGSFIPPMDIRELRDLVRYKNKKTQVISSEKNRMIKILEDCNVKLSSVVSDVQGVSATKIVNAIAGGETNIEKLMVHVHGKIQANREDIKKALEGKVTEHHRFMLNMSRESIEVNEALIKKLDLQIEKAIEKYQVELDLLQTIDGIGKDSAIAIISEIGVDMKQFPNEHHLASWSGVSPGNNESGGKKKAQEP

SEQ ID NO: 451125 - protein, 400 aa, unidentified
MRAVFGIDVSKVSSEVAILVNGEKVHGYTMPNDAIGFSRLLGDLKTVHKPEIIFEATGVYSRRLQAFLEDNGYAYTRLNPLEAKKQLDSLRVRKTDQIDAEKLAQSQFVLNRKPTYVQEEVYQNLRDLSRFYQNLTEDIVRAKNRLHKVLQVTFPELETIISTQTGEQYWNLVIAFPCKDFVLELSKNELSKSIRQSTSKRISDKRVAYLAEKLTALANQSYCAVKKTSPMLEEVRYYAKELLRLSEQRQTVLDQMVELAHPLPEYDILLSIPGIAETTATSIIGELGDIRRFQSANQINAFISIDLRHYESGNFLAKEHITKRGNPYARKILFKCIHNIASASHTNHCHIADFYEKRKRQSQTTSTKPHTIASIHRLIRTMYYLITHNKLYDYTLTQNL

SEQ ID NO: 451126 - protein, 403 aa, unidentified
MNTFFAGLDWASQTHAVCVIDAQGGVRERLEVAHSAAGLTELLRRLKAWGMPPVAIERPSGLVVDTLVEAGITVVPIHPNAVKATRPRYRSHGAKSDASDAYLLADLLRTDGHRFKPLKPQGDEIRALRALVRGRDDLVATRVQLANQLRSLLQAFWPGAVAVFADVDSPIALAFIERYPSPESAARLGPKRMAAFCAQHAYCGRRSPEELLTRLHEAPAPVNGELEMDAKGELVRCLVRTLARLVEQIRLLSARIEHHVASSDDGRILMSFPRAGRICAAQILAELGRSRERFDSDAQLAAEAGVAPVTYASGKSQAVAFRWACNHRLRAALTCLADNSRHASAWAADVYARARARGCDHPHAVRILCRAWVRVIWRAWTERTPYDPARHGAYQALLKTAGG

SEQ ID NO: 451127 - protein, 342 aa, unidentified
MSITCIGLDLAKSVFQVHGIDASGGAVVRRRLARSQLLPFFARLQPLLIGMEACSSAHHWARELMRLGHEVRLIPPQYVKPYVKRNKTDAADAEAICEAVGRPNMRFVPIKTPDQQAVLALHRVRSLLVRQRTATINALRGLLGEFGIVAGKGAARLDDLRRRVGSEADEELPAVARKAIDELFGRLDDLAARVEAVEAEIIAWHKGNEASQRLAMAPGIGPITASALVASVGDARQFRSSRHFAAWLGLTPRMASSGDRQRIGRISKGGDRYLRTLLIHGARAVIGAFKRPNLKPRPWLSPLLARRPVPVAATALAHKTARAVWAMLVRGETYHKQEAHPA

SEQ ID NO: 451128 - protein, 356 aa, unidentified
MSRDIKYIGMDVHQEAIVIAVLNGSGKLVMETILETKASSILQFIHGLRGELHVTWEEGTWAAWLYDLLQPQVQQVLVCNPRRNALLKEGNKSDKVDARKLAELLRTGMLRAVYHGENGLRTLRELGRSYQTISKDLTRVMNRLKALYRGWGIPCAGTQVYAPRYREEWLSKIAQVGVRRRAELLYQQLDGLQALRRNLRPEFLAESRKHKAAKLLRQIPCIGPIRAARLIALMQTPHRFRSKRQLWTYSGLGIETRDSAQYRFVRGQLQRSKKPQQLRGLNQNHNHEMKEIFKSAATRASCGRGPLRDFYTALLAKGMKPEMARLTLARKIAAITLTLWKRGEGFDAEQLKTQAA

SEQ ID NO: 451129 - protein, 324 aa, unidentified
MSKVIGIDISKQTFDVALLDSKTGKWQHHVLENNKLGFKRLCKFISEQSHVVMEASGSYYLQLALYLEMNNIKVSVVNPLVIRRYSQMKLQRAKTDKKDAQTIAMYGIEQNPELWQSQDKEVMELKQLYSTIELLSKQVSQTQHQLEAHTSSGILSSSLKQELNQHIKTLKRRKEKLETRFRLLSEQTYGDTLERLATIPGIGKKTAVMLTVITNNFKKFDNYRQLIAYVGLSPRKYESGTSVRGRGHICKMGQSQIRKLLYMCSWSAKKLNKACIAMYERLIAKGKAERVVKIAIANKLLKQAFAIAKNKEVYNENFMQKVCL

SEQ ID NO: 451130 - protein, 448 aa, unidentified
MRDPEEIEDEEYEQVLARVCAIDVAKASGKVCTRVPHESRPGRRCTRVWDVDATTNAVLELGEHLVAERIEKVTLESTSDYWRIWFYLLEAAGLNVQLVNARDIKNAPGRPKTDKLDSVWQAKMTERGMLRPSFVPPMEIRRLRDYTRLRVDLTHERTRYWQRLEKLLEDALIKVSAVASTLDTKSTRDMLEALIAGERDPQVLAGLARGRMRSKNAALIQALTGRFDAHHAELTRMLLDQIDTLTRQIDTLTGRIDQLLAAIPAAQGVDADGTTGPGAGHGPDAAALPAVDRLDQITGIGRSGAQAIIAEVGLDMNRFPTSGHLVSWAKLSPRTIQSGPVTRSGRTGKGNPYLKGALGEAAASAARTDTFLGERYRRIVKRRGKLKALVAVARSILVIVWQLLADPLARYHDLGSGYYAARTDQARKARNHIRQLEALGYTVTLTAA

SEQ ID NO: 451131 - protein, 469 aa, unidentified
MKRKSRRAKCQKVSPFSGDLQLIEPDAAAVDVGSRSHWVAVNPQRDPNPVREFGAFTADLISLADWLAQCEAKSVVMEATGVYWVSLYELLERRGFKVYVVDAHTVRHLPGRSKSDVKDCQWLRRLHSYGLLRGSFRPPAQIRQLRNYLRSRTKIVEAAAQQQLRMQKALTLMNIHLHHVISDLSGLTGLAIVRTIVGGERDPIRLARLRDPRIRASRETIQKSLEGNWQEELLFDLKIALESYDHFQGQIAAYDEQIRQELKEVESKVDLANEPLPAARLKACRKRPGMSQQNQLDLREELYRISGVDLTRIDGISLQTAQKVFFEIGTDVSPWSDDKKFSSWLGLSPNHRISGGKVLKRGSRKVVNPLSVALRLAARTLRNSHSALGANFRRLIAKIGMPKAITAMARKLAVLIYRMLKYGTQYVDKGMQHYESKYQETKLQYLRAQAAKFGMILLPKQAAATGIAS

SEQ ID NO: 451132 - protein, 317 aa, unidentified
MFTVGFDVAKDKLDIALINRSGQLKDRYVIDNTPKKITELLKSIRTRHPKLLVGCEATGHYHVALVRACLALGIEVRILNPLMTKQYTRSTIRGRKTDIDDALSIARLILRGEGRAASLSDIALPKLYVRLSTKVIQQRQALELQRQFLQALETETDEPVRDCFSSAIASLSKLADELRARAALDVNPKDLELLQTIVGIGPHIAVSILAEIGDVTRFPSSKQLIAYTGFDPKQKQSGSSLNRTGRLTKRGSPELRRVLFLAASSARRYDPELKAYYQMKREQGKRYTPAVVAVTHKLTNRIYAVLIRQTPYIIKSS

SEQ ID NO: 451133 - protein, 338 aa, unidentified
MYYVGVDLHKHSISLCVVELADRERKIIERRKFRCDEEEQMAEYFASLGEYQLVVEATASYEWFVQLVEPTADRVVLAHPGHLRVIAQSKRKTDKLDAQTLAEFLALDQIPEAWRPTPRVRQHRTLVRHRHYVIGRSTSVKNKLRRVLSHYNADTKHLFSKAGREYLATIALSAADRFVVDLLCEEFDQHRERLKRVDLQLKAFAKQAPVAEQEARTVLESMPCVGPVTIDAVLAEAGDIRRFGSQRKATAYAGLAPGIRESAGKAKQLGITKQGSRILRMILVETAWRLVNKTRRWASVYEKLKSRCGAKKAIVAVARRVWCVMVSILQSGQKYQPT

SEQ ID NO: 451134 - protein, 321 aa, unidentified
MAAILGIDLAKKKFDVALLRDGKFKAKVFDNSPNGFAALKAWLVRQDVDQVHACMEATGNLFEGLATFLADEGHQVSVVNPWKIKAFGESLLTRTKTDKTDARMIARFCEAMNPSLWKPSPPEIRQLKALGRRRDALIEMRNQESNRDGSSSSRVQESIGTVIRMLDREIDDMTRQIKEHIDNHPDLKNKKDLLRSIPGIGDASIEAILSETNGFANFDKVEQVVAYMGLSPREKSSGSSVRGKASLCKTGNRRLRKMLYMPALVAMRYNPLVQQLAQRLKEKSKHGKLIACACMKKLVHIMFGVIKNNQPFDPNYMLNSA

SEQ ID NO: 451135 - protein, 546 aa, unidentified
MRWDRQSEALPNANRRSRELAMSEMKLYCGLDISKGRAEAALMDHQGIRLGRSKQFVDTPEGRKELCTWVYHQAVRRGLSEVEFGLEPTGGYEVHFQRDLSDLHWEEIQTRVRQLPTTAVGGQNKTTGQRTRTDSTSAWALAEVLKGHPDLQIPILTADQRAFRSWVRRIEKQMVQAQQTQTELQQVLYEVMPFMVPYVEKDPPQWVLTLLSQYGSAQAMAQARRLPNIPRAPQRKLKQLFGLARQQAARLPQHELQKELLQDLVSQFQQLRQRIEQKQNQLIQWVQQTEDWKKIEHWLSLSNLGTYTAIVVYSELFLGDKHYTEAEQIVKSAGLDVDLFQSGDKGILRLSKRGPKAVRRVLYLAALRQVKTPGVFRDYYDRLVQRKGEKHKVWALVAVMKKLLRVMWKLWNEEKDFDPQHETLWKANHPVVQSQAPQPDPAVQNLCTLPSQQRQQAPLSSAMRRKIHKELKRRQNSEDLSPENNPQTSFEKKEKKTTGRKKALPLKRRSPSPPPLPSVKQSSNQNIPISRREVKGPKESKKMMDL

SEQ ID NO: 451136 - protein, 380 aa, unidentified
MRFIGLDVHQKYAEGCEIGPNKEKRRFRIANTRQAWEEFAKTLDSNTRVVMEATSNAFWIHDILSGYPGQIVIANPLKTRAIAEARVKTDALDAQILAQLLAADFIPESWIPNKDEYQLRVLLHHRIRLAKIRTMLKNKIHAALIRNGIQSPWSDLFGKNGRKFLENISLPETEQIIVCSSLKLLDTVQKEMAALEADLCARAKENPNVKLLMGIPGISVLSALTILAEIGPISRFSSPKKLACYAGLVPSVHQSGKTRYAGNITKEGRSTLRWILVQCAQRAIQSKGKLRSFYLRLKEKKGHKIAIVATARKLLHIIWAVLTRQEEYMELTKNLLERKLKSLTKQAQAYVVDMNELLRVIDGIEDVSEKETQSWLFGTG

SEQ ID NO: 451137 - protein, 419 aa, unidentified
MQSQAPAAFAAFVGLDWADAKHEVCLQAAGTAQREFLSLEYSPEEINAWVQTLRTRFNGQPVAVCLELTKGPIVSALRTYDFLVLFPVNPLTVAKDREAFTPSRAKDDPTDAELQVEILLKHRDKLTPLRPQSPTMRALAQLVEHRRRLVGDKVRLTNRLTSALKNYFPQVLHWFPEKDTAIFCDFLSRWPTLKAAQLARRTTLEGFFRAHHVRSTDLIATRIEAIKSARALTTDDGVIAPNVLLVHALVAQLRVTLQAIADFDQAIAQRAQDHPDFPLFDALPGAGAVFAPRLLVAFGEQRERFTSADELQKYAGIAPVTERSGKKSWVHWRLQCPKFLRQTFVEWAAESTRHSFWAQVYYQQQRDKGKAHQAAVRALAFKWIRILYRCWQNRTPYDESIYLQALNRRSAPLLHNLAK

SEQ ID NO: 451138 - protein, 349 aa, unidentified
MLAEVVDAVVGVDTHRDVHEAELAAPSGAVIAQLQVANSSAGFAQLLAWIGEHAPGPRVVVAVEGTRSYGIGLTRALTAAGLQVIECEQPARKDRRGRGKSDAIDAHLAVLFALRQDAERLPTPRADGTREALRILLAARQEMVTTSTGQINRLRALLLSGEDGERQASRAALTDAALSTLARRRLRPEADRHEAVRHQEIRRLVLAIREATRALKANRRELHELADQIAPGLTERPGIGPVSAAQVIVSYSHPGRVRNDAAFAALAGTSPIPASSGQTVRHRLNRGGDRALNRAVHTIAQTRMRSCPRTRDYITRRTTEGKSSREIRRAIKRYITRELYRTLTAAMTP

SEQ ID NO: 451139 - protein, 343 aa, unidentified
MYNAVGIDVSKGKSTVAVLQPGGTVIRKTFDVSHTSQNLNELADYLSSLDGTTKIVMECTGRYHEPMVKALSEAGLFISIVNPHLIKNFGNNSLRKVKSDPADARKIARYTLDNWTELRQYSGMDNTRTQLKTLNSQFSFFMKQKVAAKANLIALLDNTYPGVNKLFDSPTREDGSEKWVDYAYSFWHADCVRKIGLKAFTERYMSFCKKHHYIFQQDRPEKLFNASKELVAVFPKEKTYKLLIQQSIQQLNLASEHVERFRREMNELASTLPEYSTVMGIYGVGKTYGPQLIAEIGDVSRFTHREALTAFAGVGPGVDESGQHKSKSNRASKVGSARHCFRS

SEQ ID NO: 451140 - protein, 354 aa, unidentified
MEDYDGRQVVGMDLHRRRSVLVRMTEDGRRLGTVRITNSPAELRREIARAGKGPRVVLEATYGWYWAADVLAAAGAEVHLAHPLGVKAFTYRRVKNDVRDSADLADLLRMGRLPEAWIAPHEVRELRELTRYRAKLVRLRTSCKDQVHGVLAKLGIPVTCSDIFGTAGSAWLDGLRLPQPYAGKVTSLRHLAGEFTAEIDMLGEVIADLLAGHRGYQVIQQLPGVGPVLAAVIAAEIGDITRFKNPGQLCSWAGLTPRHRESDTKVARGHVSKQGSRLLRWALIEAIQRIPKDSVIGAVKDGIIARRGKEARNIAKVAAARRLLTLVFYGMRDHQIRCLARPAGPAAAAPAKAA

SEQ ID NO: 451141 - protein, 424 aa, unidentified
MSSDLEIAAFVGLDWADQQHVIRLRVAGSAPVEAQLLDQKPETLRAWIGQLRQRFGGRPVALALEQSRGSLLYALMNVDFLLLYPVNPQNLAQFRKAFYPSGAKDDPQDALLLLEMLEKHRDRLRVWVPDDADTRCLRLLAENRRKLVNRRTALTNQLTSLLKESFPQALDWAGPLDSLRACDFLQHWPSLQLLQKTSTSRLRKFYRDHTRLDSDAIHQRLDQIRQAQPLTTDSAVLAAAALMIPALVRQLRCLIESIQQFDQQLKDRFQQHDDYTLFHSFPGAGPVMGPRLLSAFGSNRNRFECAAEVQRLSGIAPVTERSGKSHWVHWRLACPKFLRQSFHEFAAQSILFSTWARAFYDQLRSHGTSHHAAVRTLAFKWIRILFRCWKNRTPYDEQIYLASLRRHGSPLSAVLPTPTPGATL

SEQ ID NO: 451142 - protein, 312 aa, unidentified
MVNVGIDVSKARLDVAVRPSSESFSVANDEAGHKDLRKRLAKLKPERVVLEPTGGYESRVVQVLVDAKLPVVVVNARQVRNFAQALGRLAKTDKIDADVLAHFGEAIRPEIRAFPDAATRELEALVNRRRQLVDMRAVEVKRKPTAPAVVQPKLDELIEFLDEQIDDIDKNLQTVIRSSPVWREADDLLQSVPGVGPVLSSTLTALVPELGKLNRKEIASLIGVAPFNNDSGNGERKRMTWGGRAPVRAVLYMATSAARQWNPSIRAMYDRLVAKGKPAQVALVACMRKLLTILNAIARERHAWNLQLSVAR

SEQ ID NO: 451143 - protein, 420 aa, unidentified
MTKRRYRSTKVNQVNWSQIAEQAGEQKVVFAVDVAKEKFVGALMKPDRTVLKTIQWQHPEQTPELMHGLLSHLGAQRLEVAMEPSGTYGDPLRCLFVTHGVAVFRLSPKRVHDSAEVFDGVPSLHDAKAAYQIGRLHLDGVSRRWEERSEQRRELTAQIAVLNLHQERLQSSRNRLEAQLSRHWPELGGILDLGTLTLMSLVAAYGSPARVAAHAEEARRLMHRSSGGGLRREKIEGVLEAARQTLGMPCLEAERMLLQTLAQDMLDNHRAVQRAEQALAAQVDKDATLHWLASVVGKTSAAVLVSTQGRPQDYPDAGSYLKSLGLNLKERSSGKFQGQLKITKRGPGIARLYLYFAALRWLYRDPIIQAWYQRKVARDGGHKGKAIVAIMRKLAKALWYVAQGVAFDSRKLFNLKALAA

SEQ ID NO: 451144 - protein, 420 aa, unidentified
MKKIKSKRTRKVNSQTLIVAVDVGKDKNTGYYRCADGADGKPFEFSNRRKGFDVFWDRIHRAQEGFDLKHIVVGIESTGPYGEPLVHYLRGKPVQLVQVNPMHTKRLKELCDNSPNKTDKKDPRVIADIMQLGHVLSMVIPEGPAAELRRLTQARERSVERRKALQNQLQQLVFVLFPEFIQVMKGLESKTALYLLRHYPTSQDIIACGLDRLSRIIRRISSGRLRANRARALYETAQHASGIQEGVESVLLEIRQALALLETLEGFIRELEQQLSHYLKQIPYSGLMLSVKGVGLITAAGLIGEVGDFHKFRTISELTKLAGLDLFEISSGKRQGQRGISKRGRPLMRKLLYFAAMSTVRKGGILHENYHRCLERGMPKIKALVAMSRKLLRILFAMVRDDREYNKDYVKAKVVLKEAA

SEQ ID NO: 451145 - protein, 336 aa, unidentified
MHFTHFIGIDVSKDTLDFTVLHTGDFLFHLQVENSSKGISRFVNHLKKIKGKEDKCLFCVEHTGVYNYHLLEYASVNKLDIWVEPASRIKASAGFQRGKNDKVDSLRIAQYAYKNSESAKLWQAPRAVISQLKRLLAMRQRCINLKKQATVPVNENASFSSKVLCKLEASLFKQTLIALDRDIKGIERSIKEVIDNDIELKRLFTLMTSINGIGPVIAAHVLVLTNEFKDFNCAKKFACYAGVVPFDHSSGKSIKGKSRVSHLAHKGIKHLLHMAALRVIQLDGELSGYFIRKAEKGKNKMLILNAIRNKLIHRIFAVVKSGIPYQKNYISHLVLS

SEQ ID NO: 451146 - protein, 343 aa, unidentified
MQTITTIGLDIAKSVFQVHGVDAVGQVVIRRQLKRRQVQPFFERLPPCLVGIEACASSHHWSRQLQALGHTVRLMPPAYVKPYVKRQKNDMADAEAICEAVTRANMRFVPTKTPEQQSCLMLHRTRHLFIRQQTAVINSIRAHLAEFGIVAPVGRKGVTELLHIVADPNDRRVSEVARACLAALGNQLLSLKEQILEFDRMILAWHRSDQTSKRLHHIPGVGPMLATALVASVADATTFRSARNFSAWIGLVPKQHSSGGKERLGSISKQGDRYLRSLFVAGALAVIRYAKIHGTGHRPWLTALLSRRPTKVAAIALANKIARMAWAMMAKGERYKQPAALAR

SEQ ID NO: 451147 - protein, 403 aa, unidentified
MDRCAGIDWAKEAHRVCVLEADGSPLVEQGFTHDERGLGQLCELLVGLGVKRVAIERPDGVLVGRLLEAGLAVLPIHPNQLKAARPRFRAAGGKSDSFDAFCLAELARTDHHRFRVLAPDSDETKALRALTRAREDLVRTRVSLTNCLHAELEAFWPGADRVFCRIASPIALAFLERYPSPTDARRLGEKRLAGFLARHGYCGGKSAAELLARLRCAPEGRVQETEEEARRTAVLSLVAALKPLVEQIRVLDSRIAHAVRAHPDGGVFLSLFRDPGSMLTAAKLLSEIGDRRERYPTAEALAADAGMCPVAKESGKRKVATFRRACNKRLRDTLATLADSSRQHNPWAKDVYLRARERGCDHPHAIRILGRAWVRVIWRMWQDGVPYDPLKHGGRRRLDAAGG

SEQ ID NO: 451148 - protein, 321 aa, unidentified
METQEQRLVLGVDVSKQTLDCATWPATNVWQEGRDAAGIARLVQWAIEHGVRLVVLEATGGLEIDVAAELARAGVPVAVVNPRQTQRFAQALGILAKTDQVDAGVLARFGAMTGIEPRPLKDEVLRELDEVVARRRQLVEMLTMEKNRLASARDPRVCKNLKAHIAWLEKRQSDLDNELRQRIKDSPVWKAKDDLLQSVKGIGDVNAATLIAELPELGRLNRKQIAALVGVAPFNHDSGKHKGKRSIWGGRATVRHALYMATQSAQRYNPQIKAMSDRLTAKGKVPKVVIVACMRKLLTILNAVMRTKQPWNPQHIVIQTA

SEQ ID NO: 451149 - protein, 399 aa, unidentified
MLFVGDDWAEGHHDIEIVDDEGKMLVRRRLPEGLEGVTRLHSLITAQMPDDWVDRDPDEVAGLVKVGIETDRGSWVAALVAAGYEVFAINPLSVARYRERHSTSGAKSDAHLLAEIVRLDRAHHRPVAEDTDLGEAIKLTARTHQSLIWDRSRHVARLRSTLREYFPAALLAFEDLDAPDALELLARAPEPDQAARLSKTVIGAALKRARRRRVEDRTRQLQNILRAPELRQPPALQNAYAAVVASEVAIITALNTQIDRLGAVVGEHFGRHRDAEIYLSQPGLGARILGEFGDDPDRYADAKSRKNYAGTSPVTRTSGTKKVVLARYARNRRLGDALQQWAFCSLRGSPGARAYYQQLRDCPRTASRRAPEQRRVGGGRDGLTPCGRLQTLDRFIEIR

SEQ ID NO: 451150 - protein, 344 aa, unidentified
MVTVGVDTHGEVHVACALDQLGRQLATGQAATTPAGYRALLAWARSLGEVTAWGVEGTGCYGAALARFLGGQGQVVLEVNRPDRSARRRQGKSDPVDAEAAARAVLAGQATTIPKTGDHAVEMVRCLRVARATAIKARTQAANALRALLVTAPAELRERLRGLSAAQLASTAAHLRPGPIVTTTAATKLALRLLGQRYQALDAELAAVDAELDRLTAQAAPGLRQLCGVGPEIAGALLVAAGDNPGRLRSEAAFSMLCGASPIQASSGKTVRHRLNRGGNRQANTALYRIVVVRLRWHQPTRAYLARRTSQGLSKREIIRCLKRYVAREVFAALRADTALTQPS

SEQ ID NO: 451151 - protein, 349 aa, unidentified
MLADQVDYVVGVDTHRDEHVLAVVAAPTGVVVAQRAVGASGRGYAQAFAFADEHAVGRRVWAVEGAGHYGAGLARHLDDRGETVLEAGRGPGGERRLQGKDDQLDAVRAARTVLASETLALPRAGQRREALRLLLVARRGAVDVRREALVQLRSVIVTAPDDLRRELRGLPAGRLIQRCSRFRRSSSRTPDALAVTLVLRTLARRVQAATLEAVELQTEILAHVRALAPQLLDEPGVGPIVAAQVIVTWSHKGRVRSEAAFARLAGVAPVPASSGQTVRQRLSRGGDRQLNRALHTVILHRRLHDPATRDYIARRVAEGKSRRDAVRLLKRYLARHLYRLLQNQGPLLA

SEQ ID NO: 451152 - protein, 438 aa, unidentified
MSNKVIFNLDELFISVGIDVGADFSWMSIALPNQQFVGKPYKILHNSIDSLTTAVSKIKEAEELYSLESRIFLESTGIYHYPLFCYLRDKGFNCSVINPIITKNSTNINIRKVHNDRFDSKKAALVGLNPDLKVSLMPSDLALNCRNLCREYYDLMDNRSAYVNKLQGELRMAFPQYFGIFSKVTINTSLTLLETYTSPSAFLKADRQEIIDIIKSTARFGLTYAQNKYNAIIQAATDANQFGYIIDSNIKRIRLYISFIRKYDEEINNILESLHELADANEDADFVKQIHLIETFKGAGFLSAVSIMGEIGDFSAFSKPKQLFAYFGLDPAVKQSGKFEGTKVQMSKRGSAIARRVIHTLTLQSISISRNGEAKNPVLREYYLKKCDSKPKLVSMGAVSHKVCNMIFAILRDNKPFKIIAPQEHIKQYNAAKCDIAA

SEQ ID NO: 451153 - protein, 336 aa, unidentified
MDRGQEFLAEDQLPTTLEAFGAYFEAIPKSCIALEVGTHSPWVTNLLESMGHQVYVANPRKMESIQKNKRKNDKKDARTLARLVRSDPELLYPIRHRGIEARQDLILLRARDGLVQSRTKLINCVRGLVKSVGGRVPKCSADSFDKQAAGVIPETIRAMLLPIVEQIATMTAQIRKLDGQVEEMADKKYPETTLLEQVKGVGAITSLAYILTLEKPERFKKSRDVGPYLGLVPKQDDSGESSKQLRITKTGDTMVRRLLVTSAQYILGPFGPDTDLRRFGEKLAARGGKNAKKRAVTAVARKLAVLLHKLWLTAEEYEPLRNARLQEEALTAVAKA

SEQ ID NO: 451154 - protein, 395 aa, unidentified
MFIVGIDIAKRSHEAIIIAEDGQVVRKAFSFRNNCTGYNLLLEQVRRLTLVKSQIVFAMESTAHYWLALYARLLKDGYTVMVLNPIQSHSLRELYIRKAKTDARDSLIIADLVRFGRCKASNVPQDKILALRELCRSRAYLVDMAADLKRKLIALLDRIFPEYESLFDSVFSKASIAVLSKYSTPQKVKNANLRKLTDILMESSNGHFSEWKAHQLKEAACSSFGIDDSGGVYSTLLGMFLEQILSLTAQADSLEKQISVFFQEFNNPLTSIPGVGTVLAATILSEIGDITRFSSADKLLAYAGLDPSVKQSGEFKSNQNRMSKRGSPYLRRAIWLASTIAVHRDPMFQTYYEKKISEGLHYMNVIGHVSRKMTAVIFAVLRDGQPYQPILQSAG

SEQ ID NO: 451155 - protein, 393 aa, unidentified
MICVGIDVAKDKHDCFILSSEGEVLADVFTIQNNTEGFDRLLQTIRRCARPEDKIKIGLEATGHYSYNILGFLLDKCLPTYVINPLHSNLYRKSLSLRKTKTDRVDARTIAVMLMSDVDLKSYTDTAYHNEELKSLTRYRFDKVRERTKLKQSVSRLVTILFPELEKLVPTLHMASVYALLSEFPGAKQIAGVHLTHLKAVLSDASKGRYGRDMATTLRDAARCSVGSVMPAKSLELRHTIRLIRELDAEIEDIEAAIQSMMDEMQSPITTIPGIGVRMGAMILAEIGDFSRFDSPEKILAYAGMSPSTYQSGQLSLSGAYSHMEKRGSRYLRYALYNATKYVCLWDPTFAAYLAKKRAEGKHYNVALSHAAKKLVRLIYAMEKSQQSYRNAA

SEQ ID NO: 451156 - protein, 410 aa, unidentified
MELQIQRGCGLDVHQATVVACLLTVLADGKVKKQIRAFGTTTRELLALSQWLQGEGCTHVAMESTGVYWKPVYAVLEGTFELIVANAQHIKNVPGRKTDVKDAEWIADLLLHGLLRPSFVPPKPIRELRDLTRYRRKLVESRSAERNRLLKVLETANIKLASVASDAFGVSGMQMLTALAEGKATPAEMAELAKGRLREKIPQLEPALEGRMEEHHRYLLKLQLRRMRDLDQDLAELEERIQQRLEPYREQLQLLEEIPGVDWTLAAVIIAELGVDMKVFPTASQLASWAGVSPGNNESAGKRRNARVTKGNFYLKTALVEAAQAATRAKGTYLRDKYYRLKARRGSKRAVVAIGHKILVAVYHMLSDQVSYNDLGDLYLDRLNKEHLTRNLVRRLERIGWRVTLEKAAA

SEQ ID NO: 451157 - protein, 391 aa, unidentified
MSMYFIGIDISKYKHDCCIISAADQKVVSKVTIKNNKAGFNELLTIIHSLANPADIRIGFESTAHYALNLELFLENSLLTFMEVNPVLISEYKKSKTLRRTKTDSVDCESIARWLMTVEYKPHSKGFYHAYSLKSLTRLRDKLIRQRSFYLVKITNVLDHTFPEFKPFFNERLSKTALYLLENYGSAEKMARMNSASYEKLRSVSRGKFSPQQFLRLKELAANTVGVNNSIFDVELNSLLSLYKSLVKEIDTIEKEINKLIEEVHPHYMSVPGIGPLSAAVIYSEYGDISNFTNPGQMLAFAGIEPGINESGTESHGGKMVKRGSSQLRYTLINCCLPLIRFDMTFATYYAKKRGEGKPHRVAITHVAKKLIRVIYALESQDIDFNTQKLR

SEQ ID NO: 451158 - protein, 355 aa, unidentified
MQLIITDAVVIGVDTHKDVHVAVALSGLGVWLGNASAPATADGYRQLADWARSHGAVHAFGIEGTGSYGAGLSRALSAQGFRIIEVNRPNRQLRRQRGKSDTIDAEAAARAVLAGQADAPKSGDGEVEMIRHLKITRDTALKCRTQAMVTLKTLLANAPQPLREQFIAVTGRMTLIRALAALRPGSMTSTTASAKTALRALARRWLALNDEIREHDAALEELVRRRAPALMETPGVSTGTIAEMLVVLGDNPERIRSEAAFAKLCGVCPIPASSGKTTRHRLNRGGNRRANAALHRVAVVRMRSHRPTIAYVRRRTAKGKSTREIRRCLKRYIAREIFRHLCAEPRTNATASKAS

SEQ ID NO: 451159 - protein, 351 aa, unidentified
MMIRGVDYHPSFQQIAFLMEESGEYGERRLNHSDGEAERFYRDLHQGRIPVRVGMDATGYSRWFERLLAELGLELWIGDPAEIKARRVKKQKTDRKDAELLLKLMLEDRFPRIWVPSPENRDLRQLLWHRHRMVQMRTRIMNQLQALAMNEGKRWRSKLWSQPGRTEFEKLVLGPWASRRRRELLELLDRLNPSIDELTAAVGQEVHKRPEALRLMTHPGVGPVTALAYVLIIGTPERFDRGKQIGSYLGMIPTEDSSADKQRLGHISKQGSSLLRYLLVEAAQAASRFNPHWRRRYIHLAMRRHKSIAKVAMGRRMAIRLYWMWRNGCEYSPSFEFGSYVGQPGTRHGVQ

SEQ ID NO: 451160 - protein, 343 aa, unidentified
MKLTRVGVDLAKNVFQLHGVDRAERSVWCKRLKRNRWINEIEQNVEPGVEIGMEACGGAHHWARLLQSKGYRVRLIAPQFVRPYVKSNKTDANDAQAVCEAMSRPSMRYVAVKSIEQQDIQAVHRVRAGLIRDRGAKANQLRGLAYEYGLVAPRQIAALRLAVPAWLEDASNGLTVRLRALLCGLYADLRALDERVRELDKEIRAIGRENEAVGRVQQLRGIGPLIASALVAMIGDARQFKNGRHVAVALGLTPRQHSSGSKERILGISKRGDSYVRTLLIHGARSALRTAAGKDDRMSRWALALAKRSHVNVAVTALANKMARVAWAMLKHGSAYEPNGLAA

SEQ ID NO: 451161 - protein, 352 aa, unidentified
MTVIGLDLHKRYITACAMTEDGAILAEQRRVVPEVEAREAFFAGLPAPLTVAMEATLYWAWLHDQLVARGITVQVAHAYQVKLIWQARAKTDPIDARKLAELARTHLLPTVWVAGPELRGQRKLLRGRAYLVRMRTSVKNRIHGHLMAENCRTAVTDVYGKAGRAWLETLALPAATRLQVDLLLEVIDALNVRIKRMDRDVARLARHEPVSLQLQTVPGIGVFGAMLLLTEIGSIDRFRSSHELAAYAGLVPSTHSSGGKTTHGAVGRAGNSWLKWILIEAVQALKLAPGPIGAQYQRLVRAKGKQKATVAAARKLCCYLFWMLKEGWTYEQWLLQHHKLEVRPTQRMGTAA

SEQ ID NO: 451162 - protein, 317 aa, unidentified
MEVTPIFVGIDVSKAQLDVAIRPTGHRESVANDKAGIKALVKRLGKVGPAWIVLEASGGFERQVMHALVCAELPAVVVNPRQVRDFAKATGQLAKTDRIDAEMLARFGEAVRPALRPLPDTVTVELRALITRRRQITEMIVAERNRLAMASKAVTKRINAHIGWLESELEQVDKDLDRTIRHSPIWKLNEDLLRSVPGIGPVTSRVLLAELPELGKLNRKQISALVGVAPFNRDSGTLKGRRCIWGGRASVRAALYMAAWVATRRNSVIRKFYTRLISAGKERKVALVACMHKLLTILNSMIKHKTRWSEKISLQTT

SEQ ID NO: 451163 - protein, 320 aa, unidentified
MSDRFAVGIDADSRTLVVACHGTKGSARIANSASAITKWLSALPARSRIGVEATNRYHELVVQAAQKAGHAVFVLNPRDIKHYAKSVASRGKTDSGDAQIIARYIAKEADNLHEHVARSPAQEQLHVLLQQRDSLVRSKAKLNLSLGVGASESAIFGRIFGGLKEAIAMLDQQIQQLCRSGEQRELYRRIMTIPGIGPTVAAFVTHHITRWPLASSDAWVACTGLDPRPNESGARIGRRRLSKRGNAGLRQILYMAAMGLTRSKGGKPLYLAIRERGHSSTASFNILARKLARIAWGVFKSGRDFDPAMLKVGQACFQQA

SEQ ID NO: 451164 - protein, 351 aa, unidentified
MWIIGCDFHGRYQQVAAMNEETGEVIERRLSHETKEAETFYESLPRGALIGMEASCTAQWFERLMDRCGHRLQVGDPATIRASVVRKQKTDARDARQLLELLLTDRFPGIWIPTPAERDSRQLLVHRHHLVRWRTQVRNQLSALARGQGIFPRTRFWTQAGRQRLESLPLDRWAGQRRQDLLRLLDGLDEQIADLTRQVEQQARARNDAAELMQQDGVGPIVSLAFVLTLGTAKRFRRGKQVASYLGLNPRERSSGGTQRFGHISKQGNRMMRWLLVEAAWIAVRKDLELQRVYRRLAFRRGRKIAAVAVARKLAVKLYWRLRDFEAKNAPAAAGSDAGPLGQRLVHSSTL

SEQ ID NO: 451165 - protein, 344 aa, unidentified
MKKVLIGIDFSKEKFDVAIIVKSTSTQEHALFDNKVSGYRKMIKWINSVVEDIPCSSWLFCGEITGGYSRMMSDWLYAQGYDVWIENALVIKRTFPLKRLKNDTVDAFMIAEYALRFEDRVQLYEPLSQALTELREIFLYRHHLVRHRCSFEVRRIEKRFTQQKSANKNVISQSARHIITEINKEIAKCDEKIKECIESDDQLSSIFAIVTSMPGIGTINAVSLMVYTNNFTKFAYNPRKIACYYGIAPFGRDSGTSVHTDPRVGFIANKMLKSLLTQAALASVRTCPQIAKYYQRLIERGKKPIVALNNVKNKMIAIITAMVRTGCMYQPDNICLATQSVIVK

SEQ ID NO: 451166 - protein, 407 aa, unidentified
MAATRKQHSTRRPAKRNQAAARPQTAPRLYVAFELSWNEWKLACASGPADHPRLKSVAARDTQAVLQEIAKAKKRFGLAEDALVHSCYEAGRDGFWLHRFLQSKGIDNQVVDSSSIEVQRRGRRRKTDRLDAGKLLSMLIRWHQGEEKVWSVVQVPSVTDEDRRQLHRDLLELKAERTRHSNRIKGLLAGCGLAVATIDARFAEVLAELRTWDGQAVPPELQRRLQREHQRWQLVDRQIRDLENERVRTLGKSQDPFLIKVRQLLRLRGIGLNSAWMYVLEFFGWRRIRNRRQLAALAGLTPTPYQSGVDCHEQGISKAGNRRMRTMAVEIAWCWLQYQPHSALSQWYQKRFAKGSSRQRRIGIVALARKLLVALWRYLETGEVPAGAETVSWKRGLPRRASEAVPA

SEQ ID NO: 451167 - protein, 309 aa, unidentified
MPAVGIDTAKNKIDVAYRGSVRTIARNESSVMQVLDALPRPCQIVIEPTSRYHRMVVEVARGCGHEVRLVETCKFSKYKDSLDLRCSNDKKVALALERYAEKEWDAIPARVPAPKAMEQLRDLISLRESQLRLKIAFESAQSEFGKAPAKSNLALKAMEASIADLDKKITRIASKNPLYKVLLNMDGVGPVSAPVLVWLFEAHDFKDVDELIAFVGLDVRIRESGKFKGHRKLSKRGWPVIRKYGYCMANAMRSIDDLKPLFEKYDKRGMRAKATNMIVFRKLLRAAFAIAKHGEQYDRATFLKPRKTS

SEQ ID NO: 451168 - protein, 341 aa, unidentified
MYYAAMDVASKASFVYVRDRKGNKIASGKVTTDKEGIGNFFKEYADQKLEVAIEAGGSTRWIYDYLKWLGMDVYVVNPNKVKAIADSKRKTDKIDAKILSELLRIDALPQKVHMSEGKNRELRDLIQARHQVIKGYTNLMNYLRGLLRQEGIRIKAREFITTDYTERLKEESLPDHVRKIIAVYAVTIKAMIEEKKKLEDSIKKYQTRDIELIKTIPGMGDISSRTIQAAVGDIKRFKRAKQLTSYCGLVPSVRQSGERTEYGHITREGRSEVRRVGIQCAHALLHSKAKESQPLQEWWRRIAERRGTKTAMVALARKLITITFYVLRDQKAYDHTLLKTA

SEQ ID NO: 451169 - protein, 410 aa, unidentified
MAYKVAGIDVHKKVLMVVVWDVSDRESEPQRRRFGTTTSELRQLSTWLREQGVQEAVMESTAQYWRPVWYELEPHMGLQLAQAFSNRAPRGRKHDFRDAERLIRRLVAGELTLSFVPEPEQRTWRTMTRMKVQLSEDKSRLHSQLECLLEEMRIKLSSVISDLLGVSGYRILRALAGGETDPKKLAALGDDRLQCSEKQLIDALTGNPQPVHLQLLALYLDRHQMLVGQIAKLDGMIAQALKPHQEAVARLAVVPGLGADSAQQVIAEVGAEAGTFPSAAHLSAWVGTCPGRDESGEENHSSRSAKGNKYLRRVLNQAAHAAVKKKGSHFQAVFRRLLPRLGYKAAIWAVAHRLCRLVWKILHEGVTYVERGSEPDPSTKRRRAQKLVKTLRKLGYEVDLKPITAACAAA

SEQ ID NO: 451170 - protein, 462 aa, unidentified
MPGREDSETGESSRRQLQGLPVIRRNVAGIDLGSERHWVCAPTRDGSGREIASFGATTAELLRLAGWLKARQVESVAMESTGVYWIAPHEVLEAQALQVLLVDTRQLARVPGRDKKTDPSDCEWIQRLHSCGLLRGSFRPEEAVCMLRTLVRDKANLVAESGDWLRRMQKSLDQMNVRVHRAVSDIDGVTGMAMLRAIAAGERDAQKLAQLRDRRCSKTQQEIAEQLTGHWREDHLFSLQQALKMYDAVQQRIAAYEQEILRQLGEMEEPGQQGQTAPPLHNANKTKAIKKRGQESKRQALYRMSGVDITQIDALGVETVEVVLSEYGPDLSRFPTEKEFVAHVTLAPRVPSSGGKPLKKKKRNSASTRVAAALRMAALSLRHSQTALGAHYRKLAQRLGGDVAVFATARKLATLIYRLLRWGQPYVDEGAAAYENRYLQQRIKSLTAKAKQLGYELTAVNA

SEQ ID NO: 451171 - protein, 416 aa, unidentified
MPLALPDAQVFTGIDWASAEHAVCVLDAAGKITAQFTIAHSAEGIASLVRRLARYGDPAGLPVAIERPSGRLVDLLLEAGHPVVPVSPNAIKTWREGEVLSGAKSDAGDAAVIAEYLRLRYHRLAPAVPYSDETRALRTAVRTREDLVEMRVAATNQLSALLDAHWPGARAIFADVESPISLDFLTRYPTPAAARHLGVKQMAAFMVKHGYSGRRPPAELLARLHHAPAGTAGQALTEALRDAVLAVVAVLRALNGAIKDLDRSAAAHLGEHPDGQIFTSLPRSGQISAAQMLAEWGDCRQAYDGPDSVAALAGVTPVTRQSGKYRGVEFRWACNKRFRRAMTTFADNSRHASPWAARIYADARAAGKDHPHAIRILARAWIRVIWPCWINQVPYDPARHGAAAALARKTSGQSAA

SEQ ID NO: 451172 - protein, 402 aa, unidentified
MNAVGIDVSKGKSMVAIMRPFGETVSPPFEIKHTASDIHSLVELINSVEGESRIVMEHTGRYYEVLAHQLSEANLFVSAINPKLIKDFDNDSLRKVKSDKADAVKIARYALDKWHNLKQYSVMDELRNQLKTMNRQFSFYMKHKTAMKNNLIGILDQTYPGVNAYFDSPARSDGSQKWVDFASTYWHVDCVRKMSLNAFTCHYQNWCKRKKYNFSQSKAEEIYGKAKELVPVLPKDDLTKLIIRQAVDQLNSASTTVESLRTLMNETASKLPEYPIVMDMKGVGPSLGPQLMAEIGDVSRFTHKGAITAFAGVDPGVNESGSYEQKSVPTSKRGSGTLRKTLFQVMDALIKTKPQDDPVYLFMDKKRSQGKPYYVYMTASANKFLRIYYGRVKEYLATLPES

SEQ ID NO: 451173 - protein, 376 aa, unidentified
MLLTILPSEYDIFIGVDVDSKSYATTYRDHDNQGRSLKMPADPLNLHSYFKKRFPDKRLLFAYEAGPTGYDLHDHLVKQGESCIMVHPAGVPTAANSCVKTNRIDSLKLAEEAQSGKLKGIRVPSEAYRELRHLVNLRQQYATALKQAKQRIKAFLLFEHIRLPDWASEKIWTSRWRFALKQAALSPTHRFKMDLLLKDLDDARDRILLVLRQMRQFCASQEAIAKNLTCLQSLPGFGFIVSTYFLARSGDPSHLKNVRELGAFSGIVPREYSTGDRVQKGHITHMGDRNLRRLLVEAAWVAIRKDGELAQFYSRIRSKRGQAGSRIAIVAVARKLTCRAYRVLKDQRPYKIHQFMKPSFEKEQELACLGRLDKSQ

SEQ ID NO: 451174 - protein, 352 aa, unidentified
MQDYIALDVHKHYTFAGREEFDTCKATYNRLEHQRGIFKRYLAEVEPGTTVALEATGNWYWVVDEIEASGMKPALVHPYKAKVMLGCINKTDKLDVIGMNRLQRTGTLPTVWIPPVETRDLRELPRTRMFMMQIRAKLKNRIQATLTKYALNVTGYSDSFGQKARQVMDKQMEELPPQARKATQQLIEVLNPLEEQIRDQEKRIHELVKVTPEMNFLVTIPCIGKILAVVIASEVGDISRFPKAENYTSYAGTAPRVKASGDKFRIGRLRTDVNHYLKWAYIEAANCVCMHQRDFPDRHVTLFYKRIARRKGHQKAIGAVARHLAEATFYVLSRKQVYRDPAFNKRVVTTGT

SEQ ID NO: 451175 - protein, 391 aa, unidentified
MIYVGIDVAKDKHDCFIINSDGEVLFKAFSIANNRNGFNDLYQKIESVMEDVTKVKVGLEATGHYSYNLLGFLLNKGLTTFVINPLHTNLYRKSLSLRQTKTDKVDARTIASMLMSDVNLKSYSDTSYHNEELKSLTRYRFDKVKERAKLKTSVSRLVCILFPELEKLVPTLHMASVYAMLSEFPGAKQVANAHLTRFTNLLSKVSKGRYGKETAIAFRNAARTSIGSNMPAKSLELKHTIKLIQELTSEIDEIENEIKLIMDEINSPILSIPGINYRMGAMIIAEIGDFNRFDSPDKILAYAGFSPSTYQSGQLDGAYSHMEKRGSRYLRYALYNAAKYVCNWDPTFAEYLAKKRAEGKHYNVAISHAVKKLIRVIYHLEKTNQQYIKAV

SEQ ID NO: 451176 - protein, 396 aa, unidentified
MKKVYEKVASIGMDVHYKFSNVAFRDGQGQLLRREKLDHRDWPKLVDRLRQWPPEVPIAMEGSFGWPWICDLLTQLGRKPQLANSFKIDKVREARGWAKTNEKDAALVSLMPLEKGDWWKVWMAPPEVRDRREWTRFRADLVQMQTRTKNRVHAIFHRHGIFHQYSDLFGSKGRMFLEALGEQDNGLLSGGAWWALRGNLAILSLVRRQIAEVLKQTHRQLQRTPVTRQLRQNVPGLGAVLTHVIVAETGDMARFGYNHRRYASYCLLAPRSDDSGEPREEPAPGRKLGRRGNRVLKWAFIEAARGAVRRGGIWRAMYDRYTQGGKKSRNRGYIKVARALGKLVVGQWRQAVLAGQTSQDSPQAAAERKHRRGRRGGKSGSTRSGTGEPKHTMVEA

SEQ ID NO: 451177 - protein, 329 aa, unidentified
MNIYVGTDISKLHFDSFIEGKVYRFGNDKSGHLNFIKRLPEGSWVVMECTGTYGHRLAETLVDHGFLVSMVNALQVKRFAQSRFKRAKTDKADAKLLTEYAQSLEQCHDERDRLRLWIPEKSSQVFLKQLRTIYEMLVHVRTMMTNQLEALEGYPKVSPMARQTLQSLLKTLNIKINAIEDAMNTIVDDNYPDESKNLESIPGIGRKSAVVIIAAVGDIQRFSDAKAFAAFAGLAPRVNESGSSIRGRGILSHYGVTWLRSQLYMCAMSALRWNKQCKELYARLIAKGKSKKSAILAVAHKLIRQIYAVLANKTSFDVDYNITKITLVG

SEQ ID NO: 451178 - protein, 346 aa, unidentified
MNEITLIGIDLAKNILRINCVDKKGKRVMNKSLHRDGLLRFLATLPQCTVAMEACASSHYWGRAIASLGHTVKLIHPHYVTPYRLGDKNDANDAAAICAAAQRPDMRFVRLRSQRQSDIQSLHRVRSGLVQERTATINRVRALLAENGIVIKQGPSAVFTQLPAILGDETSELSAIMRRILGSQHDHLLHLREQIKELEGTLNTLIAEDADCKSLMQIPGIGPLTATMLASEIGNGSGFSRGRSFAAYIGLVPKQHSSGGKNLLLGISKRGNRYLRTLLVHCARAAMRTIIFGKTPFGGSIERWVLQLMERRGKNKAIVALAAKLARIAFGMLSNGTSFQKAAGAC

SEQ ID NO: 451179 - protein, 380 aa, unidentified
MTCKECGQVIKLTRTMNKCHSNTELSSHEGTRRQFNGGRCAIKLGIDVHQDFYVVVMQVGGANPKPPQRFQKEAFLHWAAKLKQSSGAEIHAVYEACGFGFGLQRALSALGMRSHVVCPQKLDEANKRVKTDGLDAKALCLRLDRFVQGNRDALALVRVPSEQEERLRAIHRQREQLVKARKQLEAQGRNLMVNHGIEPVKIWWKPRKFALLPLPQWMRELLNNSQPILIALQEKIGALTLQLQAAAGSKQPRGLGAMSSVIIDREIGDWNRFNNRRQVASYTGLCPGEYSSGNTRLQSCVTKHGNPRLRAALVELAWRLVRFQPNYKPICKWNATLCKGALATGAARKKAIVAVARQLAVDLWRIRTGRLSAETLGLSN

SEQ ID NO: 451180 - protein, 339 aa, unidentified
MSDVTVVGIDLAKSVFSIHGVDRQGYVQIRRTVRRDRLLEFVTQLPACIIGMEACSGAHEWARRFKALGHEPRLVAPKFVVPYRKSGKNDGNDAEAICEAVSRPNMRFVPVKDLDQQSILTLHRVRQGFVVERTATINRIRGLIAEFGMVLPQRAAEVRRGAASLAEQLPSLAACAVSDLLQHLSVLDDRVRFYEHQLKQHANSDDRARRIQRLEGVGPLSASAIVATVGQAHEFKNGRQFAAWLGLVPRQHSTGGKVRLGRITRQGDPYLRTLLVLGARAVLRTAARRTDRLGRWALSIRERRGYHRACVAIAAKHARIIWALLAKGEAPEVTSMKAA

SEQ ID NO: 451181 - protein, 369 aa, unidentified
MKHVSTIGLDLAKHVFQVHGADAEGLPVFNRKLRRSEVLRFFEKLPPCLVGMEACGSAHYWAREIAALGHEVRLIPPAYVKPFVKRGKTDAADAEAISEAVTRKTMRFVPIKTAEQQAAAMVLKTRALLVRQRTQAANALRAHLAELGIIATAGLAKVEALVAIVRDETDARLPAAARFALRAIADEIEASADQIERLEHAIVVETKHEDMRRLTTIPGVGAITAATIKALVPDPGGFKSARHFAAWLGLTPRPHSSGGKERLGGISKMGNPELRSLLVVGATAVLRVVRNDARARPWLKALLARRPFKVAAGAQANKTARIIWALLNKGGRTNVPTRSLPRPPSDGRSDRQSDLTGAGRQRARCNNSR

SEQ ID NO: 451182 - protein, 351 aa, unidentified
MKKIAYLGMDVHAGHCVLGQMDFNGNFIGNKTFPTSEQNIIEALKAVKARNKFLAMEEGTLAYWVAQVAKPYVTEVISSDPKENALIFRSPHKKDKVDTKKLCRLLRLGELKRVYQPENDDRAIFKAAVQHYIDLRDQQISLKNKIKAMYRHWGVIDVAGETVYGMKKRHDYLKRVKHVYIQNQLHRLYHLMDETQSMQNNALKAMKQLGRKYPEIKEFKRIPGIGDILAHIFDAFIQTPERFEKRSQLWRYCRLGVTDRSSDGKPLGYKRLDRSGVSELKSIAYQAWLSAMRGDNEVKRFYSESLRRTFNRVHARLNTERKILAVMYGIWKRGEAYSPQRFLDSSQIGVV

SEQ ID NO: 451183 - protein, 459 aa, unidentified
MCQEHVVITGRPKRLTRLGCEPGSIVVVLEPAYAGIIPHFRKEEQMSFIGLDVHKKFINGAVIDSPSEHAKRVFTIPTKKESITRFASSLSPSDSLALESTTHAFPIANLIRKNSNGANVVVSNPMKTKVINESKNKSDSVDALALANLLASGYLPVIWEPDSETGSLRKITSYAQAIGRDRTAVKNRVHSILHRNLIEYSGISDLFGKKGRKFLFSLSLPEDEQLQLAEELETLDFLDRRFVSIKERMAKVSVKDNYIKRLMTIPGIDYFIAFSLKAAIGNDISRFKSPKKLVGYFGLCSSVYQSADKRYTGKITKRGRSHARWVLVQAAQAIVKSPSPLKAFFLRIKNKRGRNKAIVAVAAKLSRIIWNMLTKGEDYFYSPPLRTKEKLAKLRIIATGEKMKSGPKKGIPSAGGRTAYLKARKNDKTTAKSAECDYVKFIKERFSSRKSARRTEFLS

SEQ ID NO: 451184 - protein, 480 aa, unidentified
MNVKANQTKKQVNVENQANLLLSKEELRKRMEGVEKELKSYTWRELETNGKFSKNDKLSFITDDMLIVGCDIGSETHYIRAIDIRGRELGKGAFEFSNTAEGFENAKAWMLKHAAQNEKRQIVLGLEPTGHYWFALAAWMISKGISVVQVNPYAVKQSKEIEDNSQLKDDRKDPKLIANLVKDGNYGMPYLPEKTYADMRRLSMFRDQLTEDRIRNINRLHRELKIYFPEYMDAFGKIDGAFALEVLKVSCIPSEIAALGTEGLRNIWHDAKLRGRGYSRAGKIVNHAEKSVGLEDGTSAGREAVRWFSEQIMKLDEQLARIESTLHKKCMEIPYAENILEIKGVGENILAGIVAEMGDISRFDDVKEIQKLSGMGLVACSSGKHRGQTKISHRGRKRLRYWLFQAAKSAVSHAEEFKQLHVYYTTRARNPLKKMQSLIVIACKILRVIYTILKTGATYDPQKMLKDIKRPEAAPAQMAA

SEQ ID NO: 451185 - protein, 243 aa, unidentified
MNKQFVGIDLSKAQLDVALHPQTQQWKLANNDAGIATLVEYLKKHKPSLIVLEATGGLERPVAEALVKAGFQVAVVNPRQVRHFAKAKGLLAKTDVLDAKVLAQYGEAMKPEARPLSDEQTQQLQDLLARRRQLLEMLKAEKNRSSRAQPPIRSQIQTHINWLEQHLRLLEQGIKQLQQDNRTWRKKAEVLQSVPGVGPVMSATLLGDLPELGSLSHKQLAALVGVAPFNRDSGRWKGQRVVW

SEQ ID NO: 451186 - protein, 415 aa, unidentified
MALKIVYKICCGIDVHKTFVVACIASTNSKGITTYERHRFSTYTSGLKDLLQWLLKRNCKDVCMESTGKYWIPIYNILENDCSIVLAHPKYVKAIRGKKTDKKDAKWIADLFKHDLVAGSFMPPADIRQLRDLMRYRFKLTCFKSSEKNRLQNCLTVSNIQLGNVVSDTFGKSAQAILDKLLENPADTSFDLEPLVYKSLKKKLPELRDAIDGYITPEQAGKLKVIKAHYENLESRKAELEELILALAAPYQQELAILQTAPGIRSDFTAIGIISEIGTNMEAFPSAKHLCSWAGLTPTNNESAGKKKSVRVSKAGCYIKPLLVQCANAVVKSKKHPEIRNRYLRLKKRRGHKKAIIAIARMLLTALYHMLKNGENYNAELYRKSDLPSVDREITVEQAIIIARKQGYKIKSATA

SEQ ID NO: 451187 - protein, 321 aa, unidentified
MTYIGIDVSKDTLVVAYSPEKNSKTRTFKNTTRGIHEFIRTISKDEHHCVMEATGNYSALLVYLLSEAGITTSLENPLKVKNFARAMLSTVKTDEIDARLIALYGEKMNPAPYRLRSDAILTLKQKRTVIRQLKKQLIATRNLKGSMEVLPFFDAKCKKSIEKTIAFLEKQVKDLEEDLSSLARSEYKKQMDLLTSVKGIGVTLAAALIMATGGFTYFDNAKQLTRHLGLSPTYQQSGTSVNFKGHINRNGDSSLRSQLYVAACSSLRCNTECRACYDRLRSNGKPGKVAIIAVANKLIRQAFAVVTQEKLYVDGYVSSKK

SEQ ID NO: 451188 - protein, 397 aa, unidentified
MIAVGIDISKAKSTVAVIDSDGTVLASPFTMAHTQPEMEAFVSYLKGLGEPTTILMEYTGHYHYPVLKKLQGEGFPVCIVNPYQMKKYGDVEIHKAKTDKKDALRIAAYALEKSYKLVPYSSMEQKYEDLKFLSRQYSQRITYVAKLKVQLIALLDQTMPGITRILPLNSRNPEKCALLLFIRRFKSFDEIHRIGKTRFLASYDVLAKKTSERSASSKGLSIYELAVDSITTRGEDPYIWLSQNQCVDLLSTTQNAADEIISQMRNIAETIPEYKVLRSMRGVGDRLGPIILAEIGDIRRFHSGKALNSYAGNDAPPYQSGQFESRNRHISKRGSSALRKACYEVMQALKLTKPQDDPVYLFMLKKEQEGKPFNVAKMAGVNKFLRIYYARAMELYK

SEQ ID NO: 451189 - protein, 386 aa, unidentified
MTKKITNPEILAIRAAADVDPECGRVWVGLDVGLKSTSVCVLDREGKVVHHCSMKTHPTEIGRYLAKNFASNVAVIGMETGAMSAHLAGGLRRQGYHVAVMDALQVHRVLSLKRNKTDTNDARGIAEITRTGRDYLTEVYVKSAACFEVRAQLIMRHRLVQQRLANENMIRGLLRVYGGRVEPGAKSSATYRDRVVEQLHVIQDREGINLRPRILPVLDLCERLQTDAVRIEAELEALAAANPVCRRFMAVPGVGAITALSFFTAIEEPSRFRRADDVAAYIGLTPRVYQSGESLTHGKISKMGNRLTRTHMVNAATVLLSATKTFSSLKDWGIRLAKKVGFNKAKVAVARKLAVILFGMWRDGTHFQFKAETVEPHRQMMTAARA

SEQ ID NO: 451190 - protein, 414 aa, unidentified
MSRKIAGIDVHKRVLMVAVGPADESVATESPRFQMRRFGTCTSELLHLLAWLEAEGAEEVVMESTAQYWKPVWLALEGHFRLFLAQAWSNRAPRGKKTDFKDAQRLVRRQAAGELTLSFVPDGEQRQLRSLTRRRAQLTRDRVRIQNQVESLLEETRIKLSVVVSDLFGVSGMRILSALGRGESDPVKLASLANARVQRTPEELADALTGTVTEVHRKVLQQHLAMVQLIEEQMEELAQLAAAAMQTYSQAIKRLAAIPGIRVLAAQQIIAEVGPQASAFASAAQFSSWIGVCPGRNESAGDNHSSRCAKGNIYLRRVLCQVAQAAVRTKNSYFEQKFKRLLPRLGYTKALWAMARVLSVVIWKILHDGVEYLERGAASTPQAVKRRLQHLKQELRRLGYSDQLTPLTSEVAVP

SEQ ID NO: 451191 - protein, 445 aa, unidentified
MTRRTIGIDLAIRGDHVGQIFDDGRPVSKPIRFRNDPASLDAFVAKATEGMSPGGTVQALMEPTGMSWFPVAHRLADAGVEVIRVKGQRVRALRRYLSEHAKTDLADAHVLGAMPLFGGPRFDPVHIPAPKSHALQRLTKQRSRFQDAVAGAKRRLLDLVRWASPGLEAVLPDLRTRLSLALLQSWVDPAAVLKARRSTLARFVGQNASGNHPHSGPFVDALVDGLKRAARDALALQGRHVDFAELQAEVALEVGIIIRHLEAIAELDRRIATLYAEIHPSDALRTIPGVGLHLAPVLIGVLHTSERFRSERHIRGFCGLFPNRADSGGAERPGQKISQSGNDRIKRALILAADTARRIDPDLAEVYWRLMTTKGHHHKQALCAVANRLVNRIFRVLRTGAPYGLRDLDGRPIEIAEAKAIIAARYTVPESVRASRRVNRIQTAA

SEQ ID NO: 451192 - protein, 355 aa, unidentified
MGRPQHQRKTAVTHYIGIDVSLERSSVCILDGSGKIVREAKIASEPEALVAFCRELGLPVTRIGLEAGPLSQWLHAGLTSAGFDTVLLETRQVKAALSAMVVKTDRKDARGIAHLLRMGWYRPVHCKSLPAQEVRALLAGRKLLLGKLRDVELSMRGLLRGFGLKVGEVSKVRFEMRIRELIAGHGMLEQVIEPLLCAREALNRQYNVLHRAMLNLVRRDAVCRRLMTVPGVGAMVAITFTSAIDDPARFPRARAVGAHFGLTPKRYQSGETDVVGAISKIGDEAVRTALYQAAHTMLTRSGQFSSLKRWAMEVARRRGLKRATVALARKLTVVLLRMWTSETEFRFSRLAVAAA

SEQ ID NO: 451193 - protein, 342 aa, unidentified
MQVTTIGLDIAKNVFQVHGIDAAEKVVVRKQLRRSQVLAFFKALPPCLIGMEACATAHYWARELTKLGHRVRLMPAKDVKAYVKRNKNDAADAEAICEAVRRPTMRFVQTKSAEQQGRLMLHRVRDLLMRQRTQVINALRAHLAELGITAAQGTAGLKELLKIIASDADERLPVDAHASLVVLAAELQAMQTLVGSLEKRIMAQHRGNEASKRLETIPGIGFIGATAIAATVTDPTAFRSGRDFAAWIGLVPRQDSTGGKQKLGPISKQGDRYLRRILVVGAYAVLRYAKQNPEKYPWLTQLLARRPFKVVAVALANKMARMAWALLAHGGTYRAPALAAAA

SEQ ID NO: 451194 - protein, 343 aa, unidentified
MTRFVGLDVSQKLTSICVVDDTGRRLWRGQCHSDPEQIERAVRGHAGDDASIGIETGPMTPWLVHELRQRGLNVTCLDARHASAALKMQMNKTDQNDAEGLAQIMRTGWYRPVHVKSLDAHRARALLGARAQLVGMTTRLSNHIRGVLKTFGLLPGAMRGLPFDKRVEALLAERDELAPIVRPMLAAWRQLREQIAAFDKAVRALAKASPTCRLLRSVPGIGVVSVLAYVSTVEDPARFTRSRSVGAHMGLTPRQYQSGEVDRSGRISRCGDTLARTLLYEAAVVILTRVKRASRLKDWAQAIAKRSGVGKARVALARKLSVILHSIWRSGEPFRWSEQPSGT

SEQ ID NO: 451195 - protein, 377 aa, unidentified
MSKIRFVGLDVHAETIAVAVAEPGGELRSVGVIPNRLESIRKLVGKLGPVQDLKVCYEAGPTGYVLYWQSTQLGVACEVVAPTLVPTKAGDRVKTDRRDAEKLARCYRGGELTAVWIPDAAHEALRDLVRAREAAKKDQLRARHRLGKFLLRHGQRPTGAGTAWTKKYLEWIKTHVRFEQPALEATLSYYLHEVEHMAERILHLEKAIDEAVAQASPDIRAVIEALQALRGVAQMTAVTVVCELGSLARFPSPRQLMGYSGLVSREHSSGNRIQRGAITKTGNAHLRRVLVEASWAYQHRPNVTGFLLRRQKSLALSDEVKRIAWKAQYRLHKRYQAFTARGKNKNQIVTALGRELLGFVWAIAVHTETQMKSRQAA

SEQ ID NO: 451196 - protein, 377 aa, unidentified
MSKIRFVGLDVHAETIAVAVAEPGGEVRSLGIIPNKLESIRKMIGKLGPVGSLKCCYEAGPTGYVLYWQLTQLGVACEVIAPSLVPVKAGDRVKTDRRDAEKLARCYRAGELTPVWVPDAAHEALRDLVRAREGAKKDQLRHRHRLGKFLLRHGKRPIEAGPSWSRKYLNWIRIHAHFEEPALEATVEHYLHEVEHAAERILKLEKAIDEAVAQAPAEIRTVIDALQALRGVAQTTAATVVCELGSLSRFQSPRQLMGYSGLVPREYSSGNRVQRGPITKTGNAHLRRVLVESAWTYQHRPNVQGRVLRRQKSLALSEEARQIAWKAQQRLHKRFVALSARGKHKGQIVTALARELLGFMWAIAVQTESRFPLTKAA

SEQ ID NO: 451197 - protein, 355 aa, unidentified
MDNMKYIGMDVHKEAISVAVLNSSGKLVMECTIETKASTILDFLKGLRGSLHVTFEEGTWAAWLYDLIKPHVTELVVCNPRRNALLKEGSKSDRIDARKLAELLRWNMVRSVYHGEHGVRTLRELARSYLTISTDLIRVMTRVKAIYRSWGIACRGKQVYAERYRAEWLGKIQEAGVRRRAGFYYQQFDALRALRQEVRRQLLAEAQKHDAWKLLREIPFIGPIRAALLIALMQTPHRFRTKRQLWTYSGFGIETHSSAEQRFVQGELQRAKKPASIRGLNRNHNHELKNVFKSAATVAAAKAGPFKEFYDALVAKGIRPEMARLTLARKMAAITLIVWKKGVRFDAQHLKPQTA

SEQ ID NO: 451198 - protein, 426 aa, unidentified
MRVLYDRVAAIDVHKDMVKVAIRVPGAKRGTRKTDVLEFRTFYGVLQAMARELRGRGVTHVVMEASGVYTDPVYYALRELDFTEVMVINPAHAKALKGHKTDAKDAIRLLDLYECGLLSGSYLPSEDLREVRDLARYRMKTVQARTSEIQRLQKTLETAGIKLSSVVSDVTGGSATAMIEALISGERRGAVMAGLAQTRLRSAGKMADLSMALTGRFTDHHALMCRLHRDRITIFDDAVKDLDAKIAPLVARYAREAELLKTLPGFGDVIVAGWLGAIGPAPHQHFATASRLASWATLCPGNYMSARKSKGGRTGDGGAYIKPLLIQAAWAAVRVPGRLQARFGRLVRKFGGPRNKGAQKRAITAIAHTLLKIAYSVLKTGKPYADLGTDFYTSRESPDARQDYLMRQLRKLNPGCVITITPAETA

SEQ ID NO: 451199 - protein, 403 aa, unidentified
MATIGIDIGGHTHVAARCRDGQAQADHRILRVSQSRAGFDSLDAWLAAEPEPIELVVMESSGHYWMPLAAHLRRSGVPVAVVNPLAARYFAKSRLERTKSDPADARSLAEMAMRDSPPARDPLAGVELRSSARFAMTLVAEQAKLCQRLYRLVELGFPELRELFEDPTCRTARAVLRLAPTAAAATRRRTSTLANANGSAGHRRLGQAKAERLAAAAANSIAVPDLDAEVAFEVGLLLDQFDLLERQIEAAEARVGELLDGELARRLRTIPGVGPAIVATLIAEIGDINRFDDFDQLLAFAGVHPAERSSGRKGTSPETSWHMSKAGNSYLRAAAYRMAVVGVQHNPVIAAHYARKRAAGKSPMNALGHCMRKALSIVWGGLAQRSGLRPELGRRGLTRTYGI

SEQ ID NO: 451200 - protein, 342 aa, unidentified
MKVYIGVDFHARQQTVSYLTTEDGEIHQCKLEHQKDDIRGFYRQFEGEVIVGMEASGYIEWFEEMLLEMGHEVWVGDSAEIRRRARRRQKNDKRDSMLILDLMVKGEFPKVHRQTAESRQVLKQLRYRHRLVKIRTIAKNNVQALAMSGGLLAKRLYSSRRRQELRPLEREPMLAEQAKQLVKVIEEVTVEIKRVEQWLRKQADADPRAMLLQTHPGVGLLTSLVLVHTLWPVQRFRNGRKVTAYLGMDPVEDSSAGRIRIGSISKQGSMLARYLVIEAASTAAKSDKGLKSFYRRLMTRQGKPKAKVAVGRKLLVRCFIMLRDEIDYDEFLRRGVEVRSSR

SEQ ID NO: 451201 - protein, 333 aa, unidentified
MNYAGIDVSHKELVIVVSVKGKAHKAKTFENTASGHKAIIQLLSKLKGESKVCIEATGVYHFDLAVALSRAEGIEVMVINPKASHNFAKVLMKRSKTDAVDAEILAIYCERMPFEAWQRPADENIALRAIARRIAALTKLKTQTKNQLHALKATEETPVLVIEYTEELIEVVDKQIQVHRESARQLIQQHDELAEAFALITGIKGIAVASAVQMLGELMILPKDMSAKQWVAYAGLDPRQFESGSSVTKKPRISKAGNKFVRRALYMPALVATCHEPHIKGYYTHMIQDNGLKKIQAVCAVMRKLLHAIHGMLKAKKEFDGTRFYTFPVEAKS

SEQ ID NO: 451202 - protein, 409 aa, unidentified
MERMIERACGLDVHKVTITACVRVVGPRGERLQEVQTFGTTSVELLALRDWLEAQAVTHVAMESTGVYWKAVYYLLEDRFTCLLVNPAHMKQVPGRKTDVQDAAWIAQLLEHGLLRGSFVPPAPIRELRDLTRYRKVLIQERTREANRLQKVLEDAGIKLAAVATDILGISGRAMLDALVRGTTDPNVLADLARGKLRAKLPALRQALAGRFRPHHALLISQILGHLDYLDEAIVALSEQVGAVIAPFAETIHRLDTIPGVNQRVAEVLVAELGVDMAAFPSAGHLASWAGLCPGHHESAGKRHAGTTRRGNRWLRATLIQAALAAARTRHSAFGARYRRVLRHRGHKKAVVAVAHALLVTAYHVLAEQTPYRELGADYYDCRHTERATRRAVQALERQGYRVTLERVA

SEQ ID NO: 451203 - protein, 338 aa, unidentified
MHYAGIDHHRQYSHITLLDEKGEVVRSGRVANLRRELEKFLEGIEKIKAVIEAGRSSYTMVDVLDDMGIETAVAHPKDVKAIAKAKVKTDERDSYKLAHLLRTGYIPEVYKRSRENRSSQRVLRQRAFYVGKQTAVKNRLRALLAQQGEEVRLEVARVEDLFTAKGMKVLGGLALPEREAKMVGALLRTYRHLQDSISETNALVDELYEKMPYARLIRSVPGFGVFLSVLVAVEIEDIRRFEDVGKLHAYAGVIPSTHSSGDRSWHGKIIKEGNRWLRWAAVEAVWPALRADYDLRCYYDRMKRRKGANSAKVATARRLLTIIYRMLKENRPYIPYKR

SEQ ID NO: 451204 - protein, 399 aa, unidentified
MLNPQTLQLRVGVDVGSQRHSVAVGLTDGSLLEEFEIPHTATGFGDFFARINEHAKRHPYPIAVAMEGYNGHVRPLDSLVKARGWRLFNVNNLKLARFKEIFPAAAKSDRIDSAKTLELFQLHDHLPMAGDVLQEVMATPEENDILKRLSRRRRRLVNERGRVMNSLQADLQAVAPGLLHITRDVANLWFLNFLTCRKGLLELARVRRASLLKVPGIGTTYADAIQAWQSRAFFGHDASLVGDMIQQDAARILELKRQIKALEERMADVAESSSIASQLASIPGYGSVCSAELAGEIGTIERFRSEASLALYLGMATLDNNSGKYRGSKAPKHVNARAKAAMMVAVDHHRKRVPQSQRYYEKKRTDGKRHNQAIRALGRHLCRVIFKMLSQDRPYRIDP

SEQ ID NO: 451205 - protein, 417 aa, unidentified
MKDPPIAIPWERYLAVDLHKHYLVIGGVNAHQEIVLGPRRMDLAAWPTWAQAHLLPTDSLVVEATTNAWDFYDHTQPLVGRLQVANAGKIALIAKTRVKTDALDVLKLARLSAANLIPEVWVPPQVVRELRNLIAHRWRLTRMHTMTANRLQSLLHRYHFVPPAGELYWDSHRAWWDGLVVSPTERLRLRQDLATLDHLRPQLAEVDQELARLSTEPPWATAVPLLRQLPGFGLLTVMTVLGARGTITRFDSAKQLVGYAGLGAGVHDSGQTHRGGRITKQGRKDLRHVLVEAAWTAVQRHPYWKREFEQLTARMAKGKAIVTIARKLLVRVWYVLTKQEADRQADPHMVGLKFFAWSWKLTAEQHGGLTRRQFVRYHLMQLGLGNDLTHIQRGGTKRPLASVEEVRQLRPDLRDAA

SEQ ID NO: 451206 - protein, 345 aa, unidentified
MDQISRIGMDTSKHIFQLHGVNAAEEPVLRKKLRRKEMFAFLEKLAPTVIAIEACGASHHCARLLQSFGHSVKLIAPQLVKPYVKRGKNDAADAEALCEAMSRPTMRFVPVKTAEQQAALMLVGVRDRLIRNRTQLSNAIRGYAGEFGLTAARGKAHLAPLLERIHADESLPGLARELFAAQAEEYAQLQAQIDKVDARLMAWHRADECSRRLTKIPGVGPIGAVLLTVKTPEPGLFRSGRQFAAWIGLTPKDHSTAGKVRLGGITRAGDEGLRSVLVVGATTVIQHAQRGGRPSPWLTELLKRKSPKLAAVALANKTARIAWKLMVTGENYAAKAAPAALAGAA

SEQ ID NO: 451207 - protein, 412 aa, unidentified
MDRFVERCAGLDVHKDSVAATVRFPGPDGQRLQETRTFSTTTRGLLTLADWLDSYPVTLVGMESTGCYWKPVYYVLEERFECWLLNAQHLRNVPGRKTDVADSAWICQLVEHGLVRASFVPPKPIRELRDLTRYRKAQIEERSREVQRLDKVLQDAGIKLSSVASRTLGVSARRMLDALVAGTHDPELLAELARGRLRRKLPALREALTGRFRSDHHGLLVSQILAHIDYLDETIATLSARIEQVIAPFSRERELLETIPGVARLGAEVLIAEIGVDMSVFPSSAHLASWAGQCPGNHESAGKRRSGKPRKGSKWLEKTLTESAKAAARTKGTYLAAQHARLRGRRGPGKATGATRHSILVAAYHILERRLPYQELGADYFDQRRSLEQRTKRLVRQLEQLGHTITLEPLAA

SEQ ID NO: 451208 - protein, 433 aa, unidentified
MKVLYERVAGIDVHKDMIKVAIRSPGDKPWTRKTEIVEFRTFYGVLQEMARQLRRRGVTHVVMEASGVYTEPVYYALCEQDFTEVAVINPAHAKALKGHKTDAKDCARLAELFECGLLRGSYIPPAELKEVRDLTRYRVKTVQARTSEIQRLAKALESAGIKLGSVASDITGVSATAMIESLIDGERRGDVLADLAKGRMRTAGKLADLSMALAGRFTEHHALLCRLHRDRITVLDEAVADLDERAAGKAARWQREAGLLTSVPGFGDVVAQAWLGEIGPAPHLHFATCEKLASWVTLCPGNNISARKRKYSRTGDAGTYIKPMLVQAAWAAIRVRGRLQARYNRLVRRFGGDKNPAAKKKAITAIAHTLLKIAYQVLKSGMPYQEPGADFYTRRESPEQRQAWLERQLQKLHPGCTVTVTISPPEAALLPGA

SEQ ID NO: 451209 - protein, 375 aa, unidentified
MSNRMRHVGLDVHAETIAAAVAEVDGTVRELGTLAYRPEAVRKLIAKLGGPGQLKVCYEAGPTGYALYWQLTGLGVHCDVIAPSLVPTKAGDRVKTDRRDAAKLARCYRAGDLTPVFVPDAATEALRDLVRAREVAKQDQLRARHRVSKFLLRHGRQRPEGMRAWTGRHATWLAQQRFELATLQGVYDEYRGALTLAADRVDRLEQAILAAIQTLTPTQQALIAALATLRGVRHVTAATVVSEIGTFRRFARARQVMGYAGLVPREHSSGSSRWRGAITKTGNAHLRRVLVEAAWAYRHHPGVTGVLRQRKLGQSAPILATSHAAQTRLCSRYRRMLAKGKPPLFIATTIARELLGFMWAIGQQIESLSATQVTA

SEQ ID NO: 451210 - protein, 318 aa, unidentified
MTKLSTLTAGIDTSKDKLDVAVHDTTTHFTVENSKAGWQRLAGELRKAGVERIGIEATGGYERGVTRHLQAAGFTVVVLQPTQVKAFAKVHLRRAKTDRLDAALIAACTYIFDARNKLPPDPRFDALADHLTFIEQIDDDIARSKTRLEHIVNKRLRRIAEAGIRRLELLRAVELKRLLAELRSHADLAERFELVLSIPGIGERTALTVIVRMPELGRLSREQVAALAGLAPFVHQSGKHQGEAHIAGGRSRLRRALYAAALPASFRWNPALKALYGRLIARGKSHTSALVACARKLLVFANTVVARGTPWQDRPAAA

SEQ ID NO: 451211 - protein, 316 aa, unidentified
MISYFVGLDVSKATLDVGFLPESIPQFQVRNDPEGFAQLIACLNELEVERVLLEATGGYERAVFKALRLEGLNVIRVNPKRCRDYASAMGKIAKTDKIDAQMLARFARDFEGLPQIEPNQDRDELGELIKLRGNLVQHRDDDKRRMKQTTSATAITVYTEHVAYLNDQIKALDKAIERASNVLDRTTAMRLRSVKGIGVISCGTFMAYLPELGSVTGREIAALAGLAPYNKDSGKKSGPRKIEGGRYRVRKAAYMSIWSMIQHVPEVRARYEALIARGKRAKVAAVACMRVLLVRLNAMLRDGTEWKELKPQVPAP

SEQ ID NO: 451212 - protein, 338 aa, unidentified
MVLIGIDPHKATHTAVVVDESEHELARIMVKADRSQVAALLEFADGFRPRRWAIESAGGLGFLLAQQLVRAGEDVVDVPATLAARVRLLGSGRGSKNDPNDALSTAIAALRDPHLRTVLVEDHAMVLRLLADRHQDLTSLRTQAVCRLHALIAALTPGGVQARISADSAASRLRAIHPDNAVEAARKEMALELVADIRRLDRNIAEVKKRTTAAVAASGTTVTDVYGVGPIVAALLIGHTGDITRFPTKGHYASYNGTAPIEASSGKVVRHRLNQRGNRQLNHALHMAAVTQLRRDTPGRAYYLSKIEAGKSPKQARRALKRKISDAVFRQLREDART

SEQ ID NO: 451213 - protein, 350 aa, unidentified
MMIIGCDLHTRYQQIAMLDSDTGEVVERRLEHEDGEARAFYGALVGRVRVGIEATGHTQWFEAMLAELGHELWVGDAAQMRAMVVRKQKTDTRDAAHALDLLMSNRFPRIWRPSWEERDLRQLVWHRQKLVWMRGAVKNQLQALAMGQGVCRKQKLFTAKGRKELEGLALGTWASYRRQELLQLLDQLQQSLKKLDEAVEQQAKRQPTAVRLMTHPGVGPVTSLAFVLTIGPVSRFQRSRQVVSYLGLNPQEHSSGGRQHLGSISKQGNPMMRYLLVEAGHTAARFDPQLQRMYQRLKFRRGAAVAKVAIARKLAVRMYWMLRNPADYAQLVRMQGSPGGTLVSKRTSFA

SEQ ID NO: 451214 - protein, 403 aa, unidentified
MNAVGIDVSKGKSIVAIMRPFGEIVFSPFEIKHTTSDINSLVELINSIDGESRIVMEHTGRYYEVLAHQLSEANLFVSAINPKLIKDFDNDSLRKVKSDKADAVKIARYALDKWKNLKQYSDMDELRNQLKTMNRQFGFYMKHKTAMKNNLIGILDQTYPGVNTYFDSPARSDGSQKWVDFASTYWHVDCVRKMSLNAFVDHYQNWCKRKKYNFSKSKAEEIYGKAKELVPVLPKDDITKLIIKQAIDQLNSVSTTVESLRTLMNETASKLPEYPIVMAMKGVGPSLGPQLMAEIGDVSRFTHKGAITAFAGVDPGVNESGSYEQKSVPTSKRGSSDLRKTLFQVMDVLIKTHPQDDPVYQFLDKKRAQGKPYYVYMTAGANKFLRIYYGRVKEYLASLPESK

SEQ ID NO: 451215 - protein, 483 aa, unidentified
MVTIPLRRLRYSSPAPVTFIITEKVEGQKMARRKQRRKQFAVTDLPEHLQHVNLNAAGVDIGSDRHMVAVPAGRDEVSVREFAAFTADLNALADWLAKCGITSVAMESTGVYWIPLFELLEQRGFEVKLVDARQVKNVSGRKSDVLDCQWLQQLHTYGLLAGAFRPPDQVCVLRGYMRQREMLVQASSMHIQHMQKALQQMNLLLHNVVSDITGVTGMKIIKAIISGQRDPQVLARLRDQRCHSSADTIAKSLLGNYREEHLFALTQAVSLYETYQAKIVECETAIASYLKQQPNRTDDEPPPQDKSVRNRDRLRGGVDVRSQLYKMTGVDLFNLPGLAADTLLTLGGEVGFDMTPWRSEKHFTSWLALCPGTRKSNGKVLSRKTKRSANRAAAAFRIAAASLTRSQTALGAFYRRIRARVGPAEAITATARKLAVLYYSLLKYGSAYVEIGQTAYEQKYQQRRLNSIQKQALAMGYQLIPAT

SEQ ID NO: 451216 - protein, 500 aa, unidentified
MSRRKTRAPEARQPTPPPAHPTTAARAQAADDLRRAARHAEQTRRDAEACAKLASLPVRHEHAAGIDVGDASHWACVEATPDGSATVRAFAAHTPGLRQLVAWLRHCGVTTVALEATGAYAHVLFLTLIEEGFTAVMAPPQFARQIKGRPKTDRRDCQWIQRLHKHGLLPAVFQPDEATQTLRDYVRQRANLVRLSGQPVQRMPKALELMNLKLTQVLGDVTGVTGLKIIRALLAGQRDPRRLAELRDRRCQHTEAEIAQALDGRWRPEHLTELRGNLALWEKYQEVIAELDAVIAGQLRAMRRQTELPPLPPKPRVRGRKPHDPGFDVRTALYYATGVDLTAIEGIDEVHALTLVSELGTDFTKWPTVKHFTCWLGLCPNWQKTGGKVKSSQTRRGKNRAAHALRLAAWSLMRSKSYLGAYLRRQRSRLGAPKAITALAHKLARIVYHLVRYGAAYVQQTEAAYAEQVRARLEKQLRRRARELGFELHKIEPVPSPAVE

SEQ ID NO: 451217 - protein, 338 aa, unidentified
MKLYGGIDLHSNNSVIALLDETDNVVYQRRLPNDLTLILAELAPFAPGIAGLVVESTYNWYWLVDGLMAVGYRVHLANTAAIVQYSGLKYTDDESDARWLAKLLRLELLPEGYIYPKAERAVRDLLRKRCQLVHQHTSLLQSIENLLARNRGRSPSANAIKRLTYGEVDQLLPEASLALAVKGSLAVMHTVAGVIALLEKAVKARICLRPAFKLLLTVSGIGDILGLTIMLETGAIARFAKVGNYASYCRCVGSQRISNGKPKGRGNTKNGNKYLAWAYIEAANFAVRYNPQIKRYYQRKCARTNHLVAIKAVAHKLARACYYILRDQVPFDVNKAFA

SEQ ID NO: 451218 - protein, 334 aa, unidentified
MKQVNQIGVDVDSQELICALQRAGQRMPLATFANTAAGHKKFIRWATKGGHPARVCLEATGIYSLEFALALHHAKNVQVMVVNPRAIKDFARACMQRAKTDAVDAAGILEYLERMPFVAWHPPAPELLELQAINRRIVQLDTELTREKNRRHAAEYAGASAEVIAHDIEVNIHHLERRIERMHDSGLKLVRGVPALATKLAHLISAKGIAEASAMRLLAELLVLPDDLAAPQWVAHAGLDPRPYDSGVSVHRPRRISKVGNRHLRAALYMPALVAIQHEPNVKAFYNKLIAAGKKPMQAIVAVMRKLLHAIWGMLKHDEDFDGEKFFKITAKTA

SEQ ID NO: 451219 - protein, 349 aa, unidentified
MLADELDYVVGVNTHRDEHVLAVLAAPVGAVIARYAIGANPRGYREALRFVEQYTGGTRAWAVEGAGHYGAGLTRFLVGHGETVLEISRPPRAERRLRGKDDSLDAVSTARAALASETLALPRAGQRREALRLLLIARRSAVDVRREALVQLRSVIVTAPDRLREELRGLPAGRLLERCRRLRRTRTMSADELATRLVLRSLARRVLAATAEADELEAEILADVRALAPQLLDEPGVGPIVAAQLIVAWSHRGRLRSEAAFARLAGVAPLPASSGQTTRHRLSRGGDRQLNRALHTIVLHRRQHDPATKDYIARRIAEGKTRRDATRLLKRYLARHLYRVLDGRELQMT

SEQ ID NO: 451220 - protein, 356 aa, unidentified
MHHIGMDVHDKVTMICVRDPNGKIAEERTLRGPLCALRGTMAILQEKYGPQLRICYEASTGAGWLHDELAAPGRQVLVAHPGKVRMIFRAKRKNDRIDAQKLSALLYLDQVPLAHIPPYQVRQWRRLIEYRRRLVERRAGVKSRTRTLLRSRGIVAPRCLWTKGGLAWLEGLNLSEVEALERALMLEELASLKDRIGRLEKHLGILAKREPAVGLLMTIPGVGIRTAEAVVAYVDDPHRFGRIKSVGCYFGLVPCEDTSVKARFGHITKEGPSTVRKLLTEATWQAIRRDTTVRAYFDRICRNDRDRRKIALVATAHHLVRVMLSMMRTGECWNPTSGGCRRQETPTSGDGTQAAA

SEQ ID NO: 451221 - protein, 321 aa, unidentified
MTYVGIDVSKTTFVVAYSSDKASRTKTFKNTVKGVHEFIQTLSAAEHHCVLEATGNYSALLVYLLSEASITVSLENPLKIKNFARVMLSVTKTDETDARLIALYGEKMQPAPYKLRSDSILTLKQKRTVIRQLKKQLIATRNLKGSMEALPFFDPKCRKAIEKTIAFLEKQIKGLEEELASLVQSEYKKQMDLLTSIKGIGVTLAAALIVATGGFTYFDNAKQFTRYLGLSPTYQQSGTSVNVKGHINRNGDSSLRSQLYVAAFSSLRCNSECKACFDRLRSNGKPGKVAVIAVANKLVRQAFAVVTHGKPYVDGVKSERL

SEQ ID NO: 451222 - protein, 355 aa, unidentified
MVTIGVDAHKRVHVGIALDDAGQEIGHWRGPNSVVGWESLLGWVSAFGESRAWGIEGAWNYGRGLAQHLVEQGETVYEVNARWTAAGRRRARTPGKTDRLDAQAVARCVRQEAPHLPRVGADDATAVLDLLTSQRETVLTETTRLRNQLHALLLQLDPEYRDRLPSMDSSTGLEALERYQAAPGSTVLQQERAAAARRLAQRLRIASQQADELKAQIETRTEEAGLLPLIAIHGVGLLIAGALAGILGPGCRFRSDAEFAAYAGVAPLDASSAGYVRHRLNRGGNRRLNSLLHMVALTQLSTWKPAKDYVKRRITEGKTKREAMRALKRFLARAVWQAWKRCLAISNGKGNAQPA

SEQ ID NO: 451223 - protein, 412 aa, unidentified
MASHCQFYNYKFQEVILLSFKILKFKCCGLDVHKTWIYACIGITDSNNRTEYKQARFSSFTKGLNELCDWLAKYNCTDVCMESTGKYWIPVFNILEQHNLWVTLSHPKYTKPMKGNKTDRKDAKWICDLYMCGMVKPSFIPPADIRELRDLVRYRYKLTCMITGEKNRAQNCLTVSNLKLDDVFSDVFGKSSRSITEQILQHPGEKFDVAPFVHGRCKTPIEEIQAAVDGAISKEQAVKLRQCLDHIDELNKHISELEQEILRLSDKYEAALNLIRTVPGFDKNPMTAVQILSEIGGDMSVFPTAKHLVSWAGCCPRNDQSNQKIKSTRISRAGSYFKPVLVQVANALIKSKKHLEFTNRYKRIKARRGHKKAIIAICRMLLTVIWHILSDLKPYSAEGFLELRPVNESQKY

SEQ ID NO: 451224 - protein, 348 aa, unidentified
MRFYTKQHRYYCGIDLHARSMYVCILDNEGNTLVHQNMKSCRERFLALIQPYQQDLVVAVECIFTWYWIADLCRQQGIAFVLGHALYMRAIHGGKAKNDKIDSQKIALLLKGGLIPHAYAYPAEMRATRDLLRRRMHLARQRADLIAHIQNTVSQYNLPPLLCRIGKKSERQGVVEHFPDPVVREMIALDVSLIEHYDEQLRVLEQDLAMKAKAHDAYAYHLIRSVRGIGRILTLVILYEIEDIHRFPTVQQFASYARLVKCSKESAGKTYGYSGKKIGNAYLKWAFSEAAVLFLRGNPKAQHYIERQARKYGKGKALSILAHRIGRTVYAMLTQGRPFNEAQFMSKL

SEQ ID NO: 451225 - protein, 341 aa, unidentified
MDTVSLVGIDLGKHCFHLHAQDASGRMVFRKKLTRSQMFALLGNFPSCTVVMEACAGAHWIARRLQALGHEAKLISPHFVKPFRQGNKNDFADAQAICEAASRPSMRFVSPRNEAQQVVSALHRVREALVRERTGTINQIHAFLLEFGISLPRGMAVIRRLPAVLETQALPPRLVAVLERLQAHFKYLDEQIGQLEHELLTQLHEDERSERLLEIPGIGPITASMLMSELGDAHQYGSARQFAASIGLVPRQYSTGGKPTLLGISKRGDKELRRLLVQCARVIMLGIERRTDSLGTWVRSLLARRRSNVVACALANKLARIAWAILAKGTHYRSAPAALAA

SEQ ID NO: 451226 - protein, 431 aa, unidentified
MPSPIPDVAAWVGLDWADQEHQGRLQAVDGSSPVESFVLAQRPEALQDWVSALRTRFPLGRVAIAVEQSRGSLVYALMTHDFLVLYPVPPKTLADYRKAFFSSGAKSDPKDADLLLELVRCHADRLRVWQPDDARTRQIQMLSEQRRKLVDDRTRLTNRLTAWLKASFPQALEWAGELGTPRACAFLTRWPSLAALQQARRSEVRHFYLDQGWKDISSLDTSLDKISQAQPLTSDPAVLEASALMVRLLAQQVSTLASGLQEIDQAIAALFAQHPDQSLWDSFPGAGPVLAPRLLAALGADRQRYDHASEVQQLSGIAPVTVRSGKSCWVHWRWACPKFLRQSFQEFAAHSRRWSPWARAYYEQQIEKGAEHHAAVRALAFKWIRILYRCWQDRTPYEEERYLQALRRRGSPLVKRLQAQAALSAASGGAM

SEQ ID NO: 451227 - protein, 344 aa, unidentified
MKLFIGLDVSLAKTAVCVVNEHGKILKETEVASEPEALAAFADTLPGTVAIIGLEAGPLSQWLHRGLTEAGLDVVLMETRQVKGALKAMPIKTDRRDAEGIARLLHIGWFRPVHCKSVSAQEVQALLGARKAIQQGMIALEMSLRGLLRNFGLKVGAISRGRYDVRVRELVEGNAMLEAATVPMLKSRAALRSELANLEREVRGLAKDDPVCRLLMTMPGIGAVVALTFKSAVDDPTRFKSSKRVGPWVGLTPSRHQSGERDVIGGITKAGDANLRRALCQAATVMLHRGRSSRLRTWAARVAKRRGSKRAMVALARRIGVVLHRMWRDGTEFNHATPPIVGGI

SEQ ID NO: 451228 - protein, 361 aa, unidentified
MMTTTTIPTTILAIDLAKANSLFCWHDVVKGTHRLRNIASTPKAFHDALLQQQVERVIIEVCDMAGWIKDLCEGLAIPLQIANGNTEGWRWRNVKRKTDKDDCLKLISLSLTNQLPTVVLPDRPTRQWKSLILYRQKLIERRTRIKNKIHAILVSEGRAMRGGRQAWSEPSLAAVSKLARPLADCAIDELWRGQLHMELAALDDLDHAVGQLDQRLDALGQADARVIRLQTIPGVAERLSELVVAVIDDPKRFKNVRQVSAYVGLVPRRYQSGAMDRSGRISKAGCAKLRKLLMEIAWGMLVHNAHGRSVFQRISKGQKTRRKQAAVALARRVLGWCWAMLRDGTDWRDPAGGAAPSPVAT

SEQ ID NO: 451229 - protein, 266 aa, unidentified
MKRDKYMGMDVHQATTVVAVIDAEGKIVLETIVATAAAPIRRLIESISGAVHITLEETTQAEWLYELLQGFVAEVVVCDPRRNRLLSEGSKGDKADARKLAELLRTGMVRSVWHGRQTTRGLKEMVRSYETFAADTRRTMLRIKALYRSRGIATTGTGVYQVKQREHWLKQLTEVGMQQRAAWLYQQLDHVRELRKQAKAAVLAEGQGHRAVELLRTIPQVGPLRAAQIVATAGTPHRFRTKRQFWSYSGLAVVTHTSAEYELRAG

SEQ ID NO: 451230 - protein, 326 aa, unidentified
MSKIIGIDISKQTFDVRFREKKKLSHKIYDNNLRGFKKFINGIESKDQVIIVMEASGPYYVNLASYLYKFGIKVSVVNPLIIKRFSQMKFYRAKTDKKDSGIIMEYGETEMKSLKLWKPETEGVQSLKQMQTTLELLQKQLRQSKNQLSAFKSSGMVNQQVETGLKSVMRSIVRTIKKLEDQMLKVCNDYYKESLELITSIPCVGNKTAMMLIAVTDNFSKFEHNKQLIAYVGLAPRVYQSGTSVRGKGHICKMGKSQIRKLLYMCSWTAKRYNKTCKEMYQRLQAKGKPERVIKIAIANKLLKQIFAVATTKQKYIENYQLNISF

SEQ ID NO: 451231 - protein, 426 aa, unidentified
MFVESSDDEQIIERVAALDIGKAEVVCCVRLPAQGDGKRRVQEVSTHTTMVPSLCELANRLVGLGVTRVVMEATSDYWRAPFYLFEAHGLEPWLVNAKDVKHLPGRPKTDKLDAVWLCKVAEKQMLRPSFVPPADIRRLRDLTRYRADLVGVRTAEKNRVEKLLEDACIKVSVVAADIFGVSGRTMLNALTTGQRDPKILAAMARSRMRIKIGRLEEAFAGLSLGTFDDHHQFLLAKMLARIDAVNADIAALDTEIGDQLAPFADAVARLDEIPGIGPTAAAVIIAEIGVDMSRFPTPAHLSSWAKFAPGVSSSAGKTKGNGSTGHGDHYLARVLGEAAVIVGRTDTFLGARYRRIARRRGKKKAIVAVGRSILVIIWHLLSDPDTRFCDLGSDHYDHHVNTSAKRRSHIRQLEALGYKVTLQPAA

SEQ ID NO: 451232 - protein, 477 aa, unidentified
MPLLGRNHNPANMKSKTPKSKNKKQKVSVDQHWEAINPRAAGIDIGAKEHFACVPPQAAPKNVRSFGTFTADLVALADWFKECGVTSVAMEATGVYWIPVFQILEERGFGVILVNARQTKNVAGRKSDVQDCQWIQRLHTYGLLQGSFRPEDPYCVLRAYLRYRDELVSARSTQCQHIQKALQQMNLQLTQVLSDVMGVSGRAIIQAILAGERDPVKLAALVDCRVRATAATIQKGLEGDYREEHLFVLQQAFSLYGTYEEKIHACDEQIVRETATLPDKVDPQHQPLPPRKEGRPASKDKMQGHDMREALYRKFGADLTAIEGIGVTTALVVLTEVGPNLTSFKTEKHFCSWLGLCPDNRISGGKVLSSHTRRVINRASDALRMAAVTLERSQSALGGFYRRMKGRLGAAEAITATAHKLARIIYRLIKHGEAYVRQGMEDYERKFRERKLHALRKTANSMGFNLIAQQQVAPPVS

SEQ ID NO: 451233 - protein, 406 aa, unidentified
MEVVHERCCGLDVHKKTVVACVITPKDRQVRTFGTMTQDLLELGEWLVAEGVTHVAMESTGVYWKPVFNLLEGSELELLVVNARHIKAVPGRKTDVKDAEWIADLLRHGLLQASFVPNRDQRELRELVRYRRTLIEQRAHEVQRVQKVLEGANVKLSDVATDIMGVSGRAMLRALIEGEQSPQALAEMAHGRLKRKRGSLEKALRSSVGAHQRYMLGHLLEHIEFMEREIKELDQAIGERMRPFEAAIARIDEIWGIGRRTAEEILAEVGLDMSRWPTHKHFASWAKVSPGNNESAGKRHSGRTGKGNRWLHSTLVEAANNVSRNRASYYGAQYHRIARRRGRKRALVAVAHSLLTAVYHMLRDGTVHQDLGAEYFDSLDRERATHRAVQRLRRLGYEVTLRPVAA

SEQ ID NO: 451234 - protein, 347 aa, unidentified
MIHIGMDLHKKHSVFCAVDHQGAVVARGKVLSNEEAWKEILRRWPGEEVKVAVETGTLSWWAVDVARSLGIEPVVVDARHFKLIRESKKKCDRRDAFHLADGLRTGLVQQCAVAVPSERARRGRALLQARATIVKQCTASRNAALGLLRSVGISLSGRKWCSESGWEAALLMRPVPDWMKPLLALHRQQWKSAEAVRRELDRQVAEELDLWSEAHRLQEIPGYGPIVTLAVVASIDDPKRFRPKEVGSYAGLAPAVRASGERAGVGGITRQGRPGLRVLLIQAALAAMRSQKLTPGLAKLWRRLYAQRGRQVAAAALARRLLLLGHKLMKNGQCYDPNFSRKEVQAA

SEQ ID NO: 451235 - protein, 424 aa, unidentified
MLFVGDDWAEDHHDVEIQDETGVKLATARLPEGVEGIARLHALIARYGGERVEPARVVVGIETDRGPWVQALVGSGYRVFGINPRQAARFKERYTTSGAKSDKGDAHALADMVRIDRAQLRAIAGDSEQAQAVKVVARAHQTLIWERTRTMMRLRIALREYFPAALVAYADLTLSGADTLELLRLAPDPQTAAELTRAQITAALKRARRRGIDDKVTAIADALRTGHLGQPERVTDAYAATVRAHAGVITALNEQISQLEKQVKTHFRGHPDAEIYRSVPGIGDLTGARVLAEFGDDPARYASAKARKNYAGTSPITRASGKATSSLPATSATTGSPTPSTPKHSQHSPDHPAPAPTTTGNEPAGSATTPRSANSATASSASSTDASKPAPSTTKQPPGHTTLKPSPLDTKQHGVSSARSGGWA

SEQ ID NO: 451236 - protein, 350 aa, unidentified
MIIGIDPHKVSHTATAVDPATNTAMSSLRVGASLAGYRELLGWARRFPDRRWAVENAKGLGCHLAQWLLARGEEVVDVATTATSRVRELSRGGRRKNDVIDASAAASVAALHGDAQVVKAEDETTVFALLEERRANLAAQRVRCVNQLHAVMRDLIAGGVRTALTAKAAGEALRKVRPTTRTERIRKIIAWDLVRDVRNLDRQLGTIAAQMTEALDNYDNQLLEVDGIGPVLAARLIGRTGRPSRFRSSDAFASYAGVAPIEVSSGQRITHRLSRSGDRRLNSALHLIAVTQVRMRDSAGHRYFDRKIEQGKTRNEAMRCLKRKIASHVWRRMRAAELRRQHHVALPEAT

SEQ ID NO: 451237 - protein, 499 aa, unidentified
MKTTKTKHSPLKAKSVLPVNTVSRAKRRRAKERAAAVLDNLEQINLHAAGIDVGSAENFVCVPARSVKQGQSAVRSFGVFSTQQDELVEWLKECGVTSVAMEATGIYWMSLYDKLEAAGLEVLLVDPHSVRHVPGRKSDVLDCQWLQQLHTYGLLRGAFRPEATVRRLRVLSRHRADLVAEGSSHLQQAQKALVQMNVQLPLVVSDINGETGLRIIDAILAGERNAQALVKLRDPRIKKSTVAEMEAALSGHYSEELLFVLRQNIETWRFYQKQMEGCDQQIEATLKAMASISKAGVPAAPPKPVPAAAPGSPGAKPKRQRPLHGNNAPKVDFSEQIRRICGVDLMKVCGLNLLSVLMLIAEIGVDMRQWRSAKAFSSWLGLCPGTKISGGKNLSRRSRHVVNRASVLLRLAALAAGQTDTWIGRFYRRKRAHLGAPKALTATAHKLACVIYHMLKYQEEFVPLDVAVYELKAQERRMRHLRKQAEELGYQLVEKQEAA

SEQ ID NO: 451238 - protein, 411 aa, unidentified
MNNTLFVGIDISKRSNVATFMNCEGKVVGRLAFSNNGSGADRLVAKILSYYEKEDFEAIRIGMENTSVYSKSLVWFLYEHEALNEHKLSIIPLNAIMVANYKKSFLDMDKDDITDSFAIADFIRIRPGLLPFKLDDRQEALKIMTRSRYNYVQALSRMKSQFLTRLFLSFSEMEAGKPFYSIFSKTSLSLLEEEFTLDELAEKPIPELVEFLQEKGGGKFQNPEEIAKVLKKAASSSYRVPAMVRESLNRTMASDMEIMRILENEIHNCDKNIEKLMKSVPAILVSIPGIGPVLAAGIMSEIGDISRFQKQESLGKMAGFKWKRNQSGKKESEDKAAVLSGNKKLRYYLVEAANRVRIHDPVFEAYYRKKYAESKTHAHKRALILTARKLVRVIFYLLKENKLYKPDVGIS

SEQ ID NO: 451239 - protein, 352 aa, unidentified
MKYVGLDWAYRTAQWCALDPGGEIAGEGRFAADRDGLARLVLELGDEVTACLEMMSGALWARDELVACGWQVQVADARKVKTVAPLAAKTDKVDARLLAELSRRQLVPALWLPSLDERALRERLRRRMHLVRLRTSAKGRIFGLQTQWGIRISLRRLRRADGMTLLERAGMPAVWRHSISESLALIDFLDARIVPLDAELRPFAQADPRAVLLDTIPGVAELLALTIAVEIGEISRFAGPEKLVSYGRLAPRVRQSGQGRPHSGPLNKSGSRLLGWAAVEAAQHAWRESNPWHQLYLDVSRRSRNHNSAKAAVARKILIAAWHMLSRNEPFKPAPRTGATSVPASSRLALAA

SEQ ID NO: 451240 - protein, 381 aa, unidentified
MPSMQLRRDDVIVGVDTHKDNHVAVAIDGFGGRLGDIVVPTTIAGFEELLAFCLAFVGSAGRLIGFGVEGTGSYGVGLARYLRNHGHDVHEIARPARAAERRLAGKNDTIDAEHAARQLLAGHGLSTPKTADGAVETIRLVKIAYDGAVQARTTAMITLKATLATGSEALRAELETLTDHKLILACAALEGPTPLPPVRRGAPAVVVPGDPDVAMRHVLSSMAKRWLALHEEAKAHAASLKALTAAAAPQLVEAVGVGYDTAAQMLITAGDNANRIKSEAAFAKMCGACPIPAGSGKTNSRHRLYRGGNRQANAALYRVVIVRMRWHQPTIDYVARRTAEGMSKREIIRCLKRYLARELFRLLPAPDAIAKPVNGELEIAA

SEQ ID NO: 451241 - protein, 361 aa, unidentified
MTGMVTYAGLDVHARSTHAAAIDVSTGELVRARFGPGVEEPVAWLAGLPGTVRACYEAGPTGFGLYRAAVAAGVSVEVIAPGKTPRGPSDRVKTDRKDAELLARLLLAGSLTSVVVPPVEVEAARELVRSHDACRRDLMTARHRVSKMLLRHGRVYLRPSTWTLEHRRWLSRQQFEEPASELVFADMIAATDGISARKAAIAERLSRLAQDEQWWPTVARLRCFRGIDTLTAFALHLELGGDWQRFEHATALSAWLGLTPSLHQSGESSRQGSITKTGSTFARRLLVESAWHYGRRPSIGATLQNRQQGQPDHVLQISNRAQQRLHRVYRRMRARGKPHNVTVVACARELSCFLWAAATID

SEQ ID NO: 451242 - protein, 404 aa, unidentified
MWYAGIDWANDHHDALIIDEKGRQVGTLRVDHNPQGLSKLNTFLAQIIGSESKEQMACIIETTHGLLIAHLLEAGWPVYPVNPRTVDRRRSASGAKTDTIDAYLLAKTGRADLADLHRLTPDSEKVSELKELTRDQDALIRMRTRLVNQLTACLKAYYPVALELFAKLQQKSTLLFLQTYPTPQAAMAASVHQLEEVLRQAKHPHPTTVAAQIFEQLHQPHLQADAVTTRTKARLMLVLVSQLLPLIEQIAQYDKEIDTLFLTHEDHELFESLPRAGQHLAPRLLAEIGDDRSRYQDARSLQALGGTSPVLFQSGMYSKAHRRLGCIKPLRNALHQFAWQTTQSEPWARQYYQRKRAEGKSHTVAVRALANVWVRIIFAMWLHHQCYESATFEQAQQQHARKVA

SEQ ID NO: 451243 - protein, 347 aa, unidentified
MRFYTKQHKFYCGIDLHAKTMYLCILDQEGEIKLQRDIKTDPEIFLRTISRYREDIVVAVECIFTWYWLADLCAREDIPFVLGHALYMKAIHGGKAKNDKIDAHKIAALLRGGMMPIAYVYPPEMRSTRDLLRRRMHLVNKRAELLAHVQNTLHQYNLPEIGKNIGKKCNREGIAERFPDVSVQKSIELDLALIDHYDQLLHHVEHEISLLAKKHDADSYFRLRSIPGIGRILSLVILYEIHDISRFERVQDFVSYCRLVKPARESGGKRLGSSGKKIGNVHLKWAFSEAAVLFLRRNPDAAKYREKLAKKHGKAKSMTILAHKLARAAYYILKRKEVFHIETFFAR

SEQ ID NO: 451244 - protein, 345 aa, unidentified
MKQYAGIDVSLEYSSVCVVDADGRIVREAKLLSEPDALTAWFAEHGVAMERIGLEAGPLSQWLYAGMAKTGLAVELIETRHVRAAFKTMPVKTDKKDARGIAQLMRLGWFRPVHCKSLAAQEVRALLTARKLIQGKLHDIEMSIRSILRGFGLKVGPTTRRTYAARICELIEGHPTLEAIAASLLKARDALADEFACFERKLRVIARQDDKARRLMTAPGVGVLVALTFAAAVDAPERFRTSRAVGPHFGLTPKKYQSGETDYSGRISKIGDVGVRTALYEAANVILTRPVKGSDLKTWALAVARRAGPRKARVALARKLAVVLHRMLRDGTNFLPRKAAPAMAG

SEQ ID NO: 451245 - protein, 313 aa, unidentified
MNASQDVMVGIDVSKAYLDVALDGATSVARWNNDAAGCDGLAAAVAGASLVVVEATGGYEMRMVRTLMAAGIAVAVVNPRQVRDFARASGRLAKTDQVDARVILHFAKAMRPAQIPHIDDGRIALAALVARRRQLIDMAVAEKNRLEHASADIAALIHELLASFKAQLTRIDTAITLAIETEPDMVERRDLLLSVPGIGEITAAILIAELPELGSIDDKKLAALIGVAPMAHDSGAMRGQRHIAGGRSAVRCALYMATLSALRCSPTIKAFYARLRDAGKPPKVAIVAAMRKLATILNTIVRRRTPWINQHGC

SEQ ID NO: 451246 - protein, 363 aa, unidentified
MENVRFVGLDVHADSIAIAVAEPGRGEPEVLATIPNDTRKLLKRLRALGKVKCCYEAGPTGYGLHRDLTAAGIDCMVVAPSLVPRKGGERVKTDRRDAVRLARFLRSGDLTEVHVPDVDTEAMRDLERARDAAKRAERVARQQLTKFLLRHGRRFPEKKWSRAHLRWLHAQTFDHPAQQTVLEDYLNTAESLTARVTALTKRIAELVEGWHLGPLVKAFQAMRGISLVSAVTLAAEVCDFARFDSAPKFMSFVGLVPSEHSSGEGRHQGRVTRAGNGFVRRILVEAGWAYRHKARMSEAIRERNKGLPPEIQQIAWRAQERLCARYRKLTGRGKNRNKTVVAIARELAAYAWSMARHPALAAA

SEQ ID NO: 451247 - protein, 355 aa, unidentified
MRDIIRIGMDTSKSVFQLHGVDAAEAVVLRKKLSRKAMIDFFEGLAPTEIGLEACGGSHHWARLLGSFGHTVKLLPPQHVKAYVKRSKNDARDAEALCEAMSRPTMRVVPVKSVDAQAGLMLLKVRARLVADRTQTAHAIRGHAAEFGLTAPKGLAHIRPLVARIMEDAGVPELARTLFGELLERFDDLDRRIRHKDAQLAAWHRSDAASRRLTRIPGIGEVGAVMLSLKTPDPQGFRSGRQFAAWLGLTPKDHSTAGKQRLGAITRAGDEALRAVLVSGAMAVIQQKSRGKGRPWPWLEALLAHKSTKLAAVALANKIARIAWKLMVSGEPFDPERALRACPVGDDTGTLSPAH

SEQ ID NO: 451248 - protein, 409 aa, unidentified
MEEKYWAAVDWSDDEHVVSIVDDERKKVKTFAVDHTDEGLDRMADRLRKFVPLAGVAIELNRGLVVQKLLDERLTVYPINPKLSKKWRDAQSVNGCKSDPGDAFVMATGLQRYHEQLRSLEPEDPLTRQLTGLCTTECRFIRTHTVFVQQLKACLKRYYPQALEWFDDWTGPTPLDFLKQFPTPERLRKATKSKLIGFLKTHHLRLLPKWQQKIDRRADDTWPHDQATTSAGKQEALGLVKMLRQAKQCIKQQRQAIRELFQLHPDAHIFDSLPGVGERLAPRLLGHFGTNRDRFPDARPLQQLSGTAPITRGSGKSYTVRIRRGCQKDFRNAMHWVAKCSINTCSWARAFYDKCRAAGDHDALALRKLANRWLKIIFCMWRDRRPYDEAKYLESLIKRGSPLLRYMQS

SEQ ID NO: 451249 - protein, 320 aa, unidentified
MAELSHCGIDVSKDRLDVVVLPNEQCFSVVNAAAGWAELIEKLRGLNIAAIGIEASGGYERGIVRALLAARYSVRLINPFKLRQFAKACGVLAKNDRLDARMIARFVATMPTRPMQRNVAVERLAELLTARRQLSEEKVAAENGSKLLEDSMLQRLYRRRITRMEADIMLLDKRLADMVAADAALAQRYELLISMPGVGPVLACTLVALLPELGQMSRKQVAALVGVAPYDFESGKLKGMRCIWGGRAPIRRVLYMAALIASRCNPALKVFHDRLQATGKKSKVVIVAVMRKILTTLNAMARNNVLWNDRRNGRCAVSAA

SEQ ID NO: 451250 - protein, 344 aa, unidentified
MDHFAGLDISVKDTSVCIVDGTGRIVREVKVASEPEALLAVLTNRSYSFKRVGLEAGPLSQWLFSALAEADLPVICVETRHMRAVLKAQINKTDRNDARGIAQMIRVGLYRPVHVKTLRSQKLRMLLTHRKLLQSKAIAVDNDLRGTLRNFGLKVGMVGAAKFEARIRGLIEGFPDLMVLVEPLLVVRRALREQVAILHRRLLTIVRDDEVCRRLMTVPGVGPVVALTYRATVDVPARFRKSKSVGAVFGLTPARDQSGERDRPGAISRCGDEMMRTTLYEAAQVVLMHSARWSWLKAWAMRIARHRGRKRAIVALARRLAVILHRIWVDGTEFKWTREAVPAA

SEQ ID NO: 451251 - protein, 364 aa, unidentified
MSDCITWIGLDDSADKINVAIFHGQEMNPREELVVVNDSTGLGRLAKKLKGLSGDARCVYEAGINGYHLQRHFAKHGISCDIAAPSLTPRRVGKRVKTDRLDAKTLAKLYRSGELTSIAIPEKEQESLRDLIRAREDALENQQRARHRLLRFLMRRGVRYGLGKNWSLGHMRWIKRLRFEDDLDQMVLDESRLSLDEQSERLKRFQDKIEELATREPYQKRVRYLMALKGIKALSAMTIIAEAFDLRRFTDAPAFMAAIGVVPSENSSGAIEHRGSITKTGNSHIRRIIIESAWHYQRCSAPGKTLRKRREGLPAEIVEIARKCDGRLQRKFRQLVNRGKDRRKAAVAVSRELAGFIWAIGQVA

SEQ ID NO: 451252 - protein, 337 aa, unidentified
MIVVGVDVHKQSLTAVAVDEAGRALAELTAGSGGELLSWAASLGSERLWALEDCRQLTRALERSLLGAGERLVRVPPKLMAPQRRAGRMRGKSDPIDALAVARAALREPRLDFPRPGEDRLRELKLLVDHRDDLVDERRRAQQRLRWHLHDLDPQLAVPPGALDRPIWLDRIGRRLARQEQTVQVRICRELIGRCRSLTRTILALDRELQAQIDKTAPALLALPGCGPLSAAKLLGEIGPIERFDTDAQLARHAGVAPLEASSGKHQRHRLDRGGNRQLNCALHRIAITQARVHPPARAYLERKQAEGKSRREAIRCLKRQLARTVYNTLKAIPALT

SEQ ID NO: 451253 - protein, 420 aa, unidentified
MNAQWSEHTHFAALDWASDHHDVTVVSRDGQVLLEFRFDHSAAGWAEFVQKMQPFAGAPLALETSSGPAVDQLLQRGWTLYPVNPKAAERYRERKAPSGTKTDRHDAWSLADALRTDGQAWRAFAPQDEATATLRALCRDEMSLIEQRTALVNQLRAALREYYPTALEAFEDWTSPGAWAFLKRFPTPAALLKAGERRWQNFLHSHRLWRGDGGTQRIALFALANALPASPAIIQAKSLLALTLAALLETLEKQLDQYRARIDRAFGEHPDHDIFGGLPGAGEKLAPRLLGELGAKREVFPDAQSLQCHAGVSPVSWQSGQLNKAHVRWACDTALRHTVHLWADLSRKKCAWAQAYYQGKRAEGQTHASALRCLGKRWLKILWRLWTNRGRYNEAIHLQSIQKHGSWVHANLAAAAPKPV

SEQ ID NO: 451254 - protein, 349 aa, unidentified
MITLGIDAHKRTHTVVAVDDAGRQLGVRTTVATTTEEHLALIRWSEQFGETRLFAVEDCRHLSRRLEADLLAAGEKIVRVPPKLMAHARDAARTYGKSDPIDALAVARAAMRHPDLPAAQLDGASRELRLLVDHREDLVNERTRVLNRLRWHLHELDPLWDPPAGWLSRLIRLDQVAERLKTFDGTVARIARELVERARAITVQERALTREISSLVATVAPNLLAMPGVGPLIAAKIVGEVADIRRFKSKDAFARHNGTAPLPVWSSNTERFRLSRTGNRQLNCALHRIALTQARYHEEAIIFLARRRDMGNTGPEARRALKRKLSDVVFRKLLLDASEAPSVTLELAA

SEQ ID NO: 451255 - protein, 469 aa, unidentified
MEEEVTINSVGIDFHQGQHRVRCLDDRAQPCGSFGFQTTTEGLATFEEHIFKDGSNPIIVFEPAGIPWLTVAAYLRSRYPECRLVKAKMQKVAALRRYLKGPVKSDRIDALTLAKMPFIDPEQLEEVYLPSAEIHALQRLTRQRKRLESDISGRKVRIEAIIDGYLPGLRKAFASPWSTQVRAFLRARLNPFAVVRDGEKALSTFLSKASYRDKGIRAESHQIFQACQTVADICKVAEPATTINEEFFMELQDEMARELRLMETEEAESESLESRISEIYHKLHPSNNLCTIPGVGEHTAPIFLATIGDPARFRNQSAFANWTGVVPRSRQSSNMEAKGLRMTKAGPSIMRMALFQSGDIGRRWDPQMAAIYYKQMVSHGKNHKQALGAVMSHLGARVLKVLLEDRPYDLRDIDGKSVDREAAKTLILTKYHVSDDIRRERRRRNSKAGKTGETATNRTNEAAKAPQPV

SEQ ID NO: 451256 - protein, 413 aa, unidentified
MEIVYSHCAGLDVHKKTVVAAILVPDEAGGIQRETRTFGTMTVDLLGLSDWLLGAGVTHVAMESTGEYWKPIYNILENLFEILLVNAQHIKAVPGRKTDVKDAEWIADLLRHGLLTASFVPPVGQRELRELTRYRSTFVRERATLINRVQKLLESANIKLASVASNVMGVSGRAILQALIEGRATPEQMADLAKGRLREKREALSQALAGRVKAHHRFVLTELLAQIENLDESIQRFDEQIEAYCRPFEAAVELLDTIPGVARDTAEILVSEIGTDMNRFPTADHLAAWAGVAPGNNESAGKQHSGRTRQGDQPLKVALTQMAHAAARTKHTYLSAQYHRLAGRRGKKRAIMAVAHSILVIAYYMLQRQEPYHDLGGNYFEKRRPEATANHLKRRLEELGYQVELSAAPPLAV

SEQ ID NO: 451257 - protein, 342 aa, unidentified
MREKRSIGIDLHRRRFTCCVRLEKGRNYLSEWSLEQLPQFIRKLRATDEIAVEVTGNTRLFYEAVAPYVARVVVVDPHQFRVISHSVKKTDPHDARNLALYLAKGLLPEVRMKAKRQAEVASLTQTRDRLVKLRTALKNKVNNLLSARGIELDKESLSSEKGLAWVLEQKLEELAHLELEVIVEQIRSLNRSIARLERVIEEASQKLPGYRNLTSIKGIGSLGAGILLSVIGEVSDFAHEGKLAAYFGIVPRVQDSNETEHRGRITKRGSKLGRTTLVQCALIAKRHSPYLDRYYERIRARRGTGKAIIALARKFLSIVYYTLKNNWIFEDFPNFVLAEAKT

SEQ ID NO: 451258 - protein, 359 aa, unidentified
MQIQSNTLDFDGQNIYVGFDVHLKSWKVTIMTDELIHKTFSQPPEPLILHQYLKKNFPGGVYHSAYEAGFSGYWIHNSLVNLGIHSIVVNPADIPTTNKEKVQKDDKRDSRKIAKALRSGDLVPIYVHSAKTLEDRYLIRARGLLVKDLTRNKNRIKSFLYFHGIKYPPSFENSKTHWSKRFVDWLEGIEMKEDSSKLTLSILVSEGKKLRSTILNVTRSIKELSQTVAYQEQERLLRSVPGIGLLTAMIILTEIETITRFGNTDHFHSFVGIVQSTRSSGEEEKVGEITPRGHGTLRSAIIESSWIAARIDPALTKAYHEYCKRMEPNKAIVRIAKKLLNRISFVLKTKQSYRLSMLK

SEQ ID NO: 451259 - protein, 344 aa, unidentified
MEITTIGLDLAKSVFQFHGVDATGRVVVRKSLRRAQMLPFFAKLPSCLVGMEACGTSHYWARELIKLGHQVRLMPPAYVKPYVKRGKTDAADAEAVCEAVARPTMRFVPVKSPEQQAALSMHRTRDLLVKQRTQLVNMIRGLLAEFGVDIPKGLERALLMARRIVDGEAPNVPMEAAKIVGTLSQQALDIHVRLREIDRDLLVWQRNNDVARRLMTIPGIGPVGATALAASVTDPHQFRSGRQFAAWLGLTPLQKSSGGKERLGRITKMGDKYLRKLLIVGMTSLVRRARYNPKTVDPRLADLLARKPVRVATVAMANKTARTVWAIMARGEAYRAGHRPALTA

SEQ ID NO: 451260 - protein, 350 aa, unidentified
MVVVGADVHKRSHTFVAVDEAGRKLGELMVKADPGGHDKAIRWARQQFGGELTWGIEDCRHLSARLEIDLLTANEKVVRVPPKMMAEQRRTARTRGKSDPIDALAVARAVVRQPDLPVASHDEASRELKLLVDHRDDLVRYRTGVVNRFRWHLHRIDPTVDPAPKSLNLAKTRARLAGFLAPLEGIDARLARELLDDIAELTQREKALEKEITGLAAQRAPQLLEIPGCGALTAAKIVGETAGIARFANEARYAMHAGVAPIPVWSGRTAGRVRLNRSGNRQLNAALHRIAVTQTRLGGLGKAYYDKRIAAGDTKTEALRCLKRRLARIVFNVLKPTTAAATGTCLPAAA

SEQ ID NO: 451261 - protein, 393 aa, unidentified
MAAGGVRGLDALLSELFAMTLGIRAAILVCLAGVFREGAGDRAILGRWRPWLSRAPRPRLVQPGQSHGRPIPHLQGRDNEMNTPGAYVGIDVCEERLDVHVSPMGKAFRVPYTERGIQDPARRLDGYDVHRVVMEATGKVESAAAAALAQLRLPVVVVNPRQIRDYARATGRLAKTDAIDASVIAHFGEAVKPQLRPLPDAQARRFAELLSRRRQLTEMCVGEKNRLRRTVESDLQATIGAHLSYLKAELNSLDARMGEMVKGNPQWRTRDQLLQSVPGVGPFLSYTLIGRLPELGRIGKKQIASLAGLAPVNRDSGAMRGRRTIAGGREDVRTALYMAAVSGIRHNPVIRTHYTRLRKQGKPPKVAIVASMRKLLVTLNAMAAANHHWEPQP

SEQ ID NO: 451262 - protein, 330 aa, unidentified
MNSICLSTDQLTTALPVLGLDVAKKSVQAELRTNGKRVRFGFENNAKGFAQLARMLKEQGAPKVWAGLEATGPYSRALALWLHGQGHRVSLLNPRRVKQYARSAGNRNKTDLLDAAIIADFVCAHLPAAWQPPTLEVAQLQALVRRREELSLMLQAEKNRLEGVASHVRCSLERIIDTLSAEKTRLEKLITQQIRSHQQLSRDHQLLCTIKGIGSLTAAILLAEMARPGQVQRARQAAAHAGLAPRREQSGTSVRRNRGLGKEGNRYLRKALYMPALVAIQYNAPLRHFACRLRTAGKPKMSIVCAVMRKLIHIAFGVLKHQKPFNPSLA

SEQ ID NO: 451263 - protein, 398 aa, unidentified
MICVGIDIAKGKSTVCFLKPGGEVLRTPYDIPHTAEEITRLIRDIRSYDEEVRVVLEATGHYHLPVVAQLLEADIFVCVVNALRMKKFCAQDIRKAKTDRIDAVKIAAFGLTYWQDLQRAKPTDEVYRELRLLSRQYFQLTSMLVKAKISLGNLLDNVMPGIADVLQDRDPHHKLTDFVLKYLHFDKITAMGEKKFVSGYCSWAKKQGYRMYERQAEEIFALVQNSIPALPMTPSTTIVVKEAIRVVREIETSRTSILTQMQAFAKSLPEYFLIREMACVGDTLTPLVIAEIGDVRSFHSKHALIAYAGIDAPPYQSGGFNGTERHISKRGNGYLRHVGFEIMQCKLRLKPEGDPVYEFIQKKRSEGKCGKEAMVAGINKFLRIYYGKVTELYRELEA

SEQ ID NO: 451264 - protein, 299 aa, unidentified
MLQAHTLSVGMEGPTEAIAVASVAQEQGADVIALGTLGTRPGASDPLIRPLQSQSTPRVCVDDAGPCGAGLSRSLTQTGAVGWVVAPSVRPTKAGDRVTTDRRDARPLARRMRSGDLTPVAVPAVHEAAIRDLRRAREATLRDLQAAQVRLTACWRRQDSRSTGQAPWSPAPRRWRSAGGCPTPAPPMVWQEAVQTVTAPTARWPRREHARHAQVPPWRCAPVVEALQALRGVQCPVAVPPVAALGDLTRCETPRHLRHDLGLTPSESSRGARRHQGRMTPTGTTHARRALVAGAWASR

SEQ ID NO: 451265 - protein, 347 aa, unidentified
MRIVPHSCAVYGVDLGKTTFHIAGADQHGRPTLRIKLRRDALLQFFATASPARVGMEACPGAHWLARKLIAFGHDVKLIPAQFVKPYLKSNKNDTLDAEAIAEAVTRPTMRFVPVKRHEQLDMQALHRVRAQFVHQRTALVSQFRCFLLEYGIAIHTGIGMFRRDATRILADDSNDLTPTMRQLLTDLWSDFLRIDERVTALSGQIEASAKHDDVVQRLTTIPGIGPLGASALCAAIGNGKQFRSGRDLAAWIGLVPRQHTTGGKPTLLGISKRGNTYLRHLLVLGAQSCLMHLDRSRDRLGRWLDTLESRMHHNKVVIALANKLARVAWVVLTRPGALYEKMDPRF

SEQ ID NO: 451266 - protein, 349 aa, unidentified
MLADEVDYVIGVDTHRDQHVLAVVVAATGAVVAQHSVRADRSGYEAALRFARRYAADARIWAIEGAGHYGAGLTRFLAAHGETAFEVGRSGRGERRLQGKDDPVDALRAARSALATRTPTLPRRGERQEALRVLLLARRSAVDVRRLALVQLRSVIVTAPERIREELRQLPAGQLIRRCSRFRRSNSRTPDEFAIVLALRSLARRIEAATEEANELEREIVGHVRALVPDLLNEPGVGPIVAAQLIVSWSHRDRVRSEAAFARLAGVAPLPASSGQTIRHRLSRSGDRQLNRALHTVILHRRQHDPATRNYIARRIAEGKSSREATRILKRYLARHLYRVMQNATPLTT

SEQ ID NO: 451267 - protein, 367 aa, unidentified
MQNTIVHYEGTASLEAVATKVKPRGAVIKIGLDVHARLYVAVAQYDHLLPKAARRLRPCEFVPWVEALLRQGQSVHVVYEACGFGFSLYRQLIAAGAHCYVIAPRKLDEECSRVKTDPRDATTLCQRLSRYLEGNTRELAVIRVPSQEEEQARHVSRQRTQLVCHRQKLEAQGRSLLISHALPAPAHWWKEQTWTRLGRHLPAWIMTRLQMARPALLSLQEQINALTNELEASASSNLPRGVGKLTSVMLTREICDWHRFNNRRAISSYTGLCPGERSSGNKRVPGSVTKRGNPRVRAALVECAWRMVRFQPQYPPVQKRLAVLAKGSRAIGAVRKKAIVAVARRLAVDLWRLHTGRCTAEQLGLKF

SEQ ID NO: 451268 - protein, 352 aa, unidentified
MDATTVAVDLAKDIFEVAVANRAGRVVERKRLTRRRFEGFLGSLSAGTAVVMEACGTAHYWGRRCQTRGLRVQLLPPQYVRPYVRRNKTDRTDAEALLEAARCGGIQPVPVKTLEQQSLQVLHRVRTQWQAARTARINVMRGVLREHGLPMGVGARTALTRVPALLEDATVELPDLVRHTVSLLLEEVHALERRIAVIDVQLARTAREHPIAQRLQQVPGVGVLTSTALVGAVGHIHAFHRGRQFASWLGLTPRESSTGSRRYLGRISKRGDVYLRCLLTHGARAVLLTAQRTVRATPDRATRFQHWAVTLAARRGHNKAAIAVANKLARMIWAVWHRQVDFRAEARDIVAA

SEQ ID NO: 451269 - protein, 339 aa, unidentified
MTMSVIGLDIAKCVFHVYTIQADGKVIKKMLRRQQVLAFFANYPVSLIGMEACASSHYWATELMGLGHEVKLLNAKHVKAFVKGNKNDFNDAEAIFDAVTRPNIRTVAVKTVEQLDIQLIHRLRQEAVKRRTALVNQIRGLLGERGIVIGQGVSQVRKRLPALLEEAENALTLLSRAAFAEQYERLLAVDKEIKHYDQQISQLCQANELSKRLAEVPGVGPLIATMAAGDLGKNQHYGNARHYSASLGIVPRQCSSGGKSVLLGISKRGNSYLRTLLIHGARSVLRTCHHKEDKLSLWLQQLMKRRGFNVAAVALANKNARILWALANKAERYRMAVSA

SEQ ID NO: 451270 - protein, 343 aa, unidentified
MQTITTIGLDIAKSAFQVHGIDAGGQVVVRRQLKRRYVLAFFQKLQPCLVGIEACASSHYWSRELQALGHTVRLMPPAYVKPYVKRQKNDATDAEAICEAVTRVNMRFVPTKTPEQQSCLMLHRTRHLFIRQQTAVINSIRAHLAEFGIVAPVGRKGVMELLQVIADPSDKRVTDVARACLAALGTQLLNLKERIVAFDRMIMAWHRSNEASRRLLYLPGVGPMLATALVASVGDPKVFRSGRNFSAWVGLVPKQHSSGGKDRLGSISKQGDRYLRSLFVAGALSVIRYAKIHGTKHRPWLTALLARKPTKVAAIALANKLARMAWAMMARGERYRIPAALAA

SEQ ID NO: 451271 - protein, 336 aa, unidentified
MKRQYVGIDLHRRSSTIYRMSEDGKTLGCVRVPSRPLELAEALAEAGDAPEVVIESGYGWYWAADVLEELGATVHLAHPLGNDWGNRRVKSDERDAKDLAAMLRLGRLAESWIAPPEVREIRELVRYRAKLVQLRSGLKAQVHSVMAKHGVLPERADMFGPGGQAQLDALALPGPYMARIGSLRHLIELYDREVTVLEREIHKALKDDPGYKALQQIPGIGRTYAAIFVAEIGDVSRFSSAEKLCSWAGLTPKHRQSDTKLVRGRITKQGSTLLRWAAIEATAKCRTGTKLQADYHRIAERRGKAKAHVAVARRLLTLVYYGLRDGEIRALAPKAA

SEQ ID NO: 451272 - protein, 356 aa, unidentified
MSRDLKYIGMDVHKEAVVIAVRNSTGQLVMESIVETKASSLLQFIHGLQGELHVTWEEGTWAAWLYDLLKPHVQEVLVCNARRNALLKEGSKNDKVDARKLSDLLRTGMLRPVYHGEHGLRTLRELARSYQTISQDLNRVMNRIKALYRGWGIACAGTQVYAPRYRQEWLEKIQHAGVRRRAELLYQQLDSLQALRRTLRSELLAESRKHKASKLLRQIPCIGPIRAARLLALMQTPHRFRSKRQLWTYSGLGIETRDSAQYRFVRGQLQRAKKPQQIRGLNQNHNHEMKEIFKGAATRASCGVGPLRDFYVALLDKGMKPEMARLTLARKIAAIALILWKKEERFDAEQLKTQAA

SEQ ID NO: 451273 - protein, 349 aa, unidentified
MNRVTLQSNDNAAEGVLYMAMELGDKHWKLVFSDGGAKRRHEIVEAGRRMQLVEAVSKAKANFHLLPEARVVSCYEAGRDGFWLHRYLVSLGIENQVVDSSSIETNRRERRAKTDRLDGVKLLTMLMRYWAGERGLWSVVRVPNVEEEDARRLHRELGSLKKERTRHRNRIRDLLVAQGLRLEPHRDFLKRLETLTLWDGRSLPAELKGELEREYRRLRMVEEQLRALEQTRTERIAHADSHPLRQVVRLMGLRAIGPNCAWLLVMEFFAWRGFRNRRELGACAGLTGTPYDSGGSKRDQGISKAGNARVRTMMVEIAWLWLRHQPNSKLSRWFILYLLKAGRPAHLVP

SEQ ID NO: 451274 - protein, 369 aa, unidentified
MARKGTLAKFDELKPSFRAAADQVTIGIDLGDKYSHCCLLGADGVMFAEGRVRSTPEAMESHFKNLPPSRFAIEVGGHSRWVSQVLQNWGHEVIVANPRNLPMITSNIRKSDRVDAHLLARLARVDPQLLSPVSHRDKEHYPAVAQLRARDLLVRARTRLINAVRGISKATGLRIPACSSPSFSEKAAPFISDELKPSLAPLLDTIEHLSQQICSFDKEISRLGRQQYPETAQLRQVSGVGPVTALEFVLTIGNPKRFVKSRDVGPYLGLTPRRDQSGNTDQQLKISKAGNKHLRSLLVQCAQYLLGRFSPDSNLKRWGLKLASRGGKNGKKRAITAVARKLAVLLHHLWVTGDVYDPLHNAIVSCPSS

SEQ ID NO: 451275 - protein, 450 aa, unidentified
MSSSQHRAEPRSTLTVQNPNAAGIDVHDGAHWVCVPPDRDPQPVRRFGTFTADLEALADWLTHCGVDTVAMESTGVYWIPVFELLERRGFRVFLVDARAVAHAKGRPKTDIHDCQWIQRLHSYGLLEKAFRPPDQIVVLRGYVRQRLMLIAYAAQHIQHIQKALQQMNLKLTLVVSDVVGKTGMAIIKAILAGQRDPDELAKLRDQRCHRTAAEIAKALVGNWREEHLLALRQAVALYEFYHPQIVECDQAIEADLKRLPERSGGKPFPSRPVRRQKANELTFDARKRLFTTLGVDLTAIEGIDESVALLLAAEVGCDVSAFRSEKAFASGLGLSPHPKITAGKVKSRKTHPGANRVATAWRLAASSLLRSPTALGAFGRRLRSRLGAAKAVTAVAHKLAILVYRMLKHGEDYVKRGAEEYEAQYQSRRLAGLRRSAAEWGFNLVPLPVD

SEQ ID NO: 451276 - protein, 371 aa, unidentified
MTEAVKYVGLDVHKETIAVAVADGERGGEVRFVGTVANDDDAIRKLVKRLIGPGVTLNVCYEAGPCGYGLHRLLTKLGQSSIVIAPSMMPRRPGDHVKTDRRDAMTLARLLRAGELTAIWVPDEAHEAVRDLIGARRSAQEDAIGAKQTVRSFLLRHDRRFGGKAAWTKMYSRWLSEQRFDFPHQQLAFQEMQKRVLEAQARVGRLEAALAEAVDAWCFAPLVRNLQVLRGIRLVSAATLVAEVGDLTRFDNPKQLMAYVGLVPSEHSSGARTKRGRITRAGNAQARTMLIEAGWSYRLPAREERRYRERVIDLPEDIQAIGWKAQVRLCQRYRRLAATGKPQPKVTTAIARELVGYAWDIARRVSPAVAG

SEQ ID NO: 451277 - protein, 387 aa, unidentified
MPQLNDLSRSLVTLDQNSTIIAVVELSHSSWLVGGVVPGIERQPRKKLEPSPERLLALLHRWRDEAVRAGSTITRIALAFEAGRDGFWLARWLAARGIEAHVIHASSLAVSREHRRAKTDRLDTELLKRGFLGWLRGERGHCSMARVPTIAEEDAKRPNRERDCLVGERTRIVNRIKSTLVRLGIRTFKPTLRKAADRLATVYTPEGMPLPPNTLAELQRDMARLSLVVSQIRQIEDARQKRLEQQHETGSHAMVRLLARIVGIGVETADMLVHEVLSRPMRDRRAVARYAGLTGSPDESGAQRREQGLARAGNARVRRGMIQLAWRFLMFQKESALAMWYRARTADSRSGTRKTMIVALARKLIIALWRFVTTGEPLEGVVLRPAS

SEQ ID NO: 451278 - protein, 403 aa, unidentified
MNAVGIDVSKGKSMVAIMRPFGEIVASPFEVNHTASDIKSLVKLINSVEGESRIVMEHTGRYYEVLAHQLSEANLFVSAINPKLIKDFDNDSLRKVKSDKADAVKIARYALDKWQNLKQYSVMDELRNQLKTMNRQFGFYMKHKTAMKNNLIGILDQTYPGVNSYFDSPARNDGSQKWVDFASTYWHVDCVRKMSLNAFIDHYQKWCKRKKYNFSQSKAEEIYGKAKELVPVLPKDKVTKLIIKQAVDQLNSTSVTVEELRSLMNETASKLPEYPIVMQMKGVGPSLGPQLMAEIGDVTRFTHKGALTAFAGVDPGVNESGSYEQKSVPTSKRGSADLRKTLFQVMDVLIKTMPQDDPVYQFLDKKRAQGKAYYVYMTAGANKFLRIYYGRVKEYLLSLPESE

SEQ ID NO: 451279 - protein, 407 aa, unidentified
MEVIYTRCAGLDVHKQTVVACVRIAGEGPPLQQVRTFETTTSGLLALADWLDSFGVEHVGMEATGVYWKPVWHILEDHFELVLANAAHVKNVPGRKTDVNDAMWLADLLAHGLIRASFVPPVAVQELRSLTRTRKQFVRERAAHAQRIEKVLEDANLKLSVVISDILGKGGRAVLQALIDGHSDPERLASCITTRVKASRAELLEALRGNVSAHHRFMLKLHLGHIDALDQAIATIEKEVGLGLEPFRAAAKLLSTMPGLSAVSAHVVVAEIGIDMSRFATPGHLLSWACMCPRNDESAGKRRSTRLRRGGKWLKTTLVQAAWAAVRVKGSYLQAQFHRLRARRGAKKAIIAVAASMLTAAWHMLRDGTEWHDLGAAHFDRADATKTANRLIRRLQQIGYIVQATPA

SEQ ID NO: 451280 - protein, 341 aa, unidentified
MESVIGIDAHKGTLTASAVDELGRELDSITAANDGRGFARIERFALRVGATRVGIECSGSYGLALAQHLAAAGLEVKEVPGQLVKQVRRAAARGKNDVLDALFIARVARREPNLPPPPRQGLSHDLKALVDHRETLLREAVRHRNRAHAMLTQLRPGYWRSVPALTSAKRLEAARRLVEDDSGVRVELLRDALARVGELESSAKSLERQIEALVKASGTSLTDIVGVAAITAARILAEVRDVERVPSQSAFGALTGTAPVPASSGKTDRWRLNRGGNRQLNRAIHTIALTQISHDPRARAYLERKREAGKSRKDAMRCLKRHLARVIYRRLVVDGPVLPLT

SEQ ID NO: 451281 - protein, 341 aa, unidentified
MKNLFIGVDFSKEKVDVAIIFADGLTETAARVFNEFKTTVSGYKQLVKWVEQNSYGIDSSLWLFCGENTGDYSKGLCNFLYGKGYDMWLENAKSIKDASGLRRLKSDRADASMIAEYAMRNYDKAIMYEPLSESLAQLRELFLYRQMVVRHRCSFQVRRGEKRLTMEKSPIKTMISQSGRHIVSELNKEVEKIDKRIAELIKSDEELTEVFTIVTSVPGIGTQNAVSLMVYTDNFRRFNYDSRKIACYYGIAPFGKDSGTSVHSDPRVHYMANRQIKAMLTQAALAAVNFNPVMARYYMRLVERGKKKQVALNNVKNKLVHLVTAMVRNRQLFSPEYKISA

SEQ ID NO: 451282 - protein, 312 aa, unidentified
MQTQELYVGIDVSKNTLDVDSVPVSHRAQYSNDADGHRDLAARLVQLQPQWIVLEATGGLETELVSVLATAGLPVAVINPRQARQFASATGVLAKTDQVDAMVLAHFGRAVRPALRPVKDSELRELEEVLTRRRQLVEMLTAEKNRRQQASSKMAKEIDEHIKWLKARIKGTEGEMGRAIKQSPIWHAKADLLLSIPGVGAITAATVIAELPELGTLNRREVSALVGVCPYNRDSGRQRGKRRIFGGRACVRTVLYMAALAAIRAKGTIAATYEHLLAAGKLKKVAIVACMRKLLVTMNAIVRDNKPWQTNG

SEQ ID NO: 451283 - protein, 319 aa, unidentified
MAQNDLVVAGIDVAKDKVDVCLRAPSLRRTFANTAEGRRELTAWLRRQKVGKAVMEASGGYEREWAKVLRNAKIEVRVVDPKRVRSFAQSAGRLAKNDTIDAEMIAWFAETFDEVRGQAYDAAREELVQIVNARQALLEQQTQMQNRSGHTVPVPVRKMHERLLNVIILEVARLEAAIAALIKATPHFAGIAAIIESVPGLGKITSAGLIAAMPELGQVSNEAISALLGVAPYDDDSGKRRGERQIKGGRRKVRNLFYMACLGAATRHNPVLNTFYRRLITNGKKPKVALVACMRKLIVILNIMIARGEKWDATRYTAT

SEQ ID NO: 451284 - protein, 347 aa, unidentified
MTEAYDGRQVVGIDLHRRRSVIVRMTEDGRKLETVRITNSPAALRAEIAKAGKNPRVVIEATYGWYWAVEVLEEAGAEVHLAHPLGVKAFSYRRVKNDERDACDLADLLRMGRLPEAWIAPQEIRELRELTRYRHKLVKARTSVKDQVHGVLAKLGVPVTCTDIFGAWGNTWLDGLGLPQPYAGKVASLRQLAGGLGTEITVLDTVLGDLLAGHEGYAAIQQLPGIGPVLAAVIVAEIGDIRRFPGPGQLASWAGLTPRHYESDTKVIRGHVTKQGSRMLRWAVVEAIQRQPAGTRPRQVKDAIIARRGKEARNIAKVAAARELLTLVFYQMRDGHARRASQRGQAG

SEQ ID NO: 451285 - protein, 384 aa, unidentified
MAQMALQANDSGLVGVLYMALELSKSTWKVGFEYQGKRRIKNVTGGEVGELRQALDEAMQKLGVPAEALVRCCYEAGRDGFWLHRLLEDWGVENVVVDPASIEVSRQARRTKTDRVDLLSLLSKLRQYHAGEFGVWKVVKVPSEQDEEGRLLHRELERLKKERTGHVLRIKALLFAQGVRVEQVGGKKWAGYLMGLTRYDGRALPADLMAQVRRESERLAMVQEQIQAIEKEQERRVREAAEVGGVMAMVQALRQLKGIGSVGAWVFVMEFFGWRQFKNGKEVGALAGLTGTPYASGQMQREQGISKAGNRRVRALAVEIAWLWLRYQPDSALSRWYAERFAGTSKRHKRVGIVAVARKLLVALWRYLQTGELPTGARLKPAKA

SEQ ID NO: 451286 - protein, 408 aa, unidentified
MEVLYPRCAGLDVHKDSVVARIRCVSEPVHDEVKTFATTTSALLELNEFLSAQGVTHVAMEATGVYWKPVWHLLEGDFELILANAQHIRNVPGRKTDVSDAGWIADLLAHGLIRSSFVPPAPIQELRDLTRTRKQLVREVSQHSSRIQKVLEDANLKLGSVLSNVLGKSGRAILEALIAGQSDPERLADLAQGTARKKRAELIEALHGRIRPHHRRLLQVHLTLVATLEQAIADIDATVGKALASVHESARLLSTMPGISDVTARVIVAEIEVDMTRFASDAHLRSWAGFCPRSDESAGKRRSTRVRKGAPWLKTTLVSAAWAAVRVKESYLQAQFHRLRARRGAKKAILAVASSMLTAAYHMLKNGVEYQDLGASHFTRRDREKIILRLVRRINDLGCQVQVVPQAA

SEQ ID NO: 451287 - protein, 345 aa, unidentified
MKKGITIGMDLGDKKHQVCILDKTGKIIAEEEVAGTRAAVTKFFKRYRGAVVAMETGTHSRWVSQIAEAEGLEVLVGNARKLRMIWQSRQKSDTRDAVMLARIARMDPKLLYPIRHRGEQVQMDLEIIRARDLLVGERAKMVNHVRSVVKSMGERLAASSTASFGSKAKIPEALNEALKPMLEMIRELTKKIRAYDLMIKEAAVNKYPETERLRQVGGVGPLTALAYVLTLEEPERFTKSRMVGSYLGLVPRLDQSGQTDKQLRITKHGDGYLRRLLVGSAHYILGPFGPDCDLRAFGLKLMQRGGKNAKKRAVVAVARKLAVLLHALWRNGQQYEPKRKQPLAA

SEQ ID NO: 451288 - protein, 389 aa, unidentified
MQKSSTHKKNENIDLFVGLDVHKETIDIAVAADGRTAEVRHYGKIGGDLAALDKVLRKLQADGRTLHVVYEAGPCGYAIYRHLTARQIACAVIAPSLTPKKSGDRVKTDRRDALSLARLHRAGELTTVYVPREDDEAMRDLSRAREDAKRAETRARQQLQALLLRHDLRYTGRTPWSAPHLRWLAQLKLPHPAQQITFQEYVTAIDEAAQRVARLTTQIEELLPSWRMAPIVEALQAMRGVALITAVCMVAEVGDLTRFDNPRQLMAYLGLVPSEHSSGGRRHLGAITKAGNSHVRRMLVESAWAYRLPARVTPIIQKRQEKLSKPVREIAWKAQLRLCARYRRLSGKGKTKQLIVTAIARELAAFMWAIAGEVTPAAGGAVASQQRAA

SEQ ID NO: 451289 - protein, 346 aa, unidentified
MVYAGLDLSRKRLDFHLLDGAGATVEVGAAPPDADGLLGLTRRLDRHREPIRAAIESMNGARFVHDRLELQGWQVEIADAQKVKGLAPLACKTDRIDAWVLAELTRRDLVPAIWLPDPMVRAERERARWRLHLVRHRSSLKQRVHAVLLTHGKPCPVTDLFGVGGRQLLASLGLPQPWQATIEASLRLIDELDREITDCERELRRLGADHRYVPLLLTVPGIGWVLAYTIAAEIGDINRFPSPRKLAGYTGLCPRVYQSGERDLRGPLAKQGPKYLRWALVEAATHACTAAIYRDRYQQTKARIGKQRGAKVAQIDLARRLSEAIWHMLSRDQPFAPKGATDPLVA

SEQ ID NO: 451290 - protein, 352 aa, unidentified
MPKRTRVVIGGVDAHGRAHHAAVIDQQGRLLGDREFPADSAGYRQLLGWLGRHGNPDTVGVEGTGSYGAGLTRYLLDQRVAVVEVDRPDRRTRRQRGKSDPLDAEAAARAVLAGTASAPAKRRDGVVEAIRALRAVRSGAIKARTAAINQLKGLLVSAPAPLREDLDQLPMAALVATCARLRPDEAALADPAQAIKAALRAVACRIHQLDQEIGLADQRLATLVGRAAPRLLKLHAIGVDHAGQLLTTAGDNPERLRGEAAFAHLCGTAPVPASSGKTHRHRLHRGGDRDANRALHLAVVVRMRWCPRTRAYAERRTRDGLSKPEIMRCVKRYLVREVYHALVADFEALNAT

SEQ ID NO: 451291 - protein, 292 aa, unidentified
MRDDSEVYVGIDTSKLHHAVAVAEDGRQGEVRFLGEIETSGPATAKLVRKLASQYRRLTFCYEAGPTGYGLYRQIRSLGHDCIVVAPSLIPRKPGDRVKTNRRDAISLAKQLRAGDLTAVWVPDPRHEAMRDLTRARQAAVEDLRRKRQQISAFLLRQGRLYEGKTAWTRTHLKWLASQKLEHIEQRIAFEEMLLAVRQAEERIERLAQAIRAAVPDWSLAKGVTALMAMRGIDLISASGLLAEIGDLSRFQKPRELMAYLGLVPSEDSTGDRIKRGPITKAGNHRARRILV

SEQ ID NO: 451292 - protein, 422 aa, unidentified
MLEQAQDKHEIIERVAALDIGKATLVCCTRIPGQGGRGRAQEVTEHSTMTRSLQLMADRLLELGVTRVVMEATSDYWKPPFYLLEAHGFEVWLVNAKDVKHLPGRPKTDRLDAVWLCKVAERQMIRPSFVPPAPIRRLRDLTRYRVALIADRTREKNRVEKLLEDAQIKLSVVASDIFGVSGRAMMDQLIGGERDPRVLAQSARGSMRGKIASLEQAFVGSFGDHHAFLLRQMLGRIDALSADIATLEDRIETQIAPFAHAVSQLDEIPGVGVTAAQTIIAEIGLDMSRFPTPAHLASWAKFAPGVKESAGRNKGNGSTGHGDPYLARVLGEAAVGASRTDTFLGERYRRIARRRGKKKAIVAVGRSILVIVWHLLSDPEAHFHDLGSDFYDKRRGPERIKQTHVRQLEALGYKVTLEPTAA

SEQ ID NO: 451293 - protein, 334 aa, unidentified
MTIQLLAIDLGKQSFHLHGIDADGVVVSRKVSRGKLMPTIAGLEPQMIAMEACASAHHWGRELQAAGRQVRLINPRFVKPFVKGSKNDAADAEGIFEAATRPTMRFVPVKNMAQQDLQSLHRIRERLVSQRTSLINHTRGLLAEYGIVLPQGPWRFARQAPVAIAEADLSDLARELFAELLDQLCDVNARLDRLDGRILAICRANAACRRLARLPGVGPIIATALIASVDDGRHFRNGRELAAWIGLVPRQYTTGGKPRLGGIGRRANHYLRRQMIHGARAVISRLAQHDDARSRWLKTLLDRRGFNRTIVALANKTARIAWALLARGEEYAAA

SEQ ID NO: 451294 - protein, 424 aa, unidentified
MKVTYQTCCGVDVHKSFLVATIVKTTGGIEPSYQKKRFSTFNNSILEFKQWLLDNHCHDVCMESTGKYWVPVFNLLEDEINVVIANPKWVKAVKGNKDDTKDSKWIGDLFRLGLVKGSYIPCKKVRILREYTRYRYKLVSCRSSEKNRYQNALTVCNVALDSVVSDIFGKSSTSIIDYLLEQSGASINHEEIASKLLRSLKSKEDAVIESVEGYQMTDAQKYRMRLVRAHIDYITAEINDVDKMIENMISSNPDFENAIQFLCTIPGVKRDSAITIISEIGTDMSQFSSSKRLCCWAGLTPGSNESAGKKKSVRITRAGVYLKPALVQCAHAAVKSDKSPYYKKKYESLVKRRGKKRAIIAIARMILTAIYQMLSTGEQWNPSDLYKVDMPVALVEKQKAKAIRQAKKLLQREGMLPPDESLAS

SEQ ID NO: 451295 - protein, 398 aa, unidentified
MNTTAKVDRVVIGMDPHKRSATIEVMTADETILGKGRFGTDRDGYAEMRRYVDRWPDRVWAIEGCAGIGKHIAVRLLADGEQVVDVPPKLSARARVFTTGQGRKTDATDAHSVALVGTRMSGLRPVVTDEQLEVLRLLVDRRRSLGEEHTRKTCQLHQLLLELIPGGAKRDLSAAQAKALLAKVRPRDVVGKTRRRVAAELIADLERIYARKKAANKELTELVTATGTSLLDLHGIGPTGAARLLVEVGDITRFPSKAHFASWNGTAPLDASSGDQVRHRLSRKGNRQINRVLHTMARVQLRNPTEGRAYYDRKKADGKAPMEAMRCVKRRLSDIVFQTMLNDAVRTTGATTRTGPGGQRGNDSDSSAAGSHPHTDSSDKSLPGPARQHPRTPLPAAS

SEQ ID NO: 451296 - protein, 414 aa, unidentified
MHVVVERACSLDVHKRTVVACLLTPGPDGMPRQELRTFSTVTADLLRLADWLIATECTHVAMESTGIYWRPVYNVLEAVGQFELLVVNAQHVKAVPGRKTDTNDAAWIVSLLRHGLLRGSFIPPRPLREIRELTRYRSELVHDRVRLVNRLHKVLEDVNLKLAMVATDVMGVSGRTMLAALIAGETNPERLADLARGTLQKKREQLEQALNGQFRPHHAFLLAELLSQIDVLEDAETRVMAELDTRLQAEVEGLDLLDTIPGVNRRIAQIILAEIGTDMGHFPSAKHLASWAGVCPGNHESAGKRWTGHTRKGSRWLRQALAEAAHGAAHTRKTYLAALYHRIAARRGRKKVVIAVAHAILVICYHLLTRQEPYRELGANYFDERDRQDVERRLVRRLQRLGYDVVLQPAALPV

SEQ ID NO: 451297 - protein, 429 aa, unidentified
MTGSNDTPERVTLVAIDIAKHYHDVLIEPPAPKRRSRLRVANSRAELDHLAEYLRSLKSSVVVGFEATGNYHRPLAYFLHRRGFELRLIPTLALARTREAMHNSWDKNDPKDAQVILHLLKTGLVQTWHDPMVNGINDVQELSKTHFQVTLARVRVWHTLRNHYFSLYFPEIDRFVRSDHSLWMIQLLNSFPTPASIAALSEEEFQKQAWNLVGRKVSKRALLAEIYAAAKRSIGVPVALDSAAIAMFRLVLEQYLILHRLRERISEQAAVLLEDNPDSQRLMTVPGIGPANALTILAEAGDLRRFRHHRQFLNFCGLNLSTLQSGKSRSQSHISKYGNARLRTALWMAAQTAVRMRENSFRRKFDNYVRGNPLDADLRRKAYTAIAAKLARVIFGLIKSGTDYRPFFEHKFQVEEPSRASAVGASSTP

SEQ ID NO: 451298 - protein, 338 aa, unidentified
MTVVTVGIDLAKNVFAVHGVNAAGKAVLVKPLVRRAKLLELIATLPACLIGIEACTGAHYWAREFQKMGHTVRIMAPQLVSPYRMGGRHGKNDAADAAAICEAVTRPNMRFVPIKSVEQQGQLFVHRAHQGYVSERTVLINRIRGLLSELGIVLPQAFKAFLSGVAQVLEDLPGYCNQVIGDLLNELYHIEEKIKNSEKLIQQLARDNSAAQLLMQFRGIGPMTATAIVASIGNGHDFKNGRQFSAWLGLTPRQQSSGGKARLGRITKAGDSYLRTLLVLGARSVLLGAAKNDDPVSRWALQLKERRGYGRALVAIAAKNARMCWVMLHLRDEFIFPA

SEQ ID NO: 451299 - protein, 344 aa, unidentified
MKIKRMGVDLAKNVYQLHGVDGGDKCVLRRRLKRANWLPVLFDKAESGCEIGMEACTGAHHWARLLQSKGYKVKLIAPQFVKPYVKSNKNDAKDAEAICEAMSRPSMRFVSIKTVEQQDIQAMHRIRSELICHRTAKANQIRGLVAEYGLVASKQMTSLRSAIPRWLEAADNSLTDRFRGLLNGLWGDLRGLDQRVRELDQEIQGIANSNPEAKRLQQLRGVGPMIATALVAAVGKGEHFSRGRQMSASLGLTPRQHSSGQKDRLLGISKRGDPYLRSLLVHGARSVIWASRGKDDRLSEWVTDLATRRHTNVAAVALANKTVRMAWAMLSNGTDYQPDLAMGR

SEQ ID NO: 451300 - protein, 426 aa, unidentified
MITTDSPTLSVPPPVPIGAFLGWDWADKKHDLYLRLPAQAVGTHQVIENTPEVLHSFLNELHKRFPNQRVAICVEASRSALLPIFGQYQEWLVVYLLNPKTLAKYREAFRPSGAKNDRLDCELCADIVVSHPEQLHVWEPLDPATAELAALSEDRRKLVDQRTLFANQLKSHLKGYFPQVIDLLDDDLTTVVASDLVRKWPSLAALQKASPSQIRRFFLARGCHATEGLEKRLSQVGKAKAVTEQVEWLGPEIRYSQAIAVQLCALHPLIADYDKLIALRAKAHPSYQVVAHLSGAGPVIKARLLAVLGGLPERFDDANDFAVQCGIAPIQRQSGNSCCTQRRRACPMFIHQTLVEFAKSSTFTCAWAASFVSTKKALGWKHYRAVRALAFKWSRILYALIRSGSAYDEARYLASLSKKNSPYFPK

SEQ ID NO: 451301 - protein, 349 aa, unidentified
MVVVGADVHKRTHTFVAVDEVGRKLGEKVVAATTTGHHKALRWAGKQFGAELLWGIEDCRPLSARLERDLLSAGQKVVRVAPKLMAQARASARTRGKSDPIDALAVARAVLREPDLPVASHDPVSRELKLLVDRREDLVAQRTSTINRLRMRIHELDPAHAPALGSLHRANPRRMLADWLATQPGLLAELARDELADIDRLTHAIDALAARIGEHIEVAAPTLLTLHGCGDLTAAKLVGETAGVARFKSEPAFARHAGVAPIPVWSGNTAGRVRMTRSGNRQLNAALHRIAITQIRLTGSAGHTYYRKRIDAGDSSKEALRCLKRRLARIVFTRLKADYRPDDAWQPAA

SEQ ID NO: 451302 - protein, 326 aa, unidentified
MAKQQKNEVSFEEVVARGCGLDVHKKEIVATVSGTDIKKETRTFQSTTRSLTQLKEWLLELGVTHVAMESTGVYWKPVMNILEPGGFTIMVVNARHIKYVPGHKTDKKDSAWICKLLRAGLLKGSFIPRRDQRDLRDLTRYRRKLVQQRAAEHNRMIRIFEDANLKLSSVFSNIRGKTCTAVIDEVIKGETDPQKLAELCTNPRLKHSQEEIAEAVEGHFTEHHKFMIRAIRKSIKNIEDEIEVLDKETDRRMKPLQGRIEQLCEVPGMQNSSVKELLAEIGVDMEVFPTEEHLTSWAGLAPGNNESAGKKKVHTPTTATRQRRPS

SEQ ID NO: 451303 - protein, 358 aa, unidentified
MGQNKKIDFSNQDIYIGLDVHKKNWTTSIFTKEFEHKTFSQDPDPDILVNHLHRNFPGANYHAVYEAGYCGFWIHDELKARGIDCIVTNPADVPTKDKERKRKNNQVDAIKLARSLRSNELDAIYIPSREALEDRSLLRSRRNAVKEQTRYKNRIKAMLSIYGIRIPEQFKEGGWSGYFIKWLESICFNKHTGKKTFQFYIDELKHCRKKVAYLNKEIRLLALEDRYRDKVKYLKTIPGIGRLTAMILLTELVDFNRFKTLDHLASYIGLVPGEHSSGEDDDENFTSITARSNRYLRSILVECAWVAVRKDPALALCYKKLIKRMKGQKAIIRIAKKLLNRIRHVLNNNQEYVTAVVE

SEQ ID NO: 451304 - protein, 340 aa, unidentified
MFHVGLDIHSTRISICVLSETGQIALRAQVRGIEEMLRVLKGLSDRFEVCYEASCGYGHYHDLLRPLAARVVVAHPGQLRLIFRSKSKNDRNDAERLAKLLYLGETPAVHVPAADVRMWRELINCRSQVVAKRTRAKNAARALLRSAGVVPPTHPDLWTKAGLAWLRRLDLPTASQQLRRDLLLEEIEALTRQVHRIEVELNRQARRAPAVARLRTIPGVGARTAEAVAAFVDDPHRFGSAKAVGRYFGLVPCQDQSGDRNRLGHITREGPPVVRQLLAEAAWQAIRRSTTVRAFYERTRREDPQRQKIALVATAHYLVRVMWAMLRRGTVWQESPALAA

SEQ ID NO: 451305 - protein, 341 aa, unidentified
MQITTIGLDIAKNVFQVHGIDAAENVVVRKQLRRGQVIAFFKALPPCLIGMEACATSHYWARELAKLGHEVRLMPAKDVKAYIKRNKNDAADAEAICEAVRRPTMRFVEVKSAEQQAQLMQHRARDLLMRQRTQLINAMRSHLAELGIIAPQGREGVKELLAIISIEDDKHLPNDARASLIVLAAQLQALQTTIGAIEKRIVVQHRAKKESRRLQTVPGIGIIGASAIAATVTNPKIFRSGRDFAAWIGLVPRQMSTGGKPKLGPISKQGDRYLRRILVVGAVSVLRRAKNNPEKFPWITQMLTRRPFKVVAVALANKMARVAWALMMSGNTCRAARFATT

SEQ ID NO: 451306 - protein, 304 aa, unidentified
MRFYNQPHEYYCGIDLHVKTMYVCILDAGGHVLVHRNLSSTPAAFLEAVAPYRTGLVVAVECMFTWYWLADVCAAEGIAFVLGHALAMKAIHGGKAKNDKIDSHKIAVLLRGGMLPQAYAYPAAMRSTRDLLRRRLHFVRKRGELLAHIQNTRAQYNLPAFEKRLAYPGNRDGVVEHFPDPSVRKSIDVDVVLIDQYDALVTDLELTIVREAKRHDADAFHRLRSVPGIGKVLALTILYEIHDITRFDRVQEFASYARLIKCTKESAGKKLGTGGAKMGNVHLKWAFSEAAVLFLHTPPTGRGS

SEQ ID NO: 451307 - protein, 385 aa, unidentified
MRGKTFIPTDYDVFAGLDVDKRSISVTFTNHQGFIRSLRMPYNVEHLLNYVRKHFTDQKVAFAYEAGPTGYGLYDGLEAQAYPCLIASPSMIPKAPGQRVKTNRLDSRGLSENLRGGQLKSIHVPSPVYRELRHLTQLRDTFISEVVAMKLRIKSLLLFEGIDFPPAPPGSQWSFMVRDKLRHLRCSTTVRFKLDQLLDSLEFSEKQVFKATKEIRRFCQNDAELAQSIKYMMTICGIGWIVASQLLARIGDWHELKNVRQLGGFLGLVPTENSTGDKTDRGSITHSGDSRLRSKLIQAAWSAIRQDGELREFYRSVCRTHPRDRAARVAIVAVARKLTTRIAAVLMQQRPYVVREKVHSAPLTKEETVPQGTTRRQAEPGEQNS

SEQ ID NO: 451308 - protein, 345 aa, unidentified
MKRKGKRYLGVDLHHDSCVVCIRSQGRVVEYRRWQLEQMTEFAATLKADDEVAVEATGNTRWFCRQLEGRIKRVVVVNPHQFRVICDSTKKTDRRDATLLAEYLEKDLLPEVRQKTDQQSEVAQLAAARDQLVKMRTMLKNQVHGLLRSHGVLITKQKLASRKGQSQLHQIPLPALASLQRQVLLEQIAALTASIVQLEKALAEAARQFPGYRNLESIKGIGGLSAAILLSSIGRVEDFADAGKLAAYFGLVPRVEQSNQTEHCGRITCRGNKLARTALVQCALIAKRYSPFLKDFYERIQRRRGTGKAIIAAARKLLTIVYYTLKNNWVFDDFSSFALAESPTL

SEQ ID NO: 451309 - protein, 397 aa, unidentified
MSKRSKKAAQPSSMVPTVDRLALGAQDAEVKLDRRRSFGTSPDRRQSGRPAQGTSSHPQGRALSMDGSCIVTPRVFIGIDVSKFYWDVHVLPEGRWFRIQVGEGAIERLCSQLGSPEGTLIALEATGGFERRLVAELLDAGWTVAVANPRQVRDFAKGMALLAKTDRIDAQVLAKFAQHVNPRPMQKTSEKQQELDALVTRRRQLVSMRATEKMRRQQVTHKAAGRSIENLIKALDQQIAGLDKAITKLIESEVEWRTTRDIVESVPGLGPGTSRAVIGELPELGRLNREQIASLVGVAPFNDDSGTLQGPRHIRGGRIAVRNALYMAAFSARRSNEVIKRFADRLLNAGKAFKVVMTACMRKLLTILNTLVRNGQLWSPHPSVEMSSSTLFPLSTP

SEQ ID NO: 451310 - protein, 317 aa, unidentified
MPTTPIYIGVDVAKAELVVATPDQALCRVANEPDGIRTLLKHLESLTIAAVVMESTGCYGREALAMLTAAGHQVAIVQPGRVRAFAASLGIRAKTDPIDARVIARFAEATKPRSTQPPTKEVARLRALVDRRDQLIEMRKQEANRLESTADPLITKDMRASIKRLEKAEETYSKHIHTCIQAHEGMRALSERLQEESGVGLQTAATLLAYFPELGRLNRQRAAALAGLAPYDRASGTNDGKRSTYGGRRRLRRALYLAATTAARWSPWLKEIYAKLRAKGKCAKVAIIACARKLLVRLNSIAAQVLDKEQQAVSMSP

SEQ ID NO: 451311 - protein, 402 aa, unidentified
MWFAGIDWADTHHDALVIDESGQQVGSLRVLHTKKGIDELKRFLLAIAEKPDQLACIVETSHGLLITALLEAGFTVYPVNPKTIDRRRNAAGVKTDAVDAYLLAKTGRSDLADLRKLQPDTPLVAELKLLTRDQDGLIQSQTRLVNQLTACLKTYYPVALTLFSKLHQPSTLVFLQRYPTPQTAMAASAQEIETLLRKEHHPHPPEAAQQLVELLHQPQLVADVVTTRAKSRLMLALVSQLLPLIQQIAQYDKEITALFLSHEDNEVFSSLPRAGKRLAPRLLAEIGEDRTRYADAASLQALAGTAPVAFQSGNYAKVHKRYACLKPLRNALYQFAWQSTLEEPWALDYYRRKRSEGKSHTMAVRALANVWVRIIYAMWFNRTCYDPATFAAAQRRHARLAA

SEQ ID NO: 451312 - protein, 449 aa, unidentified
MRDIASAFSGMILIREVADAPVIMGILKPVGLKSPCGEVKIVKPLFVGIDVSSRNNVAYLMNPDGSKYSSFSVQNNLGGAKLLSERIVSALSSMQLRDVVIGLEATSIYGDSLVYALREDGSLGRFQRKIHVLNPKQVRKFKEAYPDLPKNDFVDAFVIADHLRFGRIAKEVYMDDYRYQALRTLTRARFDVIQNLTREKQRFANYLFLKCSGMAQNKDIQNTSATTIALMERFETVDDLANADLDELTAFIAKAGRGRFADLDATAKAVKAAARGSYRLPKTVNDTVNQAMSVSIASMRALKEQVKVLDKAIEQQFEIIPNTLTSIPGIGKVYSAGIIAEIGDIHRFNSQASVAKFAGLVWTQHQSGEFEAEHSRMIKSGNRYLRYYLLEAANSVRRCDSEFRRYYDLKFKEVNKYQHKRALALTARKLVRLVFRLLKDNRLYIPPEG

SEQ ID NO: 451313 - protein, 420 aa, unidentified
MKAFSPSDFAVLIGIDWADQKHDICEILPNQKTPKFYVISSNPKAIHEWANQLKTRFPGQKIAVACELKKGPLIYALEKYDHIVLFPINPVTVSQVRKAFANSGAKDDPSDAFIIAQLIERNMDKFMPLEADKPAIRAIARLVEGRRKFVQNRVKLTNRIVSLLKEYYPQPIEWFKEKDTEIFCDFITQWPTLERAQQARPSSLLKFFNAHNAHYPERNQQRVEQIKSAISLTQDQGIMAPNTFMVIICIEQLRLLIRAITVIDKEIKRRYKEQKDRVIFDSFPGAGPQLAPRLLVAFGTNRDRYNNAAELQKYAGIAPVIERSGKKSWTHWRYSCPKFLRQTFIEWAGLSVRFSFWAKAFYQQQIEKGKPHNTAIRALAFKWIRIAFCCWKTNTPYDETKYLNALKTKGSQLLNYAVHC

SEQ ID NO: 451314 - protein, 370 aa, unidentified
MPRKISTQAIATIGIDIGKNTFHLIGLDKTGAIVMQSKLSRNQLACRLVNIPHCLIGMEACSGAHFIGRMLEGFGHDVRLIPAQYVKPFLKGHKNDYRDAEAIAEAVGRPTMRFVRIKTPEQMDLLALHRVRSRLVSQRTGVINQIRGFLIERGITAAKGPNSLRKVLPDILASCDDVLSPMIVRIIEELSEDWRRLDIWIDDLTEEIELLANEDACCQRLMTVPGIGPTISSAIVAAVGDASGFASGRDLSAWLGLVPRQMSTGDRTILGRISKRGNKYVRTLLVQAAHIILVRRPATARQGLWPWIEAASKRLHRNTLVIALANKLARIAWAVLARGVDYQPKQLGWMSSRPSIPTVMTLCASLSAQR

SEQ ID NO: 451315 - protein, 366 aa, unidentified
MKKISTVLTFENEICNAQKLTIGVDLGDRWSFYCILDEAGKIILEQKVLTTPEAMKKTFGEIPRSLIAMETGTHSPWVSRLLTELGHEVIVAHAQKVQLITKSNRKDDRHDARTLARLARIDPELLGPVQHRSAKAQIHLMVIRARAELVSARTALVNAARGLVKSYGERLPKCGTQQVSRELGAGLSAELRDVLEPLLKEIESLNERIKEYDERMEKIAKEVYPEASLLQQVKGVGTQIALTYVLTIEDPYRFLKSREVGCFLGLKPGRRDSGESKPQKGISKAGDRYLRTMMVQGAHYILGPFGEDSDLRRWGLKLAERGGKNAKKRAVVAVARKLAVLLHRLWVSGEVYEPLRNSQKAMRAVA

SEQ ID NO: 451316 - protein, 423 aa, unidentified
MSQNQPEIQYAAFLAIDWADQKHVWSLQGANSSTCERGEVDHMPEAVEAWVAQMSQRFAGRPIAVAVEQSRGALVFLLSKYEQLHIFPVPPAMTANLRKAFYSSGAKSDPTDAGLLLDLVQRHREKLRRLSPDTEATRLIQNLVEERRKLVDEKTAQSNRLEAHLKIYFPQIPRWFGDVDSPLVCALLERWPTLEALQTARPDTLRSFFRKHHSRKEELIESRIKAIGEAMPALKDRAVVQTKVAVVKVSVQLIQVLHEGIEGFNRQIQEAAEAHLDFFIFDSLPGAGAAMAPRLLAAFGSQRERYQNATEMQTFSGIAPVTESSGKSSWVHFRFACSKFLRQSFHEWAALSITQSQWARAYYELQCRRGKRHHAAVRALAFKWIRIIYRCWKERVAYDENVYLAALAKHNSPLVAATKAEAL

SEQ ID NO: 451317 - protein, 360 aa, unidentified
MTLYVGLDLSRKSFFCYAVRRSDEAAVHSGSYEMNSEGLWKCVSDLHEQTPADDPGNAEVLCFCFEAGTESHWVNEELLSAGYATHPFHPTDFAYLTKSKKKTDRIDAKKMAQAYAAGMLPERVELPRGRQEEVRRILAERAFWLRLRCATGARLKALARKKGISYEGIGSLRRPENREKLTELFGPTCREEVQRHLSGMRLCDQNIASCEKQYQTNMSAEEKVVAKRWDGIPGVGLIVTCMLAAFIGDGKRFRNGRAAASYFGLAPKVYQSGEVLRLGEITKRGPRYGRSLLLEAARSMAGSRAFKGTELSVWYEELVKRKGKKKALVGLARKLVMIMTAMAKQGRSFEPALLTAAAAA

SEQ ID NO: 451318 - protein, 418 aa, unidentified
MASGHENRASRSYEGGASELRCGHPKLEDLLMLQTVAALFPAAVDYERTLVLAIEVSNKSWVLAAQVPGLPHTKAKRTVNPEAEALLAAIAGYRTRAVATGRSIERVIAVYEAGWSGFWLARWLIRRGVEVYVIQPSSVPVDRRMRRAKSDGIDAELLLRTLLAWLRGEPRVCSMVPVPDAADEDARRCVRERTELISERVGLTNRIGAVLATLGVSDYNPLLRSRNRRLAELRTGLGEPLPRNAHAKIERLLARLELVLTQIAELERERDAVVETEASDKASKMIQQLTSLRGIGVQSATVLVREAFVRRFANGKRLGSYAGLASSPFSSGGVDREQGIGKAGNRRVRTVMVELAWLWIRYQPAAAQVCWFRERVGSTGRRVRKIMVVALARKLLIALWRFVVDGVVPEGAVLKSAA

SEQ ID NO: 451319 - protein, 345 aa, unidentified
MQSMYYIGLDVHKKTISYCVKDGSGIVHAEGTIPATRWDLDRWMKMLPQPWTAAMEATIFTGWIYDHLKPHAAALKVAHPLMLRAIAAAKKKNDRIDANKIADCLRCDFLPECYMASTEIRERRRTLRYRNLLVHQAVQLKNKISGLLMEAGVSYNKQKLHKVGYFKEPLATNPDINEGLRPLLRLCRETLVRLQKTESALVRSLQRDSLLAERVQRLMTIPAVGPITALTWVLEVGDVKRFSSIKKAISYCGLCGAEKSSADTVKRTPISKQRNKHLQSVLVEAAKMAPRLSPELALIYDREKQKGNANRASLAVARKLVAYLVAIDRSQRDFLVVEKENCAAA

SEQ ID NO: 451320 - protein, 399 aa, unidentified
MFYCGIDIAKYKHEASVIDINGKTLLDSIPFANDKQGCGKILAVFEKFEIAPDDVIIGMEATGHYWLSVYAFFLELGYTVKVINPIQSEAFRKMYIRQTKNDSKDSYIIAQIMRFGEYSATSLSEENIIALRQLSRYRLAVVDACGDCKRRVIALLDQVFPEYDKLFSDTFGSSSTELLLNCPTPEDMLAISTRKLTNILNKASHGKFGKEKAEELKAAAKNTFGIAFAKDAFSFQIKQLMQQVVFLENQLSELEEQISNLLHETNQYITTITGIGDVLGAIIVSEIGDINRFERPNQLVAFAGLDVTVKQSGEFSGTKNKISKRGSPYLRRAIWLAAQRAAFCDPVLSEYYQSLRARGKHHLTAVGGVARKLCNIIFVILKENRPYLPTPTKNPKNLS

SEQ ID NO: 451321 - protein, 338 aa, unidentified
MKTHIGVDLHQRFCYLTAVNASGKLFKQGQVVNESEALRAWLRQLPGPRQVVVEASGFWPAFARAARAESERLVMVHPQRVKSIASAKLKNDRVDSETLAHLSRCDLLPEAWMADEATQQLRMLVRLRIAMGRQRARAKNQLQAVLHQEGFKKPVTDAFGKRGRVWLAGLELSPAGRMVVDTWLREVDHLDVELAEQTRELERMARADGRARVLQTAPGIGAYAAMVIVAELGDVERFGNKRALASYAGLTPVVRESAGKRKRGGITHQGSNTLRWIMLQVAQVAARCSPGARSYYAGLRARKPAQVARIALARKMLTVVWALLRHGVCFDEELFTRG

SEQ ID NO: 451322 - protein, 343 aa, unidentified
MKITTVGIDLAKNVLQVHGVDARGKAVLKKQLKRGQVLAFFANLPPCLIGMEACGSAHYWARQLQALGHTVKLIAPQFVKPYVKTNKHDAADAEAICEAVGRPNMRFVPIKTVEQQAILSVHRARHGLGKARTAQANQIRGLLSEFGIVIPKGMAHIAKRLPEILEDGENGLPGVFRHLLQRLGEHLKELEHQVAALEGEIQHWHRDNEASRRLAAIPGIGALTASATVATAGDGKSFTRGRQLSAWLGIVPKQHSTGGKPTLLGISKRGDSYLRTLYIHGARAVIAQVERHPERADDWLKRLLARRPKNVVVVALANKNARIAWALLAHGCDYQPRGTPLAR

SEQ ID NO: 451323 - protein, 353 aa, unidentified
MKCDKYIGMDVHQAMTVVVVLDADGKMILETMVATEAAAVIRMVQSLSGPVRVTFEEGTQAAWLYEVVRHFVTEVIVCDPRRNKLLEDGSKADKVDARKLAELLRAGLLRSVYHGHEATRRLKEFVRGYETLSIDTQRTMARIKAIYRGRGIPTAGRGVYQFQQRERWVELLTEPGARQRARWMYEQLDQLQPLRRKVKQAMLAESREHQAVSLLRTIPQLGPIRSALIVATVDTPHRFRTKRQFWSYVGLAVVTHMSSEYEMNAGRVVRRRKPIATRGLNQNCNRRLKEVFVSAATGASRQEPYKTFLERLKHNGMRTEMARLTLARKIAAAALIVWKKGVAFDPKKLNCTT

SEQ ID NO: 451324 - protein, 377 aa, unidentified
MKRIKFVGLDVHAETIAVAVAEQDGEVRSLGVIANREESIRKLVKKLGPVEQLRFCYEAGPTGYVVYWQLTAMGAKCEVVAPTLVPVKSGERVKTDRRDALKLARNYRAGELTPVWVPDAAHEALRDLVRAREAAKKDQLRAKHRLGKFLLRQGRRPPTGVKPWSLNYLSWVKHEVHFEQLAQEATLLDYLHEVEHAEGRIARLDRAIEEAVKLTPAKMRAVIEALQALRGVAQVTAVTIVAELGEVSRFTRARQLMGYGGIVASEHSSGESTRRGSITKTGNAHLRRVVVEAAWAYRHRPNVGGTLRKRQEVVSEEVREIAWKAQHRLHARYRKLTARGKNKGKVVTAIGRELLGFIWAIAVKAEAPQKESERRAA

SEQ ID NO: 451325 - protein, 462 aa, unidentified
MKRKAKSQPTHSGLAVVNPNAAAIDIGATMHMAAVGADRASDPVRSFGTFTADLRRLADWFAECRVKTVVMESTSVYWIPIFELLEERGFEVILVNARDAKHVPGRKTDVSDAQWLQRLHSYGLLRASFRPKGEIVELRAYLRQRERLLDTAASLIQHMQKAMTEMNLQLHHVVSDITGATGMRIIRAIIAGERDPAVLASMRDTRCHSTIEVIEKALTGHYRAEHLFVLEQALALYDVYQQKVAACDIRIESVLKELISVRGSKEDASANGSGSPRRRSRQSNGPDFDVGKALNALLGKDLTRIHGIGPYLALKLVSECGDDLSAWPTAKHFTSWLCLAPSNKISGGKVLSSRTRRSGSRAASLLRLAAVTIGRTDTALGAFYRRLSARAGKSKAVTATARKIAVLFYNAIRHGMDYVDPGASYYETRYRERVVKNLHRRAKAFGFILQAAEIPVAEQAVS

SEQ ID NO: 451326 - protein, 340 aa, unidentified
MKSTTIAIDLAKSVFEVGISHQPGHVDSSHRLSREQIGTFMANQPATIVVMEACSSAHYWGRTFQGFGHEVKLLPPLYVRPYVQRSKTDRSDVKGMLEAWRNSAIRAVPVKTESQQQLTSLHRVRSGWMAARTKQINMARGLLREFGFVFPLGASALPGRVRELIENADTTLPMPLRDLLHQLVLEIGELEKRVKTAEKQLGALAIQTPVVDLLRSIPGIGPLTSTALVGFVGEITRFPSGRHFASYLGLTPREYSSGSRRRLGRISKQGDVYLRTLLIHGARAVLICAKTSPKPDRFHAWGLELQNRCGHNKAAIAVANKLARIVWAVWKSGKPFESRS

SEQ ID NO: 451327 - protein, 400 aa, unidentified
MRTVFGIDVSKASSEVAILVNGERVHGYTMPNDIIGFSRLMEDLNTVSNPEIIFEATGVYSRRLQAFLEENSYDYTRLNPLEAKKQLDGLRVRKTDKIDAEKLASSQFVLNRKPTYVQEEVYQNLHDLSRFYQNLTEDIVRTKNRLHKVLQVAFPEIENLLSTPTGEQYWNLVSIFPTKHWVLELSEVELKEAIRNSTSKRISENRVGNLTEKLVGLAKQSYAGISKTSPMVEEVKYDAQELIRLTNRREQVLQQLIALAEPLPEYKILLSIPGIAETTATSIIGELGDIRRFKSANQINAFIGIDLKHYESGDFLGQEHITKRGNPYARKILYKCIHNIASASHTNPCHIADFYEKRKRQSQITSTKPHTIASIHRLIRTMYYLIMHNKLYDYSLAQSH

SEQ ID NO: 451328 - protein, 336 aa, unidentified
MEPTIIAIDLATRVFQIHFVDSDTGAIHTKALKRAQLLPFFANRPVSRVVMEACGSAHHWARQLARLGHDVRLIAAQFVRPFVKSNKNDAADAAAIWEAAQRPGMRFVAVKTEDQQAMRALHRMRQQLVRFRVMQVNQMRGLLYEFGVILPQGRRAAIEAAKVALATLADQLPAMLTESLQDQLSRMLVLDEQIGRIEQRIIEWRRSDEACLRISEIPGVGLLTATAAVSVIGQAKNFRSGREFAAYLGLVPRQNSSGGKIRLGGISKRGDVYLRTLLIHGARAVISSSKHLPERLRLLLTRRPTNVVAVALANKMARTIWALLAYGRTYQATPAQ

SEQ ID NO: 451329 - protein, 385 aa, unidentified
MTIIDQSSPGATAIHGQDSRVVVSLELSAKAWLVTSLSPGSAKFSKRWVNGGDSAALLALLRDLVAKAARRVGGPVGVVSIQEAGLDGFWLHRVLVAAGIASHVVDAASIPVPRRKRRAKSDRLDGESLVRALLAWLRGERRACSMVRPPSIEAEDRRRLSRERDTLVRQRIRESNRIRGLLASQGVTGFEPLRRDRRARLAELVTGDGRKLPPRLAAELGRLIDRLELVLGQIAEVEAACKRELADAEGRDPAALLPQLRSLSQDSVAVLAFEGFWRGFANRRQLAAFAGLAPTPWQSGQVKREQGIGSAGNPRLRKTMVQLAWLWRRHQPGSALSRWFEQRVGTHKGRLRRIAVIALARKLLVALWRYVTQGIIPEGAVLKSA

SEQ ID NO: 451330 - protein, 335 aa, unidentified
MKKFDYYIGIDVSKLTLDVTVLYECENATKTEYYKIENKEKSIAQFAKKTLGKYDLKQILFCFENTGMYSLPLSYYFSNNELSYWQVPAIEVKRSKGITRGKSDKTDSKDIAFYAYTHTHKFCPSSMSPESIQKLRLLFTEREKIVKSLVLFESTIENKEFMPKDIYKVLESENKKIINTLNQTLQSIEEKMLAIITFETELKQQYELVTSIPGIGKQTAIYLIIATKGFESFENWRQLACYAGVAPFPYQSGTSIHGRTKVHHLADKKLKSLLNMCAIAAVRHDKELKAYYERKVKEGKNKMLVINNVRCKLLARVFAVINRKTPFINTFKFAS

SEQ ID NO: 451331 - protein, 411 aa, unidentified
MPKHTPTRLGIKGQCIVLAVDVAKRNHMLMVQGPDGAREKPRRIGNSAAGFGALLQHAQTARRRWPGVPLVVALEPTGHYWLPLAYWLQARDLPVLTVNPAHTKRAKELEDNSPAKTDEKDVRVIADLAAMGRARPCRLQTGVYATLRALARLRARVAADLTAVTNQLHQLCDQLFPELLPCFGGDLRRTSCRRLLAVAPTPAAVQALGVERLTVLLRGASRGRYGAARATQLLAAAATSIGLREGTAPLVTRLHYLLEEEARLRGYRRALEQQQAAALRLVPYAAGLLQFCGLGVVTVATLLGETGDLQGFRRARQLLKHAGLNLYELSSGEHQGQRRLTKRGRPGLRRILYMAALRLLKRGAPLHGYYHRLRARLAGTAAVVAVMRKLLRVVHALVHSGQAYDALRLAA

SEQ ID NO: 451332 - protein, 387 aa, unidentified
MFYCGIDVAKLKHVVSLMDEKGQVTRTGFTITNTRSGFDQLLATLQAQREAVSVGLEATGHYWLALYDELTRQGYAVTVLNPLQIAAYRKTGIRKLKSDTSDAVWIADYIRVSNLRPTTPDLPVLLQLRELSRFRFRLSEQIGDVKRKLLSILDRVFPEYERLFSSVFLQASRAVLQEAVSAHEFADFDLQELAALLSQTSHGRFGQDKAELLQKQARQSIGVAFLADAARIEMKCLLDQISLLEDQRNQIDLAIAERMQQIPQHITSIPGIGPATGAAILAEIGDIQRFETLDKLVAYAGIDASVYQTGQFQASEAHMSKRGSPYLRQALWLAAVAALLHDPSLKAYYQKKRDEGKHHGTAVGAVCHKLLARIFVILKEQRPYVIR

SEQ ID NO: 451333 - protein, 408 aa, unidentified
MAFKIFRKNCCGLDVHKTWIYACIGITDINGRTEYKQSRFSAFTKGLHELTAWLAKYDCTEVCMESAGKYWIPVFNILEKSSWVTLAHPKYTKPQKGNKTDRKDAKWICDLFMCDMIKPSFIPPPDIRQLRDLMRYRMKLTNMLTSEKNRALNCLTVSNLKLDDVFSDVFGKSSRSIINYILEHPGMTFDVAPFIDRRCKHPVDEIQAAVDGAISREQAAKLKECLQHIDEIGTHKKNVEQEILRLAEPYTTQLSLIRTVPGLSGDPMTAIAILSEIGADMSVFPSAKHLVSWAGCCPRNDQSNGRVKSTRISRAGAYLKPILVQVANAVIKSDKYPECKERYRRLKARRGHKKAIIAICRMLLTAIWNILSKLEPYSAAGYISDKLPDLSAVIRLCSATSARQTAEA

SEQ ID NO: 451334 - protein, 346 aa, unidentified
MAVAGDIDLVAGAGTHLDTHTAALCDGRGRELSQLRVPATTAGYAQLLAWARPAAAGRRAAWAVDSTRHYGLGLARYLGGEGEDVAEIDCSRHVGRRRGGKSDAIDAVRAARELLARPWPAQMRSDGDREALRLLMVDRDNAVQSAKTARTALASVLVTAPAPLRDQLRGLSGERRVRQCAALTCPSGAGRQARIVHQTLIHLARRAAALTQAAADLKAQITQIVDDMAPGLVAAEPGPGAISAAQILLSWSHAGRIRSEAAFAMLSGTAPVPVSSGRTDRHRLSRLGDRQLNRAIHVIAVTRMRCHPATTAYVQRRRAEGKTGKEIRRCIKRYLARHIYRTLNST

SEQ ID NO: 451335 - protein, 372 aa, unidentified
MKKNTRWVGLDVHAETIAVAVADKDGTVQSVGTIPNHPEAVRRAMKKLENGGRLHVCYEAGPCGYGLYWRLAEMGIECDVVAPTLIPIKTGDRVKTDRRDAEKLARLLRSGDLTAVWVPDAEQQALRDLVRARHAAKRDQLRHRNRLGKFLLQLDVRRPEKIVAWGAKHMVWLEGQKMARASHQEVFVDYLNEVKRAKERIERLEQSIDAGIARAPKHLQELIAALQTLRGVAKIGAATLVTEVGRFTRFENARQLMAYVGVVPSEHSSGGSTHRGAISKTGNARMRHVVGEAAWSYRHRPSQGPALRKRQQDQNEDVIAIAWKAQHRLHNRFRKLSAQGKHHGRVVTAVSRELLGFVWAIARKIEAQSDAT

SEQ ID NO: 451336 - protein, 400 aa, unidentified
MKLWAGIDAGKAHHHCVVIDAQGNRLLSQKIPNDEPVLLDLIATVLKLADGDEVIWATDLNHGGSALLIAILVAHGQNILYIPGRTVHHASKLYRGEGKTDAKDAAVIADQARMRRDLQPLRAGDEISTGLRILTSRRADKSADRVRAINRLQAQLLEYFPALERAFDYSRSKAALFLLTKHRTPDGIRRTGQVRLQAWLKKHGARSSTAVAAAAVEAAKSQRTTVPAQHLGEMIVAALAREILTLNQELADLDAHISEKVTEHRHTRTLLSMPGFGPVLAAEFIGATGGDLTVFETADRFAGVVGLAPAPRDSGRISGNHHRPRRYDRRLLRVFYLSGLSALKSCSASRGYYDRKRTEGKTHIQAMLSLARRRLNVLWAMLRDGTTYTPAPGQAARLAG

SEQ ID NO: 451337 - protein, 349 aa, unidentified
MKILAIDLGKFKSVACRYITETGKSDFLIVQTHVFSFEQLLSKESPDLVVIETCSIAGWVHDLCCHHGVRCDVANPSNEAWKFKNIKRKTDRDDALKLAQLAALEQLPTVYVPTPEIRQRRALLKYRQSLITRWIAIQNHLRALFQQQGVLLDRGHRAWTETGLLAIEQHVKPLEQCGPDELWCGEVALELQAFKSICQQLQQVERKLDVFAKTDAKVKLLRTIPGVGRCTAEVVVAYLDDPQRFTNGRQVSAYAGLVPKQFQSGETDRRGRITRRGPSLLRKMLVEAGWILLRHNLWAQRLVKRLSRGQKTRRKQAIVALARKLLVRCWAMLRDGTPWCDFLPLPATT

SEQ ID NO: 451338 - protein, 349 aa, unidentified
MNSTTVAVDLAKNVFELAVADSEGNIGERLRLNRARFSSFFVHRAPCRVLMEACGSAHYWARWIGAHGHAVQLLPAQYVRQYVRRNKTDRADAAALIEAARCAAIRTVPAKSLEQQQVLVLHRLRSQWMSTRHRYLNTLRGLLREFGIAVPLGVGVARTRIAHYLAQPPQELPAAIRPLLAQMLSEVKELEHHIEQIERDLTALTRADPVVQQLRQIPGIGLLSSTAIRAAVGDVERFPCGRSFASWLGLTPREYSSGERRRLGGISKRGDVYLRTLLVHGARSALLAAHRQQRTGRPLDHLRQWALQCERERGHNVATVALANRLARIVWATWKHARAFDGNWGCAAQ

SEQ ID NO: 451339 - protein, 351 aa, unidentified
MLIIGVDYHPSDQYIAFADTETGECGERRLNHEDGEAQKFYRDLQSRAVSVRVGMEATGYSRWFERLLAELGIELWIGDAAEIKTRRVRKQKTDTNDARLLLKLLLEDNFPRIWVPSPENRDLRQLLWHRHRMVQMRTRIMNQLQALAMNEGQRWKKKLWSEQGRAQLEKLPLARWASRRREDLLELLDRMNPTIEELTRATEREARKRTEVARLMTHPGVGPITALAFSLIIGTPKRFGCGKQIGSYVGLIPAEDSSAGHQRLGRITKQGSTLLRFLLVEAAQAAARCDADWRRRYLHLAMRRERNIAKVAMARRLGVRLYWMWRNGWEYPELVKFGSNAGQLGTGHSVH

SEQ ID NO: 451340 - protein, 344 aa, unidentified
MANLNQFCDFTKLIGIDIAKSVFQIYSCDTQTGEITNVQIKRDKVLESLANCGKCLIGMEACGSSQYWARKLQALGHTVRLMDPKLVKPFVRHNKSDKADAEGVYHALVSGVRAVAVKTEPERDIQTLLTMRALLVKQRTARINHVRGLLAEYGHVMQKSVDQFDKKVDECINSLEGDAVQLVIDTLRDTVKSIRDDQDRIKTLQREISRLASQTKNAKHFLTVPGVGDTIMAYMCVLLADPTQFSSGRQFAAYLGLVPMHTGSGGKTVTTKIPGRCDKALRALLVQGAHAVARSEYRTDWVKNILAKKPKKVAMVAIANRMARQCWAVASKGQDWRRMPVTAA

SEQ ID NO: 451341 - protein, 315 aa, unidentified
MAMPVLVSKPIVGVDVAKNELVIYQAEFDLLEEIPNTKAAIKQWLKALPETVAIAIEATNIYHLEFADLAYEAGCTIYMVGGYELSHYRKGVKVRAKTDALDAKLLARYLKNEAEELHPWTPPSPLYRQLLSLFRRRAALVQARVGLVQSWANEPLLKAAFAEQVKSMQQLETLVEKTIKDHLKEAGLLGQLKRCLKVEGIGFLTGARLIAAFQRGDFRNANAFIAFLGMDLRVAKSGQKDCRRSLSKRGDPEARRLLHNAAMSASRTAAWKGFYEAQRARGFSTTQALVMLARKLARVVFALLKGQSEYQPKTS

SEQ ID NO: 451342 - protein, 405 aa, unidentified
MPMNMQYERTFGLDLSKKTFHGCMLDGPDLGNRHFFTGEMGPQGKAKLAGRLCKCDLVLLEAGTSSFSLARFLLENTEAEVVVLNPAKLYNIFNSTLKTDKSDSEKIARIARTMPRDEWPTVSIPTKEEQAERSTVSLEVFLAQEITMLVNRLYALFNSMGHPFIRKSDLKTEEARLTLANRLLCEEALAMEQAIMLSNQIEHVADQLEQCKQRLRDICLSHPKEALSLLSLPGVGLMTAASQIAFLNDGSRFNSPDSYVNYVGLSERRFDSGTKVSKGHISHMGNKCIRRNIIQAAWVASTKLKGNPLSMKYKDLILRGKNKPVAAVAIAKKMIQLSYILVKSNGIYEFTKQQGLGAFRRKLQYHKLTQLLDFLPEITKREMEEIDGTKRKEAAATTSSPKKFA

SEQ ID NO: 451343 - protein, 349 aa, unidentified
METILSIDLGKNKSVACIFDKKSFNAKFKTIKTTAAVLRELVDKVKPDIVLFEVGSSAGWIADMLNDMSVPFKVANTNHPAWKWRNNSKKTDRDDAYRMVTMYLNNSLPTVYIPNKEVRQKRSLVNYRQSLVGRITQSKNTIRSILSSVDISMPSGKKGWSQKSLEELKKIAINIQEIGSDEDFWQGELYAELEVLEKLCEQLKNITAKLDSLAEKDENIQLIKTIPGVGNRVAEAVVAILDDPHRFKSAKQVGSYAGLVPRCYQSGQMEKNGRITRQGDSLIRALLVQVSWLGLRYEWMREIFDRVQKGSKSRNKIAIVALARHILVRCWAMLRDGSKWHGSVAMVKK

SEQ ID NO: 451344 - protein, 407 aa, unidentified
MRLFVGDDWAEDHHDVELMDAAGRVLARKRLPEGVAGMARLHELIGQQLGEDGEDTEVLIGIETDRGPWVAALVAAGYTVYAVNPLQASRYRERHGVSGAKSDRGDAHMLTDMVRTDSHQLRAVAGDSADAGAIKVVARTHKTLIWERTRNGQRLRHQLREYFPAALEAFDDLDAPDALELLAKAPDPARAAKLTRAQISAALKRARRRDITGKATAIITALRSGQLGQPPAVTAAYAVTVRSLIAVISTLNEQVKALEGQVEAYFGRHPDAEIYLSQPGLGYVLGARVLGEFGDDPDRYASGKTRKNYAATSPITRASGKKKVVAARFIHNDRLIDALMAQAFAAMNASPGARALYDAERASGTDHNPALRKLANRLVGILHGCLKTRTLYDEATAWSHHENKLAA

SEQ ID NO: 451345 - protein, 403 aa, unidentified
MIFVGDDWAEDHHDVYVMDAEGARLASRRLPEGLSGIRVFHELVAEHVVESSQVVIGIETDRGLWVQALGAAGYQVFAVNPLAVARYRERHQVSGAKSDAGDAKVLADLVRTDRHNHRSLAGDSLEVEAIKVLARGHQNLIWTRTRHTNALRSALREYYPAALEAFDDLADRDALAVLGRAPTPADAAHLSLSKIRSALKRAGRQRNIDARAQEIAAALRTEQLAAPAAVTAAFAATTRAAVGIIIELNRQITELEAELATHFEAHPDADIYRSLPGLGVILGARVLGEFGDDPNRYTTAKSRKNYAGTSPLTVASGKKRAVLARHVRNRRLYDAIDQWALGAINNSPGARAFYHQHRAAGDLHHQALRALGNRLVGILHGCLRHHTHYSEHTAWAHRTATAA

SEQ ID NO: 451346 - protein, 365 aa, unidentified
METIYIGVDFHARQQTICYLKTETGELVTCELKHQDKQKVRAFYAQFRGRVIIGLEASGYSPWFERLLEELGCEVWLGHATEIRRRARWRQKNDRRDAELILELMLHNEFPRLHRGAVQSREVLRMLRYRQKLIKIRTMSKNSLQAIALQSGLARGSRLFTKEGQQQLSTAEMSPVMHWQREHWLQLMEPLNQQLLETMVWFKAESKGDVRVMRLRTHPGIGLLTSLCLVHTLQPVSRFRNTRKVVAYAGFDPVERSSAERKCFLGISKAGSRLLRYLLVEAAQTAVRKDEDLKRFYKRLAERRGRPKAKVAAARKLLIRSYIMLRDEIDYAEFRHRAVAARLARRSQRPEVPEVLIGQPASPEH

SEQ ID NO: 451347 - protein, 421 aa, unidentified
MQVLYERCAAVDVGKDVIAVAVRLPGEGPDGRQMIKRTFKTYYGVLREAARWLTSLGVTRVAMEATGICSMPVYHALIEHGEFAQVLVCNAGHVKNVPGRKTDLADAEWLVHLLECGLLRGSFIPPADIKAARDVIRYRTKVVQSRTSEVQRLGNVLQDAGIKIGSVASSITAKSGLAMIEALIDGERRPQVLAGLAKGTMRSEIADLSMALEGRFGDHHALMCRLHLDHIGHLEEMIAALDTQIEAMMEPFRAQRDLLTTIPGIGPLAAAAVISEIGAGVREYFPGAAHLASWAGVCPGNHESAGKRRSGQRRHGNQHLQPVLVESSWAAVRHEGYLKALYHRHVMKWGGYRSQTAKKKAIVVVAHALLVIIWHVMATGTPCDELGEDYFTTRMDPDRETRRLVAKLEALGHTVTLEAAA

SEQ ID NO: 451348 - protein, 400 aa, unidentified
MLSIGIDVSKGKSTVCGMKPGGEIVYTPFEIQHTREGMSELVSLLHNSGEEVRAVLESTGSYHCPVVAALLENGIFVSVVNSLRMKRFCSQSIRKVKTDRIDAMQIALYGLAYWQELQPTRLPEDTYRELQLLARQYYQMTSMLIKAKVDFNAICDQVLPGMQELMSDHAGRHKLSDFVLRYRHTAHILEMGETRFRKDYCKWAEKKGYRNCERMAALIFATAQNGIPVLPNAPSTQIVITEAIRVLHTVEASRDAILTQMQALAKTLPEYSLVREMPCIGDTLAPRLIAEIGDVRRFHSKRALIAYAGIDAPPYQSGKFCANNRHISKRGNRYLRKTGYEVMQSYVMHKPANDPIFTFIEKKRGEGKSGKLAMVAGLNKFLRVYYGKVTELYRSLPAIE

SEQ ID NO: 451349 - protein, 432 aa, unidentified
MKNDNRKYLSVGIDVGADFSLMAIALPSQELLGKSYRIFHNSKRSLDGAIDRIYSVMEQYDLPARIFMESTGIYHFPVYHKMREAGLDAYVLNPLVTHASKDINVRNIHNDKFDAQKIALLGLRPDLKTSIVPSDDVAAMKAILREYYAMKKETSMYICRLKDQLRQVFPQFIPVFSKVNGVAAMAVLYEYLTPDSVLAAGADELERFMKTVISKGPLHIRKKAEALVEAARDAQNFGHGNTGVFYLIRHYIEMIRLLDAQTKQILTQVKVLLKEQKNSQMAKQVRLLQSIPGIGFLSAVTLVCEIGDFSAFKRPKQLFAYFGLDPAVRQSGNFSGADLKMSKRGSPYARRCIYVLAIQSVSLRVDGTAKNPVLRSFYEEKCKSKSKMTALGAVMHKVCNIIFAVLRDERPFVLITPEEHRTAYFSASVKAA

SEQ ID NO: 451350 - protein, 358 aa, unidentified
MIAMKYYISTTKFNCGIDLHARQMYVCLMDPQGNKLVHTNIRNNDFDYFLKRIEPYRHDLTVCCECMFGWYWLADACQAAGLKFVLAHALYLKAIHGGKNKNDRIDSEKIAHLLRTNFIPPAYVYPAAMRPLRALWRQRIVYVWRRAELLCRIQSHELAHNRCPIKQYRPNRDPWEKLLLAREENPLRQLALQNDLAMIRSYDQQITALEQRLQQFTKARSWREYALLQSVPGIGENLGHTILYEIGDIERFATVKDFLSYCRLVKGSVASAGKIKGLRGAKLGNPYLRWAFGEAAVIAKRDHATIGPLAQRLEARMGGNKFKANTVLAIKLARSVYFMLKNKTVFDPQRLISALSKN

SEQ ID NO: 451351 - protein, 338 aa, unidentified
MNYVGIDHHRQYSHMTMMNKEGQVLRSGRVPNCQSEIEKFLEGGEAMEAVIETGRSSYTMVDVLEELGVAVKIAHPNEVKAIARAKIKTDKRDSEVLAHLLRMNMIPEVYRRSAENRQAQRVLRQRAFYVSAMTALKNRVHAFLAQQKEEVRETVARETNIFSVKSQKVLLGLDLAHGEKRLLTALMKTYRHLETRIEESTTLVGKLYEESREAQLIRTIPGFGKYLSVLVAIEIADLNRFSDEAHLHAYAGVIPSTHSSGDKTHHGKIIRAGNRWLRWAAVEAVWPAIRADFDLRCLYERLSHAKGANKAKVATARRLLTIIFKVWKEQRNYIPYRR

SEQ ID NO: 451352 - protein, 349 aa, unidentified
MSQNLNSAVAVIGIDIGKNSFHVVGLDNRGAIVLRQRWSRGQIEARLANLPPCLIGMEACVGAHHLSRKLQALGHDARLMPAKYVRPYSKGQKNDFRDAEAIAEAVQRPTMKYVATKTVEQLDLQALHRVRERLVSQRTGIINQIRAFLLERGVAVRQGLRFLRAELPRILATPPDVLSPRIVRVISDLAEDWRWLDDRIDQLSSEIAVLARQDAGCERLMSVPGIGPIISSAMVAAIGTGDAFSKGRDFAAWLGLVPKQMSTGDRTILGKISKRGNRYLRVLFVQAAWVVLIKPMSWDRHGLKHWIEAAKKRLHRNVLAIALANKLARIAWGVLAGGRTFEASKLQIA

SEQ ID NO: 451353 - protein, 347 aa, unidentified
MRFYTKQHKFYCGIDLHARTMYLCVLNQAGEILLHRNMQARPEPFLQAIAPYREDLVVCVECIFTWYWLADLCTAEGIPFVLGHALYMKAIYGGKAKNDKIDAQKIAVLLRGGMLPQAYVYPAAMRATRDLLRRRLHLTRKRAELLTHVQQTNWQYNLPELGQKIAYKANRHGVAARFPDPAVHKSVEVDLALIDFYDQLLRDVELTIVQTAKQHDAQTLYRLQSVPGIGKILSLVLLYEIHDISRFPRVQDFVSYCRLVKCAQESAGKRYGTSGTKIGNAYLKWAFSEAAVLFLRNNPAGQKYLARLEKKHGKGKALTVLAHKLARAIYYMLKRDVVFDLDTFLQS

SEQ ID NO: 451354 - protein, 350 aa, unidentified
MDVHALSVVAHAVDEETGKVARARLCPDHGEILGWLHQLRAPVRVAYEAGPTGFGLARAITGAGMECVVAAPSKLQRPAGDRVKTDARDAAHLARLLRLGEITEVRVPEREIEAVRDLVRAREDARADLMRVRHRLSKLLLRQGIVYSGGTPWTYAHEEWLRRHRFDDIHLKAAFDHGFDAVLAATAARDRLDEQIMVVATSPRFADPVNRLGCLRGISALTGLALTVEIGDWSRFTGSSIGAYVGLVPSEYSSGNSRVQGSITKAGNTHVRRLLIEAAWHHRKSYSTSGPSLRARWAKVDPALRARGHAGNRRLYSRWRGFTERKKNPLVANVAVARELSGWCWSLATM

SEQ ID NO: 451355 - protein, 350 aa, unidentified
MLIIGCDYHPSFQQIALVDTENGELQERRLGHREEAEQFYRTLATGGAEVRVGMEASGHTGWFERLLAELHFELWMGDAAKIAAKRVRKQKTDRLDAQHILTLMVKDDFPKIWVPSWENRDVRQLLWHRHRMVQTRTRIMNQLQAAALNAGLRYKKKLWQESGRQQLESLPLAPWASRRRRDLLEVLDGINPTIAELTRAIDQQAERCPEAQRLMTHPGVGALTAIAFVLIIGKADRFRCGKQIASYLGLVPEEDSSGERRRLGHISKQGNSLLRFLLVEAAQVTVRSDTRWRNRFFHLARRRGRKIAKVAMARRLAVRLYWMWRRGWNYAQLESFGSHAGHPGHRHGVQ

SEQ ID NO: 451356 - protein, 368 aa, unidentified
METIHRSRTLYVGIDVHKDTHTAVALSPFGEKIFEMTISNESEDFISLVEKTKAEASRIGLIPSFGLEDVHSWGERLSSFLVEEGLPVTAVAPILVDHLRQKTTHPEKNDSLDALGVAKVMIQRIDTLPRYTLTEEAKKAKQIRELSVEREWLVKERTRLKNQLHILLHRIHNSAYRIKFKDPFSKKALRHWMRSMPKDIDSILDQRTKRALRRLLDLIEETQEIEDELTALMEANGFKIHTASGCGPVIAAEIIGEVGDISRFKSPGALAKYAGCCPRECSSGKKIRWRKTRSGNRRLNRSLHRMALSQISRSGNNAAREYFKRKISEGKTKSQALVCLRRQLVNIVWMMLKHKTEYVCPLRSKSLN

SEQ ID NO: 451357 - protein, 340 aa, unidentified
MEQASMIGLDIAKNVFEVHGRNAAGEVVLRRSLKRSQVEKFFARQPKAVIGLEACGSAHHWARVLGKLGHEVRLMPPAYVKPYVKRNKSDAIDAAACCEAAGRPDMRFVPVKTVEQQAALSLHRSRDLLVSQRTQLGNALRALLSEFGVVAGKGKAGLARLVDELRAGTLELPADAVAAAMALADQHAALDAAADALERRIVAQAKADTKAVMLKTAPGVGPLSAHATLAMMPDPSLFKSGRDFAAWLGLTPRLTGTGGKTRTGRITRQGNQPLRRLLVLGATAWLRQVRANPEKASPWLRGMLARRPSKVVAVAQAARTARILWAMLSHNQPYRAPAVG

SEQ ID NO: 451358 - protein, 427 aa, unidentified
MRVLYDRVAAIDVHKDMVKVAIRVPGAKRGTRKTDVLEFRTFYGVLQEMARELRRRGVTHVVMEASGVCTEPVYYALTELDFEEVMVINPAHAKALKGHKTDAKDAVRLLDLYECGALPRGSCIPSPDLKEVRDLARYRMKTVQARTSEIQRLQKTLEMAGIKLSSVVSEVTGVAATAMIEGLISGERRGAVLAENAHSRMRNAGKMADLSMALAGRFTDHHALMCRLHLDRIKIFDAAVGDLDATIAPLVARYSREAGLLKTLPGFGDVVVAGWLGAIGPAPHQHFATADRLASWATLCPGNYKSAAKSKGGRTGDGGAYIKPLLIQAAWAAVRVPGRLQARFRRLVRKFGGPRNKGAQKRAITAIAHTLLKIAYSILKTGKPYQDLGDDFYTRRESPAARQDYLMRQLQKPNPGCVITITPPEAA

SEQ ID NO: 451359 - protein, 339 aa, unidentified
MKVLIGVDPHKASHTAVAIDATETQLAELTLRANKSQATRLLAWAAPFPDRRWAIESAGGLGYLLAQQLVAAGEDVVDVPPTLSARVRVLGSGKSSKNDPNDALSTAIAALRGRSLRPVLADDHRAILRMVADRHHDLTALRTQAVCRLHACLAALVPGGFSGVLSSSRATTMLAGIPVTNGVVAERKALAEALLDDVIRLDAEIKAIKGRARVAVEASKTTLVELYGVGPIVAALIIGHAGDACRFATRNHFASYTGTAPLEASSGPKKRHRLNPRGNRQLNHALHIVAISQIRNDTPGRAYYRRKLDEGKTRKEALRALKRRISDAVFRALVADASR

SEQ ID NO: 451360 - protein, 282 aa, unidentified
MYYIAFDVSKKELSVYDGKKDMTFLNTEGLSSLKKYLKAHYRDFNQLIFLLEATGSYSDHLIEMCARCRIKAVIINPKASHHFAKSLGIRNKTDKIDARMIYQYRRLIDYQMITVPRINKEAKTLSAYLGSYQLALKQRIALDNHLEHVREKDLFRLLKKELKRAYRLEEQILKRITAYILKDPQLKADYQRLLTIPGIGEKSAPALLYLFITYQGANRNQITALCGLDPLQRQSGTSVKGKPKISKHGSKLIRKVLYMPMLSAIQTNSQDPSLLPEITAKP

SEQ ID NO: 451361 - protein, 324 aa, unidentified
MIDAILGIDVSKNTLDVSISSCTKVRTKSFANSSDGWHHLLDWLVAQKIQRVHACLESTGRYSLGIAYSLYEAGHVVSIINPAQIRDFVRTKLGRNKTDGIDASRIREYCELFKPSPWAPPSEAHRRLGELQTIRAGIIAGLTEWKNRKNSGIVDTEAQALADATILHFTSQLGAVDKAIALTIDNDSDLRSKRDLLLSINGVGDTLAGVVLAELPGPDVLRSSGEVVAYAGLNPRQHQSGTSVDRATRISKIGNAVLRAALYMPALSAMRYNPAIVALVTRLKSRGRLKPKQIVVAAMRKLLVLCFGVLKTGKPFDPAIAMGC

SEQ ID NO: 451362 - protein, 349 aa, unidentified
MKEQLEFFRWVGLDVSKDSFTAAHYAFGGDSMSFPKCGKFGRDAEGVRQLLAWAGSIPCGDAMPAFGIVMEETGSYSKELARLILEAAPDQHVSICNARSVACYIQSHGRQKTDRTDAALIARFGFDRRPPRHVPETEAESALKTAVRERNRLVEQRTALRNAGSGQEEGVAADANRIVLDALDKAIRMLDREIRRLVGEDARAREEVGLMTSIPGVAMLSAASIYAELGSLKNYTRRQLSAMSGVCPVRIESGKSVHRSKISHAGSRVVRKILYLDTQFAARDVPAIRALRERLLARSESSRLTARCACMRKLLLTMRGIVKSGKPFDPTFTPASKKTKNVKKVAIAT

SEQ ID NO: 451363 - protein, 362 aa, unidentified
MKYRTCIGIDTHSRKNEVCALDTETGEVRRATLGADPGDLAEWLAGAVGSPEGAMCVYEAGPTGFVLARALVAAGWPCTVAATSKLPRRTDAMKTDRIDAEWLARCLASGAVRPVRVPTEAEEALRHLSALRGQAAAQLRASRQRVASFLLLTGTRYTLTKKRWTKAFRGWCRTHEMACPADTYVLRDLCREEERQLGRLSAIEAEMGRLVAADPGLSAAVAALECLPRVGRVTAMSLVCEVYDFSRFRSGRAFASWLGLTPSERSTGSRTRRGGIDKRGNANLRRLLVEAASGIGPRSPRPPARAPEGVPGAVADKALRCSERLRARRAALGRRGVPANKAKVAVARELAEWVYYVATMGR

SEQ ID NO: 451364 - protein, 405 aa, unidentified
MKTLGRAIGLDVHLDFCEVAIAEDGVVRSAGRIQTTPEQLRLFAQSLGSDDRVALEVTGSAWEIARTLEPHVARVVVVSPNDTGIWQARAKTDRLDARTLARLLWAGELDAVWTPDEQTRVLRRRLARRRQLVRARSRAKNEIHAVLMRRLKGKPPFSDLFGVEARKWLAELELPVEEQETVAACLRHVEFLDREIAAVDALVARQALESEEAQRLMTVPGVNVICAQTFLAAVGDIARFQTTRKLVGYLGLDPRVYQSGSAPAKGGRISKQGSSAARWALVEAARSVVQQPGPLHAFYERIRARRGHQIAVVACARKLAVLFWCLLTRGEDYAYQQPSLTAKKLRLLEIRAGAKTLKGTNTGTWATRQKMRQAERALAEQAEASYKRTVADWQAAKAARRGARA

SEQ ID NO: 451365 - protein, 429 aa, unidentified
MTRISVGVDVSKNRSTVCIMDQDGKFIMRPFLVWHSTEELDFLADTLKRLNGEVRVIMESTSVYQYPIALQIKERGLFISIVNAYEMRQFANIDFRGGKTDKKDSRTIASYGISYWDKLVEWQIPKDTYFNLDLLNRTYMNAKKHRQIILQELQHYIDCAMPGMDKELHSLNLSTKKDFMLDFVEKFWHRDEIVNMTEAEFTEVFTAWAKKKGYRPGKGKAAKIYAIAKSCIPYYPSNPTVKTILQCIVDKLSGVNRTLVTIVTQMIEEAKKLPEYQIVREMPGVGDPLAARFFGSAGDIRRFKNSKALVAYAGIDSPPDESGDFSSTHRHITKKGSKVFRDTGYEIMMALRAQKRTWEKVRKNPEVYDYMLRKEAEGKPPKVAKIAALNKFLRIIYARIKELYDNMALAERAKAKTKSKTKAKTKATA

SEQ ID NO: 451366 - protein, 342 aa, unidentified
MKQVKIVGIDVAKLVFQVHAIDASGKPVMRKQMRRTELERFLGSLEPCIVAMEACGGSHMLGRFCRQLGHEVRLISPQFVKPYLKSNKNDQEDAEAIVEAVQRPGMRFVALKDERQQIHLAWHRIRDRLVRQRTALMNELRGLLLELGIVFPAGVTILRRGMQKILDGSLIIPMDMKPIIEHLYKEWMSLEERISVFENGIIKQYRSSPVSQRLGQIPGIGPITATALEASVGNFHSFKNGRALAASLGLVPRQCSSGGKTTLRGISKRGDPYLRRLLIHGARSVIMRCKGKSDRRSRWIQEKLQTRGFNKTCVAVANKNARMCWALAVHEKDYDNELIRSC

SEQ ID NO: 451367 - protein, 399 aa, unidentified
MLLDHPIPGPTAIQTQLSAIFASLELSRSTWIVTSLSPGKGEKMSRHSLQGGDLAGLLALFAEQKRRARERTGSDYPIITIQEAGLDGFWIHRALQQEGIQSHVVDAASIATSRRRRRAKTDKIDGEALLRALLAFTRGEPRVCAMVTAPSPEEEDRRRLCRERQTLLDERIVHTNRIKGLLFAQGISDYAPQRRDRRKRLEGLRTGDGRPLPPRLKAQISRELDRLELLLIQIKAVEAAQEAMLAAECKRVIEAEPREAERKGEQPRNVVAMLLAVKGIGTHAAAILWSEGLSRPFSNRRQVAAYAGLAATPWRSGAIVHEQGLSKAGNPRLRTLMVQIAWLWLRHQPQSELALWFKARGERGRKGSIVALARKLLVALWKYVTHGVVIEGAVIKTAT

SEQ ID NO: 451368 - protein, 343 aa, unidentified
MYYIGLDVHKKTISYCVKDAAGHVHLEGKIGATRRELDVWVKALPQPRMIAMEATIFTGWIYDYLLPHAETVKVAHPLMLRAIAAAKKKNDKIDASKIADCLRCDFLPECYMASTEIRDRRRTLRYRNLVLKQMVQMKNRVSGLLMESGVSYDKQRLHKMGYFTQLFSTSEEISDSIRPLLRLGREHIQRAQRLDRALTSSLEHDPLLSERLRRLRTIPGVGPITALTWALEIGDYTRFRSVKEAISYCGLCSAEKSSADKVMRMPISKQRNKHIQHVLVEAAKMAPRYSHELALVREKEMQRGNKNRATLAVARKMVAYMLAVERRQLDFLPCEDMAGKAVA

SEQ ID NO: 451369 - protein, 339 aa, unidentified
MKVYAGIDLHSTNNYIGIINDKDQRIFKKRLPNNLDIITSALETFQPELHGIVVESTYNWSWLVDGLQENGYRVHLANPAAIKQYEGLKHTDDRWDSFWLAHLLRLNILPEGYGYPKENRPIRDLLRRRTMLVRQRATHIISLQSMITRNLGINMSGRAIKRLTEEDAEQLFGDSCLVLAARNNISIMAFLKEKIRLIEQSVLSRVKLRKEFAPLLTLPGVGKILGLTIMLEVDNINRFPKVGNYSSYCRCVKSERLSNGKKKGTGNTKNGNKYLSWAYVEAVHHAIRSYPYVKSFYQRKKAKRNGIVAIKALSNKLCRASYYVMRDQVPFDHEKLFEF

SEQ ID NO: 451370 - protein, 386 aa, unidentified
MKKHTKNETRKCQRETKKVAELETAGWSEREANTLVIGIDLGDRSSSYCVRTLGQQMVREATVATTATAILKEFQGLRRQRIVIETGTHSRWVAHLLEMMGHEVMVANARKLKLISENNQKSDKVDARLLSQLGCMNVEWLHPVYVRSQEAHCELLLARSREALVETRTGLINHVRGVVKSFGSRLAKCTSESFVEVARVGLPDGLKPALSGVLAALEEMDEQIYDYDCRIEHLCNTKYKEAAQCLLQVNGVGPVTTVTYLLTIENKDRFEQSRDVGPYLGLVPKSRQSGQRDPQLGITKAGDEMLRKLLVNCAHHMLGAKGQDSDLRRWGLELVRAVERKGKQGARKLAAAAVARKLAVLLHALWVSGAVYEPLRNRGAQQTPAA

SEQ ID NO: 451371 - protein, 371 aa, unidentified
MEHTRFIGLDIHKERISVAVAENERSGAVEYLGEIANEPGAISKLCDRLRRPGKPLAFCYEAGPCGYGIHRHLTRLGHRCDVVAPSLIPTKAGDRVKTNRRDATMLARLHRAGELTPVWVPDADHEAMRDLIRLRSVVRQIVTRARQHLQGFLLRHGRKHGRGTAWRMAYRRWLSTLAFEHPAQQIALQDYVDAVMDAERRLKRVEEQVFGLLPDWNLRLVVDGLQAMRGIALINAVVLVTEVGDFTRFSNPRQLMAYFGLVPGERSSGETVRRGAITKTGNAHVRRALVEGAWAYRMKARIGRHKVDRIEALPKVVRDIGWKAQVRLCTRYRRLRARGKTANVVNVAIAREMVGFIWSIACTIQSAPRAA

SEQ ID NO: 451372 - protein, 341 aa, unidentified
MYRTKVGVDLAKNIIQVCTLHGKKVTSNVEMSTDEFSLWLAQTKPVTVAFEACSTSNYWYQQAIKAGHDARLISAKLVKAVRQNQKTDKNDALAIAQTLFLPEVSFINGKNIEQQQLQSIQRLRELAIKSQNASQKQIVSLLLELNIRLPNTQAGLLNGLEGVLEDGENNLSDTFRATLLVAKVQLENMISAIREYDKYLEQSIQSLPDCKKLLKLEGVGPVNAVNLYIALGANQSQPFKSGKNASACIGLTPIQHSSGGKEVMGTIGKYCKNGSLRSQLITGAMSVVIKVIKYGAKTKKELWLQGLMQRRGNRCAAVALANKTVRTAYSMLQNNTEYHAA

SEQ ID NO: 451373 - protein, 417 aa, unidentified
MSRIRGGRVRPVLRGPRRSNASGLPDSHTAVAIDETETALGELRVRSSARQVPQLCSWAARWPERTWAVEGAGGLGYLVAQQLVAAGENVVDVQPKLGSRVRLLATGNVNKNDPNDARSVAIAALRAKDLRPVVAEDHAAVLKLWPKRRRDLGSLRTQVVCRLHAVLCDLVPGGHPRREITAAQAARALDGLEPVGAVAQARYELAIDFLADLRRIDAQMAETKKRLEVAVKASGTTLTEIFGVGPYVAATVIGYVVDVARFADGDRFAAYNGTAPIEVASGGHKVFRLSRRGNRRLNHAVHMVAVTQVVHRHSQGRPYYDRKLKEAKTNKEALRCLKRRISDAIFAHLVADADEASKAGPGGQRGDGSVSSVAGSHPERQLFGQATPGPAATIRSRPAPTQRKAPLQVQKKSRKAS

SEQ ID NO: 451374 - protein, 318 aa, unidentified
MNTNTLQNINVGVDTGKSQLDIYIRPLDIYFTVPNTEKGISDAIKTIKKHKPQRVVIEATGRLEMPFILACDKAKLPYVIANPLRIKRFAGAIGQRAKNDRLDAALIAHYAERVQPELTKLKSENIRLMSDLVTRRNQLLTMQTMERNRLQILPKNISSTITPILTALKNQIEKVEAKIAKLIESCPEYQAKNTILQSMPGVGKVLAASLISNVPELGFITNKQASSLIGVAPITRESGRFKGKRLIQGGRSQVRTVMYMAMMSAIQCNPVFKATYERLLTAGKPKKVAIVACMRKMVVILNSMLRDGVMWDTDSLKN

SEQ ID NO: 451375 - protein, 412 aa, unidentified
MDVVYQRCAGIDIGKRTAKVCVRVQGRGRQKTSTTVTSWSSTMPQILKLRATLVSEGVQRVVMESTSDYWRPFFYVLAEELDVILVKASDVKAMPGRKSDVSDAEWLADLAAHGLVRASFVPPQNQRQLRDLTRARSRLLADQAREVQRLEKELEDACIKLAAVVTDLQGVSARLMLQALIEARDDPAAMAELAIGRMRTKIDELTEALTGRFNDHHRFMVTFRLKRIDAATADLAELDARIDALIIDAGFGPARDLLLSIPGLGRHGAEELVAEIGPDMSIFTTPEQLAAWAGVAPGCHESAGKRKKVPARRGNRYVKRALGIAAKSAARKKTGFLAARFRRLAARRGYQKAIVATEHSMINAIWHMFTNAEYYHDLGSDYYHRLTPARIIKRKIAELQAAGYTVTREAAA

SEQ ID NO: 451376 - protein, 387 aa, unidentified
MQKPHDDSKACLTAFIQDSTLTVVVEMSLGSWLVAGMIPGVNRDPLKKIAPNPEVLLQLLHRWRDEAIKAGKEITRIAVAYETGRDGFWLARWLRARGIDAHVIHATSVAISREHRRAKTDRIDTAMLRRGFLGWLRGEPGHCSMAIVPTVEDEDAKHPHRERETLIKQRTSTVNRMKSILIKFGVRDFNPALRKAPEKLASVRTPEGIPLPSNAVAALQRHMERFRIIKEQIKAIERTRLQRLQRDPTEKFNAMVFLLVRIIGFGVETAQQLVHEMLSRNLRDRKAVARYAGLTGSPDESGSKRREKGLSRCGNRRVRNILIQLSWRLLKFQPKSDLVVWFKKRTANARGSRKPMIVAFARKLIIALWRYVNTGLVPEGFQLRSAA

SEQ ID NO: 451377 - protein, 340 aa, unidentified
MNVTTIGIDLAKSVFQLHGADADGAVVLQKKLRRGAVLDFLGKLGPCLIGIKACATSHHWAREITALGHEVQLVPPAYVKPYVKRQKNDAADAEAICEAVSRPNMRFVPVKTVEQQSVLVLHRSRDLLMRQRTMTLNAIRAHLAEFGVIAAQGPQRIVELVARLTEGEDLGVPELARSALLSLAAQLYSLTHERQRIERELMAWHRRSAASQRLETIPGVGIITATALAASVPDPSVFKSGRQFAAFLGLVPRQNSSGGKDRLGHISKMGNGYLRRLLVVGATSVTRRAGANDSRTGAWVRALLERKPARVATVAIANKTARTAWAMLMRREDYRAAAAA

SEQ ID NO: 451378 - protein, 377 aa, unidentified
MKRTSLPLRRRVVVEMSKASWLVSSVVPGVERQPLKKLEPDATALLRLIERWRTEAVRAGRPIRRIALAYEAGRDGFWLARWLIARGIEAHVIHSASVAVSRERKRAKTDRLDAAMLMRVFLGWLRGERGHCGMVAIPTMEEEDARRPNRERESLVNERSRIINRMKSALARLGIRGFKPHLRKAPERLAGLRTAEGTGLPANIIEEFRRDMARLALVREQISSIEKTRAERLERAPDTGPHAMVRLLARVIGIGIETADMLVREILSRKLRDRRALARYAGLTGSPDESGLKSREKGLAKAGNARVRRGLIQLAWRFLMFQKDSALARWYRTRTEGPSGARKTTMIVALARKLLIALWRLVTTGEVPDGVELRTAA

SEQ ID NO: 451379 - protein, 420 aa, unidentified
MEEVTEEPAELVEQVAALDIGKATLVACVRVPHETKPGRRRQEVRSFATTTKSLLELADWLYGLGVTRVVMESTSTYWKPPFYLLEEQCECWLVNARDVKHVPGRPKTDTQDAVWLAKLAERGMLRPSFVPPPWQRELRDLTRYRRTLTHERTREKQRAEKLLEDAQIKLSVVVADMFGVSGRQMLEALIAGQRDPKVLAQLAQGRMRSKISDLEEALTGHFRAHHGYLLRMMLDRIDALGAQIEELTGRIEELLAPFAHQVAQLDEIPGVGRIGAQELIAEIGTEMGRFPSAAHLVSWAKFAPTTKASAGKTKSSSTGKGNPWIGATIGEAAMGASRTKTFLGSRYRRIVKRRGKQRALVAVGNSILTIAYHLLSDPQTRFVDLGADFHDRLHPQRRTRQLIRELEHLSGKQVTLHDAA

SEQ ID NO: 451380 - protein, 330 aa, unidentified
MKKWNVILGVDVSKLTLDICCAERNLHIKIDNCSKGFCVLKKWCKTNGIDLSETLVVLEFTGGYEYRFLQFCESMSISYCRVPGLEIKSSLGMTRGKSDEMDAFRIGQYGEDKVKRLEPSKPLNKNILELKQLLSFRKRLVREKAGLESTVKERKHMYGLTKADMITRIAQAKIKSNEKYILQVEQEIMEIIKSDEDMWRNYRIITSIKGIGKVNGWMTIAYTENFTSFTDPRQYAVFVGVIPFGHTSGTSIKGRKRVSHLAHKGLKSELNQAAKTAIVHDPEIRIYAERKLKNKVYPLVLNNVKFKLILRMFSLVKRGEMYVENYRRAA

SEQ ID NO: 451381 - protein, 340 aa, unidentified
MTVSVIGLDIAKNTFQVHGVDEQGQRVVNRSLKRHQLRQWFATLDRAEDCVVGMEACGTCHYWARELEKLGYRPRIMKAAFVKPFRRGQKNDARDAEAICEAVQRPSMRFVPLKTVEQQAMLGLLQVRERLIRERTRLINQTRALLLEQGISIGLGRKRFRETLPDILEDGENDLPMLLRDTVADIYDDYRVLEGRIERLTRRIEAVARQDKVCQRLQALEGVGALTATLLRALIGDAKPFRCGRDFAAYLGLTPRQHSSGDKERLLSITKAGNGLLRRFLVHGARAALQRVGDKQDARSAWLQGLLRRRPHNVVVVALAAKNARIALAMVKGDSAYTPA

SEQ ID NO: 451382 - protein, 385 aa, unidentified
MRSEATRAGETNVGAQVLYMVLELSERSWKVLFASAAGRRRERAVAGRDVAGLLEEIAAAKRRLGLSAQARVVSCYEAGRDGFWLDRALRGHGIENLVVDSSSIEVPRRARRAKTDRVDLVKLMGLLLRWVGGEKKVWSVVRVPDVDAEDVRQLSRSIERLKAEHGRHVTRIKALLATQGIRLGHIGRRDWAKRVGELRRWDGSALGVWLQRDLVLEGERLAVAAAQLAALKAERDKLVAQGGEVAAVKARELARLGAIAKESSFVFAAELFGWRTFANRRELAGSVGLTGTPYSSGDSAREQGISKAGNRRIRTMLVEIAWCWLRYQPTSALARWWQGRFADSGGRTRKIAIVALARKLLVALWRYLERGVVPEGAVLKTRVSA

SEQ ID NO: 451383 - protein, 315 aa, unidentified
MAMRVTLEKPIIGVDVAKNELVIYHDQYDRLEAIPNTKVAITQWLKALASSCAIAIEATNVYHVLFADAAYEAGCDVYMVDGYQLSHYRKGVNIRAKTDAQDARLLARYLKNELDELRPWIPASPLYRQLLSLFRRRAALVQARTGLVQSWTNEPFLRTAFANQVNSMKRFEALVEKKIRDVLQEAGLMRQVNRCMKVEGIGFLTAARLVTSFQRGEFSAANAFIAFLGLDLRVSKSGQSDGPRRLTKRGDPEARRLLHNAAMSGSRTPAWKPFYEEQRKRGFSTTQALVMLSRKLARVVFALLKNQSEYQTKVA

SEQ ID NO: 451384 - protein, 346 aa, unidentified
MMIIGCDFHPSWQQVSWLDTETGETGEQKLVQASGDAERFYRQVPAPALIGMEATGNCHWLVDLLAELGHELWVGDAAQIRASCVRQQKTDRRDAEHIRILLQEGRFPRIWMPSSEVRDLRQLLLHRYKLVTIRARVKNELQHLCLNQGVQRKHKLWSQAGQKVLRELRLKPWAARRREDLLGLMAMLDQQIDPLDRAVKEEAQRDKMALLLQTQPGVGAVTALAYVLTMGDVSRFARGKQVASYLGLIPREHSSGGRQKLGAITKQGNRMLRMLLVEAAQIAVRFDPGLRKQYLHRCHQKPKAVAKVAAARKLAVRLYWMLRTQTGYPEIVRIESSPRLPLVGAS

SEQ ID NO: 451385 - protein, 321 aa, unidentified
MAKRTTICAGIDTGKRKLDVALDGSSEQLQVENTAEGHKALLQWLGGHKVMRVGIEASGGYEQSVVAELRRKRFVVVVFQPAQVRAYARYRGQRAKNDRIDAALIAACTAAVNKIHPAPDARLSPLAGHLTLIDQIGEDIARFKNRLESCRDVRIQRLWKQDIARLAERERVEFKALLAAIRAHRDLATRLDLIYSVGGAGLPTAVAVLVRLPEIGQVSREQAAALAGLAPYDDDSGDQIGARHIDGGRKRLRQALYAAALAASFRWNPQLMALYKRLIAGGKGHKRALIACARKLLVFINAVVARGTPWQADAPVATPAA

SEQ ID NO: 451386 - protein, 419 aa, unidentified
MSFKIFKFNCCGLDVHKTWIYACIGITDSNNRTEYKQARFSSFTKGLNELCDWLAKYNCKDVCMESTGKYWIPVFNILEQHSFWVTLSHPKYTKPMKGNKTDRKDAKWICDLYMCGMVKPSFIPPADIRELRDLVRYRFKLTCMITGEKNRAQNCLTVSNLKLDDVFSDVFGKSSRSITEQILQHPGEKFDVAPFVHGRCKTPIEEIQAAVDGAISKEQAVKLRQCLDHIDELNKHISELEQEILRLSDKYEAALNLIRTVPGFDKNPMTAVQILSEIGGDMSVFPTAKHLVSWAGCCPRNDQSNQKIKSTRISRAGSYFKPVLVQVANALIKSKKHLEFTNRYKRIKARRGHKKAIIAICRMILTAIWHILSDLKPYTPEGFLESHPVKEGKVLSSSQALNFFKQRGYIIKDEPLSVS

SEQ ID NO: 451387 - protein, 340 aa, unidentified
MKDTVIGVDLAKNIFQVHGASRAGEVMFRKKLRRQQFMQFMATQSPALVVLEACGSAHYWARELAGAGHEVRLIAPQYVKPFVKRQKNDAADAEAIVIAARQPEMRFVEPRTEAQQARGVLFRARQRLVHQRTELVNALRAVLYEFGLIVPQGIAHIRHIEAMLGEAVLPEAVKQECLDLLRQISEQSVRIDVRTKKIRMLAQESENTCRLQSMPGVGPLTALAIEAFAPDLQSFRRGRDFAAWLGLVPRQFSSGGKERLGKISKAGQADIRRLLIMGAMTQVNWASRKAPAPGSWLARMLARKPRMLVAIALANRMARAIWAMATKQEDYRDPALSVAA

SEQ ID NO: 451388 - protein, 312 aa, unidentified
MTEHCYGGIDVSKDRLDVMVLPDRKSFSVDNNAAGYSELVKRLRGLSIAAIGIEPSGGYERAVIRALLAADLSVRRINPNKLRQFGRARGVLAKNDRLDARLIAEYVAIMPTRVVQRDPAAEQLAEVVTMRRQLCDEHVAVENQTAHLEDAMLRRLNKRRLARLAADILLLDRRMAQIVASNANLTRRYELLTSMQGVGPTLAFTLIALLPELGHMSRKQIAALVGLAPYDFDSGRLKGHRCIYGGRLPVRNVLYMAALSACRYNPALKVFHHRLAATNKKPKVIIVAVMRKMITTLNAMLRDNVVWQTKSA

SEQ ID NO: 451389 - protein, 341 aa, unidentified
MKKFIRTAIDLGKTYFQVHGLESEGGQSISRKMKRSKMREFYEQIEPCRVGMEACGSGHYWARELVAMGHEVMLIPPAYIKPYIKRGKNDAVDAAAICEAMSRPGMRFVPIKSADQQAVLMLHKTREMFVKQRTMSVNALRGHLAEFGIIVAKGIGRVDELLALAQSDTKLPQIAKSTVAGLAQHLEGLDQSIEAVGDEIARAHKQNPTSRLLDEIPGIGVLIASVIASSVPDPSVFKTGRDFAAWLGLTPRQNSSGGKEKLGSITKQGNRYIRKMLVVGATSVMRVAGKRKGALADWINALQAKKPKRVAAVALANKLARICWAIMTTGEGFRVDTYVKA

SEQ ID NO: 451390 - protein, 310 aa, unidentified
MQIRSVGIDLGKTTFHLVALGDSGKVLLKKKFSQRQLIAFTANMQTSLVGMEACSGSHFLGRALREQGHDVKLIPAQFVKPFVKSNKNDFIDAEAIAEAVDRQNMRFVPIKTDDQLDLQALHRVRDRLMARRTSLINQIRAFLLERGIVFAKTPIRLREALPEVLENANENLTPRMRNLVAMLWSEWKDLELQIVEMNDEVERIASSDAACRRLRQIPGIGPLVATAIVASIGNGAAFRKGREFSAWMGLLPKQHSTGGKARLYGISKRGNSYLLRQIGCRIREHKLAGHPGLDRCPIRKFPTLVDISSA

SEQ ID NO: 451391 - protein, 342 aa, unidentified
MDYFAGLDVSVKDTSVCIVDDAGKIVREVKVTSEPHALLAVLNNPAYHFKRIGLEAGPLSQWLFSSLAEAGLPVICVETRQMRAVLKAQINKTDRNDARGIAQMMRAGLYRPVHVKTLRSQKLRMLLVHRKLLQSKSIAIENDLRGTLRNFGLKVGVAGAAKFEARIKELVENLPDLAALVEPLLVVRRVLREQIAVLHRRLLAIVRNDEVCRRLMTTPGVGPVVALTYRATIDVPARFRNSRAVGAVMGLTPCKYQSGQSDRTGAISKCGDEMLRVMLYEAAQILLMRSTKWSWLKAWAMQIARRRGMKKAIVALARRLAVIMHRIWVDGTEFRWTKAAAA

SEQ ID NO: 451392 - protein, 338 aa, unidentified
MSTITLGVDLAKSVFSVCEVEASGRFVRRLDLKRDAFSAWLAQQPANTVVAMEACSGAHHWAPRCAEHGLQPRLMAAQLVKPFRKSQRSKNDRNDAEAIATAARQGNMHFVPIKSIDQQARLPWHRVREGYKTESLAIGNRLRGLLAEFGIVMGKSDKALRRVLADLDAHPALPAEFKELIRSIDAHARDDERCVRLRAIVGVGALTADALIASLGKAQEFRNGRQLAAWLGMVPTQHSSGGHTRLGAISCRGDGYLRMLLIQGARSSLQRAKAVATEKATPEQRWIRSLAARLSFGKVLVAIANKHARQLWVMLAHDVDYDPCASQRHPMHRPTQLA

SEQ ID NO: 451393 - protein, 310 aa, unidentified
MHRCVGIDVSKHHLDWTLGEDGPVEQLPNTPAGIRQLLVRARRHAPPLIAIESTGGYERKLVIALQKAELPVVLVNPWRVRRFGEGLGRLAKTDPIDARLLAQYAERARPPRRPLPGPRARQMADLVARRRQLLEIVVAEKSRLENAPAWLRKDITSLVAIVQRRIAKLDAKVDAAIAQDPEQHETSEILQSTPSVGPGVARTLIVDLPELGALSRRQITSLVGLAPYARDSGRKRGLRKIRGGRPGPRTALYLAAMNAARFNPVLKAFYQRLRAAGKPAKVAFVAVARKLLTLLNAMVRDRTTWRKAIA

SEQ ID NO: 451394 - protein, 345 aa, unidentified
MKHCAGLDVSVKETAICIVDETGKIVREAKMTTEPKEIVELLTEDGFEYLRVGLEAGPMSQWMVTGLLEAQLPVVCAETRHIKAVLKAQQVNKSDRNDARGIAQMMRVGLYKPVHVKTLTSQHERMLLTSRKLLRDKLQDIDNELRGTLRNFGLRVGVVSTGHFEARVRELVAGHPPLEAIVAPLLAVRRVLREQFAVLHKMVLDRVRSDRLCRRLITVPGVGPVVALTFRATVDQPQRFARSKTVGAHFGLAPRRYQSGDTDYDGKISKCGDAMMRTALYEAAQVLLTRTQKWSWLKAWGMQVARRRGGKKAIVALARRLAVILHRMWTDGSEFRWRKEVNVAA

SEQ ID NO: 451395 - protein, 343 aa, unidentified
MAQQTIIGIDLAKHVFQVCMVTPTGTLKTNTTVARGKLLALIARQPPALIFMEACGGAHDWARRFGALGHEVRLLAPQYVTPFRRGQKNDPNDALALTEAGQRPNIPTVPIKTVEQQDLQALHRVRERLVKHRTAVVNQVRGLLLEYGIIIPQGIARLRKRLPRVLEEADNGLSFLMRDLLQSLQSELSALDTRITEVTSQLTRLGHEMEACQRLQAMEGIGPLSATALVAALGNGHDFQTGRQVAAWLGLVPRQHSSGGTTRLGSITKGGNSYVRRLLIHGARSVISHVRDKPDAKSAWIRQLVTRLGVNKACVAVAHKMARVAWALLHTGEHYRKPAVLSI

SEQ ID NO: 451396 - protein, 414 aa, unidentified
MNVGWAKRSVPTISPIAQIEWWARFALPTLVIAQTGIVGVFRKEWPATDVHPAAGRWRSDRVRPEPLWLPRSVIVVSTFIGPGWLPEQLGSLHKAGSRKMTQTNMTTAGIDTSKLKLDIAVHGRTERWKVANALPGWRALAANLAKADVTRVGIEATGGYERGVVEHLRAAGLIVLVLQPVQVKAFGRVHLRRAKNDALDAELIAACAAAIDRLRMVPDARLTELAGHLTFLEQTEEDIARFKTRLEHIDEPGLRRIVNSDIARLKARKAAQIRDIAKRLRAHDDLAERLDLVLSIPGIGERTALALLIRMPELGQVSREEAAALAGLAPFDDDSGQRKGQRRIAGGRGRLRRSLFAAALPAAYRWNRALIALYARLKARGKAHNAALVACARKLLIYANTVVQRGTPWTEKAA

SEQ ID NO: 451397 - protein, 351 aa, unidentified
MQRFIGIDVHGQSCTLVVMGPSGRRLGEHVVETSAKALIERIRSIPGDKYVCMEEGTQSEWLYEVLESHVKQIVVTQPLKRAGSKSDAIDAWALADMLRRDALERTVFKSPKTSTALRQAARGYIAVRRDMVRAKCRLNALYRSRGCNPTGEIYDPDTRNSWLAKLPPAYRTLGELLSEQLDGLCQSHQAAESWLLKEAERIPVARRLATAPGIGPIRAALLVAIVVTPTRFRTSRQFWSYSGLAIVTRSSSDWVRDGRGWTRKLTAQTRGLNRNRQPELKAIFKGAATTVIQQMPNHPLHKDFQRMTDAGIKPNLAKLTLARRIAAATLAMWKHQEDYDPSKQTRAPQSQ

SEQ ID NO: 451398 - protein, 430 aa, unidentified
MSYRIAGIDVHKKMLAVVVSDVEVESEYQFEGRLFSSNPEQLRSLAAWLLEKEVEEVVMESTAQYWRPVWEALEQYWKPLRQKREGAGRMSGTLHLAQAQSNRGPRGRKRDFRDAERLVKRLVAQELTLSFVPDGEQRLWRTVTHKKYQLRRDRVRLHNQLESLLEEAHIKLSSLVSDLLGASARRMLKALADGETNPAALAALADQKLRATPEQLCDALGACTELKPVYRRLLKMALEQLQFLEQQIGQLDQELATLLHPHQDAVERLAEVPGLGVDSAQQIIAEVGPTAATFPSAKQLSSWVGTCPGDEQSAGVNYSHRSPKGNRHMRRILNQTANAAAKTKGSIFDIVYRRSVTHLGHNQAVGAIAHRQCRLIWLVLHQGVRYEERGPAVNKQSKQRRTWKMIRQLRSLGYRIQPPNPDQPSQAQEQ

SEQ ID NO: 451399 - protein, 393 aa, unidentified
MYLVGIDIGKLKHSFCLLEKETGEILVEPVFFENNRDGFNALLSSFKHLPQKDILIGMEDTGHYNLALLKFLLDRNYQVALINPVATNLTRKMQGGISKNDKLDTLTICDVLSSNQRVKSYRISKYSSFDLYEQKQLTREHHNLKEEENQLSNRLQKCIDVVFPEFNSLFKSKYGIVYMNILKEFGSADAIAHADIRTLRKCFDTGRGKHISLTAQELKEAARNSIGFPSSSEATQIKHLVARIELIKEQIAEIDKKIEEFSIQNNSPILSIPGISHFSGTSILAELGDIHNYSKPSQIIKFAGVAPLTYESSQFTAQHTAITKKGCKYLRKTLYQIITPVIQYNPVFRKFYLLKIAQGKGHRCAQGHCVRKLMRVIYHLLNTGTQFDPALLR

SEQ ID NO: 451400 - protein, 404 aa, unidentified
MSESGCGVDVHRDMLVATIVDDSVKETGRFMNDVDGINSIKEWLKGHGCKRVVMESSGVYWVSLYLALEDAEFDVLLANARQVKAIPGRKTDQLDSEWLAHLLRSGLVRPSYVPEKRVRELRELTRLRVKLVGSRTAFKNRCHKVLSRVNIRLGSRLSDIFGKAGSEVLEGLMEGKTVDDILDHTGNRWLKKRGDEIKEVVKGVLSETDIFILKQCVDMVKQVDEKILEVDAQIEMLVNERDVDIVASVPGVGRKSAAVITAEIGDAKRFEDGKKIASAAGLAPSVYQSAGKNFTGGITKQGSMWLRRIMVEVAHSAVKTRDSKLRMFYLRVKARKGDKTAIVALARKMLTIIHHLLVNGERYVEDGFEKRLRGRGSIRFRGVPLEEMASVLRDAGYLVSGPVG

SEQ ID NO: 451401 - protein, 321 aa, unidentified
MQTVVGIDVSKETLAVCHLVAGEPRHLEVENAKAGFRRLLKGGGPESLYVMEATGAYYMRLAYFLVGQGAKVAVVNPLVIKRFIQMHLGKGKSDRKDAQWIMRYGQQNELKLWRPDEARLVECRQLEQAIEQLIKQKTMTLNSLEALEQQPVRNKVTVRTLKLTLLVLQKQIHLLEQELDGHLREQFKEQMELLSSIPGIGSKTAGMLLLFFGGFRQATYYRQLIAKAGLCPREYSSGSSVRGKVRITKMGGSQIRSKLYMCSLTAMRANTACRELYERLVAKGKNRKLALIAVCNKLLKQAFAIIHSGVAYQPDFKRFSA

SEQ ID NO: 451402 - protein, 457 aa, unidentified
MGTAVEFEAIHIPSCGLDVHKDKIEACVIDADGRRHQKAFDTMRKSLYVLRDWILSLGCHHVLMESTSVYWIPIYEVLEEEPGMDVGVGNARHMKNAPGRPKTDKADSNWIARLCMVGFILKSFVVGRKFRELREYTRYHKKLVQERARQVNRIEKLLQMNGFKLSSVLSDITGASGLRLMKKLRDSGSVTLSDVTELLDRRVKKTPEEIECAINGRMKLTSRALLGKMLVKLETCEKEIEEIYGMMVKLSKEHKPQIMLIDSIPGLGELSAMYIIAEISTDLSSFKTANHLTAWAGLAPKDNESAGNLKYSRTQKANIYIKTVLVECAWAAIKKRDTRLSNWYWSHVKRLGEKKAIIAVARKLLVYIYAMLKSGELYDDSLDVADTMNHKAKKLDSARKIVEHQSISPNTQEHPSDVAQQSNAGLHNQENELPHAANKADPPRKRGRPRKTVKADN

SEQ ID NO: 451403 - protein, 332 aa, unidentified
MEILHFIGVDVSKKKLDFCVMFEGKVVHEEKTANHQGAIMSLLRNLEEDYGITSGQMLVCAEHTGQYTFPLACACKSVECKLWLENPAEIKYSSSVQRGKNDKVDAKRIAIYANRFQDKVQYYERPTEDIERLKQLESERTLYVTDLAKYKGQMKDQKDYMPKALYERKMKRLQALMDDLEEAIQAITDEMDEVIASCPVLSRQRELLMSIDGVGRVVATNMIIATEAFTRFVDPRKFNCYAGIAPFYYSSGSSQHSKAKVSHRADKVMKRLLHLAAVAVTHRVGGELKMYYERKDAEGKNRMSVINALRAKIVARMFAVIKKNEKYKPILS

SEQ ID NO: 451404 - protein, 444 aa, unidentified
MKVKAVSALRSERGLHRVNGAEPQVVGLTPQTTMKRKANTMKTYILRDPKPVEPQKSIRPPRSKPAAPATLKGPVLFIGLDVHNDSIAVSLAPSDATEVRRYGIIGGEHEDVLKLAKKMAAAHPGTTLKFCYEAGPRGFALCRCLRAHGWDCILVCPSKIPRKPGERVKTDRRDADDLARLYRAGELTGLYVPEPVDEAMRDLIRARFQVGRQQHRARQQLKMYLLRHNLRYGGQTSWTPAHLRYLAKIKMPFPTQQIVFQEMLDVISEATARLERYDQEIERAVPGWRWEPVVRALMSLRGMALLHAATLVAELGDFNRFEHPGQLMGYLGLVPSEHTTGKDRQQGGITKMGNAPARRALVEAAWQYRIPARLSPHLKKRQEGLPKAITDIAWEAQRRLHHRYTHLTRVGRKKSQVAVTAVAREMTGFVWAIARQVKPVATTP

SEQ ID NO: 451405 - protein, 436 aa, unidentified
MDGPMSSDRKMLSKLQGASFQQLQKTVEVKRMEKVCGVDVHRDLLVATILCGETEEKETKNFVNDADDIDKIKTWLKTRNCKRAVMESTSVYWVPLYLALEEAGFDVMLANAHQVKGIPGRKTDQSSSEWLAHLLRGGQIKPSYVPGKSLRELRELTRLRVKYVQNRTAFKNRCQKVLNRVNIRLRSKLTDVFGKAGMEILNGLMAGKSVEAILEHAESKQLKSKAEEIRSVARGALSENDIFVLKHLTGTIKHLNAQIHDLEARIESVVNKADVEVVSSVPGVGGRSAAAILAEIGDAKRFENGKQVAAWAGLVPSVYQSAGVSVFGSITKQGSKWLRWNMVEVAHAAVRVRGSRFRALFLRVVAKKGKKTAYVAVARKMLTVVWHLLMNGEKYVEEGFEKKAVGFRRLGYGGHVPLEEMVKVLRSAGYTVVVNG

SEQ ID NO: 451406 - protein, 349 aa, unidentified
MRFYSHQHQFYCGIDLHARSMFLCIQDQSDKILLHRNYRAGPDALLGAIAPYREDLVVAVECVFTWYWIADLCSREGIAFVLGHALYMKAIHGGKTKNDKIDSHKIAALLRSGMLPMAYVYPQGMRSTRDLLRRRLYLARQHAELQAHIQNTNTQYNLPYFEKRIDRKSNRAGIATRFTDPAVRTSVEVDGALMDALHQQILTIERQINAQVPEHDPVAVHLLRSIPGVGKTLALVILYEIHDINRFPAVGNFISYARLVKCPHESAGKRVKGTHNKIGNVHLKWAFSEAACLFLRKNERGKLYHQRLVSRYGKAKALSILAQKLGRTVYTMLKRRSPFDAKRFFETVG

SEQ ID NO: 451407 - protein, 372 aa, unidentified
MGTELTRKFKFYIGIDVSKSFFDYVITQGKTVLHHKQVLNKDSEIESLILDLKQIAGFKLSNAVFGMEHSGLYCNALLHALHKKKAKIVHENANMIRNSLGNLRGKTDKIDAGRIAEYLYKCREGLKFWEPKRQILNQLASLASLRERLIATKNILDMPLKEMSKFATKEIIEQTRHHCQASLLALNLNIADIDNSIKLIWSGDEYLSVKMKQMMSVPYVGKTTALQILIKTNELIDINDPRKFAAFCGVAPYPHKSGTTVNKRTRTSSMADKKMKALIHICALGSIKTKGEFRTYYDRKTVGEGKNGMLVLNAIRFKLLLRIFACVNGNRMYQAEYIPTPKRIISQFSLLNVDVLQMKHVFCFNTKRVFSS

SEQ ID NO: 451408 - protein, 356 aa, unidentified
MEHFVGIDLHSNNSYIAIIDNDNKRVFKKKVSNDLHNVLHVLEPHRKQIKGIVVESTYNWYWLVDGLMEKSYKVHLANPSAIKQYEGLKHSDDVTDAFHLANLLRLGILPEGYIYPKEERPVRDLLRKRLQLVQQRTALILSFENLLSRNLGTRLKVDEINKLTEEDVEDIFQQEYLVLSGKASIATINFLGTRIEQIEKTVHKAARLRSEYKLLMTVPGIGKILALTIMYEAGPMERFAKVGNYTSYCRCVGSERISNGKKKGKGNRKNGNKHLSRAHVEAAYYAIRHYEYIKRYHQRKMAKTNNIVARKAIAHKLARACYYIIRDQKAFDPGKLFAHKIAATVNPYYCWDNHST

SEQ ID NO: 451409 - protein, 435 aa, unidentified
MDEVTDEPLYRNRVCGIDIGKAQMVATIRVPSDRDPARRSAETRAFATTKRGVLALADWCRSWQVPAVVMEAASDYWKGPFYRLEAEGFECVLADAKQVKNLPGRPKRDPADSRWLAACFERGAVTSCFVATPEFRIIRLHTRCRRDLIEERTRDKQRAEKLLESAAIKLSSVVSDLHGVTGRDIMDHLIAGERNPKVLAQLARAAARRKIAELEEALEGAEFFTAEHAGLLAAMLERIDRVTADIARLSEVIEQLLAPYEEQLAQAESMPGWRRRSAEDAIAETGVDMTRFPTGAHLASWGSRAPLDHQSGARKGRARSKKGNRYLAGVLGETAVAAGRTQTREGARYRRLARRLGKPKAQVAVGNTQLKVLHKLLSNPGMRHEDLGPDYCERRASLRRQIHHHVTHLESLGFEVTLCRAPDPQPGPAGQAHAV

SEQ ID NO: 451410 - protein, 346 aa, unidentified
MLYAGLDLSRKRLDVHILDEDGRTVEVTAVSPDAVGLRRLAAHVLRFGHDVDGAIESMTGARFVHDTLERYGWDVAIADAAKVKGIAPLAAKTDRIDARVLAELARLELVPEIWLPDPTVRAERERARFRLHLVHHRTALKNRIHATLMTFGHPVPVADLFGAGGRELLARLALPEPWTGTLATSLRMVDVLGAEIDACEAELRRLGADHPSIPLLLTVPGIGPLLAYTIASEIGDIGRFSSPKKLTGYTGLCPIVRQSGNRDVRGPLAKNGPKYLRWALIEAATHAARDAHYRERYERTKRRLGRQRGAKVARIDIARQLAEAIWHVLTKNEPFAPAGPTKLLVA

SEQ ID NO: 451411 - protein, 339 aa, unidentified
MRKEEFECIGVDVSKSTLDAALFRGEVDWNEGHVKVGNNASGYNELKKWMHSKQVKKDKVRVCMEFTGLYAVDFRSWLEKENITYYMVDPKRMYHFAPPLSIKGIRQTKTDKADAFRIAIYCSLFHESMKPSKLPSAAYFKLKRLLAERRQYVKQSKLYKQQLHDISVYDSVSSRIRKKDELKALRRNVKDTEQEMLSIIESDSSVKHNYDLLVSIVGIGLVVAVTTIVLTENFTTFTNPRKYASYIAIAPFPHESGTSVRGATRVSKQGFRQAKADLSISILPAIRYDAEIREYWQRKKAEGKHTGVIFNAIKFKLVLRMFAVVKRGMPYVNTKGYKG

SEQ ID NO: 451412 - protein, 410 aa, unidentified
MRHYLGVDWADQTHAVWVVDESGTKITARTVTHTAEGLGEWGRELDAWRAQGIAVWAAIERPDGRVVDFLLDHGVVVYPVNPKALDRARDRFRQSGAKSDPFDARVLADFLRTDHGHIRSLQPSSEAAQELKLLTEDCQRHIRQQTRLVNQLTATLKAYYPRALEIAELTSALAREFLPAYPTPAALTALTERQWQRWARAHRLTEARTGELWAVLRQPQLPVPAHVVRAKARLMRALMEQLMPVMAAVAQYRKAIDDFFASIPAAQWARTLPIGKHGITAPTLWARLGDAPGRWESFRHLQAHAGTVPVTKRSGKQQRVVQFRFACDKALRYVVDQVAFLSLLSSAWARAYYDQQRARGHSHRQALRALGAKWLKIIFVMWERHVPYDEQYHLATMTRQQLRPRQKQIA

SEQ ID NO: 451413 - protein, 347 aa, unidentified
MENSTTIAVDLSKTFFQISISTVPGRVNERMRLTRQKFVSFLATRPPTEIVMEACGSAHFWARTARELGHRPVLLPAHYTKKYVLRDKHDRADADAILEARRREAIRPVPIKTVEQQTIAFFHRMRSSWIQTRTARINAIRAILRELGKVIPVGPRNVVPHLPELMADIPEALHPVLLAMADEIRQLESSIKDADRQLKALLVDSDGARSLLSVSGIGLITCSAMIAFVGSPSRFRSCRAFSSYLGITPKEHSSGAKRRLGAINKEGDTYLRTLLIHGARSVLVAAKRSKNPDRLQAWALRVQERRGHNRAAVALSNKIARIAWAVWSKGTLYQPRPAAAGPAAATN

SEQ ID NO: 451414 - protein, 318 aa, unidentified
MSKHTTVSAGIDTSKRKLDVALDGKSDRLQVDNTPEGHERLSAWLRRHGVNRIGIEASGGYEFAVVATLRRDGFVVVVFQPAQVRAYATFHLQRAKNDKIDAALIASCTNDVKKIHAPPDPRLAAFAGPLTAIEQMTHDMTRLKTRRESCRDARLQQFWKEEIARLKKLQKAEFKALVAAIRQHQDLARRLALINSVDGIGLPTAVAILVRIPEIGQITREQAAALAGLAPYDDDSGTYVGVRHIAGGRERLRGALYAAALPAAMRWNPQLIALYQRLTAAGKLHKVALVACARKLLIFANTVVARGTPWTSQPGGAV

SEQ ID NO: 451415 - protein, 450 aa, unidentified
MSPLALDVVTKTGKTPVLVRMLSKYVGRKTSSIENDITKARNHLRQRGKIMRVVFGIDVSKASSEVAILVNGEKIHGYTIPNDAIGFNRLLGDLRTVYQPEIVFEATGVYSRRLQAFFEDNSYAYIRLNPLESKKQLDSLRVRKTDKIDAEKLATSQFILNRKPSYVQEALYQELRDLSRFYQNLTEDIVCSKNRLHKVLQVTFPELENILSSPTGKQYWNLVMAFPCNSFVLELDDAALRAIIRQSTSKHISENRVTYLVDKLTKLANHSYCAVKKTSPMMEEVKYYAGELLRLSEYRQSVLEKMITLAQPLPEYEILLSIPGIAETTATSIIGELGDIRRFHSANQINAFIGIDLRHYESGDFLAKEHITKRGNPYARKILFKCIHNIASASHTNPCHIADFYEKRKRQSQVTSTKPHTIASIHRLIRTMYYLITHNKLYDYTSTQNR

SEQ ID NO: 451416 - protein, 342 aa, unidentified
MKQYVGLDVSQKETSVCVVNEAGEVLFEGKAKSDPGALAALLCKRAPQAERIGFETGAMASWLWHELRRVDLPVVCIDARHAHAALSVRMSKSDQNDARGLAELVRVGWYREVKVKSEESQKIRAILVARSRLVAIRRDIENQVRSLIKESGLLFPRAIGLQFRNLVRDLLADGHQLLGVIAPLLSIHEQICKQQSKFDDEVRQLARSDETTRRLMTVPGVGVVTALTFRHTIDDPSRFRSASSVGAYLGLTPRRSQSGETDINGKISRWGDRLLRTYLFEAATVLLYRTKKWSSLKAWGIKLAKRIGMRKAKVAIARKIALVLHCIWVDGTSFDWGQAKEA

SEQ ID NO: 451417 - protein, 336 aa, unidentified
MKNYVLFTGIDVSKDKLDICYVDKNGNVLGSKVIDHKPKNIKSIVKDLERLGYNLTQTLICFENTGVYSIKLGEVLSELNAYYSEVSALEINKSKGITRGKDDKTDAKMIALYALRNIDKIVLSKVTDEAIQELKLLFAEREKIQKSITSLKMTQENEGRVNSKAYESVQKINQQTRVALKNSLKAIENEIERVFKEHPELKKNRDLLKSIKGIGTIISAYLVMITHNFTKFKNSRKFACYSGIAPFEHSSGKSVRGKTQVNHFANKKVKALLSMAVQSAKKYNSQIKAYFEKKKEQGKHILLISNNIKFKLVNIAFAVIKRGTPYVDIYKYATVA

SEQ ID NO: 451418 - protein, 366 aa, unidentified
MKKDSIRIRNGKGDWEGKKLTIGMDLGDRTSRYCVLGEGGEVLLEASVTTTQKGLSEAFGALPACRIAIETGQHSPWVSRHLSGLGHEVIVAHARNVRLIGESTRKDDRLDAKTLARLARIDPALLSPVRHRSAEAQAHLTRIRARAVLVGARTALVNAIRGLTKAYGERLRKCHPEQIRKELAAELSPELRTALEPLFQEVQSLTERIQHYDHEIEKIAKQHYPEVAQLQQVNGVGTLIALTYVLTVDDPHRFGKSRDLGCYIGLRPGRRNSGNSQPQLHISKEGNRYLRTLMVQGAHYILGPFGKDSDLRRWGLKLAQRGGRNAKKRAVVAVARKLSVLLHKLWVSGEVYEPLRNHREEKRAAA

SEQ ID NO: 451419 - protein, 408 aa, unidentified
MYNAVGIDASKLKSTITIIQPAGVVIRKPFDVLHTSDELNTLVTYLKSLEGETRAVIECTGRYHEPVVKSLSEAGIFISAVNPKLIKGQKQNTLRKVKSDPADARKIAKYALDNWAELREYSSMDTTREQLKTLNSQFTFFMKQKVVAKTNLISLLDNTYPGVNKLFDSPTRDDGSEKWVDYAYSFWHVDCVRKIGLKAFTERYEAFCKKHHYNYQKNKPALLFEESKQLVAVFPKEKSYKLLIQQSIQQLRLASEHIEILRKEMNELASTLPEYKTVMSMYGVGETYGPQLIAEIGDVSRFTHREAITAFAGVDPGVNESGQFKQRSNRASKNGSTRLRKTLFQVMSTYLQNKPVNEPVYQFLDRKRAEGKPYLVYMTAGANKFLRIYYGKVKECLRNLEQSQIEES

SEQ ID NO: 451420 - protein, 308 aa, unidentified
MYDSTTTVAVGLDVHARSIRLAAVRADELLEERTLPYDEEAVERLLRRWPLVRCCSEAGPTGFGLYRHLVDRGIDCAVVAPGLVPQRPGDRVKTDPRDARKLARLLAGGLLEPIHVPSPELEAARDLVRAREDARLDRMRDRHRLSKFCLRHGRLLPTSSWTVVRRRWLGEQRFEHAAEQITFETYLHALDLVDARIEALEQAIRKTAEQAPWRELVLRMRCLRGIDTLTALALVAEIGDFSRFRSAEEFRAFVGLVPSESSSGAHRRQGSITKVGNSPACSSRPPGTRAGGRRSATNSPAASVAKTP

SEQ ID NO: 451421 - protein, 327 aa, unidentified
MSLFVGLDLHKVYSEFAVMDIFGNVLRQGRVENTLDKMREFSESLPSSSSVVMESSSTWYWAHRLLSERHNVTLSNPVKNKAIASAKVKTDKIDSTTLANLLRGGWAAESYVPSKETMEFRELVRFRANLVRERTRMKNRIHAYLLMNNISIDAGPFTKGFVEKVRGIDDARVQSYLRLIDGLNREIREASMTIRRKAGSNEDASLLMTIPGISYYSALLIISEIAEIERFEDSASLVGYSGLAPSTHSSGGKTHHGPITKTGSSYLRWIMGQCTRAHMRVEPEGTVANFYARIARKKGDQKAIVAASAKLLKIVFWVLKEKRAYHS

SEQ ID NO: 451422 - protein, 320 aa, unidentified
MTYIGIDVSKDSFVVAYPGKCGYTTKSFPNTTSGVRKFLQSLPEESHCVMEATGNYSMLLLYLLQESNITVSMENPQKIKNFSRAMMSVTKTDEIDAKLIAMYGEKMNPAPYKIPSESIILLKQKRTVLRQLKKQLIMMTNLQHSLSVLPKQDPTAKVATEQTIKFLRKQISKLEDEITNISNKEFKRQMELLTSIKGIGESIASALIMATGGFTYFSSAKQISRFLGLCPTYQQSGTSVNVKGHINRNGDTHLRSQLYVAAIASIRCNTACRETFERLRERGKSGKVALIAVANKLIRQMFAVVTNNRPYIDGYVSSFA

SEQ ID NO: 451423 - protein, 478 aa, unidentified
MPYFMAGGHIIVGRPKQLDRKTMQLPKHLQRLNLNAAGIDIGSKSHFVAVPEGTDDEPVREFECFTADLYRLADWLISCGVTTVAMESTGTYWIPVFEILESLNIEVKLVNARHVKNVPGRKTDVLDCQWIQQLHTYGLLEGAFRPPEQICELRAYIRHRMNQVRYSSAHIQHMQKALTQMNLLLHNVVSDITGVTGMRIIKAILDGERDTQILASMRDKRCKNSIATIAKSLQGNYRPEHLFSLKQAVEALEFYEAQIAECDREIESLLASFDSVTKNSLPSQPEEDNKSSKSQCATPAFNLQTELCRVAGVDLTKIDGIDTTTALKIVSETGFDMSRWKSAKHFASWLGLSPGSKISGGKSLSGKTKPVVNRAAIALRMAASSLYRSSCALGAYYRRMKARLGAPKAITATAHKLARLVYSMLKYGTDYTDVGQEYYEQRYKSRVIQNLKKRAQQLGYELVETMGVNKKFIVTQIQ

SEQ ID NO: 451424 - protein, 348 aa, unidentified
MLADELDYLVGVDTRLDEHVLAVVAAATGAVLARQVVGADTRGYEAALCFVGEAANGGRAWAIEGTGSYGAGLARYLAGRGEMVLEVSRTPRTERRLRGKDDALDAVRTARAAPANETLALPRNGERREALRLLLVARRSALDVRREALAQLRGSIVTAPDRLREELRLLPTGRLLERCSRLRRSNTTADELATRLVLRSLARRINAPTQEAGELEQEIPSHVQALPPALLDEPGVGPIVAAQPIVAWSHHDRLRSEACFARLASVAPVPASSGKTTRHRLSRGGDRQLNRALHTVALHRRQHDPATKDYIARRIAEGKTRRDTTRLLKRYLARHLYRQLQQTEPLMT

SEQ ID NO: 451425 - protein, 343 aa, unidentified
MQDTTIAVDVAKSVFEVAVSRRPGRVAERHRFTRKGFARFLAEQAPATVVMEACGMAHHWGRAAEARGHSVRLLPPRDVRPYVRGNKTDRSDATGLLEAHRNEAIRAVPVKSVDQHALAGLHRLRSAWMATRTARLNTIRGLLRELGVMIPVGARQGLPRVWELISDAESGVPDSLRAVLEEAAHEISELERRIERVEGQLEGLARTSPLVRHLRTIPGVGLLTATAIVASVGDLSRFPSARHFASALGLTPRESSSGNLRRLGRITKRGDPYLRMLLIHGARSVLHHARRTPKPDRLRAWALERERARGHNKAAVAVANKLARICWAVAVGDDDYRPSAPPS

SEQ ID NO: 451426 - protein, 363 aa, unidentified
MLGNPQKGKVMDKITRIGVDLAKNIIQVHGVDSMERVVVRKAISRQKFLEWFANLEPCLVAMEACSAAHYWGRKLRALGHEVRLIAPQFAAPYRKGGKHVKNDRLDAEAICEAAGRPHMRFVAVKTADQQNVLVLHRMRDGFVEERTALVNRLRSELVEFGVFLPQGIDAFRAHFVEALEDGATELNGVARTALLRGWEHLQALDQQIAWCDAQVATHVKHDSNAQRVMAVIGIGPLTASATVATVGDARLFKNGRQFAAWVGTVPKQKSSGGKTRLGRITKQGNTYLRTLLFQGARSAVTSAHRRTDRLSRWIVQLQARVGWYRTLVAVANKHARILWAILAKGERFDPSYVSTPSTPGQPR

SEQ ID NO: 451427 - protein, 342 aa, unidentified
MDHYAGIDVSLKESSVCVVDADGRIVREDKVASTPEALIGWLCALGFGLARIGLEAAPLSQWLYAAMRKAGLAVELLETRHVRAAFKAMPVKSDRNDARGIAQLMRLGWFRPVHCKSIGAQETRAALTARKLVQSKLFDVENSLRGILRGFGLKVGHTTAHRFAGRIRELVPGHPSLEMIAEALLSIHAVLLREFKAFEKQVRSMARADIKAKLLMSTPAVGPIVALTYASAIDDPGRFKSSKRVGAHFGLTPKKYQSGETDYTGRISKIGDAAVRTALYEAAHIMLIKPIKGCSALKSWAMRIAKRSGMKKAKVALARKLAVILHRMLANGTPFNAAVAAA

SEQ ID NO: 451428 - protein, 351 aa, unidentified
MFIIGVDYHPSFQQIAFLNQETGECGEQRLDHSDGEVEKFYRGLQSPRVQARVGIEATGYARWFERLLAELGIELWIGDAAAIRTLRVRKQKTDRHDAQLLLKLLLENRFPRVWIPCPENRDLRQLLWHRHRLVQMRTRILNQLQAVAMNEGKRWKKRLWNKQGRAQLQNLPLAPWASRRRQDLSELLDRFNPVIAELTSAVEREANKRPEVVRLMTHPGVGPLTALAFVLIIGDPFRFARGKQIGSYVGLVPSENSSAGRQRLGHISKQGNKLLRFLLVEAAQVAVRFDPDWRRRYLHLAMRRDRRIAKVAMGRKLAVRLFWMWRKGWDYSQVVEFGSHAGPLEETPGVQ

SEQ ID NO: 451429 - protein, 467 aa, unidentified
MKVRLGIDVACRAQHQASAADETGEFLWSGWRFRTSGAELDALWAKVPGGAEVTVIMEPTRNAWVPLAAWLGARGATVVLVAPERSADLRDYYAKHTKTDRLDSRMLARLPLLHPEGLEPLHGLGPAGTFKRTVRRRWSLVERRHACCQRLDAMVEMLGPSYADALGATEYTDTALAVLERYGDPRALRRLGRQRLTGLVRRVSRGHFAEAKADEVLAAADEALTLWAGGGLDFAELAADIAAEIRLVRGLGDEIAKLDARIESLYHRADPDGVVLSAPGLGVTLAAGILGRSGDFDRFANLAGVRSFTGLVPKIDQSGNSHGHGGPTKSGDPGLRMALFLAADHAQRADPQLAAKYYRLVVEEGKHHDSALCHLAATLATRLAACWRRRERYVLRDIDGREVTEAEGRAIVAERYSISDEVRQARRTTSKAKKLKGRASRRSQKSTGAAPAPGPSTRRKSTRKKVA

SEQ ID NO: 451430 - protein, 416 aa, unidentified
MDRRRYNVCCGADIHKKFLIATILLMDGTKLTKRFSMDLKSLFEFRDWVIANGCEAVAVESTGSYWVPIYRVLEGYVELIVANAYRIKNVPGRKTDTLDSEWIAELCLNGQIKPSRIFAKDARDLRSLTRARERYVDDKTRVKNRIHHILDSNCISISSVLSNIFGKVGRYVLNCLLEGIDIDEIIEGIPVTRIKKKSDQIREAIAGQLSGTDIILIRGYLDQIDAIQKNMEELESEIRKRIAPLRKNLAIVMSVPGIGFISAAVILAEIGDFNDFDKAEQLAAWCGLVPSVYNSADKNYTGRITKQGSGHIRRILVEVAHVIARTTGKSKLKNFFLRIQAKKGTNIAAVALARKVLCIVHHLLTVQEMYQEEERDKDDEVERLHIPKQMMSLDDMIRYVAKAGYEVRKRTPGAGG

SEQ ID NO: 451431 - protein, 343 aa, unidentified
MTKISTIGLDLAKNVFQVHGVDASGAVVLGRQLRRAAVEKFFAQLPPCLVGMEACGSAHQWARVISGYGHEVRLMPPAYVKPYVKRNKNDGRDAEAICEAVSRPTMRFVPVKSVEQQATLAVHGTRALLVRQRTMIANALRAALSELGIVAAQGYEGLRELMARLQEASDEIPEMMRGALLLLAQHWQALDTDERVLERQIAKAARCDGEARRLMEVPGVGPIIASTVLAKVPDAKVFRSGRDFAAWIGLTGRDHGTGGKHRPGRISKQGDRMLRALLISGASAHLRQQKRRGISDPWLRELLARRPYKVAMVAFAAKTARIIWAMLAKGEAYRDRASAPAAA

SEQ ID NO: 451432 - protein, 422 aa, unidentified
MNTGEHQAFTAYIGIDWADRKHDVCIQSAKADIREFDQVPHQPDALDQWAQSLIQRFGSPIAIALELSKGPIVSALQKHDGFVIFPINPSTLARYRAAFTPSRAKDDPTDAELALDLILRHPHRFTPLRPQSVEMRTLASLVEQRRSLVNDRVRLTNRLRNALKQYYPHPLQWFDRIDTPLFCDFIERWPTLVQAKRARQTTLTTFFRQHNMRFAHVMKDRIDAIRAATPLTGDEAVITPHRLQALVLVDQLRVTLNAIKQYDQAIAELAPQHPDYALFDALPGAGPSLAPRLLVAFGEQRDRFNSASELQRYAGIAPVTERSGKKHWVHWRWQCSSFLRQTFVEWAAQTINKSYWAGVYYQQQRDKGATYQAAVRALAFKWIRILYRCWKNNTPYNESVYLNALKQRGSPLVSQYPDTIKT

SEQ ID NO: 451433 - protein, 429 aa, unidentified
MNFRPIAGIDVGKFFSEMAILSPTNEVVARMKIHHDSNTDVERAVELLNKTEKDFASRPFIVMESTGHYHKILFHSLCKAGFEVSVTNPIQTDSIKNIGIRKVKNDKVDARKIALLYRFQELKSTNIPNEDIECLRSLCRQYYKLSDELTAYKNRLTGIVDQLMLNFKDVFSNIFSKAAMAVLEEYPTPAHILKADRNKLISLIQKKSRKSLKWSTAKYELLVSKARDFAPLSIHNASNVIMLGVYISMIKTLEESLEKVLKSIRLLIAEDMAKDMPMLALTLELLQSLPGIGLLSAATILAEIGDFSVFKKPGKLVAYFGVDPSVMQSGEFTGTRNKMSKRGSRLLRRVLFTIALANIRTKRDKTACNPVLLEFYQQKCQSKPKKVALGAVMRKLVCIIFAVLRDRKPYQLRSPQEHAQMLAAKHTAA

SEQ ID NO: 451434 - protein, 409 aa, unidentified
MELVIARCAGLDVHQATVVATVRTPDGRGGRRRTTETFGTMTADLLALREWLQAHGVTHVALESTGVYWKPVYYVLEDAFTLLRINMPDLKRVPGRKTDVRDSEWLAQLLECGLLKSSFVPPPAIRELRDLTRYRLQQVRDHSQEVNRLCKVLQDAGLKLTTVITDVMGVSGRAMLRALVEGTTDPVVLADLARGRLRQKLPALQRALQGRFRAHHAYLLQQILMKIDFLDETIERVTAEIDRRLAPFEATLAALDTIPGIDRVGAISIVAETGGDMSRFPSAEHLCSWAAICPGQNESAGKRHSGKTRQGNRYLRGTLVQAGLAASRSNGTALQARYHRLKRHRGHKKAVIAVGHHILAIAYYIMRDGRTYHELGADYFDKRHAERAVRRHVRQLEALGFQVTIEKAA

SEQ ID NO: 451435 - protein, 424 aa, unidentified
MIQNDDSRLQEFRQLKNEIRGSMQYLAVGIDIAKEHHNAFFGIASGKTLLRSLVFDNTKEGFEKLCLYAETFKTQMSLTKVVFGLEPTADYHKPLGEYLIRHGHMTVLVAGTAVKRNRELLDGRWDKHDTKDAANVADLIAQGKCLFYEFPPPDIRELRNLLSLKRRFKKEEQGYRVRIRNHLIAQYFPEMDHYLGYGEGPRITRWCLDPRELARLPFQEFVHMVSSRSGGEKQRRRLWELHQKAPSSIGCAAHAAVSFEARLLLEGLQHIHLMIQEADKKIAEVCTRFPEYPCLLSIPGFGPDVSAKVLGAVSNPHRFDNARQVLKTAGLDLSAQRSGKKTDVKPVISKKGKADLRYALYQAALIASSRNDHFMRYFTEKLTGRERERGIKTKMRVKLSAKMLVIAWTLMKKKEMFDPECTGE

SEQ ID NO: 451436 - protein, 316 aa, unidentified
MDQTPQDQPLFVGIDVAKARLDIHVRPTGASFAVPRNGPGLDELVGRLQSLRPALIVLEATGGFETVVSATLSGASLPVLVVNPRQIRDFARACGRLAKTDGLDAKVIALFAERMRPELRPLADAPTQSLGELAARRRQIVDMITAEANRRQQAHHKKVQKRLDAHLIWLNKELSDVDAELDQAIRTSEVWCRNEDLLTSVPGVGKTVARTLLCELPELGQLDRRALAALAGVAPFNDDSGRHCGSRHIRGGRGVVRAKLYMAAWVARRYNPVIKAHYDQLIAQGKKRKVALVACMRKLLTILNALIRDQKPWQPA

SEQ ID NO: 451437 - protein, 347 aa, unidentified
MKHYAGIDVSLNSSSVCVVDESGTIVRETKVASEPVALINWFKSLCTRMERIGLEAGPLSQWLYGALRESGLPVELLETRHVKAALSAMPVKTDRNDARGLAQLMRMGWFRPVHCKSMAAQEVRALLTARKLVQSKLYDIEMSLRGILRGFGLKVGPTTSRSFAARINHLVAGQASLETVAQALLSVHAAALREFKILEKQVRQIGRADERVRLLMSAPGVGPLVALTYVSAIDDPKRFTSSKAVGAHFGLTPKKYQSGETDITGRISKIGDSTVRAVLYEAAHIILTRPIHGGALKSWAMRLAKRAGMKKAKVALARKLAVVLHRMWVSASTFDFEKANGCMRAAA

SEQ ID NO: 451438 - protein, 356 aa, unidentified
MSHDVKYIGMDVHKEAIVIAVLNESGKLVMESVIETKASSILQFLHGLRGELHVTWEEGTWAAWLYDLLQPQVQHMVVCNPRRNALLKEGSKSDKVDAGKLADLLRSGMLRPVYHGENGLRTLRELGRSYQTISKDLTRVMNRLKAVYRGWGIACAGTQVYAVRCREEWLSKIPHAGVRRRAELLYQQLDGLQALRRELRPEFLAESRKHKAAKLLRQIPCIGPIRAARLIGLMQTPHRFRSKRQLWTYSGLGIETHDSAQYCFVRGQVQRSKKPQQVRGLNRNHNHEMKEIFKSAATRASCGTGPFHDFYTGLLAKGMKPEMARLTLARKIAAITLTLWKKEERFDVEQLKTQAA

SEQ ID NO: 451439 - protein, 401 aa, unidentified
MYTSFVGIDIGKWNHQAAFLEVSGKETARSLAFQNTSEGFQSLSESLAPFDKGQTVIGLEATGHYWLALFSFLVDNGWTVKVINPMQSDALRNMNIRKVKTDRKDCVVIADVLRFGRYTETVLPDEDLLQLRELSRCRVAHVELLGDLKRRALGILDRIFPEFASCFSTVFGAAPTELLQECTDPEELADYDVDKLIKLLEKESRGRHSREKAEELKAKASRSVGTRFGRDALKFELKMLLEQLDFIKGQVKEFDKFLKKLMKNHELIYTIPGISVTLGSAILGEIGDVKRFGTPQQLQAFAGMDPSVTQSGNFQGTQGKMSKRGSPYLRRAVYLAANAARRFDPVFKEFYDRMIARGKHPKQALAAVGTKLLRVIHAVMTSQKPYNPQKLLPPSARISPN

SEQ ID NO: 451440 - protein, 343 aa, unidentified
MKISRVGVDLAKNVFQLHGVDQHGETVLKRRLSREKWIRVLVNSAEPGCEIGMEACGGAHHWARLLMKQGFRVKLIPPQFVTPYVKSNKNDAKDAEAICEAMSRPTMHFVKAKTVEQQDIQATHRIRSELMCHRTAKANQIRGLVTEYGLVAPLQMASLRVAIPRWLEDAQNGLTDRFRTLLHGLWEDLLTLDQRIEILNKEIDCIAKNDPVAQRLQQLRGVGPLVATALIATVGNGDQFSKSRQMAASVGLTPRQHSSGGKDRLLGISKRGDAYLRSILIHGARAVVAQAKHKEDRLSRWVTGLAERRHPNVAAVALANKTVRMAWAVMNHDADYDPEFAVS

SEQ ID NO: 451441 - protein, 337 aa, unidentified
MEQQRQYVGIDLHRRRSVIVRRSAQGETLDTVRIDNDPVALAAELAKSGETPEVILEATYGWYWAADVLTENGANVHLAHPLGNNWGHRRVKNDERDATDLVDLLRMGRLAEAWIAPPALRELRELIRYRAKLVHLRTSCKAQVHAVLAKEGIRVPMTDLFGIAGQQLLDTCPLGDAYAVRVESLRDLIEIIDREILMLQGRIGVWLADDAGYHAIQAIPGIGPILAAIFVAEIGDVSRFPTARHLASWAGLTPSHHESDTTVHRGHITKQGSRLVRWAAVEAVQRQRGPTPVRAHHHRVADRRGKNIGRVAAARKLVTLVFYGLRDGEIRCLADEG

SEQ ID NO: 451442 - protein, 334 aa, unidentified
MKNHSVFIGVDISKLSLDLIGVDRKSNVIINHDKLENKPLAIKKVFKKVVKKYNTDNVIVVFENTGIYGTHLALTLFEMGIDYCQLSALEIYKSSGIKRGKSDKQDALVIAQYAISNYFKLTLSSITQERITQLKLLHTQREKIVKALVQFQNNKEYNNFYTKQQLKELNRTNNSIVKNLKKNLKLIDAQLLVVINEDENLKRDFELTQSIPGVGKQTAIYLLLVTKGFTTFDNARQLACYAGVAPFPYQSGTSINGRNKVHHFADKKLKSLLNMCALTAKKHDYQIKEYYERKVADGKNKMLVLNNVRNKLLSRVLAVVKRQQPYVNLNKFAA

SEQ ID NO: 451443 - protein, 397 aa, unidentified
MISVGIDVSKGKSTVCFLAPYGKLLKKPFDVTHDKEGLSVLVTMLKELDGEIRLVMEATGVYHLPILLYLKEYDFFISVINPYEMKAYCTCGLRRAKTDKQDAIKIADFGINNWYRLKNYEVSDDVYSELKLLVRRYNHYMRMHVESILELTHLLDYTMPGIKKLLQGWNEATNKDKLSDFVETYWHYDNITKFSEEEFVEEYIEWAKEKGYQSSQSKAVKIYAVAKTSIPTVTSNTSSVKMLVQEAVRVLREINKTLKKILTQMQQLAKRLPEYSLVRKMGGVGDVLAVKLIAEIGDVKRFHNGKALIAYAGIDAPPYQSGQFAAKERKISKRGSASLRKIGYEVMRCLKSHAMPEDSAVYEFILKKELEGKSKRAAKIAGLNKFLRIYYARVMEL

SEQ ID NO: 451444 - protein, 387 aa, unidentified
MSQTAAALIPAPVAYESTLVLAIEVSNKSWVLAAQVPGLPHTKAKRTIDPEAGALLAAITGYRARAAATGHSIERVIAVYEAGWSGFWLARWLIRHGVEVHVVQPSSVPVDRRMRRPKSDGIDAELLLRTLLAWLRGEPRVCSMVPVPDEADEDARRCVRERTELISERVGLTNRIGAILATLGVSDYNPLLRNRCRRLAELRTGLGDLLPANAHAKIKRLLARLELVLAQIAELERERDAVVEMEASDKASRMIQQLTGLRGIGVQSATVLVREAFVRRFANGKALGSYAGLASSPYSSGGINREQGIGKAGNRRVRTVMVELAWLWTRYQPDAAQVCWFRERVGSTGRRVRKIMVVALARKLLIALWRFVIDGVLPEGAVLKPAA

SEQ ID NO: 451445 - protein, 443 aa, unidentified
MSEKCFAHLRGQRGQAFADLIRGISPEQILCVSLDISKYFHVAIIHNGLGEIVTPTFEVDIYQSGFDQLCRTIEQARVRTQAQVVLVGMEPTSHYFENLARHLLERSQPVKLVNSFSVKQNREQQLMRREKSDQIDVAAIGDLLRRGEGTPYKPSTGIYLQLQQIDRVRMGKIKIAGILKNQIIGHLDRIFPGLVILDETAKQRYTPLFNTDFWQCQTLQDLIRVCPNPHELVALSPEQLVRVFHAQQCRLGPATAAKIIAQAKKTLLPDPELAAIRCELLQHDLTLLKTVQAHITLLEQRLIELVAHTPYQVWAKLKGLSLVQTASLAATIGDPTNYTEAAQVFRRSGLVSGRNDSGNHQRKGRGSHILKTGDVYLRRTLMNAVATLILHQPILARYSKQLQATKPAGVARVATARKTIGILWAVLRDQSSYTLINCKGAEM

SEQ ID NO: 451446 - protein, 340 aa, unidentified
MSRYWMGIDVAKRKLDVALLDERGKVKSRVFGNDVAGHTAMRSWLRERGATPEDTHVCLESTGPYSDAPACALVDDGWRVSLVNPALPKRFAESELLRNKTDGTDAKLLARYCEKMQPEVWQPPSKAQRKLRALVDRLQSLKDMRQQEMNRLEGTPDEQTCKSIGEHVSWLDARIAELEKRVTAQIDASDDAGSGGEPSVDEQLKADAKLLTSIPGLGKTTAAKVLAYLGDLRRFTSAKALAAFIGVTPKRAESGSSVHGQSKISRMGNAYVRQALYMPAVVACKHNPFIKALRARMDAAGRKKKVAVLAAMHKLVHLMFGVIRSGLPFDPQHKSQPASA

SEQ ID NO: 451447 - protein, 362 aa, unidentified
MFYLGIDIGKNTHVASLIDDKKKVIFKAFSFSNSIDGANSFLEKLSPFIQSLEIGMEATGHYWLSIYSFLVEKNLSVHVINPIQTDGWRNGIEIRKRKTDIIDSILIADLLRYGDFLETSLSNEDYLSLRNLTRFRSYLISSVSDLKRKTIAVLDQVFLEYASSFSNIFGKSSKEILISISTPQDFENITADKLEKILENITMKKFAKRKIDELSSKATNSFGVKFYLDSFSLQIKLLIEQISFIESQVITVEQEISILMEKINSPITSILGIGPITGAVILGEIGDISRFSNPSKLVAYAGLDAAISQSGEFESTSNRMSKRDSPYLRKDLFQSALRAEFCDPIFFLLIIIKRKFLKENII

SEQ ID NO: 451448 - protein, 356 aa, unidentified
MGQNGSVNIPSNKSGVGIMKITTVGLDIAKSIFHSYAINHTGRLIRKKQLKRKQLLTYFTKLEPSIVVMEACGGANYWAREFIKQGHQVKLIAPQYVKPFVKGNKNDYNDAQGIAEASQRSSMRFVPIKSLEQQDLQNVHRQRERVKKERTALANQIRGLLAEYGIVIKKGISAIRNELPSIIEDAENDLTVMSRELFNELLEEFRAMGDLLEHCDTKIKIANKSNDVCARLGDVLGIGDITSNALYAAAGDGKNFVNGRHFSAWIGLVPGQNSTGGKPRLLGISKRGNSYLRTLLIHGARAVLRHSEKKNDRFSLWAQALLKRRGQNKACVAVANKLARMAWVIMAKGETYRPAM

SEQ ID NO: 451449 - protein, 388 aa, unidentified
MIYVGIDIAKLNHFAAAISSDGEILIEPFKFTNDYDGFYLLLSKLAPLDQNSIIIGLESTAHYGDNLVRFLISKDFKVCVLNPIQTSSMRKNNVRKTKTDKVDTFVIAKTLMMQDSLRFMTLDDLDYIELKELGRFRQKLVKQRTRLKIQLTSYVDQVFPELQYFFKSGLHQNSVYALLKEAPTPTAIASMHMTHLAHLLEVASHGHFGKEKARQLRVLAQKSVGVNDSSLSIQITHTIEQIELLDSQLFHTELEMANLVTCLHSVIMTIPGIGFINGGMILGEIGDIHRFSEPKKLLAFAGLDPSVHQSGNFQAQRTRMSKRGSRVLRYALINAAHNVVKNNATFKAYYDAKRAEGRTHYNALGHCAGKLVRVIWKMLTDEVEFNLE

SEQ ID NO: 451450 - protein, 332 aa, unidentified
MDATGTGAAASPAAPHVGVDVSKDKLDVARSDRDGVESFPNDPDGVAALVRSLAAGPAPAVVVVESTGGLERPLLEALLDAGLPAALVHPGRVRHFAKALGVRHKNDPVDARVLMDFGRLASPRLAERRSKNQAELADLVACRRQLALARAQQLNRRSSTASAAALRSIDAVIAALDRQVEPLDKRIRDLIDADDDFRHLDRLLRSVPGVGPTLSATVVARLRELGGAGRREVAALAGVAPYDDRSGRRDGRRSVAGGRTALRCVLYMATLSAMRCNPVIRAFAERLRAAGKCGKVVVVACMRKLLTLINAMARDGLTWEQLDVVKKLAANG

SEQ ID NO: 451451 - protein, 512 aa, unidentified
MSRGTAFCPFSPVPGACLWSLQPESYVTFRLHRCFIPWRTAPANQLPGCMLITRGFGQHMIPRINLYLQVPRILNKKGGDIMLKINPLSTLYVGIDVRSKSNFVCALDFYKNKYINSSFANNQPGAEELAKKILECLKEHPDLNTIIAALESTSVYSIHIANFLSSCEELMHFKPYVFVLNPKCTANYKKSYIGLGKSDPIDAFVIADYARAGNIETEPWRGSQFLALKRLTRHRLHLVECMTREKTYLVSNLYLKFSELQMLEGDDRPFCDIYGATSSSVLTEYLSPEEIIDSSEEDLISFLAEKSRNRIKDISKTAELLRKAARDSYRLDKALYEPLNVSIASSFNCIETFKKEIKLIDTAIEREIKGLNPNAFIILQSIDGIGPVFAGGIVAEIGDISAFHSSDALAKYAGLTWKSNQSGDFDGEDTPMSKAGNRYLRYYLGEAANSMRKHNATYGAYYRKKYNEVPKHQHKRALALTSRKFVRLVYGLLARNQLYSGVSLDTSMKESE

SEQ ID NO: 451452 - protein, 338 aa, unidentified
MNEFIKKKHYVGVDISNATLDLALMKEHGFGEFRTDNSLKGFSLVLKWIREQGLELEECAFCMEHTGTYGLLFCAWLAQQGILFCVESGLHIKRSLGMTRGKNDKVDAKRIADYAFTHRAKLKPYEMPSPLLVKIKQLLTYREQMVRIRTSLKNSLKSHKRYLPVSGMDSIIAQIEAQIEQQDVIIVGIKQQIMDIIKSDVELSRNHTLISSVKGVGVIIGAFMLVSTNNFTSFDNGRKYACYAGIAPFEFSSGTSIRGKTRTSKFGNKTIKTLLNNGVNSAIRYDEQIRKYYKRKREQGKDHKVIVNAICCKLVNRMFAVVKRQTPYVEVYGQNFVQ

SEQ ID NO: 451453 - protein, 370 aa, unidentified
MGKSTPLFIGLDVHKDSIAVAHAQGQSADPPVFLGEIGTRQTDLDKLLRRLRAKTPALVFAYEAGPTGYGVHRYLTGQGVECQVIAPSLIPKKPGDKVKTDRRNAVDLARLLRSGDLTRVYVPTVEDEALRDLCRARDAARLTLKNAKLRLKAFLLRLGLHYVGRADWNAAHLRYLAKVVCPTPAQQIVFQESVRAVDEQVARLQRLEAELLERAPAWRLYPVVQALQALRGVQWLVAITVVAELGDLTRIDSPRQLSAFVGLIPSEYSSGTARRQGGITKAGNGRARRALIEAAWAYRHPAKVSQHIQTRIDALPKPIQDIGWKAQVRLCKRFRRLTARGKHPNVAVTAIARELIAFMWAIAKEVAVTG

SEQ ID NO: 451454 - protein, 446 aa, unidentified
MSDRSGLSRGDRNRNARLARLRQLLPPENAIVGIDLADDKQAAVVTDHDSRVIARRQVRARAWELGDLLDWAVARAAGAGFRSVTVACEPTGHRWRVLDQLAAGRGLALVCVQPLLVYRAREGEDLTRDKSDPKDAVLIARLASELRCYEPERADAVWARLRHLGARRNQLTTDATAHANQIRDLLECAWPAVLGASGSPFRSASWRAALAVVLDRCAGDLGRVRRLGAARFEAAVRRELPRWGAQRPCLRIIRAVFAALSDPAGVAAHRPGALERAHLALGDWRDTRARLAATEARMVTVLDDLGLTSLITTIAGLTPVGAAAILAETGDPARFATARALVKHAGLCPRDNASGASQGKTSISGRGRPALRLAAWRAVWAALPNNLVMAARFTYLTTRDHNRLARQQARTACAAALLRWIHVVITQRVSWDPAIAAGSTPARQAA

SEQ ID NO: 451455 - protein, 342 aa, unidentified
MEKVSIIGLDLAKNVFQAHGACSDGSVAFRMKISRVKLLAFFASVPKCLVAMEACGAAHHWARQIAALGHEVRLIAPIYVKPFVKRNKNDAADAEAIAEAASRPTMRFVAVKSIEKQASGMAFKTRDLLVRQRTQAINALRGHMAEYGVVAPNGPIHIARLAEAVGGPDECLPIAVVRLCAMLLSHIASLGEQIGLLERELRERARRDDTAKRLMTIPGIGVVCATALEALAPAPESFAKGRDFAAWLGLTPKQKSSGGKTRLGATTKMGQRDLRRLLICGAVAVVRWALRKGAPEGSWLARMIARKPPLVIAVALANRTARIAWALMATGGVYRVPGAVGA

SEQ ID NO: 451456 - protein, 488 aa, unidentified
MTPRLDEIVPTDGREQRRRRKSEKAKARRAGGGEPKERKRSKFEERFNPNAAGIDIGSDCHYVAVPEERTEMPVRRFDAFTADLHAIADWLKSCGVTSVALESTGVYWIPLFEVLEARGFEVLLVDPYKIKHVPSRKTDVLDCQWIQELHSLGFLTPAFRPADEICVLRSYARQRDRLIRRCGDHVRHMQKALAQMNLKLTEVISSITGKTGMKILRAILAGERDPQKLAAMRDGRCRAEEATIALALEGNWRDEHLFELRQAVEFYDFYQAQIAACDRELEAKLQSLEARRPELPALEGKRKGQPSHPLQFGDGGYSELYRVTGVDLTRVEGLDAPSVLTILSEIGVDMTKWRSSKAFANWLGLCPGSKVTGGKRLSSQSRRCANRAARAFRLAAYGLQHSHSYLGAFYRRIKSRLGAPKAITATAHKLARIVYAMLRNQTEYDDKGMEYYETRYRERAFANLKRNARRLGYHLVAVEAQVPASALP

SEQ ID NO: 451457 - protein, 355 aa, unidentified
MQSNKISFKGQNIFVGIDVHLKTWHVTTLTQSGYKYSFAQHSDAKELFDRLNKKFPDAHFKSAYEAGFCGFSAHYALTEQGFENIVVNAADIPTTGKEKVMKTDAVDSEKIAWALKRGELTSIYVKEKAFMDDTNLMRLRQRFVKDLSRQKNRLKQLLYTQGVTYPERFSRCRTHWSRNFMKWLREEVELLSEEKLTLTLLCDQVDNTRQAILKVTREIRRMSTTAKYEENFGLLKSVPGFGLILSMSMLTELDNNPTRFPNERSFVAFLGLIPTCHDSGEKKASGEKTFRGNKHLGPLIVEASWVAIQRDCELGAYYTNCCQTMKPQKAIIKVARRLACRAYAVLKTKKKYVLP

SEQ ID NO: 451458 - protein, 320 aa, unidentified
MSKKKSKTFIGIDVSKKLLEVATHESDYQFRCANKASAFPELIAELIALRPALIVLEATGGLEIPVTAALHAAGLPVVVVNPRQVRDFAKATGQLAKTDRLDARVLAHFAAAIKPPLRPIKSKDELELDALVGRRGQLIEMLTAEKNRRGSAATDTVREEIKKHIDWLEERIAELDEQLQAQLKTSSLWQAKDVILQSTPGIGPVVSFSMIADLPELGTLNRQQISKLVGVAPLNNDSGQQRGTRHIYGGRARVRSMLYMAAFSATRYNPVIKEFYERLMAKQKPFKVVMTACMRKLLTIINVMVRDNTPWKTNDEPILP

SEQ ID NO: 451459 - protein, 319 aa, unidentified
MSNISVGIDIAKLSYQVHLVVNNHRYSKPFRNSPADFYKLLDWLEKVHAGQVHVCMEASSRYWEHLAKFLYDAGLMVSVVNPTRIHNYAKCKLTRNKTDPLDAALIADYCTTQNPPLWAPTAPQVQKLQAMIRHLDSLKQMRTQEHNRSLLENPSESVSNLVFQHLSFIEQQIEQLTDYIRQHIESHEDLKTGLALLESIPGIAFLTATKLLGENIQNFKSTRELAAYAGLNPSFGISGTSVRHKPRLSKIGSIHLRTALYLPAVVAMHHNPSIIDLRQRLEERNKHKMVIIGAAMRKLLALSLGVLKSGLPYDPVYSS

SEQ ID NO: 451460 - protein, 342 aa, unidentified
MKITTIGIDLAKNVFQIHGADARGKAVLKKALKREQMAAFFTNLPPCLIGMEACGSAHYWARKLEALGHTVKLMAPQFVKPYVKTNKNDAADAEAICEAVPRPTMRFVPIKNGEQQAVLAVHRARQGFVKARTAQANQIRGLLAEYGIAIPQGISHLATSLPDILEDGENGLPGVFRQLIDRLGAHLKELDRQVHELEVQIQTWHRANDASRKLAEIPGIGPITASALVASISDANAFANGRQLAAWLGLVPKQHSSGGKQTLLGISKRGDSYLRTLLIHGARAVIRLADRKANHAGSWLAGIMGRRHKNVAAVALANKNARIVWALLAHDREYTAAYAPLA

SEQ ID NO: 451461 - protein, 356 aa, unidentified
MQSKAISFKGQKVFIGIDVHKKTWSVTSLLEVGMPKTHSQKASAKELFDFLNRHYPEAEYHAVYEAGFSGFSTYYALKEYGIECTVVNAADVPTTQYESVMKSDPIDSDKMARALRAGMIRGIYIREKDNLDDRGLVRLRKSIQQDLTRYKNRVKHLLHANGVEIPELFDRSPNWSKAFINWLREDVVLLSSSRVSLDMLIEQVETLRQNLLTVTRKVRALRLKEEYAEKYDALTSIPGIGPICAITLLTEIYDVKRFRNERQFASYLGLVPTCHSSGEKASFGEMTFRGNKHLGPLLIEASWVAIHWDDALSVAFTNYRRKGLMPQESIIRVARKLSNIIFAMLKTGNHYAPANA

SEQ ID NO: 451462 - protein, 404 aa, unidentified
MIFVGIDWAETHHDICVLDELGGILAKRRIAEGLEGVGQLHALLADLATEPNQVVIGTETDRGLLVGALLVAGYQVYGINPLATSHYRARHATSGAKSDPGDAKVLADLVRTDRHNHRPVAGDSELAASLQVLARAHQNLIWSRQRLANQLRSNLREYYPAALAAFGTDLVDPVALGVLEAAPTPTVGRTLSRTKLAAILRRAGRERGIAEKAVAIQAELRAPQLAAPALVGEAYGKSVAATVHILRELNTQLATLEAELAPSFEKHPDAEIYRSQPGLGVVLGARVLSEFGDDRTRFAHPKARKNYAGNSPITKTSGTRRMSWPAAPRNRRLADACYQWAFCALRQSAGAHQYYAVLRQRGKTHHQALRALANRLVGILHGCLEHRQPYREDVAWPRSVSVAA

SEQ ID NO: 451463 - protein, 343 aa, unidentified
MSEISTIGLDLAKNVFQVHAVDPLGGVVLRRQLRRGAVEKFFAQLAPCTVGMEACGSAHHWARVIGRYGHQVRLMPPAYVKPYVKRNKNDGRDAEAICEAVGRPTMRFVPVKSVEQQATLAVHGTRALLVRQRTMAANALRAALSEIGIVAAQGLKGLRELMATLEAPSGEIPEMMRGALLVLARHWQTLDADERALERQIAKAARADHEARRLMEVPGVGPIIASTVLAKVPDAKVFRSGRDFAAWIGLTGRDHGTGGKHRPGRISKQGDRMLRALFISGASAHLRQQKARGVSNPWLRELLARRPYKVAMVAFAAKTARIIWAMLVKGEVYRDRASASAAA

SEQ ID NO: 451464 - protein, 478 aa, unidentified
MSEKKTLQHELRGGQGPVPVKSKRNKLPDRPEQLDRQVFEPNAAGIDIGAREIFVAVPEDRDDHPVRKCATFTGDLNKMAEWLVSCGVTTVAMESTGVYWVPVYDAVERHGIKPCLTNPRNMKNVPGRRTDFHECQWVRQLHSLGLLHSSFRPDSQVCAVRTLMRHRNDLVTMASEHIQHMQKALTQMNVQFQHVISDLTGLTGLAILDAIVGGERDPAVLAKLRDPHIKASEETIRKSLEGNWLAEHILALKQRLSLYRSHRDLIDECDKEIEKLVAAFEPRVDPDEKPMPEDRKQKQRKRKKKSGSPDFDMRTEAYKLFGVDLTQIPGLMTLVFMLFSEVGRDMSRWPTAAHFVSWLGLCPDNDISGGKVLWRGVRRTKNRAGTLFRLAAHSLHHDQTPMGDYLRRMKAKLGPAGATTATAHKIAIIFYTMVKNQVEYDVSLWAQRDAMRDQRIEARLQKQAAQRGYKLVPLETTA

SEQ ID NO: 451465 - protein, 337 aa, unidentified
MRFCGIDLHSNNSVVVVSDETDKVLLSRRCPNDLSKILTLLAPHRDELAGVVVESTYNWYWLVDGLMAEGYDVRLANTVAMKRYDGLKHSDDETDAAHLAHLLRLGILPTGYIHPPAERALRDLARKRVQLVRSRTQQVLAVENILARSTGSRPSAAAIKRFDPDDVGTLGLAADVALAVQANLAVIAALNLEIGRIEARLLEGVKLRPDYVWLKTIPGIGEVLAIVIMLETGDIARFAQVGNYASYARCVSSIRISNGRKKGEGNTKNGNAYLVWAFVEAANFARRYSEEARSFFDKKKAKTNSIVATKALAHKLARASYHVLKEGQPFDVKRCFA

SEQ ID NO: 451466 - protein, 465 aa, unidentified
MKSKTSKSKKQNKKISIDAVWEPVNVHAAGVDIGSREHWAAVPREASDRPVRKFGTFTADLEAMTAWFKECGVTSVAMEATGIYWLPLFQILEQSGLHVILVNARQTKNVAGRKSDVQDCQWIQRLHTYGLLQGSFRPEDPYCVLRTYLRYRDELVSARSTQCQHMQKALLQMNLQLPQVLSDVTGVSGMAIIGAILEGQRDPAKLAAMVDRRVRASQTTIQQALQGDYRAEHLFVLRQAYELYNTYEAKIAACDEQIVRETATLPAKLDPALKPPPARKAGRSCCQDKMAGVDMRPELYAKWGVDLTGIEGIGVQTSLVLLTEIGPNVSRFHSEKHFCSWLGLSPDNRISGGKVLSSRTRRVVNRAADALRLAAHSLDHSQSALGAFARRMKARLGAAEGITATAHKLARIIYRLVKHGEAYVRQGLDDYEKKFQERKLSALQKTAKAFGFELVAKQALPSGVS

SEQ ID NO: 451467 - protein, 430 aa, unidentified
MIAAAIERCGGIDVGKKFLAVCIMVGPLEGEPRIETRRFGTTVAELKRLRDWLKHENITHVVMESTGSYWKPVFNVLEDAVKVYLANPQDVKNRKGHKTDNKDGWWLAHLLRHAMIQPSFIPPRVIRELRDLTRRRRRLIDNGSSEKNRVQKILEDANVKLGNVLADVFGVSGQLMLEALLKGKAGPEEIAQLAQRRARKRIPEIVAALEEHQMSAHHRQMIRYSVEHMQFIEQQIIQLDKDIAEKIRESGLEAQWELLQSVPGVQAISAATILAETGPEMQQFGDEKHFSSWAGVCPGNNRSAGKNKSSHTTRGDPWLRSALTECAWAAANTKACFLKEKFWRIATKCGGKKPPAVVAVAHQLAHLIYEVLATGQPYHDKRGPALDPQQKERIIRHHVRRLGKLGVAVYRPLPAPNHPYKGAASKPVPE

SEQ ID NO: 451468 - protein, 400 aa, unidentified
MLSIGIDVSKGKSTVCGMKPGGEIVYAPFEVQHTREGMSELVSLLRGSGEEVRAVLESTGSYHCPVVAALLENGIFVSVVNSLRMKRFCSQSIRKVKTDRIDAMQIALYGLAYWQELQPTRLPEDTYRELQLLARQYYQMTSMLIKAKVDFNALCDQVLPGMQELMNDHAGRHKLSDFVLRYRHTTHILEMGETRFRKDYCKWAEKKGYRNCERMAVLIFATAQNGIPVLPNAPSTQIVITEAIRVLHTVEASRDAILTQMQALAKTLPEYSLVREMPCIGDTLAPRLIAEIGDVRRFHSKRALIAYAGIDAPPYQSGKFCANNRHISKRGNRYLRKTGYEVMQSYVMHKPANDPIFTFIEKKRGEGKSGKLAMVAGLNKFLRVYYGKVTELYRSLPAIE

SEQ ID NO: 451469 - protein, 407 aa, unidentified
MTVAVGIDIGSGSHAVAVCHEGAREAERKGLKIAANRGGFDDLDAWLRRQPEPVARVVMESSGHYWFNLASHLRRQGYPVAVVNPLEAKYFGKRRLQRSKSDPADARTLATFAMVDQPPTRELLVGAELREASRFAMRLTREQGQVCQRILRLVDIGFPEFAEVWDDPTCVSALAVLRRAPTARAVARMSVEKLPQLRRPGSGGRAIGPSKAAELKRLAATSVAAPELEAQVGFEMRLLIGQYDLLEQQIEEADRRVAALLDGEVAQRLLTIPWVGPSTAGTLMAEIGDIWRFADVDQLLAYAGVHPREQSSGKKGANPETSWVMAKTGNAFLREAAYRMAVVGIQHNPVIRAHYARKRAAGKSRMNAVGHCMSKALSLVWGVWRGGKAFDAAHGSAAKAPQTAPEA

SEQ ID NO: 451470 - protein, 418 aa, unidentified
MNENGDTRGSRRYVALDIHKKYCVIGGVDREGRVVLHAVRVEHADLEGWLKKNLRASDHVVFESTTNAWHVYDLLEPLVERVVVANPAKVKQIANARVKTDVRDTFILARLLAANLVPDVWVPPAHVREMRQLLSQRRQLVETHTQILNRMHSVAHRHHLKHERGKRFNEKNTVWQRDKRLSKVEQFQLELEMENRGYMEKQISRIGKEVAKMSHKNPWAQDMTYLMQLPGFGVITAMTILAAIGEVKRFESAKKLASYSGLTGGVDQSGTHLVHKGITKEGRKELRWALVEVAQRAVKSDPRWTHKFQELHKRMHRNQAIVAIARQLLELVWYVLTRRQPYRHFSQERIAYKYLTWAWQMDEAARDGLTRQQFARYYMMRLGIGHDLTRIALNPKYPRKLASETELLALRPDLNHIE

SEQ ID NO: 451471 - protein, 404 aa, unidentified
MNAVGIDVSKGKSMVAVLRPFGVVVAKPFEVNHTAAELGRLADYLEKLDGETKVIMEHTGRYYESVAQVIHDRGFTVSAVNPLLIREYGGNSLRRVKTDKADAKKIARYGLDNWAELREYTPMDTIRYELKTLNRQFHLASKNRTACSNNLIALLDQSFPGVRGWFDSPVRKDGSQKWVDFAMTFWHVDCVRLVSLTAFTDRYRKWCKRHSYNFSAKKAEQIHREAREMIALVSKSATTKLLVQEAASQLLSLSRMVEVLRAEMNRLAMQLPEYPVVMSMYGVGESLGPQLMAEIGDIQRFAGKQSLVAFAGVDPMPNQSGMKDSRSNRSSKRGSPYLRKTLFLVMTVLLQKAPSDVHVYQFLDRKRAEGKPFYVYMTAGANKFLRIYYGKVRDHLAAIELDSV

SEQ ID NO: 451472 - protein, 358 aa, unidentified
MNEDRRTTTEEAVVGGVDTHKDVHVAAVLGSTGALLGTSEFPATLAGHADLLRWMVSFGDVSSVGVEGTGNYGAGLTRFLLAEGLRVVEIVRPDRRARRFRGKSDTLDAENAARAVLAGDRTSAPKHRDGAVESLRALRVARTSATKARRAALQLLRNTIVSAPDGLRESVSGLTRTVLVRTCAAWRPNREVAHDPTTATRIALRSLARRILQLEEEIADLDGLVAALVARINPRLTEASCVGTEIAAQLLVTAGENPERMRSEAAFAMLCGVAPLPASSGKTRRYRLNRGGDRAANCALHMAAISRLRVDPRTRDYAARRAAEGLSKKEILRCLKRYLARELYKLLRPLPPDAPRMA

SEQ ID NO: 451473 - protein, 362 aa, unidentified
MKEKKAASRFVGIDLGKRTYQAAFVKKGEVKRSNGRTCVAGRQLLYKKLKPCDKVALEAGNLAFIIAKEIQAVVGCQVYVLNPSRLALIYASMKKTDKEDSLKLAHILEDFQEQRLPVVPVPSDKEMNRRKLLGSYRRAQQARGREINKLHALFLAQGITTVIRKDLASGEQREETIKMLTGLERAEAEYLVSCLDLHEKRIAHLKKQMREESAGDEEIERLQEVPGVGPLVAFAFVSHVAPERFEDASQVSNYLGLVPRVYISGEVVRHGRITKRGNGYLRALLVQASWAMIKTKQGGKLKARYEYMILEKSKSKKQAIVAVARRLAELLYTLMRSGSKYEAREFNREKKVEELVQLAMSA

SEQ ID NO: 451474 - protein, 339 aa, unidentified
MVEGTVGSHHKEGSSKMSKHITICAGIDTGKYKLDVAIDGCVDQLQVDNTIDGHAALSAWLKRHRVSRIGIEASGGYEQNVVAHLRRDGFVVVVFQPAQVRAYARFLLQRAKNDQIDAALIAACTAAIKKIHAPPDSRLAPFAARMTLIEQLTDRVACWKNYREGHREPQLREFCKKEIARFNRLLRTELKALAAAIRQHGDLAERLNLIESVDGVGLKTAVAILVRMPEIGRLTREQAAALAGLAPYDDDSATHLGIRHIAGGRERLRSSLYKAALAAAFHWNRQLIALYRRLTQAGKPHKVALIACARKLLIFVNTVVERGMPWGTVAPPSAASNAV

SEQ ID NO: 451475 - protein, 412 aa, unidentified
MHHKLKHLYIGVDLHKHQHTAVVINCWHEKKGELTFENKPSAFPQLVKLVKKLAKKEELTPVFGLEDVGGYGRALAIYLKDNGYMVKEVNSALSYAQRKSYPTTQKSDSWDAECVAQVLLNQLDTLPDANPQDIYWTIGQLVARRNALVKSLSACKNQLHMQLSYQYPSYHKFFSEIDGKTALVFWSRFPAPYCLAGVTEEKLRGILLKASARACSTRKAREILALVEADGDTRREYQESRDFIIQSIVRDIKFKKEEIAEVEQAIGNVMKLLEYKLETMAGINLVTASALVAEIGDICRFSNPDKLARFAGIAPVNYSSGGKGRNQKSRQGNRVLHGLFYTLAVQQVQTAKGSKMPRNPFFYEYYHRKLAEGKTKGQALICVMRRLVNIIYGMMKHKTAYVAPVAEQQKAG

SEQ ID NO: 451476 - protein, 452 aa, unidentified
MVPHAGGAVEEEKTMDILHERVSGLDVHKNTVVACARIMTGKETTRECRTFATTTDGLLALRAWLSECQCTHVAMEATGVYWTPVWRILSEGDFELIVANAAHIKNVPGRKTDMNDAMWLADLLAFGLIKASFVPTEPMHELRSLTRTRKQLVREQTRHVHHRGDDRRRASAAQAGRSRRQTDQGDTQGTLRCSDIMGASGRRIIEAMIAGVRQPHKLADLAGKQIKATPKELYDALHGRLTDHHRFLLDLHLRQWDGLDTTIRTIDLEIDQRIDRMDEDRAAGEPPFRSLIGNADTVPGVSAVSAPAILSEIGCDMSRFPSAGHLLAWAGMCPGQNESAGKRKPSRLRKGAPWLKTMLVQCAWAAIRKKGSYYQAQFLRLRHRRGPQKAICAVAASILTAIYHMLKDGTEHHDLGADYFDRRSTETKAKHLVARLTKLGFTVQLQPSAKAA

SEQ ID NO: 451477 - protein, 424 aa, unidentified
MNDTQNKKIAQVTDKTLVVGVDIGSDTHYARAILARGYEVSKKPFDFRNTREGFEKFVSWAYNLAAANQLTRIFVAVEPTGHYWFNLSEYLKAYDVKLVMVAPQHVKHSKEMDDNTQRKDDRKDPLVIARLVLEGRYMIPYIPEDVYAELRAAFNRRCDLVEALNRNENRMIRWFDMHFPEYREVYGKASAITGLLVLMRAPLPSDILELGVDGICRIWREAKIRAAGINRAKKLVEAAQKSIGLKGGEAVRQELWQLMEEHELLKKQLSDIMRIIEGLLTGIPGADRLLKVPGAGIVTVAGFLSEVGDISRFTDPKQIQKLAGLAVVENSSGKRKGMPGISRRGRSRLRWVLFQLARITVKSNKEMKAYHQYYTTRKENPLKKMQSLMAIAGKMTRIFYGMLKNGTEYDPAIVMKDFNKEVAA

SEQ ID NO: 451478 - protein, 334 aa, unidentified
MDKQAVAGVEVSADVLVVAFDNGQLRSCEFPNNALGHQQMLRFLRKHATEVRACMESTGLYGLDAALVLHSQSGIEIMVANPRSVRHFGCAMMQRSKTDPIDAKLLAEYARRMPFQPWQPPSLQGRQLCALSRAIHQLTEMNTMQKNRLHAASVTETTPKIVLRELQRSLAHQQRSIQRLTREALQLIASDAELQKRFELLLSFPGIAQTSALQLLGELVLLSPDFNVRQWVAYAGLDPRQYSSGKSVEKKVRISKVGNRHLRRALFMPALVAVRRDPQFRAYYRYLLAHGKLKMVALVAAMRKLLHGIYGVFQTREPFNAHKLFTLPRTGETV

SEQ ID NO: 451479 - protein, 454 aa, unidentified
MSKRQKRSPLRGLAPTPVLEPNAAGVDIGATEIYVAVPADRDAQPVRRFATFTEDLIAAADWLKRCGIETVAMESTGVYWIPLFQMLEARGFRVSLVNPRHSKNVPGRKSDVCDCQWLQYLHAVGLLRASFQPEAQVCAVRSLMRYRESLVEMAAVHLQHMQKALDQMNLQLHHVISDLSGTTGMAILDAILAGERDPRRLARLRDARIRADEATIRKSLVGDYRREHLFTLGQSVVAYRQYQQLLGACDVEIEQMLGEFTDGSGPGAPPLPQPKDRHKPRRNELKFDLRGHLYRIFGVDLTAVPGIQAQTAHMLLSEVGRDLSAFPNAAAFASWMGLCPDNRVSGGKVLSAHTRKVKNRLAKALRLAAQSLFRSQSWLGQFYRRMRAKLGAPKAITAAAHKLARILFHLLTTHQPYDESVFAQQEIQNKQRMQRRLQQQAKAHGFQLVEIKAT

SEQ ID NO: 451480 - protein, 346 aa, unidentified
MSEGYDGRQYVGIDLHRRRSVLVRMTDGGETLETVRIVNDRDRLAAVMARAGERPEVVLEATYGWYWAADELGELGAVVHLAHPLGVKAFSYRRVKNDERDAADLADLLRMGRLPEAWIAPPATRELRELVRHRAKLVHLRTNLRCQVHAVLAGQGIAVPVSDLFGVAGTALLDRCELSPAAALRIASLRRLIEAFDTEIDQAGQSTTARLGADPGYLAVQTIPGVGPVLGAVFVAEIGDVTRFPDPTRLTSWAGLTPKHHESDTTVHRGRITKQGSRLVRWAAVEAVQRAGRHSRLGAHRDRIAARRGRNIGTVAAARELLELVYYALRDHTVRRLNSPAAAPAA

SEQ ID NO: 451481 - protein, 424 aa, unidentified
MEQDYSLFVGIDWATEEHQVCGVDRQGTKVFESKVRHEGEDIARFVEELLERVGGRAEQVAVAIETPRGSIVEALMDRGVAAFSINPKQLDRFRDRYTVGGAKSDKLDAFVMSDTLRTDFKLYRRIEFGDPVVVQMRELSRVHDALSQDARALGSRLREQLVRYFPQVLALGSVYDEAWLWDLLELAPRPTDAARLLQSKVAAILRQRRVRRVKADIVIQKLREKALVVAPGVVEAASAHVRLLLPLLRLANQQLGDCDHQIAGLLEKLRSAVVSTSAEGEPEAPRKQHRDADILLSLPGLGVLTSATMLSEGATALRDRDYRALRVQAGVAPVSSQTGKQRRPTVTMRRACNLRLRNATYHWARVSMQHDAASREHYKRLRGAGHAHGRALRGVADRLLAMLVAMLRSGSLYDPNRRSALKAA

SEQ ID NO: 451482 - protein, 506 aa, unidentified
MAQTAKAARPKEKESVSKRRSTPVTAESKAAKPKGKVKRGDRRRRTQKGEAIENRPVFEPNAAGVDSGAREVYGAVPPDRDKQPVRICETFTADLQELANWLTACGITTVAMDSAGVHWIPVYEILEAHGIRACVGNARHMKNVPGRRTDWHACQWIQFLHAVGLLRAAFRPEPEVCALRAVIRHRGELVQMAAKHVQHMHKALTQMHLQIQHVITDLTGLTGWAIGDAILKGERNPSRLAQLRDPRVKASPETIEKSLVGHWQPEHLFTLKQSRRLYAEYQREIGECDAEIERLVGTFQPRVDPEVKPLPPDQKKRNRHYAKSRKRRARPQSSTREFDLRTEVYKLYGVDVTQIPGLEFLALQLFSELGRDMSRWASAACFVSWLALCPDNDISGGRVLWRTKRRVHNRAGQLFRMAAYALDRSPTPLGAYLRRMKAKLGPQAAHTATAHKIAVIFYAMIKNQTEYDETIWEQRDAQRHQRHMTGLKRQAQRLGYKLTPIEEEAA

SEQ ID NO: 451483 - protein, 422 aa, unidentified
MEVLQRETYAALIAIDWADRQHAVCLYDQTTGKRAQYFIKHTPESLQAWLLGWRERFAGQRLAVCTEQSRGPLIYALLQYDFLVLYPVNPATLAKYRQAFSPSLGKDDPSDADYLLDLLQHHRERLKAWRPDDEQTRTLRLLVEQRRRLINDRTRISNRLTALLKCYFPQVLAWFPDLSTVLVCDFLTRWPTLEELQKSKSATLLKFLRAHHSVRAATNERRLAEVKTAVPLTTDTAVLTSSRLMVKVLVAQLRTVLASLAEYDRHIEALCQTHAEYELFASLPGAGPVYAARLTAAFGSDRTRWQSADDLLRFAGVAPAMERSGKQEWIRWRYFCPKFLRQSFHEYAAESVAHSFWAKAYYNMQRLKGKKHHAAVRALAFKWIRIIWKCWQTHTPYNEVIYLESLRKSGSPLLNFVANNQG

SEQ ID NO: 451484 - protein, 403 aa, unidentified
MNNVVGIDVSKGKSMVSVLRPFGEVVAKPFSVGHTGSELKELADYLKSLDGETRVVMEHTGRYYEPVARFLHDEGVFVSAVNPKLIKDYGNNTLRKVKTDKADSRKIARYGIDNWAELRQHTPMDTIRMQLKTLNRQQSLYSKTKTMMKNNLIALLDQTYPGVNALFDSPVREDGSQKWVDFATTFWHVDCVRNMSLTAFAERYRKWCKRHGYNFSQSKAVEVHAGAQDLIAMLPRDALTKTMVRQAIDALNAISASLERLKAEMQALAAQLPEYPVVMTMHGVGDSLGPQLMAELGDVTRFTHRNAITAFAGVDPGADQSGTHEAKSTRVSKSGPPELRRALFLVMDCLLKTQPQDDPVYRFMDKKRAEGKPYLVYMTAGANKFLRIYYGRVKEYLAQLENS

SEQ ID NO: 451485 - protein, 325 aa, unidentified
MSKHQNDSICFDGIVDKGCGLDVHKKEIVATVSGTGIKSETRTFQSTTRSLTELKEWLLSLGITHVAMESTGVYWKPVMNILEPGGFTIMVVNARHIKYVPGHKTDKKDSAWICKLLRAGLLKGSFVPCRSQRDLRDLVRYRRKLVQQQSAEHNRMIRIFEDANLKLSSVFSNIRGKTCTAVIDAIIRGETNPEKLADLCTHKRLKSSKEEIALAVEGNFTEHHIFMIRAIRTSIGNIESEIEHLDNEIGRRMAPLEAEISALCDIPGMDVTSTRELLAEIGVDMDVFPTAEHLTSWAGLAPGNNESAGKKKVHTPTTATRRRKR

SEQ ID NO: 451486 - protein, 373 aa, unidentified
MTHKQSRDFAITSAFALSANKTEEQNTVKATRICVGIDTALRGYQAACKIDNSLIGPVANFRSEVELLLYLEKQIQLAEEVVVVYEAGPFGYVLYRKLTARGIKCLVCAPDSSQQQKKRRKNNQIDARTLTSNLSNYLNGNQDALQLVRIPTEEQERARLVSRQHDQLVKERKRLAAEGNSLLMSQGFGSCSNWWRPKTFSSLKESLPSWIVEMLEVWVDLLRALDQKIRVAKVGLAKRWSGPRPKGAGANSLVQLQAELLDLRLYTNRRKIACLAGMVPSEWSTGPNQRLGSITKVGVPAIRRIITEMVWRIILFQPQYPPVQKWQAVLQGSNRALKKKAVVAIGRQLMVDLWRWQTGRATAQELNLVMVGG

SEQ ID NO: 451487 - protein, 363 aa, unidentified
MSIVGGLDVHRRQITFDYLDTDTGQVCCGRIEPADRPGLRAWLARRFTGRVDVDLAFEAGTGWRYVAEEITAAGFRAHLAEPAQTAHQRGPKRRAKTDRADARLLRDLLLKDDLPRCWIPPGIVLDCRAILETYRDLREQHEGWLQRIRAVLFHHGCPHLGPQNLTTRIGRDRLAQAAGEHLPPTGRWQIETALGQVDRLEADLVRLYWQIAQIARRMRGPRLLREQLYGVGPVTALALTVWLGGSNRGFSSRGAVRFTGLDVTVHSSDGKRSSHEHLSKQGPPVLRWALYEAGKLSAQHRAPDHTYYAAVAERIDGKRATLAEARKLTRQAIHLLAGLGDDAFTLDALRGATKPIHPLGLTA

SEQ ID NO: 451488 - protein, 417 aa, unidentified
MAEYAALIGIDWADTKHDISLIDLATGQHEASLLRHSSQTIDEWATALRARFHGQRIAVCLEQARGPLIYALMKYDFITLYPINPTTLAKYREAFSPSRHKDDVTDAAYLAELLAHHRDHLRAWQPDDEPTRTLRYLVEHRRRLVDDRTRLSNRMTSLLKGYFPQVLEWFPDIRTTLVCDFLVRWPSLDTLGRVRRETLVKFFRAHNSVRTETIEKRVEAIKQAVPLVTDRAVIAASVLMTRALAAQMKTTLSAILAFDAEIEALCAVNQDFVLLKSLPGAGQNYAARLTVAFGTDRARWQSADELACLSGIAPVMERSGKSCRVRWRYFCPKFLRQSFVEYAGASVRHSFWAKAYYEQQRAKGKGHQAAVRALAFKWIRIIYQCWKSRTAYNEVKYLEGLRKKGSSLLNYAANNPA

SEQ ID NO: 451489 - protein, 346 aa, unidentified
MMVIGIDAHKRSHTAVTVDEMGRQGFVKTVGTTTQDHLRLLKWAVGLAEERLWAIEDCRHLTRRLERDLIAAGESVVRVSPKLMAHIRDSARSYGKSDPIDALAVARAALREPDLPVARLDGVERELRLLVDHREDLVGERTRIISRLRWHLHELDPGWTAPTKLQRHSAFDKVQAHLSRRDDGSPIVRRLALRLVEHLRLLTEEIDELTAEITVRVTAIAPSLLAIVGCGALSAAKIIGETAHAGRFRSKDAFARHNGTAPLPVWSSNKQRHRLSRTGNRQLNAALHRIALTQARCYPPARELLERRTNSGDGGMERLGILKRRLSDVVYRAMLADETDPLPRTA

SEQ ID NO: 451490 - protein, 341 aa, unidentified
MAIRVIGLDIAKSVFQVHGVDEAGQAVLRRRLRRAEVLKLFAGIEPALVGIEACHTAHYWGREIAALGHEVRLMPPQFVKPYIKSQKNDAADAEAICEAVQRPTMRFVPVKSAEQQAVLLLHRTRDLLIRQRSSLISAMLAHFAEFGIVIHRRVRDIDRLLLLLGETQEGLPELAREMLGIFATQLREIDGRIQVVEARLMTWHRSNEVSCRLATIPGVGPITASAIVATIADARQFKSGRQFAAWLGLVPQQRSSGGKERLGGISKRGDGYIRRLMIHGARAIVGWRKRSPRTRDHWIDGLLGRRHINVATVALANKSARVAWALMVRESSYNHRLARAA

SEQ ID NO: 451491 - protein, 318 aa, unidentified
MSESTFVGIDVSRATLEVASSTRPETWQQVNDTGGIEAMTAQLLVLAPALVVLEATGGYEFEAAVALQAAGMDVAVVNPRQARDFARAMGMLAKTDRLDARMLMEFARLLDQHPQRERFVKPLADADLQRLQALVLRRRQLVTMLSAERVRLRQSLSIARPSIESTITFLKTQIDDIERQSAEHVQQHHNALAKPLGSVKGIGPATCAMLLAELPELGSLNRRRIAALVGVAPLNRDSGQMRGKRTIYGGRSSVRHGLYMATLSTVRFNPPFKAFYARLLAAGKPKKLALVAAMRKLLTVLNAIVKSGKHWDQSLYPA

SEQ ID NO: 451492 - protein, 371 aa, unidentified
MNESSKPRYVGLDVHKDSIAVAYAPEDRGGEVLSLGAIGTRQSDIDKLIRTLQSKGAPPVFVYEAGPCGYWLYRYLTGKGLACHVVAPSLIPRKAGDRVKTDRRDAITLARLMRSGDLSSIYVPGIEDEARRDLSRGRDDAMQDLKRSKRRLKSFLLRQDIRYAGRATWNAAHLRWLSEVVCPTPPQQIVFQEYARAVTEQHERLQRVERELHEAVKGWRLSPVVEAIQALRGVQLTGAVILMTELGDLTRFDTPRQLMSYLGLTPSEYSSGERRRQGGITKAGNSHARRALVEGAWAYRYPAKVSRHLQLRLEKLPAEVQAIAWKAQVRLCRRYRQLTARGKHVNQVVVAIAREMAAFAWAIARIVPLAS

SEQ ID NO: 451493 - protein, 407 aa, unidentified
MLFVGDDWAEDHHDIEVQDELGQVLARARLPEGIAGITRLHALIGQFAGPDTGPGEVAVGIETDRGLWVTALRAAGYAVYAINPRQVARYRERHGTSGAKSDKADSHTMAGMVRVDARQLRPVAGDSAGAEAIKVAARAHQTLIWERTRQVQRLRHQLREYFPAALEAFEELDAPDALELLAKAPDPARAARLTRAQVAAALKRVRRRDIAGKTGAILAALRTEQMRQPQPLAEAYAAAVRSLTVIIAALNGEIATMERQVTECFRGHPDAAIYLSQPGTGEILGARQLGEFGDDPHRYASAKARKNYAATSPVTRQSGKKKTVMARFIRNDRLADAVHRQAQSALRASPGARAFYDELRDRGLDHNAALRALSNRLVGILHGCLKSRTLYDEATAWSHRVKLPGAA

SEQ ID NO: 451494 - protein, 312 aa, unidentified
MLATISVGIDVAKRHLDLHLHPHNKSLRVSNDAAGHARLLRWIAPATPQRVVVESTGGYERSLLFALLDAKQPATLVNPAHVRAFAGASRRKAKNDRQDARLLAEFATRIETQLLDPACKIRHVLKQLVTRRRQLVEQCTQLRNHREHADVDIVRDSIDRSIRNVREELTLIESEIQKQIDLDPSLKARQDKLLTAVGVGKNVSAVLVSELPELGTLHRTKLAALVGVAPFDNDSGDQHGKRSIRGGRHTVRAALYMATLVACRHDPYTKTHYQNLLSRGKPKKVALVACMNKRLNYLNSLLRKTCDPENEG

SEQ ID NO: 451495 - protein, 341 aa, unidentified
MENCGIDLHQKSSQVTVVDEEGEVLERASIPTTRAGLERWFGKRERMRILLEASGSSPWVVRRLRELGHEVDVIDPRRVRLIAQSTLKTDRIDADILAELARLRTKLRTLVWQRSELTQRQRGHLRVRRALVEARAGFIVTVRGLLRSFGFRVASCRSDRFAARCEATAIPPELAEVITPLLTAIRDLDARIAAMDEVVEQVGHLYPAVESFQDIPGVGPVVALAYLLSVEDPSRFRRSRDVPGYLGLRPNLRASADVVRRGRITKEGDSDVRRLLVQAAHAHLRSHADTALKRWAESLIPRIGKRKAIVALARKLAVLMHRLWITGEVYQPFPNHTAMAA

SEQ ID NO: 451496 - protein, 421 aa, unidentified
MRGLRTKRVRTVKEGTLIATVDIGVASNTGYCTTLDGRSTKSFKFDNTKEGFEKFWCMTMASKNRFGCDEVLVGYESTGPYAEPLVHYLANKQVKIVQVNPMHTKKMKEVNDNSPLKTDDKDPRVIADIIRLGRALTIVVPAGDAAYLRRLNNARERHVGEQTAFLNQLQQLVFLIFPEFKTVLKNMKGKTAQHILKRYTIPERIGALCKEALGEEMRKRSMGKFGIKDAESLIGLARETVGIKDGVAGIFMDIRHILLQLEAEGRFISEIEAEMRVTLERIPCSLRLLSIKGLGIVSVAGLIGEVGDFSKFSTQSEIMKLAGLDLYEISSGKRKGQRRISKRGRSLLRKILFYAAIQMIRRNGIMYDYYARLTGRGMERMRALIAVSRKLLRIIHAMVRDNRDYVGQYQAPERRVIKKAA

SEQ ID NO: 451497 - protein, 317 aa, unidentified
MTQTSITTAGIDTSKAKLDIALHGRTERWQVANALPGWRALAARLTKAHVTRVGIEATGGYERGVVEYLRAAGLVVLVLQPIQVKAFGRVHLRRAKNDVLDAVLIAACAAALDQVRIKPDQRLAELAQHLTFLEQIEEDIRRCKTRLEHIDELRLRRLVLGDIARLKARRLAEIRRIAKQLRSHPDLAARLDLVLSIPGIGERTALALLIRMPELGCISREEAAALAGLAPFDNDSGQHKGQRRIAGGRARLRRSLFAAALPAAFRWNKALIALYGRLTATGKAHNAALVACARKLLIYANTVVQRGTPWTERSLRV

SEQ ID NO: 451498 - protein, 407 aa, unidentified
MSRDYMGVDWADTEHAIWVEDERGAKVAALTIPHTAGGLSEFGRWLYERRAQGIEVWAAIERPEGRIVDFLLDHGVVVYPVNPKALDRARDRFRMSGAKSDPFDARVLAAFLRTDHAHLRPLLPNSEAAQELKLLTRDYQRLVRQQTRLVNQLTATLKEYYPRPLEVLDLTTPLAQAFLQAYPAPAALAALTPKTWHRWARAQRLSEAHSQEMWATLSQPQLPVPAHVVRAKARLVEALVAQLATTVRLVQEYREAVEGFFASLPAAHWARTLPAGKSGTTVPTLWGELGDAPGRWASFRHLQGQAGAVPVTERSGKLEVVKFRFACNTHLRYAIHQVAWLSLQRSEWARAYYTQYRKRGHGHHAALRALGAKWLKIIFVMWSRQVPYDEQHHLATMARQQLRRAAA

SEQ ID NO: 451499 - protein, 391 aa, unidentified
MVCVGIDVAKDKHDCCILDSDGMVRADCFTIPNNMDGFKQLLQTIRNCTKKSDKIKVGLEATGHYSYNILGFLLDNGLPTYVINPLHTNLYRKSLSLRKTKTDRVDARTIATMLLSDVDLKSYTDIAYHNEELKSLTRYRFDKVQECAKLKQSVSRLATILFPELEGLVSSIHGTSIYALLGEYPGAKQISEVHLTKLTNLLTTASKGRYGKEKAIQIREAARTSIGSVMPAKSLELKHTIKLIQELASEINEIEDSIQKIIDDLNPPILSIPGMGVNSAAVILAEIGDFSNFSSPDKILAYAGCSPSTYQSGKLTNCYAHMEKRGSRYLRHALYNATKYVCYWNPVFAEYLAKKRAEGKHYNVALSHAMKKLVRLIYALQKSGKAYLAAA

SEQ ID NO: 451500 - protein, 401 aa, unidentified
MSKKNTRNALDTSLSYAVIGLDLAKADCAVAAVPCSDDDLGLIDRMDYESLFEQAEKLKPTLFAMEPCCGYSQISLRLQNMGYEVKFISVHALKIWIASHKSNQKSDLNDATALAKLALYDHDLQPIRVKNVEECRIASVQAIRIQLRTQATKSLVCFKSLCQCWGIVIRRGSLNTKKMAEAVAAVEKLLGAEVASSLMILRDAYKFTMKQINALDKLLDALVEANEQARTMKTVLGIGTQTAARLAVTTGDIKRFPMPRSYVAYFGLAPRNIITGHSGTPSPSKRGALKPVSSRGQGKVSRRGDRVARSFIIQGAATIYMLYCKDMLPECQLRRWLHEQIKRGKPYGKIIVSLAAKLLRIVWALLTYGEKFDSHKAGVPRSVLAAMEKPLKHDAAAESAA

SEQ ID NO: 451501 - protein, 321 aa, unidentified
MNKYNEIYGVDISKDVFDVYASKTGHQSFNNDAQGFKAFKKSIHKDALVIMEATGYYHYRLAQFLYKGKVHVSVVNPLSVKRFIQMKLAKVKTDKSDAKAICEYGQLNAVPLYTALTDVQAECLQLFRLLDNYLKKRTQTKNKKHGEDTLGIPSKYVYQSLKRDLKHLNKEIAGIEARLLELVKQDQQHQLTLLKSIPGMGIKTALFLIVVTDGFRKFENAGQLCSYVGITPTIRESGSSVRGRSRISKVGNKKLRNLLFLCAFSACKHNKACRELYERIVNKGKSKKLALIAVSNKLLKQAFAIAKSGLPYDENFVSKLA

SEQ ID NO: 451502 - protein, 445 aa, unidentified
MHYKRLLSFIDGASPYLSVGLDVGADFTWMSIALPNGSFVGKPFKIIHSDPRSRDLAVAKIKEAQETYSLKSRCFLESTGIYHIPLLCFLRDKGFDCSVINPIITKNSTNINIRKLHNDKFDSKKAALVGLNVSLKTSIIPDDSVVDLRNLVRDYYYFKDRQSAVALKLTAELKVSFPAYAKVFSKVTIQSSLKLLSSYPLPEDMLAASKENIVDIIRSTARFGEAYALRKYEAIIAAAKDAAVFGRALPSNAVRIRLYVDTYQEYQKHLDTLLKALHETVEKLQDTLIYDQICLLQSLRGIGFLSAVVLIAEMGDFKLFSSPKKLYAYFGLDPAVKQSGKLNGDKVHMSKRGSSLARRILHMAALNNVKVSKGSGTPVNPVIYDYYTQKCTGKKKPVAMGAVMHKICNIIFAMLRDKKPFEIITPEEHCRHFAAEHPDKIRKSA

SEQ ID NO: 451503 - protein, 341 aa, unidentified
MDKELYFGVDVSKKTLDLAYYDGETIDWKNAHIKVSNDDAGFRKIGSWVAKVGKDFDTFLFCMEYTGLYSQNFRLWLESKEYIYGMVEPRKMHRFEPDLDDDQRSLDRIKTDELDAFRIAIYCEQNHKKILRNPSKLPSPVYFKLKRLLAERKQNTKQSVLYKQQLHDICAYDSDLSVERKKLLLKNMKENQKAIDKEIDCYMNEDVSISKNYDLLTSIPGIGHIIALEAIVLTENFTAISNPRKYACYIGIAPFKKESGTSVRKRTSVSKKGFSEAKADLSIAVLSAIKNNPSIRDYWIRKKKEKCGGIVLNAIKFKLVLRMFAVIKRGTPYVETDAYKN

SEQ ID NO: 451504 - protein, 389 aa, unidentified
MYFVGIDISKYKHDCFITTETGLIVYDPFTIENSHDGFEELLTVLRSLDSPNAIRIGFESTGHYALNLKLFLEKAHYSFMEFNPVLLAKFNKAQSLRRTKTDAIDCSSIARWLMTVEYKPHPIGFYHTYSLKSLTRLRNSLIQQRSFYLVKLTNVLDHTFPEFKPFFNKKFGATALYLLENYTTAEKMARMNSQSYDILRGISRGKFSLQKFVRLKELARNTIGESNAIFVSQLNSLLDLYKLSAKEIQSLEEQIISLIREMNPRTLSIPGIGPISAAVICSEYGNFSSFDSPAKMLSFAGLEPGYYQSGLTEHKGHMVKRGSSNLRYTLMNLSIPLIQHNIVFTEYYAKKRAEGKSHRVACSHLIKKLIRVIFTLEKNDMDFDPNKLR

SEQ ID NO: 451505 - protein, 403 aa, unidentified
MVRYHVGVDVGKYRHYVSIRDLSHEKYCGSFSLANDHDGFMELVDILDKLSLEKGDFLIGVEACPYALNLSYFLMATGFDLVEVNSFRAGQFRKAQGKKAKTDKIDARTIAAILALDDHKPLSIPDPVLDNLKELTRFRVDLVNEKATALIHLQETLSVLFPEYGKVFRQLDSAASLALLTAYPGPGHMIAAGEEVIGKTLSIASPRRMSRGMAKRIIEAAKRTIGVAQKRPSLGTKISVIAKRIAELQSIIGDLDRQITALFRNLPCKPFGFPVGRTPSLAAIISEIGDIRRYPTLKKFLSHLGWCPQSFQTGNYRLEHPKMSHAGNKYIRRLIWMLSIVAIRRVPSYREYFQRRVLEGKNKMHILVAVGRKLLSTLYAMLKTGTTYDPNWEENRRLAPARH

SEQ ID NO: 451506 - protein, 344 aa, unidentified
MDISVLGVDLGKNICSVVGLDASGAVVMRRKVRRETLIALAEKLPPCVVAMEACCGAHHLGRVFAAHGHDVRLMSPEYVRPYVKAQKNDDRDAEGIAEAATRPTMRFVELKSQDQLDMQTLHRSRDRLVGERTALINQLRAILLERGLVAPQGKRKLEQFLSVLMDEQGGAGLSPRMILLVADARTQWAELDRRISAFDAEFVRWVKENEEARRLITIPGIGAIVASALVAAVGQAESFERGRDLAAWLGLVPRQFTTGGKPKLLGISKRGNKYLRRQLIHGARAALPYMVERDTPLGRWAKDLSSRAHRNVAIVAFANKLARIAWAVLRRKERFAAAGLPMAA

SEQ ID NO: 451507 - protein, 359 aa, unidentified
MLYLGIDQHRKQLTVCVRNEQGDVIIRRQVSTEWKRVRAFLADIQRTAGERGFVVIIEICGFNDWLVKLLGEYGCKNIVLVQPEKRSKRKTDRRDANALSETLWVNRERLLAGKRVQGLRCVEWPSEEEASDRQITALRRNLGQSRTRTINRIKHLLRKHNVEQECPTKGLDTIRGKKWLAQLTLNKIDRLEMDQLLAQWKLCDEQIEVVEKEIQQRQAQSPAAAIVATIPGAGAYASLALSSRVGSIERFARPGSLSNYWGITPGSRNSGEVKDRLGSITKQGSAMARFILGQLVMHVLRRDPWMKAWYGRIKRRRGAKIARVAVMRRLATILWHMLKYQQPYVIGGPPRKKLPREGE

SEQ ID NO: 451508 - protein, 449 aa, unidentified
MAKSKRSQPERDISPTYRDAAAIDIGAKMHVAAVPPDRDTEPVRSFGTFTGDLQRLADWFERCGVRTIAMESTGVYWIPVYEILEQRGFEVMLVNARDAKHVPGRKTDVSDAQWLRRLHEYGLLRPSFRPKGELAALRAYLRQRERLLDYAASHIQHMQKSLMQMNVQLHHVVTDITGATGMRIIRAIIAGERDPATLAVHRDRRCHATVEVISAALTGNWRDEHVFALGQALELYDAYQAKLTDCDAQIETVLRRLRNVANPAGPLPAARHRDNTANAPTFDARAALHAVLGVDLTQIHGLGASLALKLIGECGTDLTAWPDAKHFTSWLCLAPANKISGGKILSTRTRRSGSRAAALLRLAAVTVGRTQTALGAFYRRLSARVGKAKAVTATARKIAALFYNTLRHGMAYSDPGASYYQQRYRARVLSNLQRRAKAFGYVLQEASSA

SEQ ID NO: 451509 - protein, 361 aa, unidentified
MRIIGCDLHARQQTLAMLDTTTGEVVTMTLKHEGNNVREFYSKLPRPVRVGIEATGSMQWFVSLMEELGMECLVGHPAQIRAAEPRKQKHDRRDADLILKLLAENRFPRIWLPSKELQDLRALLRHRHQWVRIRTRIQNALQAIALANGLRRGPSLWSQDGQSKIAALPLAPHTAYRRSELQAMYAKFAAEIEKLNQRVEEQACERPGARLLMTHPGVGPITALATEVFLGDAARFADSKALASYVGMIPSEYSSGGRQRLGGVSKQGNPLLRFLWGEAAAHAVRRDPELQRFYRRKLVQKGLGKSRVAVARKLGIRLWIMLRDEIDYNEFCRRGQKQQKSSEACVGMPDTGHGAKQSPAD

SEQ ID NO: 451510 - protein, 322 aa, unidentified
MRYIGIDVSKATFVVAYSSDKGGEIRTFNNTTAGIRQFIGTLPKDGSIHCVMEATGNYSALLLYMLNVAGITVSMENPLKVKNFAKALLSTVKTDKSDARLITLYGEKMNPRPFKVQGEAILRLRQKRTVIRQLTKQITAMSNLRGSLACLPVPDKGATHTVDETIKFLEKKRDRLQAELTDLVEVEFSRQLALLTTIKGIGITLATALILTTGGFTYFQNAKQVSRYLGICPTYEQSGTSVNIKGHINRNGDAYTRGLLYIAAWPASRFNAQCKETYTRLRQNGKSGKLAMIAVANKLIRQAFAVVAHDKEYIDGFVSNRP

SEQ ID NO: 451511 - protein, 323 aa, unidentified
MAKRITICAGIDTGKRKLDVALDGSSERTRVDNTPEGHTVLLEWLKRHKVRRVGIEASGGYEQAVVAELRRKRLVVVVFQPAQVRAYGVFRLKRAKNDKTDAALIAACTAAVQKIHPAPDPRLQPFAEHLTMIDQITEDIARLKNRLESCRNAQARKLWKEDIDRLAKRERVELKALAVAIREHLDLAERLDLINSIDGIGLKTAIIILVRMPEIGQITREQAAALSGLAPYDDDSGNHAGVRHIAGGRERLRRALFNAALPASFRWNPQLIAFYGKLTKAGKKHKRALIACARKLLIYANTVVARGTPWQKKLPNLASVPAI

SEQ ID NO: 451512 - protein, 343 aa, unidentified
MAYFAGLDVSVKETSVCIVDDVGKIVREARVASEPEALLQVLTNTIYRFKRVGLEAGPLSQWLYSVLAEAGLPVICVETRHMRAALKAQINKTDRNDARGIAQMMRVGLYRPVHVKTLRSQKLRMLLIHRKLLQSKAIAIENDLRATLRNFGLKVGMIGTVKFEARIKELVANLPDLVALVEPLLIVRRVIREQLGILHRRLLAIIRDDDVCRRLMTIPGVGPVVALTYRVTVDVPARFRNSKAVGAVFGLTPSKYQSGENDRTGAISRCGDEMMRMMLYEAAQSMLRRSAKWSWLKAWAMKIAKHRGMKKAIVALARRLAVIMHRMWVDGTAFRWTREVVAA

SEQ ID NO: 451513 - protein, 354 aa, unidentified
MRTEHFISLDVHCEFSEMAVVTRSGRLTKRHRCATAIPPLVEAIAGVPRPRYVTFEEGPLADWLCRHLSPHAERVLVCEPRRNHLIAKDSDKDDPIDAEKLAQLFRGGFLKPVHQTASIERSIFKQHVGLYHDSVRQRVRRANRILAQLRRHGVFVKEDEMQTSEQRESLRSRLPSSRLLGEDLQWLWREYDVLVDESNSFEKTLTREARSFEPIRRFVKLPGIAWIRGATFFAYIDTPWRFRGKSPLWKYMGVGLDRRHSGGGRTQLHVAKQANRILKGMILGAAVTAIDQGANPFADQYERWINEGGLSPRNARRNVARSLAATLWGMWKNGTEYRPDWVGGGFGKERDASL

SEQ ID NO: 451514 - protein, 419 aa, unidentified
MKVVHPVCCGVDVHKSFFVATLIKTTEGIEPHYSKKRFSTFNNDILQFKQWLIENNCFDVCMESTGKYWVPISNLLEDNINITVATPKWVKAVKGNKDDTKDSKWIGDLFRLGLVPGSYIPEKPIRILREYTRYRAKLTACKSSEKNRYQNAFTVCNVALDSVVSDMFGKSAAAITDYLITSDSFNPEYCTSLLKHSLKKKSEQVLESIEGYEISPEQKYRMRLVREHLNYVENEIATLDAKLDELAKPYENTVALLCTIPGVDRASAITIISEIGDNMAQFGSSKRLCCWAGLTPGNNESAGKKKSVRITRAGVYLKPALVQVAHASVKSIVSPYYKSKYERISKRRGKKRAIIAIARMILTAAYYMLTTGEVWNPTDLYAVDMPQQLQDKQKEKATKQAIKLLISQGIVDLNKFNLA

SEQ ID NO: 451515 - protein, 413 aa, unidentified
MEVVVACCAGLDVHQASVVACVNSTGRDGRSHKEVRTFGTMREDLIALRDWLKQAGVTLVAMESTGVYWKPVFEMLEGHCEVIVANARHIKNVPGRKTDVKDCEWISDLARHGLISRGFVPPREIRDLRELNRYRRKLAQVQTAERNRLIKVLETAGIKLAGVVSDVLGVSGRAMIQALIEGEAAPEAMAALAHGRLRASKTDLARALAAPLKPHQRFMARSQLARIKQAELDLERIDAELLRMAAPYRRHVELLMSIPGVNWINAITIITEIGIDMSAFHSASHLASWAGLCPGNNESAGRQRSGKVRKGNVVLKTTLVNAAIAGSGSRGHKGTFLAEKFRRLAARRGKMKAAVAIAHKILVSVWHMLSTGTFYQDLGAGFLDRLDRTRNARHLVRRLTNMGFQVQLTETAA

SEQ ID NO: 451516 - protein, 412 aa, unidentified
MDAFCGIDWAEDHHDIAVVDSSGGLLARARVSDDAAGLAALLELLARHGDSAGEPVPVAIETPRGLLVACLRATGRPVYPVNPMAVARYRDRHSVSGGKSDHRDAVVLASILRTDLHAHRPLPADSELAQAVAVLARAQQDAVWDRTQAHNRLRSHLREYYPGFLAAFAAAKGGIMRPEARTLLAAAPTPAAAARLTLAQLRALLRKAGRSRGIDAEAARLRDALRTEQMRQLPLVEEAMGRQALALLRQLDAACAAADDLEQAATESFNQHPDAGIITSFPGIGAITGARVLAEIGDDRSRFTDAKGLKAYAGAAPITRASGKSRSVTHRKIKNNRLAGAGYTWAFAALTASPGARAHYDRRRDAGDRHTAALRNLYNRFLGCLHHCLVTRQHYDETTAFPNSNKKLPEAA

SEQ ID NO: 451517 - protein, 380 aa, unidentified
MARRDLIGAWHRPQASHVRRASAFSEVKGTEAMIVLGADMHKGSHSIAAVAGETGELLDDKTVRVGDRGFAAALAWARGLGPERVWALEDCRHVSGAFERFLVVRGECVVRVATRLMAGERRGGRERGKSDLIDAVAVARAALRVGLERLPVAQLAGVELEIRLLVDHRERLVRMRSALNNDLLWHLHDLWPDQTLPGSALLSNKWASRMARRLARHEQSARVRIARDELRQMRELSRVIDELEREIAELVARVAPQLLAEPGIGPLTAGKLIGEIAGAQRFSSDAKLARAGGIAPIPVSSGKTNRHRLDRGGNRQINTAIHRVAVTRARCHPETRAYIERKRSEGKTNRDAIRCLKRHLARRVWLLLQPQDPRPLPSIV

SEQ ID NO: 451518 - protein, 473 aa, unidentified
MSKGSGLSRSERRRNARKERLRALVPRGGAVIGIDLGEDRQALAVVDHDVRVLWRKTARVKAHQLGEALDLAVAAARERGFALVTVACEPTGPRWMQVQRLCAQRGLVLVCVQPLVSHIAREQQDYTSHKRDESDAVLIARLACELHCYVPEELDETWAHLRQLGRRRERLVRAATAAVARVRDFLSVAWPAAETAAGVPFESLTWLACVDVVTSACGGDPGRLASLGEEEFLALAADAARAWGARWAVRRIARNVLGALEDPGAVGWSRRGLFRRIAGELGDLRRARAQLAAVEAEMRAVLGGELGLSRLGDIPGLTLTGAAVILAEAGDPHRYETSKSLVKHAGLSPADTSSGAFEGASRISRRGRPGLRTAAWRAVTPLLLHNPVMAAKYQAMVSAAEDAARAAAAAARPGSAQAAQAGRAARAARAKARVACAAALLRWIFSMTVHDADWDPVAASGGRITRDDLPEAA

SEQ ID NO: 451519 - protein, 413 aa, unidentified
MQVVYERCCGIDVHKQTVVACVIVPGPDGQPLKETRTFGTMTADLEALADWLAGLGVSHVAMESTGVYWKPVYNLLDGRFAILVVNAERIKALAGRKTDVQDAEWIADLLRHGLLKGSFIPTEVLRELRDLTRYRTKLGDERKSEVNRVQKVLEDANIKLASVASDVMGVSGRAILAELVEGQTDAATLAALAKGRLRDKQDLLLKALSGRVRPHHRFMLAQHLSHIDFLDEAMAQLDQQIAEQMRPFATALATWDSLPGINQRIAEIIVAEIGADLTPFEDADHLASWAGMCPGNNESAGKRKSGRTRKGSPWLRRALIEAAHGAAHTKHKYFQALYRRLASRRGTQRAAVAVGHSLLVTGYHLITRQTAYEDLGGNYFDERDREAVKRRAVRRLEKLGYRVELAPTAVPTG

SEQ ID NO: 451520 - protein, 341 aa, unidentified
MKLIRVGVDLAKNVFQLHGVDRSEKTVWRRKLVRADWIKVLLDRIEPGCEIGMEACSGAHHWARLLQAKGFTVRLIAPQFVKPYVKSNKNDANDAEAICEAMSRPSMRFVAVKTVEQQDIQAVHRARSGLMDQRKAKSNQLRGLASEYGLVAPKELLHLRLAIPRWLEDQENGLSERFRRVLRGLWRDLQTLDERIEELDREIEQIARADPLAMRLQKVRGIGPLTATALLATVGDASQFSSGRAMAASFGLTPKQNSSGGKERLLGISKRGDAYLRSLLVHGARAVIRTAQAKTDRLSIWVMRIATTRHPNIAAVALANKTARIAWAMLTKGTDYRIQTA

SEQ ID NO: 451521 - protein, 440 aa, unidentified
MKAIQLQQKRSMIDGKIIIGIDPAKAKHQATIIDTTGVQLGKSFSFDVGYEGYTNTLWQKILQTIPNCKPETTVFALETSCNLWLTIAFYLHGEGYRVLLVSPLTTYHSRPMVNHDFSRTDPKDALLVASSARQGYFDLYEDYPPLSNAMHRLSITYCKLRKGCAQNRARLRATIEQVFPEFLSFVRPDTNTALYLLKRYLFPRDFLDMDIAREANAIMAISRKQYDLQTLLELRNAACRSIGVVKTDEECIAERLSVNSWIALIEAFSVQMENIFTVLTKYAERLPEYKFLCSLKGVSDISASLFLGEVRDIHRFSHYKQLEKKAGLNLRLSQSGQYVGARHISRLGNKRLSWLIYTMTEETAKWVPEIRAKYLRRQLKVRKHRKSVIASTPQLLKLIMALVKDQRCYEIRPEKLSEMQTLEKRYTELKEQYKKNKKAA

SEQ ID NO: 451522 - protein, 427 aa, unidentified
MSEVESVRREPQFAAFVGIDWADQKHVWGLQAVGSEKRESGELEHTPEAVEAWVGQLCQRFGNRPIAVAVEQWRGALVYMLAKYEPLHLFPVPPTMSASMRKALYPSGSKDDPRDADLLLDRLLQHRDKLHRWSPDTEATRRVQNLVEERRKLVDEKTAQTNRLTNHLKIYFPQILDWFEHLDSELVCALLERWPTLEELQKVPPAKLRSFFRKYHCRDEALTERRILAIGQAIPAIRDRAVIEAKSTVVKVMVQLVRSLVEGIADLDEKIEEAAAAHPDFFIFESLPGAGAVMAPRLLAAFGSQRERYGSANEVQAYTGIAPVTEKSGKKKWVHFRWACPKFLRQSFHEWAGHSIPHSVWARAYYQQQRNKGRDHHAAVRALAFKWIRVAFRCWKDGVAYDEKKYLASLARRGSPLATVAATAKPL

SEQ ID NO: 451523 - protein, 341 aa, unidentified
MKQEMNVLGIDIAKRVFHAVGMDDTGKVVFRKRLSRHDLMPFIAKLPPVRIGIEACGGAHYWARRFRAYGHEVKLMAPQFVKPYVKSNKNDSRDAEAIAEAVTRPTMRFVPVKDVDQQDIQALHRVRERLIGARTALVNEVHGLLHEYGIVMPKGVSKFRQTVVGKLESEKDKLTPLSQEMFWKLVEEFATLEEQLAYYQEKLEALATTHPECQRLMTIPGIGPLSATALVAAISDASAFKNGRQFAAWLGLVPRQHSTGGKERLLGISKRGASYLRKLLIHGARATMRWVRLKTDRRSQWIRQLIERRGKNRTAVAVANKNARIVWVLLTSHQDYQPAEG

SEQ ID NO: 451524 - protein, 469 aa, unidentified
MQVVYERCCGLDVHKKSIAACLIVPDSKGQPTKQVRHFGTLTAQLLDLADWLIAHQVTHVAMESTGVYWKPVYNVLEGTCTVLLVNAQHVKALPGRKTDLKDCEWLADLLRHGLVRGSFVPEAAQRELRDLTRYRVALLQERTAETNRLHKTLEGANIKLSSVVTDIRGVSARAMLAALVEGESDPAVLAQLAKKRLRAKLPVLEQALHGRFSAHHRFLVSLHLARLDELDAAIDQLSHEISARLGGRGEPATLPDDPGASASADARRSAVPTTDAPAVAEIGEAPPGAATGGGAPGAGGRSGAAYADTITRLQTIPGVGPRTAEVLVAEIGIDMTRFPSARHLASWAGMCPGNHESAGKRLSGTTRHGSPWLRSALVEAAHAAGRTKDTYLAAQYRRVLTRRGKKRAAVAVGHSILVIAYHLLSRQTTYLDLGANYFDERERDALQRRLIRRLESLDLEVTVRPKSAA

SEQ ID NO: 451525 - protein, 345 aa, unidentified
MQSMYYIRLDVHKRTITYCVKDGSGAIHAEGTIPATRFDLDHWMKTLPQPWTAAMEATVFTGWICDHLQPHAAALKVAHPLMLRAIAAAKKKNDRIDASKICDCLRCDFLPQCYMASTAIRERRRTLRYRNLLVRQMVQMKNKIGMLLMEAGVSYNKQKLHKAGYFRELLATSPDIDEGLVSLLRLCRETVVRLQRTESALVRSLERDSLLLDRVERLMTVPAVGPITALTWALEVGDAKRFSSIKKAISYCGLCGAEKSSGTTVQRTPLSKQRNKHLQTTLIEAAKMAPRNSPELAMLYDREKQKGNANRATLAVARKLVAYLMAVDRGQRNFQVVETNNCVAA

SEQ ID NO: 451526 - protein, 343 aa, unidentified
MNDITTIGLDTAKSVFQVHGVDADGEVVLRRQLKRRQVLAFFAKLRPCLVGIEACGASHYWSRELTKIGHTVRLIPPRYVKPYVKSQKNDATDAEAICEAVTRPNMRFVPTKTTEQQSILMLHRTRHLLVRQRTATINAIRSHLAEFGIVAGVGRNGVEALLKIIADEQDDRVPAVARDCLMALGAQLEMLKRQALELDAKILATHRNNELSRRLEAIPGVGPCIATALIASIPDPKVFRSGRQMAAWIGLVPKQNSSGGKDRLGSITKAGDRYLRSLLMLGALSVIKRAKQLGYTRRPWLAQLMARRPVKVAAIALANKIIRMVWAMMVRGENYREPVALAA

SEQ ID NO: 451527 - protein, 347 aa, unidentified
MIIIGCDYHPSWQQICWIDTLTGETGERKLEHAQGEAEKYYRSLPSAALIGMESTGNCQWFTELMASLGHPLWIGDAARIRAAEVRQQKTDRRDAALLLKLLLEGRFPRIWTPTVEEQDQRQLLLHRHKLVEMRVRVKNELQHLAMNRGITKGRRLWSKAGERVLCELPLAPWASRRREDLFRLRKMLDEQITALDEAVKKVAERNDRARLLMTHPGVGPITSLAFVLTMGDVNRFPRGKQVGSYLGLIPREHSSGGKQRTRSISKQGNRFMRTLLVEAAQSVVRYEPEFRKEYLHRCHRSEKGVAKVAAARKLAIRLYWMLRSNTAYPEIVRVESSSRVPLDSSPA

SEQ ID NO: 451528 - protein, 415 aa, unidentified
MAMELVVERCAGIDVHQAQLRVCVRVPGVKGKRVEEFATFGTTTPDLLALSDWLVSHGVTQVAMEGTGVYWKCVYYVLEEQFELWLVNAQHVKNVPGRKTDTSDAAWLCRLLEHGLLRKSFVPPREIRELRDLTRYRKALIRERVSEVNRLHKVLEDAGIKLATVASDVMGVSGRRMLEALVAGTTDPDVLADLAKTRLRTKLPELRKALNSRFREHHGFLVSQILAHVDYLEEAIGVVSARLDEALVPLQPAITVLVSIPGIQRRTAEVVIAEIGTDMSRFPTSRHLASWAGLCPGNNESAGKRKHGRTTKGSPWLRTALVEAALGATRPHGYLRSKYWRVRGRRGHQRAVIAVAHSMLEVIHQLLTTGELYTDLGAEFFEQRQAEQLTRRAIRQLERLGHQVTLTRPAEAQTA

SEQ ID NO: 451529 - protein, 401 aa, unidentified
MSKSALIAPAARGEVVTLFVGFELSKKAWLIGLYAPELGKTISRHKVDGGDVNAALALVAMAKRRLEKLGRPVRVVSIYEAGYDGFWLHRRLRAVGIENRVVDAASIPVDRRSRRAKTDRIDLEMLIRMLLALERGETRICRVVQVPSPAEEDAKRQHRDRATLVAERTAHSNRIGGILMTLGIRGVNPRRRDFVAQLEKLVTGTGEPLPPHTKQALVREYERLGLVERQIKEIEGAQVVMMRAAATKPSDERQGEAGAEDAAERSAAQAAALVRFKGIGQISAVPLCREVFYRQFNNRRELGGYIGLTPSPYNSGSMRVDQGISKAGNQRARTIAIEIAWLWVRHQPGSALAKWFSQRVGDAKGRIRRIAIVALARKLMVALWRYLTTGLIPEGTVMTEA

SEQ ID NO: 451530 - protein, 342 aa, unidentified
MQVTTIGLDIAKNVFQVHGIDAAEKVVVRKQLRRRQVLEFFKALPACLVGMEACATAHYWARELTKLGHRVRLMPAKDVKAYVKRNKNDAADAEAICEAARRPTVRFVQIKSTEQQGRLMLHRARDLLMRQRTQVINAMRAHLAELGIVAAQGRDGIKELLKIIASEADARLPVDAHTSLVVLAAELQAMQTLIGSIEKRIMVQHRLSEASKRLESIPGIGLIGATAIAATVPDPKVFGSGRDFAAWIGLVPREDSTGGKQKLGPISKRGDRYLRRILVVGACAVLRYARHKPEKYPWLTKLLERKPFKVVAVALANKMARIAWALLAKGDTYRVPALAAAA

SEQ ID NO: 451531 - protein, 342 aa, unidentified
MDEYDGRQFVGIDLHRRRSVIVRQSESGEQLSAVRILNDPASLELQLEEAGADPEVVLEATYGWYWAVDVLQARGARVHLAHPLGVKGFRYRRVKNDVRDAADLADLLRMGRLPEAWIAPPQTRELRELVRYRAKLVAIRSGLKAQIHAVLAKAGVLIAVSDLFGVTGRQRLAKVPLGPAYAQRIRSLLELIDILDSHEARFAAMITERLDTHRGYQAIQQLPGVGPVLAAVFVAEIGDVHRFAGPAHLCSWAGLTPTHRESDTVVRRGHITKQGSKLVRWAAVEAIQHQPDSTKIARDRKRIEARRGKNIAKVAAARKLLTLVYYGLRDGHIRALDRARAA

SEQ ID NO: 451532 - protein, 351 aa, unidentified
MNVTKYIGMDVHRAMTVSAVLSATGKVVAEAIIETKGSVILDFIQSQRGTLWVTFEEGTQAAWLYDLIQPHVAKVVVCDPRKISTQGNKADRPDAKRLAELLRTNALTAVYHGERSTRALKELARSYSAIVGDSTRIKNRLKAVFRARGIDNSGGGIYTTEERECWTSKLEAGAVRLRVQRLWRELDTLDVLRAEAEKDMVVEARRHPATRILQTVPGIGPVRAALILAFALTPHRFRSKRQFWGYSGLAVVTRTTAEYELVKGRIRRTQKRPAVRGLNPNCNRVLKDVFKGAAGTAANGPWRAYFESKVASGNKPELVLLTIARKIAAITLALWKKGERYDETKLTMHAV

SEQ ID NO: 451533 - protein, 457 aa, unidentified
MSQTKRSRKSRGLFPVHPAAAAIDVGAALHVAAVGPDRDKEPVRTFRTFTDDLHRLADWFAQCGIRTIVMESTGVYWIPVFEILEQRGFEVMVVNARDAKHVPGRKTDVSDAQWLQRLHEYGLLRASFRPEAEIAGLRTYLRQRERLLDYAAAHIQHMQKALIQMNLQLHHVVSDITGVTGMTIIRAIVAGERDPNVLASHRDRRCHASVEMVCQALVGNYREEHVFALTQALELYEVYQTKVAACDEQIEAILKRLKKNAPPPASKLLPVRQRTHQPNAPAFDARGALHAILGVDLTQINGLGPYLALKLVGECGTNLAAWPTAKHFTSWLGLAPHNKISGGKVLSSKTRRTSNRAASLLRLAAGTVGRTDTALGAFYRRLSARVGKAKAITATARKIAVLFYNTLRHGMAYADPGATYYEDRYRQRVLNNLQRRAKSLGFVLREAGLDTARADVS

SEQ ID NO: 451534 - protein, 353 aa, unidentified
MSQNPTTAIAIVGIDIGKNSFHVVGLDQRGAIVLRQKWSRGQVEARFANMPPCLIGMEACVGAHHLSRRLKALGHDARLMPAKYVRPYSKGQKNDFRDAEAIAEAVQRPTMKFVATKTADQLDLQALHRVRERLVSQRTGIINQIRAFLLERSVAVRQGLRFLRAELPRILATPPDVLSPRMVRVIEGLAGDWRRLDERVESLSGEIEAVARQDAGCERLMSVPGIGPIISSAMVAAIGTGDVFSKGRDFAAWLGLVPRQISTGDRTILGKISKRGNRYLRVLFVQAAWVVLIKPKSWERHGLKPWIETAKKRLHRNVLAIALANKLARIAWSVLARGRAFEVRKVEAAAQAV

SEQ ID NO: 451535 - protein, 345 aa, unidentified
MKNIERVYTNNLTLNTATFVGIDAHPTEHTALAMNRFEEEKGLLRFDNTKDGIKEFVAWLQTLEVKTDQMILGIEGGAGMQHELLRQLTERYAHVFEVNPVYTKQRRAFGTRADKSDPFDAKLIAEVLTKKIGALPRITKRELSAQKLMLKKLVWFYEEVTLQGARIKTQIKQTKAQYELCSNPSEKRILGEILKDQNRTLALIRKQQNKLEKRLKDLLKTAGGGNLFTIPGIDTILAGKIIAHAGGIERFQTIDKFIKYAGIAPTEKSSGKSRRYIKNTKGNRKLNTTFYLCALGQIRWNPKAKAYYQKKITEGKSKKQALVCVMKRIACIVYGMLKSGEEYRG

SEQ ID NO: 451536 - protein, 376 aa, unidentified
MDCTSTAGSILPCALELSKNTWLLGIQFPDRPQPSLYPIRGGNTEDLIAKLTAARDRCAKISGRAPSIVLCYEAGYDAFWLARFLKARGIECLVVDSTSMQVNRRARRSKTDRIDVGKLLRGLIAWLRGDRHVWSVVRIPSVDEEDLRRSHRERDYLVHERTAHINRIKGLLFAQGIRRINVKRQYKTLHVDKLVTGNGHPIPPRLASEIVREIARLALVQEQIETLERERDERPTPCTATEKKRAQLMYLNGIGPAISAVMTREVYYRQFDNRRQVAGFIGLAPSPYDSGEVERSQGISRTGRGQVRGTMIQAAWLWIKHQPRSTLTRWFLERTMGQGGRVKRMMIVAVARKLAIALWRFLEHGLVPQGAILSSK

SEQ ID NO: 451537 - protein, 412 aa, unidentified
MDIIHPCCAGLDVHKDTVVACLRRLGAGGRALKEVRTFGTMTRDLLSLADWLSAEGVTHVAMESTGVYWRPIFNVLEGRLQVVLVNAQHIKQVPGRKTDVKDCEWIAQLLQHGLLKASFVPPAPIRELRELTRQRTQLVGEKSAVANRIQKVLEDANIKLGSVASDVLGASGRCMLQALIAGEEDPQKLADLARRRLRAKIPELRLALQGRVTEHHRFLLRLLLEHVSHLEGLIAQLGARVEAVLTPFEEPAARLDSIPGVDRRAAEVILAEVGADMTPFPSADHLASWAGMAPGNNESAGKRRSGKTCRGSRWLKATLVQAAWAASHTKGTYLAAQYRRLAPRRGKKRALVAVGHTILVIAYHLLKEGTAYQEPGGDFFERLDPERLTRNLVRRLEKLGHKVTLQTKEGTA

SEQ ID NO: 451538 - protein, 429 aa, unidentified
MRTESTPGARGPVFCGVDTHADSHWLCVLDWRGRRVLSRRFPADAAGYEALAGAIAAAGEPACVAMEGTSSYGAGLTRHLASLGMPVREALSPARTQRRRPGQGKCDEADAERAARAAMSGSRLGTPKSQDGWVDGVRCMLAARSGAVKARTSAINTARSLLTTAPEGLRSRFRGMGGPRLMEELPSVRAEGALGAALGALADLWAAARDAALDMELAIEASLEENCPALLAMYGCGPVSAAKLAVAAGDNPGRLRSEASFAAICGACPIPASSGKTVRHRLNRGGDRQANSALHEIARQRVMRDPETAEYAERARGRGKSDREVMRCLKRYVAREAYRALMHPHEIRRPEDASELVAARRAARVSQVRAASILGTSEKYISMLERGQRELKPIRRAYEAWVEAGLPLDWDRQAFEAERKMDSKKHLAK

SEQ ID NO: 451539 - protein, 442 aa, unidentified
MSNRTVNRLSRGDRRRNAKLRDLRSLVRPDLAICAVDLADANQAAVVADHDSVVLGRRMFRCSAWGIDQILDWAIPIAQQAGFAGVVVACEPTGHRWKPVAERARARALNVVCVQPLLVCRAREAEDFTRDRSDYKDATIIARLTSERRCYRPEVTTPRWARLRHLGQRRAAVLGAATAARQALRDLLGVSWPSVLDAAAQPLDSLTFRACLAVATDPARIVAMGYDAFAGAVAAELPRWGGKRRRHQILRAVFAAAQAPGGVAAERAGAAERAAFAVGDWHRALQELGEVEGRMVAVLDQLHLTRLVTTITGLSAVGAAAILAETGDPARYDIARTWAKHAGLCPRDNTSGRFQGQTTTSGRGRPGLRTAAWRAIWGLLPHNPVFAARYAHLTGRAHNPLNDGQARAALAAGLLRQLHAVCARQVAWDPKIAAGEVTATAA

SEQ ID NO: 451540 - protein, 423 aa, unidentified
MTVVYPTCCGVDVHKTFFIATLITTKGIQPTYKKRRFSTYNNQILQFKAWLLENDCRDVCMESTGKYWIPVYNLLEDSINVTIANPKWVKVIKGNKDDVKDSKWIGDLFRVGLVRGSFIPCKDVRILREYTRYRFKLVSCKSSEKNRYQNVFTVCNVALDSVVSDMFGKSATSILDYIVDSDIFDPVYCASLLQRSLKKKAGEVLESIDGFQMSASQKTRAKLVKEHYTFLLDQIKKIDEMINELAKPFDSVINLLCSIPGIQRTSATTLISETGIDMSQFGSSKRLCCWAGLSPGSNESAGKKKSVRISRAGVYLKPILVEIAQAAIKSNKSPYYKTKFERISKRRGKKRAIIAIARMILTAVFHMVSTGELWNPVDLLKIDIPADLLEKAMQKSLRRAANLLIAHGVIGSDTIKNVLLVPA

SEQ ID NO: 451541 - protein, 354 aa, unidentified
MSKIKQLNFDGKVIYCGLDTHKTNWKINARMEGIEMASFSQNPDPMLLKSYFDKNYPRAELKVVYEAGFCGFEIQRSLTTLGIDCIIVNPADVPCSDKDRKRKDDKRDARKLSIELAKGNLRGIYIPDKQMQDARTLVRQRHRLIQDQTRCANRIKHLLLSNGIKTGEKSERWSLRFINKLQQLDCRSALLKASLQFALEQYLQIRRIVKEVTLMIWDLSRQEPFTKVQTVLQSIDGVGLISGMVIQSEIGNINRFKRLDSLCDYAGFVPDIYSSNDKTVVRGVSKRGNEFLRETIIESSWVLVRKDPAMLMKYNVYRSRMNANKAIIRIAKHLLSRIRFLWKNEQAYVRGITG

SEQ ID NO: 451542 - protein, 402 aa, unidentified
MNAVGIDVSKGKSMVAIMRPFGEIVSAPFEIKHTASGINSLVELINSVEGESRIVMEHTGRYYEVLAHQLSKANLFVSAINPKLIKDFDNDSLRKVKSDKADAVKIARYTLDKWQNLKQYNVMDELRNQLKTMNRQFGFYIKHKTAMKNNLIGILDQTYPGVNTYFDSPARSDGSQKWVDFASTYWHVDCVRKMSLNSFIDHYQNWCKRKKYNFSQSKAEEIYGKAKELVPVLPKDNITKLIIKQAVNQLNIASATVESLRTLMNETASQLPEYPVVMAMKGVGTSLGPQLMAEIGDVSRFTHKGAITAFAGVDPGVNESGSYEQKNVPTSKRGSSNLRKTLFQVMDALIKTHPQDDPVYQFIDKKRAQGKPYYVYMTAGANKFLRIYYGRVKEYLSSLPES

SEQ ID NO: 451543 - protein, 430 aa, unidentified
MKSNTQNAKIEAITEKTLVLGIDVGSETHYVRAFDYRGIEYSKKPFKFSNTEAGFVTFKEWILDLKERHEKDKVVPGMEPTGHYWFNLGKFLQDNEMKPVLVNPHHVKKSKELDDNNPTKNDRKDPKVIAGLVREGRYMIPYLPDGVYADLRTASNIRFQLQAELTRIQNRISRWFNIYFPEYKTVYGKPDAKSGILILKAAPLPEDILTLGIDGVNQIWRDAKLRAVGKARAKTLIEAAEHSIGSKEGTVSARMEIRMLLEDYESKNMRLQEVMVLIEELVKEIPMAEKLLEIKGVGIRTVSGFLAEVGDISRFNNPKELQKLAGLALVENSSGKHKGKTTISRRGRKRLRYLLFEVAMSLVAKNPEFRELHNYYTTRRLNPLKKMQSLMAIAAKLIRVFYAMLTKGVDYDPKKMVSDIKRPAVYLQAA

SEQ ID NO: 451544 - protein, 403 aa, unidentified
MNSVGIDISKGRSTIAVMRPFGEVVISPFEVRHTDSELSELARQLKSLNGETRVVMEATGNYHAPVAKLFHDAGLYVSVINAKLVHGYGNNDLRRVKTDRKDAVKLANYGLDRWLTLPRYVPEEDTRLLLKNCYRQYRQYSKVQTVLKNNLISLLDMVFPNVNRLFSSPIRGDGSEKWVDFVAEFWHCRCVSEKSQKAFTNKYQRWCRKHGYNFSEAKAHTIHAEACGHIDVIPKSETTKLLVEQAVAQLRATSAALAALKHEMQALASMLPEYPVVMDMFGVGPTLGPQLMAEIGDVRRFYSKKALVAYAGLDAPPNDSGDVTGRHKSMSKIGASSLRRTLFLVMTVYLQNAPLDEPVYQFMDRKRAEGKPYRVYMMASANKFLRIYYATVKAYLESLEHTA

SEQ ID NO: 451545 - protein, 344 aa, unidentified
MSKHSVPGGDFAGLMERFAQLQEKARRRTGQSFRIIVVQEAGLDGFWIHRALQNEGIESHVVDAASIATSRRRRRAKTDKIDGETLVRALLAYKRGEPRVCAMVKAPTPGEEDRRHLCRERKALIAERVRHVNRIKGFLFSQGISGYQPLRRDRRQRLEELQTGDGRAFPQHLKALVNRELDRLELLLKQIKTVEAARDALLAVGQTAKPAPAAMLLDIRGIGPEFAAILWSEGLFRHFENRRQIAAYAGLAPTPWQSGAVDREQGVSKAGNPRLRTTLIQLAWLWLRNQPRSALSVWFHERVSRNGGRLRKTTIVALARKLLVALWKYVTAGVVIEGVTMKVA

SEQ ID NO: 451546 - protein, 397 aa, unidentified
MIAVGIDVSKSKSTVAILNSDGTPLARPFNMAHTLPEMNSFVERLRAFDAPVTILMEYTGHYHYPVLKKLQAEGFPVCLINPYQMKKYGDVEIHKAKTDRKDAVRIATYALEKAYKLTPYSAMEQKYEDLRFLSRQYGQRIADVSRLKTQLLDHLDQTMPGITSLLALKSRTPDNCVLLLFIKRFNSFDEIHRIGKPRFLSAYSSLVKKTTDRYAASKALAIYELALNSITTRGDDPYIWSVQRQCVDLLASAQNAADTIILQMQNIAVTIPEYKVLRSMHGVGDRLGPIILAEIGDIRRFHSGKALNSYAGNDAPPYQSGQFESKNRHISKRGSPALRKACFEVMQALKLTKPQDDPVYLFMLKKEQEGKPHNVAKMAGVNKFLRIYYARAMALYK

SEQ ID NO: 451547 - protein, 348 aa, unidentified
MRGAVHMQITTIGLDIAKNVFQVHGIDAAEKVIVRKQLRRSQVLAFFKAVPPCLVGMEACATAHYWAREFTKLGHEVRLMPAKDVKAYVKRNKNDAADAEAICEAVRRPTMRFVQIKSAEQQGQLMQHRTRDLLMRQRTQVINALRAHLAELGIVAAQGDKGVKELLALVVDKEDTRLPIDARASVIVLATQLEATQTVIGAIEKRIKMQHRSNEASQRVETIPGIGVIGATAIAATVADPTVFRSGRDFAAWIGLVPRQDSTGGKQKLGPISKQGDRYLRRILVIGAVSVLRRAQENPGKYPWLTQLLARRPFKVVAVALANKMARMAWALLAHGGTYRAPELAEAA

SEQ ID NO: 451548 - protein, 355 aa, unidentified
MKQYIGCDTHARYSVFVSIDEKGRIGAPVRIEHGGRDLRDYLGSLEKGTPVAVEASGGWYWFMDELEKAGLDARLVNPLEAKHRMGGKNKTDKLDAKGLAILLRSGTLPEVWIPPARLRDLRGLMRTRLATRSHTTVLKNRIHAAFRRYGAMEGEPPADLFSPKNRLRLSVAIGKLPEETQRATLHEWEMLDVINHHIGELEIRIRERIGKLGWVRLLKSLPGVGEILGATIYLEIGDVERFPTAAHVASYAGLVPTVHASGGKSWHGPTSPQANHYLRWAFVEAANAVLMHRHTYADQHVIELYDRLKKHKCHGKAAVAVARHLAEASWWILKKRQQYRPPHAQVVAESSSKNG

SEQ ID NO: 451549 - protein, 361 aa, unidentified
MKRILKIGMDVHTTNYTLCAMEPIIGEDDRVFATIKVTPDYKNILLFIENLKTKLGLNDEYDIQCGYEAGCLGYSLYKQLTAAGVKCVILAPTTMLTPQGVRIKTDMRDAYMIAQCLSYGGYHAVYIPTEDDDSVKEYLRMRNDHKLALKKIKQQINAFCIRHGFCYDGTKWTQAHLKWLKKLEITNQLYRETLDEYMASYEEQEAKIERYDKRIEEIAEQTRYHDKVKKLECFLGIKTHTALSLIVETGDFERFAKGNQYASYLGLAPGENSSSDNIHRLGITKAGNSHLRQLLIEASGGICKGAVGHKSKDLRARQNGNTAEVIAYADKSHFITGRRVHHEITQITKKLKMVDFFWKIA

SEQ ID NO: 451550 - protein, 350 aa, unidentified
MVEIGMDQHKHFSYAVAMDPSSGEKVQQRLEHDDPDAIVRFVRSFGPDVRVSLETTGNWYWLVDLLEDCGTCVHLVNTVEARRLHRARNKTDRLDAEALARLSSQGLVPTVYVPEREGRDERERHRYRLWALKLRTRVKNRIHAILSKLNVAPGFSDLYGKAGRAFLAGLNLREPYGRQLASSLRLLDVLDAEIELARQAIRRHLKDHSQAALLMTIPGIGELTAYLLLHEIGPIGRFASHKHFASYACVAGGAWQSASHRRNVPVGRAGNLYLKAAFTESTLSAIRCNAPLRIFYERIRRRRGTARALVAVAHKLAIAVYYVLSRNQAYAPVRPTNTRRPGKPVLCLGA

SEQ ID NO: 451551 - protein, 366 aa, unidentified
MEKIITPIGTPVGVDVHKRRCKVVELQKGKVQVRKSMANTREDWLELLTELPPDAEIGLEVSTAGYFAMSVLEEAGWRERSHWIHTAGIDSNRRQKNDRLDAERLARKLAAHHLDPLPEAWFPPPEIRMLRLRARARCWLVSLRTQCKNHLQSLLGMQGLQAPGSDPFGAAGQRWLAEQKLPPPLTESIPQIQRLLKVLEEEIKNSEQYVRAVQGQFPEIALLRTIPGIGPILAPLIWSEIGTMERFHSAKALANDTGLVSSFYDSGDVQVSGGITRQGSRWLRWAFVTAASVAMQYPNPFARRYHRLRRGKKPNVAKAAIAHSLARCAYGVLKHRCPYREDRWGRKVGALEQETRAGARSTKTVL

SEQ ID NO: 451552 - protein, 418 aa, unidentified
MKVVYPICCGIDVHKTFLVATIITSEGITPHYIKKRFSTFNNSIRQFKQWLIDNNCFDVCMESTGKYYVPVYNLLEDIIRVTVANPKWVKAVKGSKDDTKDSKWIGDLFRLGLVPGSYIPPKPIRILREYTRYRSKLVSCKSSEKNRFQNAFTVCNVALDAVVSDMFGKSASSITDYLVSSDSFNPSHCTSLLHWSMKEKADSVVESIEGYQMTREQKERIVMIRSHLEYVKRSIEKLDDKLDKMVAPYESAIKLLCTIPGVNRASAITIISEIGTDMSQFANSKRLCCWAGLTPSNNESAGKKKSVKISRAGVYLKPALVQVAHASVKSNKSPYYKNKYERISKRRGKKRAIIAIARMILTAIFNMFVTGEEWNPSDLYKVDMPQEMLDKQKEKAIKQAVKLLVAQGLIKATDISVA

SEQ ID NO: 451553 - protein, 339 aa, unidentified
MLKLGFDCHKAFSQVAVLDEKGAIVRECRLANKRETLARFVSELTQPAQAVIEAGYNWGLMYDLLTELGVDVRVAHPLRVKAIASAQIKTDTIDARTLGQLLHARLIPEIYVPTPDIRRQKDILRQRCWLVKMQTAIKNRIHQLLTRNHIENPGFTDLFGLGGMKFLRSLALGTSDQKILTQDLELYDMVHEQVKIITRWISEALQDNRYRTILLSLPGLGAILAALAALEIADINRFFSPGKLAAYAGLVPTTYASGGKVHHGDLLPQCNRYLRYAFVEAAWSAVKTSPYCRALFAKLRKRKGANTAIVVVARRLCGIAYQCLKENRFYEERAYDHSA

SEQ ID NO: 451554 - protein, 343 aa, unidentified
MQTVTTIGLDIAKSVFQVHGIDAAGQVVIRRQLKRRYVLAFFQKLPPCLIGIEACASSHHWSRELQALGHTVRLMPPAYVKPYVKRQKNDATDAEAICEAVTRANMRFVVTKTPEQQSGLVLHRARHLFIRQQTAVINAIRAHLAEFGIIAPVGRHGVEELLNVVADPNDKRVPEIARACLMAFGAQLRRLKEQILEFDRMIRAWHRSSETSRRLDDCPGVGPALATALVATVADPKSFRSGRNFSAWIGLVPKQHSSGGKNRLGSISKQGDCYLRGLFVAGALAVIRYAKIHGTKHRPWLTALLARRPTKVAAIALANKIARMAWAMMAKGERYKEPIALAA

SEQ ID NO: 451555 - protein, 411 aa, unidentified
MCIKNHGGVVATGDFSNDTLGGKLLLEMLEKHDCMDAAMESTGPYWYGLYDLLAEHELKVTLVNPAKAKTHLLNKSDRIDCNILATLHMINQLKASYVPDHEVRRLRRLTRLRAWLVDMKTAIKNQVTSTISKYNSNLLSTFTDAFGVSGRNFLKMLAEIGSEEELIKELDGLKLTEKKRDRIKEAIGSAFKSNLDPWIIQFSSNLISQIESWINLLNDAIAKAVDSIPRVKEYVNRILTVKGVGLETAQAIAAEIADISRFMSSSSLVRYAGINPRVIQSGSVKRYGPLEKCGPPHLRRALYQAANTMAFQGPKNFQRHYDAVRARYGEKRGHGVGVVSTARKLARLIWSMLTNETDFIESPKQLTEKKRRKLRKRVERFDANRETFTVKDLLVNLDRLDPEVVRMLAEL

SEQ ID NO: 451556 - protein, 340 aa, unidentified
MRYFTGLDLHSNNTYLGILDEQGTKVYKAKLPNHLPMILRALQPYREEMVGAVVESTFNWYWLVDGLMEAGYQLHLANPAAIKQYEGMKHTNDYYDAFYLADLLRLGLLKGKEGHIYPKKERAIRDLLRKRLMLVQQRTSHILSFQSLYNREKGCKYSGNETKRLDEEKIESLFADQYVHLSAQANISLIHSLTSKIKEIESAVLACMRVVPEFGKLLTISGVGDILALTISLETGDIGRFAKVGNYSSYCRLVSSQRLSNEKKKGENNRKNGNKYLAWAFIEAANFAKRFCPSAKSFYNRKLARTNKIVATKALAHKLARAAYFVMRDRVEFNPKKAFG

SEQ ID NO: 451557 - protein, 372 aa, unidentified
MTSIIYVGMDVHTTNYTLCCYSMEDDRFFAEVQVEPDAKNILKNLARIEKQQSRDCRIVCGYEAGCLGYSLYHQLHAHGIDCVILAPTTMMTKPGKRIKTDRRDARLISKCLAFHTYSPVYIPTEVDDAVKEYIRMRDDANSALARVKQQIIAFCIRHGKIHDGKSYWTNKHLEWISSLDLGNKILSEVLQEYLIRYYQLREQVDMYDMRINELAQAEPYRQKVEKLGCFRGIAAHTVLPFCVEVGDFRRFATAQQFASYLGLVPGECSSGDKQQYTGITKAGNSHLRKLLVETAQVFGRSATKSGKSVALKERQAKCDSLTVAYADKANARLKKKYFKIAMRSKVNIAKTAVAREMACFIWGMMTDNISCA

SEQ ID NO: 451558 - protein, 404 aa, unidentified
MGGSPNHQPTAECLRAKLPEGVAGIARLHAMVGQQLGEDDETVVVVGIETDRGPWVRALIAAGYQVYAINPLQVSRFRERLGVSGAKSDPGDAHVLADMVRTERHQLRPVAGDSAEAEAVKVLTRAHKTLIWERTRHLLRLRNTLREFFPAALTAFEDLSAPDVLELLGAAPDPATAAALPAEQITAVLKRARRHRATQKAEAIAAALRSPHLGQPTVVTAAYAAAVRAQVAILTTLNAEINTMEEQVEAYFGRHPDVEIYLSQPGLGIVLGARVLGEFGDDKNRYADGKVRKNYAGTSPITRQSGKKKTVLARYVHNDRLLDALGRQAFAALRGSPGARAYYDQLRAAAPHTTPRYASSATDSSASCTAASKPAPNTTNTPPGHTTKRIFNLSLDKKFHGMSG

SEQ ID NO: 451559 - protein, 341 aa, unidentified
MVREPESNQTRVPGGKLMKHHHKYVGLDVHKDLNEVAIAEGRRTSGELRVYGSISNDLHALEKLARKLGGPGITLHFVYEAGPCGFGIYRRLRQLGLDCIVVAPSLVPKKSGERVKPARRDAIKLARLHRAGELSAIYVPDERDEAIRDLIRSRADAIAEQRANRYRLKAFLLRHGYKYQGKSSWTPAHLRYLRELVLAHPAHKVVLEEYLLAITQTTERIARLDQHIETQVQQWRMQPVVEALMGLRGVQLLTAAALIAELGDLSRFTHPRQLMDYLGLVPSEYSSGDSRHQGGITKAGNGHARWFLVESAQHYRLPPKVSKELAPRLVKLPRRLEEISW

SEQ ID NO: 451560 - protein, 339 aa, unidentified
MEQLTTIGLDIAKNVFQLHGVDAAGNVLLRKQLRRGDVLRFFSGLSPCLVGMEACATAHYWARELAKLGHTVRLMPPAYVKPYVKRGKTDAADAEAIAEAVTRPTMRFVAVKTAEQQAVLMLHKVRDLLVRQRTMLINALRGHLAEFGIIAARGPGGVTAAIVALHETQDSMPVLARVALHGLVDQLRIVRDEVVKVEKRIVAQHRANDASRRLATIPGIGPITASAIAAAVPDATLFKSGRQFAAWLGLTPRTHSSGGKERLVGITKQGDGYIRRLLVIGATAVIRLARQDNASKSWAAKLLERKSARLVSVALANKTARIAWALLARNQSYVAPAMR

SEQ ID NO: 451561 - protein, 343 aa, unidentified
MQYLKTVVGLDISENTFVTRIGSLNTELVQYISNAFSFTNDMKGFKKLLSWIRKMCQNLGIPSNMEINFVMEATGVYYENLAYFLSEENKFVSVILPNKIKNYSKTLENKSKTDDIDSANITQFGLERTLKRWEVPSPELRKLKELSREYQHIKKATTSIKNQIHAKEHSHLPVKETLKRLREQLKLYNYQSKQIKNQIGELINQNSDLNSRINNILSIKGVGLMTIISVLAETNGFSLIKNSKQLVSYAGLDVVHRQSGKSENRTSISKKGNKFLRNTLYMPALCACRSNEVLKNIYIKLCIRKNYKKIGIIAVARKLLILIYTLWKNNSTFIPNYESLRSA

SEQ ID NO: 451562 - protein, 462 aa, unidentified
MQDSQKRKNSSGNRREIEGLPVIRRRIAGIDIGSERHWVCAPTIEESGREVADFGATTPELIRMAKWLKERNVESVAMESTGVYWIAPHEVLEAEGLEVMLVDTRQLARVPGRDKKTDPVDCEWIQRLHSCGLLMGSFRPQEAVCMLRTLVRDKGNLVAEAGDWLRRMQKSLDQMNVRVHRAVADLQGATGMAIVQAIVEGERDPRKLAKLRDHRCHKSEAAIAEQLSGHWREDHLFSLRQALKMYHSILERISDYEQELLKKLAAMEREECRGQKAPKVNNPQKAHAIRRRGEEPMRHALYRMSGVDLTGIDAIGVATVEVVLTEYGPDMSRFPTEKQFISHVTLAPHRPTSGGKPVKKKKRNSASTRVAAALRMAALSLRHSDTALGAYYRNIARRKKGDVAVFATARKLATLIYRLLRWGQPYVDEGAQAYERRYQQTRIRGLMARAKELGYQLTPTTA

SEQ ID NO: 451563 - protein, 413 aa, unidentified
MLKIVYPICCGIDVHKTFVVACIASTNNKGVTTYKRHRFSTYTKGLKELSQWLCENNCKDVCMESTGKYWIPVFNILEDSCNITLAHPKYVKAIRGKKTDKKDAKWIADLFKHDLIAGSFMPPLAIRQLRDLMRYRFKLTNFMSSEKNRLQNSLTVSNIQLGNVVSDTFGKSSMNIINRLLENPLDNNFDIEPLIHGSMKDKIPELELAIDGFITPEQAEKLKVIKQHYADLESRKADLEKIILSLSVPYSEEINLILTVPSFKNIFSAIAVISEIGVNMDVFPTAKHLCSWAGLTPTNNESAGKKKSVRISKAGCYIKPLLVQCANAVVKSEKHPEIRNRYLRLKKRRGHKRAIIAIARMLLTAIYHILKKKEPYNAELYRKSDVLPVSRDITVEQAILLAKTQGYRILPAS

SEQ ID NO: 451564 - protein, 277 aa, unidentified
MGEVTTIGLDLAKHVFQVHGVDAEGATVLRKQLRRAQVLAFFSRLPPCLVGLEACATAHYWARELRALGHEVRLMPAQYVKAYVKRNKHDAADAEAICEAVVRPTMRFVPVKTADQQAAVLLHRGRERLVRQRTGLVNALRGHLAEFGVIAPQGLRNVGKLIAIVRDERDARLPDLARQVLQVLAAQIEQLEAAVAAIEKQLMAWHKSNPVSQRLASVPGIGPIIATAIAATVVEPSGFRSGREFAAWLGLVPRQNSTGGKHRLGGISKRGNQYLSK

SEQ ID NO: 451565 - protein, 426 aa, unidentified
MEQTEEPVELVERVCALDIGKATVMACLRVPHEDHPGRRWQEVREYATRVSALLELADWLRSQSVQLVAMEATSSYWKPLFYLLEAEGLTCWLLNAKHVKNVPGRPKTDRLDAVWLAKVVERGMCRPSLVHPKPIRRLRDLCRYRRSLIRERTREKQRLEQLLEDAQIKLSSVISDIFGVSGRQMLQALIAGQRDPKALAQLARGKMRSKLAVLEEALTGHFDDHHGLLCRLMLERVDAVTATIDQVTAEIDRLISPFAHQVAQLDEITGVGVVAAQELIAEVGVEMGCFPSAAHLVSWAKFAPIDHQSAGTKKRGATGRGNPWLAATVGEIVAAVAGTDTFLGERYRRLARRRGKQRAIVAVGNSVLTIVWHLLADPQARYQDLGPDFYWSKVNQRRRERDLVRQLEHLTGKQVILQPRPDQPAA

SEQ ID NO: 451566 - protein, 379 aa, unidentified
MQPINTVNPTIYLAIELSASTWLIAARLPGSEKPHLHRIEGGDTAALFALISSLRARVARRLDAAIGVVCCFEAGRDGFWLHRLLTAHGIANYVLEPTSILINRRARRAKTDRLDAIGMLRVLAAYLRGDRQSCSMVRVPTPEDEDAKRIHRERENLVQEKLRIENRIEALLFTQGIRKRPSLRSWERDLAVLRTGDGREMPRHLRAELDRLRRRLVTILELIREVEAERDEVVTTNPEHQTSRKIVALCRIRGLGENFAGVLTREVFYRSFDNRRQIASYVGITPMPYQSGSMDRDRRISRAGNPRARTTMIQLAWLWLRYQPGSELAEWFRKRVGTLAGRTPIVAMARKLLIALWRYVETGVLPAGAEIRPESVAAA

SEQ ID NO: 451567 - protein, 356 aa, unidentified
MSKGITAGGSLTIGLDLGDKYSEACVLEGSGEVLEGFRVRTSQAALDRALARFASARVVLEVGTHSPWVSRLLARQGHEVIVANPRRVRLIAENDSKSDSFDAELLARLGRVDPALLSPIVHRGEEAQRHLVLLRARDGLVRARTQLINQVRGFAKSLGSRLPSSSSEVFPKRVRSAVSEDLFPGLGTMVGMIEQLTEEIRRMDREVERLCKERYAETEVLRQVKGVGPITALCFMLTLEDPNRFRRSRSVGPYLGLRPRQRNSGEQRPQLRITKAGDEFLRRLLVSAAHYILGPFGPDTELRRFGLRLAERGGKAAKKRAVVAVARRLAVLLHRLWVTGEEYQPLGYDKTMAKAA

SEQ ID NO: 451568 - protein, 387 aa, unidentified
MPQPNDLSRSLVALDQDSTIIAVVEMSQSSWLVAGMLPGIERQPRKKLEPSAERLLGLLHRWRDEAVKAGRKITRIALAFEAGRDGFWLARWLRARGVEAHVIHASSVAVSREHRRAKTDRLDTELLKRGFLGWLRGERGHCTMARVPTIAEEDAKRPNRERECLVGERTRIVNRMKGTLARLGIRNFKPTLRKAAERLATLHTPEGSALPPNVSAELQRDIARLGFVISQIKEIEEARQERLEQEPETGPHAMVRHLARVVGVGIETADMLVNEVLSRPMRDRKAVARYAGLTGSPDESGAKRREQGLARAGNARVRRGMIQLAWRFLWFQKESALARWYQARTADSRAGTRKTMIVALARKLLIALWRFVTTGETLEGVILRPAG

SEQ ID NO: 451569 - protein, 412 aa, unidentified
MDVVYQRCAGIDIGKRTAKVCVRVQGRGSQPTVSTVTSWSSMMPQILKLRAKLVNEGVQRVVMESTSDYWRPFFYVLAEELDVILVRASDVKAIPGRKSDVCDAEWLADLAAHGLVRASFVPPQQQRQLRDLTRARSRLLADRAREVQRLEKELEDACIKLAAVVTDLQGVSARLMLQALIEARDDPAAMADLAIGRMRTKIDQLTEALTGRFNDHHRFMVTFRLKRIDAATADLAELDARIDALIVDAGFDPARDLLLSIPGLGPHSADELLAEIGPDMSVFDAPEQLAAWAGVAPGSHESAGKRKNAPARRGNRYVKRALGIAAKSAARKKTGFLAARFRRLAARRGYQKALVATEHSMIIAIWHMLSTGEYYHDLGGDHYHRLIPARIIRRKIAELEAAGYTVTHQVAA

SEQ ID NO: 451570 - protein, 375 aa, unidentified
MEEGMTKEQLTIHVGIDVSKDKLAVAIAGGGVRDEVLSLGTFENTPASVDRLLKKLSGRGLPVSVCYEAGPTGYGLYRQVRAFGFECCVVAPSLIPVRAGDRVKTDRLDAIRLARLFRAGELTPIWVPDETHEAMRDLVRARESAAEDQRHKRQLVSAFMLRHGRIYHRTKPWTMRYRRWLQSQSFDHPAHQIALQEMLQAERNATERHDRLTGHIEALVPEWDLAPAVNALQALRGVALISAVTFMAEIGDVRRFETPVKLMAYLGLVPSEYSTGKTTKRCGITRAGNSRVRHKLIEGAWTYRLPARPGARKLYILQEQPAEVQDIAWKAQSRLTARYRKLSQRGKKSTVVTTAIAREMAAFMWDIARRTMPAC

SEQ ID NO: 451571 - protein, 355 aa, unidentified
MQKYKISFKGQNIYVGIDVHLKTWHVTTLTESGCKFSFAQHSDAKELFDRLNKKFPEAHFKSAYEAGFCGFSAHYALSEQGFENIVVNAGDIPTTGKEKVMKTDAVDSEKIAWALKRGQLTGIYIKDKSFMDDTNLMRLRQRFIKDLSRQKNRLKHLLYTQGVVYPKRFTKSGTHWSCNFMKWLREEVVLLSEEKRALMLLCDHVEDTRKAVLKVTREIRRLSKDERYKANFGLLTSVPGFGLITSMSLLTELDNNPTRFPNERKFVAILGLIPTCHDSGEKKVSGEKTFRGNKHLGSLIVEASWIAIQKDYQLGAYYTNCCQRMKPQMAIIKVARRLACRAYAVMKTKKAYVLQ

SEQ ID NO: 451572 - protein, 419 aa, unidentified
MKSIQSKKAKVINKDTLIVTVDISKVTNVGYCRCPNGIDVKPFSFMNNAQGFNTFWNRIMKTKNTHDLKDIVVGFEPTGPYGEPLTHFMKKKKAKLIQINPMHTKRVKELEGNSPNKTDQKDPKVIADIIELGHALTVVQPEGPAAELRKLTHARERAMQRRTAIFNQLQDLVFVIFPEFSQVFKNVKTKSARFILENCPTPEDIIKYKLKNLTITLRKVSRGQLGEERARELYAAAKTSIGVREGRQSILFEIKEILSIIETTEYFVTGIEKEMSHHLKDIPYSRFILSIKGIGEVTVAGLIGEVGDFREYKTISEILKFSGLDLFEISSGRHNGQRRISKRGRSLMRKLLFFAAINVVHKGGIMHEYYQGCLARGMLKMKALIAVSRKLLGLILALVRNHCEYIEDYAVKQELKKAA

SEQ ID NO: 451573 - protein, 426 aa, unidentified
MHRGYPAKEMVKVAIRSPGEKPWTRKTEVLEFRTFYGVLQAMGRELRRRGVTHVVMEASGVYTDPVYYALAEQDFTEVAVINPAHAKALKGHKTDARDCARLAELFECGLLRGSYIPAPELKEVRDLTRYRTKTVQARTSEIQRLGKALESAGIKLGSVASDITGKSATAMIEALIDGERRGQVLADLAIGRMRTAGKLADLSQALAGRFTGHHALLCRLHRDRIAVFGAAVDDLDERIAGKAALWQRQAGLLKTVPGFGDIVAWAWLGEIGPAPHRYFPDHEKLASWVTLCPGNNISARKRKHGRTGDAGTYIKPMLIQAAWAAIKGRGRLQARYNRLVRRFGGNKNPGAKKKAITAIAHTLLKIAYQVLKSGTPYQEPGADFCTRRESPAQRQAFLERQLQNLHPGCTITITISPPEAALPAGA

SEQ ID NO: 451574 - protein, 415 aa, unidentified
MKVVFPTCCGVDVHKTFVVATIITTPADSLQPHYQKKRFSTFNSDLNHFADWLLEHNCLDVCMESTGKYWVPVFNILEKRGIRIVIANPKWVKAVKGNKDDTKDSKWIGDLFRIGLVKSSFIPELNIRILREFLRYRYKLVSMKSSEKNRFQNAFTVCNVALDSVVSDMFGKSATAITDYLTSDESFDLDHCVSLLQHSLKKKAEKVLESIEGYSISDEQKARIKIIREHYDFVEKLIAKVDTCVNEMVEKYEGEIDLLCTIPGIDRNSAITIISEIGADMSQFGSSKRLCCWAGLTPGNNESAGKKKSVRISRAGVYLKPALVQVAHAAVKDKANPYYALKYERIAKRRGKKRAIIAIARMILTAIYKMLCTGEVWNPVDLFKIDMPEHLKEQQLAKAIKQATRFLEKQGLTVA

SEQ ID NO: 451575 - protein, 340 aa, unidentified
MKLYCGVDLHSNNGVFGIIDENNKRVFKKRLKNDLNLILTTLAPFKDNLASVAVESTYNWYWLVDGLMAHGYPVHLANPAAIKQYDGVKDADDDTDAMFLAELQRLGVLKTGYIYPKEERPVRDLSRRRILLVQHQTSIILSIESLLCRETGRQFGWRQICRLMEEEELPDLLHHDETLLFTARQEMGLVRYLTQKIELFENEIVGRLELRPDFELLLTMPGVGKVLGLTIMLETGEINRFPKVGNYTSYCRGARACHTSNGKKKADNNRKNGSRYLSWAYVEAVHHAIRCCEPARRWHQAKEARTNGAVATKALASKWSKAGYYILTRQEPFQLERVFG

SEQ ID NO: 451576 - protein, 344 aa, unidentified
MTNIQHKETVHEAKPDLFAGIDVGAEELILVIRKNGKPFDPQKFANTPADRTRLVKKLVKLPGIIVCLEATGVYHFDLSLALHDAGVLLMVVNPKAAHNFAKVLMKNSKTDVVDANTLAEYAARMDFVAWTRPSDESIALRSFARRINALTGQKAAAKNHLHALTATSETPKAVIKDAKLAITQLEKRIDRLTAEALIMIGKHPELTRILQLLVGIKGIGNTSAIALMGELLLLPPELSHREWVKFAGLDPRAFDSGKSVHKKTRISKAGNRHIRSALYMPALSAKQHDPHVKAYFQHLVANGKKPLQAVCAVMRKLLHAIHGMLKNNEPFDNTRFYAIPASSE

SEQ ID NO: 451577 - protein, 346 aa, unidentified
MNSMNYVGLDIHKKSISCCVRQADGTIIQEGTIPATRDALDNWMRQLPQPCMAGMEATLFTGWIYDHLVSGGTMVKVAHPAMLQAIAAGKKKNDRVDARKIADLLRCDYFPECHMAPREIRDRRRVLRYRNLLVRQAVQMKNKVSGLLMEAGVPYNQQKVHQKRYFAELLQKQKKEMPPSMPELLRLSRSTVETLTGMQRQLIQALERDALLAARVERLASIPGVGRVVALTWALEMGDIRRFASVKRAVSYCGLCGAEKSSGGKTERTPISKQRNKHLQTMLIEAAKLAPRWSTELALVYEREKQRGNRNRATLAVARKLVAYLMAVDREERPFDTQLGVAGNAA

SEQ ID NO: 451578 - protein, 327 aa, unidentified
MATHTNMKTQNNQNLKNIFIGIDISKKELEIHSYEDALKLPSATPNTKTGINKIIKKLAKNEHIHCIFEATGGYEKLLLSMLQSKGIKASRITPSLARNFAKAQGILSKTDSIDAKVLTDYGYKLNPRETAPVDPVIEEINALVKYRRHLNDELLRERQQLEHTPPKSIETMVKSRIKTLTQQIEKITKMMIELKAKSPELNDAVELLTTTKGVGDNSALSLLAAMPELGKLSNNQASSLAGLAPFNRDSGKYRGRRMIYGGRKDIRHALYMAALVASRYNPILKEFYQRLLAKGKPKKLALIAVMRKLLSYLNLLMKRHLQEIEAK

SEQ ID NO: 451579 - protein, 342 aa, unidentified
MEHYAGIDVSLERSSVCVVEASGRIVREAKVLSEPEALVAFLGQLGVPLTRIGLEAGPLSQWLHAGLTAAGFEAVLLETRHVKAALSAMIVKTDRKDARGIAQLLRMGWFRPVHRKSPDAQEVRVLLVGRKLLQAKLRDVELSIRGLLRGFGLKVGEVSKGRFAARIKELVAGHAMLETVIGAMLQARDGLQIEFMRLHRRMLAIVRGDAVCRRLMTVPGVGALVAVTFKTAVDDPGRFRTAKAVGAHFGLTPKKYQSGETDVTGGISKVGDAMVRTALYEAANVMLTRTSRVSALKRWAMEVARRRGMKRAKVALARKLAGVLQRMWANATDFRWGKEVMA

SEQ ID NO: 451580 - protein, 356 aa, unidentified
MYGLKHQKEKRSMDYFAGLDVSVKETSVCIVDDTGKIVREVKVASEPAALLAVLNNPAYHFKRIGLEAGPLSQWLYSALAEAELPVVCVETRHMQAVLKAQINKTDRNDARGIAQMMRVGLYRPVHVKTLRSQKLRMLLTHRKLLQSKAIAIENDLRGTLRNFGLKVGIVSKSKFEARIKELVENLPDLAILVEPLLIVRRALREQIVILHRRLLAIVRDDAVCRRLMTTPGVGPVVALTYRATVDVPARFRKSKAVGAVFGLTCSKYQSGEIDRSGRISRCGDEMMRVMLYEAAQSMLRSKKWSWLKAWAMQIARRRGMKKAIVALARRLAVIMHRIWVDGTEFRWTREQAAAAA

SEQ ID NO: 451581 - protein, 349 aa, unidentified
MNYRVYCGVDFHARQQTISCLTTEDGVVSTHELKHQNKAELKAFYAQLARPVLVGLEASGYSPWFEQMLEELGHEVWLGNASEIRRRARRRQKNDRRDAELILDLLIHDEFPRIHRPAIKSREILRMLRYRHKLVQMRTIIKNSLHALSIQSGLSLRARLFTGAGLEQLQSLTMSPVMQYQRDQWLAALKSLNQQIVAATNWLSQQAAGDECVQRLRTHPGIGLLTGLALVHTLEPVTRFRNQRKVAAYVGFDPQERSSGEKKKYLGISKAGSRVLRYLLVEAAHTAIKGDPELKRFYLRLQHRHGKAKAKVATARKLLIRSYILLRDQIDYAEFSRRAVAARLARLAS

SEQ ID NO: 451582 - protein, 350 aa, unidentified
MDKELYIGVDVSKQTLDLAYYDGESIDWKKAHIKVSNNNAGFKKIGLWVAKVSKGVDIVLFCMEYTGLYAQNFRLWLEEKHYIYRMVEPRKMHRFEPDLDDGLRSLDRIKTDELDSFRIAIYCEQNHRKILRNPSKLPPPVYFKLKRLLAERKQTVKQSVLYKQQLHDICAYDTDLSVERKNGQLKMLNDALKGIDNEIDMYIKEDADISKNFSLLTSIPGIGRVVALETIVLTENFMAIDNPRKYACYIGVAPFKKESGTSVRKGSSVSKKGFKQAKADLSIACLVCMQHIPNIRDYWERKRKEKCSGIVFNAIKFKMILRMFAVIKRGTPYVETDNYRNGKNKQPGVN

SEQ ID NO: 451583 - protein, 334 aa, unidentified
MTREYIGIDLHKAFFQACAVTQTGERCWEGRFARTAEGITRFTARGVGPDQAIAVEASGPTWAFVEALRPTGAPVCVVDPRKTKLKAGFAAKTDRLDARRLADALRRESVVSIYIPPPAIRALREVCRGRHQLVRLRTRLAQMIRSLLLRHDAGEPPGRRLFAPRALAWLAQVQLPPEAARSLRRLERLYRAVHADAQVADGEVKERAAGDPIARALDGLTGIGPVLALTLRAEIGDIARFGRGPALASYAGLVPRVDRSADRVYHGRITREGSPWLRWALVEAAMHAMKRTDATGRWARRLAVRKGATKARVALARVLCDDVVALWPRPDRSV

SEQ ID NO: 451584 - protein, 338 aa, unidentified
MLYVGLDIHKRYVVAIAVNEAGVTQSEARLDNEKEALEQYIGSLPDRAKVALEATFGWSFVYDALEEHADCIVLSHPKRTKAVASAKIKTDRIDATALAQLLRMDYLPTAYAPPREVRDLRDLLRHRATLVRVRTAAKNRIHSVLARYGIRHPFSDLFGKAGRAFLSQLELRPFHGLVVEDNLLLIDMVNESVKRVSKQIHLLSKQDERVEWLESMPGVGYYSALLILAEIGDIARFPTAKQLCSYAGLVPSVHASGDHTRYGRITKEGSSWLRWIMVEAAQQATRKPGRLSRFYERVARKHGRKPARVALARQMLSIIHHLLTHCEHYEDPTATSRA

SEQ ID NO: 451585 - protein, 370 aa, unidentified
MENRSMFVGLDVHKETIDVSIAEGHRNGEVRHYGVIASDLEPLDKVVRALRAPNRRLHFVYEAGPCGFGIYRHLTKRGEACVVVSPSMVPKRSGDRVKTDRRDSLALARLHRAGELRPIYVPDDADEAMRDLVRAREDAVVGGTQAKYRLKAFLLRQGRRYPGREGWTLPYRRWLTDLSFPTAPQHITLQEYRDTIDETERRIERVTEQLRQLAPTWRWAPVVAALQALRGVSFITAVALVAELGDLTRFAHPRELMAYLGLVPSEYSSGPSVRRGGITKAGNPHVRRLLAEAAWAYQGIPRIGRQHAYRQEALPKVVCDIAWKAQLRLTARFRRLVARGKAKPKVATAIARELTGFIWAIAQEVAPAPR

SEQ ID NO: 451586 - protein, 429 aa, unidentified
MPPHRASSEEAVTEYSPETLPAVPPGGVRCGIDRADDDHAVCVVDLAGKVVQRFIAGHTGEGLAALVRRLRRAGAGEVAIERPDGKVVDTLLEAGLTVVVISPGQLKNLRGRYGSAGNKDDRFDAFVLAGTLRTDRARLRPLLPDSPATVTLRQACRARKDLAGHRVAVCNQLRARLKIAFPGAVGLFRDLDSPISLAFLARFDCQDRADRLSPRRLAAWLKSQGYSGRKDPAERHARLAAAPRGATGDDGAAKAHITRALPAVLASLVAQVKALQAQIAGQLALHADAHIFTSLPKAGTVRAARLLAETGDCRARFPTPEALICLAGVAPSTRKPGKVTHVDFRWAAGKQLRDAVCDFAGDSRHASPWAAQLYNDAIARGKDHPHATRILARAWLYVIWHCRQHHTAYDPARHKALQRILAEEKPSAA

SEQ ID NO: 451587 - protein, 362 aa, unidentified
MTDPRTVIAGLDVHKASIRLAAVRAGELVDERTLVHDHGAVVAVLSRWPGVRVCQEAGPTGFGLHRALVEAGIDSVVVAPGLVPSRPGDRVKTDRRDARRLAGLHAAGLLTEVFVPSVEHEALRDLVRAREDARLDRMRARHRLAKFLLRHDRRMPTSCWGPTRRAWLGRQAFDLLGEQHAFDDYLLAVDLVDRRIEALERAIGELAADGEHSALIARLRCMRGIDTLTAVGVVAEAGDFTRFKTAEQFMSFCGLVPSERSSGQTRRQGSITKAGSAHARRLLIEAAWNGRRRPTVSYELERRQAGQDPAAIERAWRCQQRLHRRWQRMAGRGKPHPKTVVACARELAGFVWAIATEQPLRG

SEQ ID NO: 451588 - protein, 405 aa, unidentified
MRYYLGVDWADQTHAVWVVDESGTKIAARAVSHTAEGLGEWGRELDEWRAQGIDLWAAIERPDGRVVDFLLDHGVVVYPVNPKALDRARDRFRQSGAKSDPFDARVLADFLRTDHAHLRALQPSSEAAQELKLLTEDCQRHIRQQTRLVNQLTATLKAYYPRALEVAEVTSALAREFLPAYPTPEALTALTERQWQRWARAHRLPEARAGELWAVLRPPQLPVPAHVVRAKARLMQTLMEQLRPVVAAVAQYRKAIDDFFARMPAAQWARTLPIGTHGITAPTLWARLGDAPGRWESFRHLQAHAGTVPVTKRSGKQQRVVQFRFACDKALRYVVDQVAYLSLLSSAWARPYYDQQRARGHSHRQALRALGAKWLKIIFIMWQRQVPYDEQYHLATMTRQQLGRR

SEQ ID NO: 451589 - protein, 324 aa, unidentified
MIVRTTEAGEVLEAVRIVNDVQRLASVMARAGDCPEVVLEATYGWYWAVDALQAGGASVHLAHPLGVKAFEYRRVKNDFRDAQDLADLLRMGRLPEAWIAPPPTRELRELVRHRAKLVGLRSRCKAEVHAVLAKCGVQVVMSDLFGVWGTELLDGLELPAPYAARIASLRRLMDDLDFEINVFAGIIRGRMAHEPGYTAVQKIPGIGPTLGAVLVAEIGDITRFASASKLTCWAGLTPKHHESDTHVRRGRITKQGSRLVRWAAIESVKTVSKASEVGVLRERVADRRGRNIGSVAAARRQLELVFYALRDGHVRALEHLPRVA

SEQ ID NO: 451590 - protein, 344 aa, unidentified
MNISRIGIDLAKNVFQLHGVDRHGKAVWKRRLKRDQWLKAVSNQADPGCCEIGMEACAGAHHWARELESRGYIVKLIAPQFVKPYVKSNKNDANDAEAICEAMSRPHMRFVTVKSIEQQDIQATHRVRSELMSQRTAKANQIRGLVAEYGLVAAQTMCALRAAIPCWLEDAENGLTDHFRSLLHGVWTDLVALDDRVHELDRGIQKLANSNEVTQRLQQLRGVGPLVATALVATVGDARQYHRSRQMAAAIGLTPRQHSSGGRDRLLGISKRGDVYLRSMLIHGARAVVSQAKHRDDRLSRWVIGIAQRRHPNVAAVALANKTARMAWAMLRNETDYDPDFAMS

SEQ ID NO: 451591 - protein, 474 aa, unidentified
MRKFLECCAGIDIGKREITVTILTGSAEIEPVQQTRTFGTTVQELSRCLEWLLVSHCSTVVMESTGTYWVPVWNVLHEQIAVIVANPEHVKARRGEKTDPEDSRRLAERLRVGDVRGSFVPSAQIVELRDLTRRRKRLLSAANSERNRIQKLLEQANVKIGNVVSDVFGVSGQRILQALLQHPQLPPADLAELAKGRLRHKQQALIETLQGHRLNDHVRWMIQHSLDHLVFLENQLTELSQRTLQKLQPFEREYELLQTIPGIAGETAAVILAETGGNMAQFPSPKHLTSWAGVCPGNNRSAGKQKSASIKRANKWLLAALVQSAWATVRQRGSIFKKRFYRQMQHRGRKRALIAAARSLLAVVWQVLQRMTPYDEPSNEIFQERERGKKIQHHLRRLQQLGRSGTSSADPVRPAPSPDKPTPLRSTRHPCPLKPYSVFKDQPRPIVLPRGIFEAKNYGSLVGPVGVEPTKGCS

SEQ ID NO: 451592 - protein, 352 aa, unidentified
MRHFGLDVHKRQTTFYWMDDETGEVSRCHTVPSAELVAHLASIPGPKQLVLECRTSSRFLAARLSSLPEAQVLVLDAYKAKRTLQAWHPGRKTDKLDAKGLARLSYEGAARGLAVWVPDAETRDWRALTRTRQVLVEQAAALQNQVRSFLQAEGLQCTSSSLLSGKGARELAERAAQLSPLGQQCLASLRAQIADLKTQVAGLHRQLRQRVEADPRCALLRTIPGCGLVLAAMIVAEIGERSRFESAQQLRSYAGLTPSISQSGERSYTGPLTRGNPHLKYALVLLAQHFSWDHRFRESRYCGSYYRCLHQYGPQPAKVALARHLCDVIYALLRDQTVYRASRPAPPGGAAG

SEQ ID NO: 451593 - protein, 354 aa, unidentified
MPTEAQQSLYAGLDLHKRNVFCGIIDQAGKPIYRRRLPAELALILSALEAYQPQLKAIAVESTFNWYWLADACQREGLTFVLAHALYLKAIHGGKNKNDRIDSEKIAHLLRSNLIPPAYVYPAAQRPLRALLRQRLYFVWRRAELLARIQSHQLAHNRIPVKQTRRTRDPWETQLLAAEDHPLRQLALKNDLAMIKHFDHQIAQLEEELQRQAKRSAAREYALLQTVPGIGENLGMTILCEIGDIARFPTVKDFLSYCRLVKGTVASAGKIKGLRGAKLGNPYLRWSFGEAAVIAKRDHHLIGPLAQRLEARMNGNKFKANTVVAIKLARAVYFMLKSHTVFDPDRLVAALSRN

SEQ ID NO: 451594 - protein, 407 aa, unidentified
MVVHVAAVVSSAGVVVAVDVGKSSFAVSVTDGSRRRLFGPVDAPMTAPGVRDVVARISGVLPDDPVVVKVGVEAAGHYHWPLLTATAWPQHWEVLELNPAHVTEQRRVQGRRRVKTDAVDLEAITELVLTGRGVPIGARGIATGELAAWCRHRARRVATRTATKNQLLGQLDRSFPGLTLALPDVLGTKVGRLVAAEFADPARLAALGTSRFVRFAAARDVQVTRSRAQRLVAAARDALPLPGAPVARRVLDEDLALLADLDTQISGADAELARLLPATAFATLPTVPGWGVTRAAKYGAAVGDPVRWPGPRQLYRAAGLSPAQYESAGRRRDGGISREGSVELRRALIDLGIGLWHCDPPSRAYAAGLRARGKHGRIIACALAHRANRIAFALVRDHTGYNPGRWA

SEQ ID NO: 451595 - protein, 406 aa, unidentified
MYFVGIDIGKRHHDASVMDEQGEGRLHLTFANTSAGLERLLERLAKLAPLGPAHFRFALESTAHYWMGIHHALEVRGFSVAVVNPLRSSAARNLYLRKAKTDPRDSFLIADLLRMNRVGESQVPSEETLRLQQLSRLRFSLVDSLTSLKLRTIALLDRIFPEYEGCFPDVFCDASTALLRRYPTPGHIARARLSTLVELLRKQSRGQIGQPTAEALQAHARTSLGTTLALDTLVFELHLLLAQVEFDKQQIKQISDAIARIMKERKPVIMTIPGIGPVLGAAILGEIGDVSRFRGPKKLVAFAGLDATVCQSGQYESTRRRLSKRGSPRLRRAIWLAAVNAIRRDPQLGKMYHTQLARGKHALVAVGAVARKLTHLIYYLCLHNRPYDPGYWEQSQRAPSPEYAVA

SEQ ID NO: 451596 - protein, 376 aa, unidentified
MREKLRFLGLDVHAETIAVAVAEPDGEVRSLGTITNREDSIRKLIKKLGPVEQLRACYEAGPTGFVLYWQLTQLGVECAVVAPTLVPKKAGDRVKTDRRDALKLARSHRSDDLTAVWVPDEGSEALRDLVRAREAAKQDQLRARHRLTKFLLRTGQRPPLGLKAWTEKYVEWIQQVHYTHPAREATLLDCLNEVQHMEQRIKRLEQSILEVVKLAPAPVQAVIQGLQALRGVAHISAVTIAAELGNISSRFESARKLMGYSGVFPSEDSSGERIRRGGITKAGNAHLRRIVVESAWSYRHRPSIGARLRKRQEGVPAQITEIAWKAQNRLHKRYMKLMAAGKDQRKVMTAVGRELMGFIWAIGVKAEAACMQQKAA

SEQ ID NO: 451597 - protein, 372 aa, unidentified
MDQHNRLFVGLDVSKLKISVAVADGERGGEVRFYGDIASDPNSVTNIVEKLAKRGAVLHFCYEAGPTGYELYRQLTGMGHDCVVVAPSLIPKRPGDRVKTNRRDAVSLARLHRAGELTAVWVPDRGHEAMRDLVRAREAAQEAQKRARQQLQSFLLRHGRIYSGRSSWSLAHMRWISTLKFEHPAHFIVLKEYCQAIEDAEVRLKRLTDLISETVKSWTMAPVVEAYQALRGVSLIAAVVFVAEIGDIRRFENPRQLMAFLGLVPSESSTGEHVKRGGITKAGNSRARRMLVEGAWAYRFPARVSRTKQAQLEGLPRTVREIAWKGQLRLCSRYRKMILAGKHKAIAITAIAREMGAFLWAIGQEVQPADHA

SEQ ID NO: 451598 - protein, 355 aa, unidentified
MLYLGIDQHARQLTISLRNDEGDVLQARQVSTEPEKLNAFFEHLTRERLGSGETFVAVLEVCGFNDWLIRMLRDYRCHKVILIQPDERKKQKTDRRDAAALSELLWVNRQRLLAGKPVRGLRQVDISSTTDQENRRLTTLRKDAGRARTRLINQIKHIIRRHNLQWEMPTKTFPTQAAIAWLKKLVLPEIDRLEMNNLIIDLELVQQRMRELEEILAQRCGTSEAATLLVSMPGIGYYSGTALACWVGRVERFPRSRSLANYWGLTPGCRNSGERNQRLGSITKAGSSMARWLLAQVAYQALKKDKKLREWYKRIKRRRGSSIARVAVMRKLATIIWHMLTKKKTYAECRDFATD

SEQ ID NO: 451599 - protein, 414 aa, unidentified
MTFKVVRFICGGMDVHKNLIVATIGTTDRQTLITEYIQQSFSTFYSDLIRLKEWFISHDCYDVCMESTGKYWIPIYNVLETELNICLTHPKYVKAIKGKKTDKRDSKWICDLYKCDLVKHSFIPKKEIREMREIARYRCKLVYMRSSERNRYQNCLTVSNISLASAVSDPFGKTATNTMKKLMQSEVIEDNKILKLIHKNCKDKILDSLQGYHIESDQRFKMDTVMNHIEYLDKQIQACEAELIKRAYPLRDYFQHITHIKGISALSAILIVSEIGTDMNQFESDKQLVNWAGLSPANNESANKKKSVRISKAGQYLKPLLVQCALSSIKDKNSYFGIKYCRIKKRRGHKKAIIAIARMMLVCIYHMILTGEEFNPCDYESLTNPKPKKEPIMTVESALQFLKDSNFDFSSIQL

SEQ ID NO: 451600 - protein, 415 aa, unidentified
MFTIVYPVCCGIDVHKSFVVACIAATNDKGLTTYKRHRFSTFTGDLRLLSEWLAQNRCKDVCLESTGKYWHPVFNVLEQTCNVVLAHPKYVRTIRGKKTDKRDAKWIADLFKHGLVTPSFIPPFKIRQLRDLMRYRVKLTNCCTGEKNRAQNCLTVSNIKLDDVFADVFGKSASAITAQLLLNPDGNFDVTKFIDGRCKAKPDVVQAAIDGFMCAEQIEKLKIIRSHMSSIEECKARLESLIRSLSEQFQPQIELVLTVPGIQIFSAIAIISEISADMSVFPSAKHLCSWAGLVPQNNESAGKKKTTRITHAGAFLKPLLVQCALTVCQSDKHPEIKNRYLALKKRRGHKKAIIAICRMLLTAIYAILKKSEAYNPNLYRKEVSVPNNRALTMEQVIAFAKRRGFIVIDPDGVVA

SEQ ID NO: 451601 - protein, 383 aa, unidentified
MENKKAASSVKKGSVEWGLNNNHSNNHGGAAMAKYNIGVDYHKKFSYLVVKDKAGQVLRSGQVNNSKASVEKFLGPFREDSAAVLESCRNWCVMHDWLEEIVDEVILANPFKVRAIAEAKIKTDKIDATVLADLLRADLVPQSYIATREVRDLRSLLRERMFFVRIRTMAKNRITTIFDRYPEEVRQLKAQTDLFGKSGRLQLEAIELRLPDRALIDRELNFIDLVNVFIKEIEEVIGDNFEENESAKFLKSIPGIGQFFAMLIDAEIGDVTRFRDSKKLASYIGIVPSTYSSGGKTVNGRITRQGNKLLRWAFIEAVLPAIRSNEELRFEYDELRKRMNYNKAKVAMARKIMNIAFKCLKDKRSFRKLNKIELERKKFRGAS

SEQ ID NO: 451602 - protein, 425 aa, unidentified
MGVLYPVCAGIDVHRDTLVVTVSRAVERRARSETRTFGAVTEEVRALVAWLDEQEVPIVAMESTGVYWKPVYRAIRTLSPTRTVWLVNPAHIKAVPGRKTDVKDSAWIAKLLMHGLLAPSFVPEVALLELRDLTRYRKKRVGEQASERNRVIKLLEASNVRLASVASDPLGKSGRAIIEALLAGDKTPEQIAETEGRRLPASKRDITRAVEGVLGDATRLLLRQMLAHIDQVDATIELLDARIAELLRPMSDACALVTEIPGINATTVAGVLAEIGTDMSVFPSADHLVSWGGLAPGSHESAGKRKPVATRRGSHWLRVFLVQAAWAATHAKGTFWKRTLERLRARGSDPSRRSSPSPARCSWRSTTCSRTGPRIANSAPTTCPPTSPSDARRNSYISSRHSASTYSSRPPPSRQPERRFQSRKS

SEQ ID NO: 451603 - protein, 390 aa, unidentified
MYIVGVDIGKNNHEATIIDDTGSIIGKSIKFANSHSGGNKLIEHIKKYTGNSKVIFGLEATGHYWLSLYSFLLTKGYEINVINPIQSDSFRNLYIRKTKNDTKDSFIIAEVIRFGKFTNTKLCDDKLLALRQLCRYKLSLTTEISELKCRIITVLDQIFPEYDKLFSDIWGASSKAVLEKCQTPEGILELDINDLTKLLKTKSKGRLGFNKADEIQNAAKNTFGIKIAKKAFKFQIKQLISQILFLEKQMKSLDSEIEFYYSKFDCHLTTIPGIGSVTAAIILSEIGDIKRFKNSSSLVAYAGIDPTVKQSGQFLSNNNKMSKRGSPYLRRALFLSASTCVLHDSPLNEYYNKKRSEGKHHLVAIGATANKLTRIVFAVMRDNKDYVPIN

SEQ ID NO: 451604 - protein, 370 aa, unidentified
MKKLNKYVGLDVHKDTTVIAVAEAGREGEVRLYGTISSDLHALENALRKLGGEGVTLHVVYEAGPTGYVLYRRLQQLKIACIVVAPSKTPQAPGPRQKTDRRDAEQLARLHRAGELTAIHVPDAVDESVRDLTRARADAVHDLTRAKQRLKSFLLRQGYRYAGKSNWSAPHQRYLRELVLPLPALKSVLEEYLLAIDQAVQRVARLDELIAAQVPAWRMYPAVQALMCLRGFQLNAAAVLVAELGDVRRFTHPRQVMAFLGLVPHEHTTGTSRKLGGITKAGNAHARWILTEVVQHAFLVPKVSSHLSVRQQGQPAAYRELSWKVQTRLYKRSRHLLGRGVMKAKVTVALARELSGFVWDLLRQVPAPQA

SEQ ID NO: 451605 - protein, 351 aa, unidentified
MNINHYIGFDVHKKTISYCVKAADGKILEEGKLRATREVLRGWAQKRSQAWHGAMEATLFSAWIYDTLEPFAAELQMGNPSMMKAIGAAKKKNDQLDARKIADLVRCNLLPACYVASPEMRDLRRLLRYRNLVVGQAVQMKNRMSGLLMEVGAEYSKQRLHGAKYFSELLDQLEEVPESVKELLRLSRGALETFEATQRQLLQRLQKEALLAKRVKLLRSIDGVGEVTALTWALEICDARRFPSIGDAVSYCGLTSALNASADQQKRGPISKQRNAHLQTVLIEAAKLAPRWNRQLAEVHKREIEHGDNCNRATLTVARKLVAYLLAVDKSGQPFVVRTPAEKPVEVAAMA

SEQ ID NO: 451606 - protein, 362 aa, unidentified
MHNHRTLVGLDVHAKATIAAGLELDTGELRFRRINGPPRSAVNYLEELPGPVMATYEAGPVGYGLAREAAARRIEVRVCAPGSIPRKPGERIKTDRRDAERLVRSLLAGELSFVRVPTVEEEQFRDLARCREAARADLMRARHRLSKFLLRREIEFPGPGASWSVAHWQWLRSIDLADHPSRSVLNDYLAAVLALEQRRDGLDAQIEIAAPRSPWALTIANLRCLRGINTVTAYGLCCEVGAFHRFEHPATLTAYLGIVPSEHSSGEQVKRGPITKAGSPHARRLLVEAAHHYRHKPAIYKDLARRQRGQDPRACAIGWRCQQRLHRQWQRLRLERGKPGNVVVIALARELANFVWEVGQLN

SEQ ID NO: 451607 - protein, 365 aa, unidentified
MASVSHLAPTHLGLDVHKDTISVAILAHDRDGPDVERITHDEASIRRLVGRFPEPRLLRACYEAGPTGYELARLLASMHVRCEVIAPSLIPKAPGDRVKTDRRDCRRLARLHRAGELVAIRIPTIQEEAVRDLCRARADMVEDRTRARHRLGKFLLRHGRVWRGGNAWTLTHERWLLAQRFAEPALAATYAHYRAVLDARDAQLEAIQADLAVWYDRAPFAEAVHRLSAYRGITQLGALTLASEVCDWRRFPKAAAFGGFCGLVPSEYSSGGSTRRGHITKCGNEHLRTQLVESAWAYQHRPAVGADLRSRQQGLDPQVVARAWAAQLRLCGRFGRLAARKDSKNVVVTAIARELAGFLWAEMVA

SEQ ID NO: 451608 - protein, 355 aa, unidentified
MESTKYVGLDVHQEATTIAVMNSAGKLIMESIVETKAITIRQFIQGLHGDLHVTFEEGTWAAWLYDLLKPYVTKVIVCDPRKNILLKVGNKSDRIDPKKLAELLRNGALSEVYHGENGVRTLKELARSYLTISKDLGRVMNRVKALYRSWAIPCAGTQVYALCHRSEWLSKITEAGVRRRAEHYYQQLDALQTLRREVRKDLLLESRKHNATKLLRQIPCIGPIRAAQLVALMQTPHRFRTKRQLWTYSGLGLETRDSAQYCYVEGQLQRSKKPQQLRGLNSNHNHDLKNIFKGAATMASVSAGPFHDFYQALLTKGMRPTMARLTLARKIAAITLIVWKKGVRFDPQHLKQQAA

SEQ ID NO: 451609 - protein, 417 aa, unidentified
MSNPLLVGVDVHRKTNTVCLMDGQGQEVAPRFTVENNRPGTEDFVRQVAAAVAAGDYDAIHIAAEATGLYWWHFFQTLAQDPFLNQWPVELYPLNPRLTANFKKTYIDLDKTDPIDAFVIADRLRLGRDLPAPFRYEERYFPLRCLTRYRFHVVHNLAREKAYCLAIIYLKASEYTRQDKRPFSNIFGAASRAILQEFASIEEIAAIPFDELVEFIDLKGKRRFPDPTENARKLKLVAQDSYPLPETLARPVNLILRMSLKHISFLERQEKRLASAIAERMETIPHTLDTIPGFGPVFSGGIIAEIGNLARFDYHQAKVAKYAGFKWRKIGSADFEAEETRLTRTGNRYLRYYFCEAANQVRMRDPEYAAYYERKYREVRKHQHKRAIVLTARKLVRLVVRLLTTNQPYRPRRRWQR

SEQ ID NO: 451610 - protein, 355 aa, unidentified
MNHIAIDLGSRESQICIRDSTGVILDEERRPTTGLGKYLAGKEKSRVVLESCAEAFVVADAARAAGHEVVVVPALLVRQLGVGDRGLKNDVRDAQQLSNVSCRLQELPSVHIPSTLSRERKVMCNMREAQIEARTKLINTGRSWLRAQGIGVLRGGNREAFPWKFRQHVVNKRKTVPEEVERLLKALEALNLGIEEADKELAEEAEKDAVCKLLMTAPGVGPVTSMRYAAAVDDVTRFRSAHGVESSLGVVPGENSTGESRKRRMTGITKAGPPRVRWALTQAAWVALRFNKHDPMVEWAREVAKRRGKKCAAIALVRKLSGVLFAMWRDGKPYDPRHMRKAKEPASMVATPIVS

SEQ ID NO: 451611 - protein, 359 aa, unidentified
MNKNSTIFIGLDLGDKFSYIAVLDQDAEVIEETRLPTTRSAFKRKFSSFPPCRIAMEVGAQSRWVSHLLREFGSDVIVANARKLRAIYDNPRKGDRADAEILARLARLDPDLLSPIHHRSPQAQADLSVLRSRDALVRSRTLLINHVRGIVKSFGDRLPSCSANYFATKVAPSIPEPLQPALLPILDTIASLSQQIRTYDRQIEALCESKYPETKLLRNVSGVGPLTALAYTLTLEDAQRFPKSRAVGPAIGLVPKRDQSGDRDPQLRITKTGNTFLRRLLVSSAQYILGPFGPDCDLRRWGLRLAERGGKNAKKRAVVAVARKLAVLLHHLWKTGEVYDPFHISKLFEAKTASVPVTV

SEQ ID NO: 451612 - protein, 377 aa, unidentified
MHSENIAAYIGLDVHKETLAVAIAAPKRLGEVRYYGTINNEAQAVRRLFQKLQGLYGNILSCYEAGPCGFGLYHQLTAMNIKCQVIAPSRIPKSPTDRIKNDHRDAISLARLLRAGELTPVWIPDLTHEAMRDLIRARAAAKRDSRVARQRILSMLLRTDKRYAGKHWTGKHRTWLANQSFSQPSQQIAFQHYCQSLEQIEDRILQLDQEISRLLPEWSLCNLVCQLQALKGVGQLIAITLVAELGDFSRFSSPKQLMAFLGLVPGEYSSGNSIRPRGITKVGNSELRRLLYEAAWSYRTPAKVGAWLIYYRPDSVTQYSKDIAWKAQQRLCSRYRTLTAKGKKSQVAITAVARELTGFMWDIALAAQSSFSQQKQN

SEQ ID NO: 451613 - protein, 420 aa, unidentified
MNHPKMMYTYVGLDSHKESHTAVFLDCFFEKLGEVTFKNLPSHFDDFLKEAEGLKRNDTEFLFGLEDVSAYGRTLTTFLVEHDQKVKHVNALLVARERNNQNIIEKTDSIDAECAARVLLSKLDTLPDAKPQDEYIILRSLVVRRKFIVRNITALKNHLYCQITTHYPNYQDFFKNIDCNSSLAFLERYPSPESLKYTTIEELTAVIHEPSKGRVGARKAAEILDHVERNGFRPLAFQDMQDMAVQSTIRQLRFHMEELETVEISLAQFLSRFECTLTSMVGIDIVTAAGILSCIGDIKKFRTPAKLARYSGIAPVTHASGKKDLQFANQRGNKELHHLFHEVAHRLSMTVGSTNKVLNPFFFDYYQRKLSEGKTKRQALKCLERRLVNIVWTMLTYNEEYVNPPMYDLPKKKEIKKNHA

SEQ ID NO: 451614 - protein, 344 aa, unidentified
MKNTTIAVDVAKLVFEVAVSDTPGQVHERHRLSRARFQRLLAERPPATVLMEACGSAHHWARTAQAHGHRVVLVPPHVVRPYAPRNKTDRIDTKGLLEAFRNEDVRPVPVKSISQQALVALHRLRTTWLATRTARLNTVRGLLREFGVLIPTGAHHVVPHVQMLLGDADSALPGLLRPALAEAAQEIREIETRIRAVDRQLEHLAREHLVATQLQTIPGIGVLTATALVATVGDVARFASGRHFASYLGLTPREHSSALRRRLGAISKRGDPYLRMLLIHGARSVLSHAKLKTAPPLDRLRTWALQLERRRGPNRAAVALANKLARMVWAVWRHDTAYVGTSVV

SEQ ID NO: 451615 - protein, 322 aa, unidentified
MSLPGPLCVGIDVSKATLDIAASSAIEPFSATNDTDGFGSIIAELRKYSVALVLMEATGGLEAAVACALQAEGFELAVVNPRQARDFARAMGYLAKTDRIDARVLAQMAEVINRHPERSRFIRALPDAERQVLNAMVVRRRQLIAMLVAERNRLYLAPPQSRKSINTIIKALEDELARIDDDMNNHIRSHFKELSERLSSIKGVGAMTVAALLAEVPELGRLSRREISALVGVAPVNRDSGTMRGRRTIFGGRAGVRTALYMAALVATRYNPVIKAFYTRLVAAGKPKKVALVACMRKLLTILNAMLRKNEEWNESYHHVAP

SEQ ID NO: 451616 - protein, 344 aa, unidentified
MIRVSILGIDLGKNSCSVVGLDPTGRVVLRRRMRRESIVGLAAKLPGCVVAMEACCGAHHLGRQLAAQGHEVRLMSPEYVRPYVKAQKNDDRDAEAIAEAATRPTMRFVALKTEAQLDVQVLHRVRDRLVGQRTALMNQVRSILLERGIVVPQGRRKLLDALTALSAEPEGSGVGPRVRLLLDDMLDQWRSLDRRIAALDDEFAGMARNDPAARRLATIPGVGVLNATALVAAIGDGRTFSRGRDLSAWLGLVPRQATTGGKPKLLGITKRGSKYLRKLIIQGARAALPSLSRTATPLGGWLRDLLGRAHGNTVVVALASKLARIAWALLRDQTAFAYGGLVAA

SEQ ID NO: 451617 - protein, 344 aa, unidentified
MKNTTIAIDLAKSIFEVGVSDRPGHVVANHRLSRTEIVAFMAKQPNTTVVMEACSSAHYWGRTFQSFGHDVRLLPPLYVRPYVQRSKTDRADVKGMLEAWRNADIRPVPVKTESQQQLTALHRIRAGWMMTRTMRINSARGLLREFGIIFPLGAPALAGRVQELIEDADSALSMPLRQVLHELVLDIGELENRIDLIQRELEAIAVQTPVIERLLTIPGIGLLTATALVGFIGDVGRFPSGRHFAAYLGLTPSEHSSGLRRRLGRISKHGDVYLRTLLIHGARAVLVAAQRRPNPKGLHLWGLQLQRRIGNNKTAVAIANKMARIVWAVWKSGKPFQPHLQDVS

SEQ ID NO: 451618 - protein, 353 aa, unidentified
MTGTKYIGMDVHKESISIAVRNDSGKLVMECVIETKANVILDFIHGLRGELHVTFEEGTWATWLYDLLKPHVTKLVVCDPRQNSRQGNKNDRIDARELSDRLYMNKLSSVYHGGAGVRTLKELARSYLTISKDLARVMNRVKAIYRSWGIPCAGKQVYAPRHRAEWLAKITEVGVLRRAEFYYQQLDALRVLRQASRRELLAESKKHKASKLLCQIPSIGPIRAALLIALIQTPHRFRTKRPFWKYSGFAIEMHSSADYRSVKGELQRTRKQISVRGLNRDCNHDLKNLFKSAATIASVKPGPFQEFYAALVAKGMRPEMARLTLARKIATIVLIVWKRGVSFDAKYLKSQTA

SEQ ID NO: 451619 - protein, 425 aa, unidentified
MLAVGIDWSEEFHLVALGRPGEGVFDVGRVEHSPKAVDALCARIAALEPDPAEVRVVLESRHGLLVERLVDAGYVVVPVNPDLVARRRGPAKKKDDAEDARIACLLALDRFERLRPLIPHGELAGELRAIARDDERAARDERRLLNRLRQDLIATFPAALAIAGPDLGAPSFLRALERWPTAEALAQAPRAELVAFAREARHGWPERFAGKVAQALAAEHFQPRPYLVRAKADTIRLTAGQLLAIGGQRRAWERRMGELLLGAPRRGRAKQPREAERGQSFPGGEVYLSFPGLGDRLAARVAGEIGDHPEQFESPNALQCYCGRAPVTRRSGKSEFVVSCRLAYNRHLGDALQQWAFCSLRYSTWARAFYDEKRAKGKGHHAALRALGNRWLEVLWHCLHKGVPYNEAVHEANRNRALGRLPKAA

SEQ ID NO: 451620 - protein, 354 aa, unidentified
MSQTPNTAIAVIGIDIGKNSFHVVGHDARGAIVLRQKWSRGQVEARLANIPPCLIGMEACVGAHHLSRKLASLGHDARLMPAKYVRPYSKGQKNDFNDAEAIAEAVQRPTMKFVATKTAEQLDLQALHRVRERLVSQRTGIINQIRAFMLERGIAVRQGIGFLRTELPTILATRTDALSTRMLRVIEELAGDWRRLDQRIDGLSGEIEALARQDQACSRLMTVPGIGPIISSAMVAAIGTGDVFSKGRDFGAWLGLVPKQISTGDRTILGKISRRGNRYLRVLFVQAAWVVLVRIKNWERYGLKSWIEAAKRRLHHNVLAIALANKLARIAWAVLAKGRAFELTRTDDAGVRPA

SEQ ID NO: 451621 - protein, 345 aa, unidentified
MELMYYIGLDVHKRKISYCVKDASGKLHSEGSLPATRYDLDCWMKNLPQPWSAAMEATMFTGWIYDHLKPHAAALKVAHPLMLRAIAAAKKKNDRIDASKICDCLRCDFLPESYMAPMAIRERRRTLRYRNLLVRQMVQMKLKISQLLMEAGISYDRQRLHKAGYFRELLASNPDINDSLRLLLRQCREMVVRLSQTENALIRSLQQDRLLAERVERLMSIPAIGPITALTWALEIGEVQRFSSIKKAVSYCGLCGAEKSSGNTVQRTPLSKQRNKHLQTTLIEAAKMAPRYSPTLALLYDRENQKGNANRATLALARKLVAYLMAVDRGQTHFLVVDRETCAAA

SEQ ID NO: 451622 - protein, 408 aa, unidentified
MQVLYPRCAGLDVHKDSVVARIRCVSEPPHDEVRSFATTTSALLDLNEWLSAHQVTHVAMEATGVYWKPVWHLLEGDFELVLANAQHIRNVPGRKTDVNDATWIADLLAHGLIRSSFVPPAPIQELRDLTRTRKQLVREISQHSSRIQKILEDANLKLGSVLSDVLGKSGRAILRALIGGETNPEKLADLAQGTARKKRPELIEALHGRIRDHHRGLLKVHLDLVTALEQALANIDATVGKTLAPIHQSARLLTTLPGVSDITAQVMVAEIGVDMSRFPTAAHLISWAGLCPRSDESAGKRRSTRVRKGAPWLKVALVTAAWAAVRVKDSYLQAQFHRLRSRRGAKKAILAVAASMLTAAYHMLKSGVEYKDLGADHFTRRDRSKMIQRLVRRINDLGCQVQLIPQAA

SEQ ID NO: 451623 - protein, 412 aa, unidentified
MKDLLEISCGLDVHKEKIVACILTGPLGKPTRSEIREFTTLIPDMIALRDWIVSQNCHHVAMESTGIYWMPIYEILEDAFSGDITLLVVNARHMKNVPGKKTDMRDSEWISTLLRAGLLNGSFIPEKRIREFRDLNRYRKSVIRDITSQKNRIEKFLQSSGFRLSSFISDIFGASGRNIILHLMEHGQIDKTALDSCLKTKTRNRIDEILMSVNGTLSEHQKAFLRILMTHYDSLKKHLAEIETSLEEDMAPFALQVEQLNSIYGISTTASCAIIAEIGIDMKPFKTAEHICSWAGLCPGNNESAGKRKSTSVTKGNPYIKSMLCEIAWVIAGKRNTYLSAWYWRIKQKKGAKKAIVALARKLLVIIYTMLKQGTLFDESCFETRRKHCEQKQLSRYIRELEKHGYHVEAQS

SEQ ID NO: 451624 - protein, 346 aa, unidentified
MKIIGCDFHPSWQQVSWLDTETGESGEQKLVHAEGEAQQFYGALSAPVLIGMEATGNSQWFIELVEDLGHEIWIGDAAQIRASYVRKQKNDKRDAAHILKLLVEGRFPRLWAPDREQRDLRQLVLHRHKLVIIRTRVKNELQHLSLNKGMQRKRKLWSQEGMQLLRELRLKPWASCRREDLLGLLAMLDEQMGKLDHAVAQAAKENPQARLLMTQPGVGPNTALAFVLTMGDVRRFQRGKQVASYLGLIPREHSSGGRQKLGSITKQGNRMLRSLLVEAAQVAVRYDPEFRKQYLHRCHSKPKGVAKVAAARKLAVRLYWMLRTQTGYPEIVRIESSSRLPLVGAS

SEQ ID NO: 451625 - protein, 352 aa, unidentified
MSSQELFPNLTIGLDLGDKVSRTCEIDAAGKTVKTAAVATTPGAIERYFGERPPCRVVLEVSTHSPWVSRQLSSLGHEVVVANTGEIFSRRRRKRRNDKLDAEFLARQGRADVKLLYPIQHRGVEAQQDLALLRARDQLVQARTQLISHVRGAVKSLGARISKCDTDVFAKRAAAQLPEPLRPALAPLLEVIGDLTRRIRELDRQVERMQEKYPEAVHLQQPVGVGPLTALAYVLTVEDPKRFKHSRDVGPFFGLVPKLDDSSDSSPQLHITKAGDALVRRYLVSAAHYILGPFGPDCDLRRYGQAIAARGGKNASKRAAVAVARKLAVLLHHLWVTNADYDPNWLESRRAA

SEQ ID NO: 451626 - protein, 448 aa, unidentified
MAHANRLSRGDLRRNARLDRLRAVIRRDHAVLAIDLADATQVVVLADHDSKVLTRRTVRCSAWKLDEVLGWGLAAARARGFAGVVVACEPTGHRWRVVAEHAAACGLELVCVQPLLVRHAREAEDFTRDKSDAKDALLIARLVGQLHCYLPERPTQAWARLRHLGVRRVEQITLASAAQQRLRDLLECAWPAVLAPAVAAWPLDSLTWRAALTVASCDPSRIRTLGWARLVRAVDRELPRWGTTRCCRRILRAIWTAAGDPQGVAVQRAGALERAALVLADFHHALGELAEVETRMTAILEELGLAGLVATIPGVSVTGAAAILAETGDPARYDSARAMVKHAGLCPRDNTSGAFAGKTTISGRGRPLLRLAAWRASWGALPHNPVFAAKYAHLTSRTSNPLTDGQARTAVAAALLRQLWVVCVTGQAWDAARAGHASSSKEVTDPAA

SEQ ID NO: 451627 - protein, 372 aa, unidentified
MHATTKPVRNESSAAVTLAVDLAKDVFELAFADAAGRIVERKRLKRGPFSECLENRAPLRIVMEACGSAHAWARRFVRLGHAVELLPAQHVRPYVRGNKTDRADAAGLLEAARCGDIRPVPVKTPEQQGTQGMHRIREHHKAERTAAINTVRGLLREFGFAIPAGADKVRPAVLAALEDGDNDIPMDLRHALAGLLDRIVSCQEAMAAIETQLADIARCDTRSQRLMAASGVGLMTATAMSAGIGDFARFPSGRHFASALGLTPREYSSGGQRKLGRITKRGDVYLRTLLIHGARSALMAAHKALMAAHKAKKRGQPLDRTQHWALALAERKGHNKAMVALANKTARRLWAAEHHGASFDPEHVSRREQQAG

SEQ ID NO: 451628 - protein, 323 aa, unidentified
MGSFIGIDVSQGELVVAWRDESGEKGIRTFPNTERGQRELRTLLQKEEPAPALIVLEATGGYERGVTAELGGAGLPVVVINPRQVRDFAKSTGQLAKTDRVDARAIARFASAIKPDLRPLPSEDQEELHDFLIRREQLKQMLLAEKSRLDQTESKRNKKLKKKIKSHVHFLEREMNLLDADLDDTLKGSPIWRENDDLLQSVPGVGDQLARTLLGLLPELGTISGGAAAKLVGVAPMSRDSGKMKGKRRIGGGRARIRAVLYMATLSAIQHNPVIKARYHRLLAKGKAKKVALVACMRKLLVILNTMMRTKTRWQVGVAPATA

SEQ ID NO: 451629 - protein, 407 aa, unidentified
MELAALYKRVIGLDIHQAQITACALLEEPDGTTRIEQRQFGGFKRDRRELAHWVASLKPEEVVMESTGIYWKSPYAALEAVGIRAKVVNARHVKHVPGRKTDVGDAHWLATLARAGLLRGSFVPLAKLRELRLIARQRQKLVGQLAAEKNRLHKVLTDSGIRLGVVVSDLHGQSARAMVKALIAEQPPHAVLKLASRRLKAAREEILDALQGELTASHRFVLDELMRHIEEIEARIARFDARLLAELESEHNTLALLQTIPGVDLIGAAMLLVEIGTDMDAFGSAERLASWVGICPGNNESAGKRKSGRVRKGNPYVRRLLCEFAHAASRTTSVFKSKFQSLLVRRGYKRAIIAIGHKILRTLFFMLKRREHYRDSATDYEALSVQRNAPRWIKSLIKFGFIAPTNA

SEQ ID NO: 451630 - protein, 337 aa, unidentified
MTIQSKKIVQELKSRFAGIDVGAEELILVIRKNGTPYKPQKFTNTPADRARLVKKLSNLPGIIVCLEATGVYHFDLSIALHDAGVALMVVNPKSSHNFAKALMKNSKTDAVDAETLAQYAERMDFVAWTRPSDEKIALRSFARRIDALTRQKAAAKNNCHALSVSRETPKAVLRDVKLAISQLEKRINCLSKEALVLIGKHPELERAFLLLTGIKGIAQTSAIALMGELLLLPPGLSHREWVKFAGLDPRAFDSGKSVHKQARLAGNRHIRSALYMPAMSAKQHDPYVKAYFQHLVDNGKRPLQALCAVMRKLLHAIHGMLKHDKPFDNTRFYAIPA

SEQ ID NO: 451631 - protein, 364 aa, unidentified
MFHFTTLFIGMDVHKESFLLCYYDMMANQFKHSTKVGPNVSYIVNYVNELRRLYGQDAEVLCGYEAGCLGFTLYHQLQAHGIPCIVMAPTTVMKEGSKRVKTDKKDAAQLAKALAFRSYRPVHIPTAEDEQVKEYIRMRTDHKVTLKKIKQQLLAFCLRHDFRYTEGRNNWTQKHVRWLHSLNPKGLYAEILTEYLLTYEKLVDQIARYDARIEQLGQSDSYQEEVSQLSCFIGVKTLTALSIVTEIGDFNRFATAQHSASYLGLTPSENSSGDKERRGAITKAGNSHVRRLLIEAAQSLAKGTIGYKSKELKRRQSGNRVEVIAYADKANERLRRRYRTLVLGKNKKQNVAKVAIARELSGFI

SEQ ID NO: 451632 - protein, 429 aa, unidentified
MNSTQNKKIEQVKETTMIVGIDVGSEKHYFRAFNWRGIELTRKPVAFSNSMEGFNSFYNTIVELMQKSELEEALVGIEPTGHYWFDLGQFMGEKDIKFVMVNPHHVHKTKELDDNSPSKNDRKDPRVIAGLVRDGRYFYSYMPTGAYAELRNASNRRFVLVEEQTRAKNRLQKWIAVYFPEYKGIYTHIDAKGGMLVLKKAPTPEEIVRLGVEGIIKIWKDAKLRGNGHKKAMLILAAAMRSIGLKAGLTEARMEIQDLIEDYELQTKRLERVNDLIKGLCQQVRYADKLLEIKGIGITTVAGFIAEVGDITRFDSTKELQKLAGLELVADSSGKHNGKTKISKRGRKRLRYLLFEAAISVVGKNEEFKEIHRYYTTREKNPLKKMQSLIVVACKLIRVFHAILTKGIRYDASKMLKDIRHPGEQLKAA

SEQ ID NO: 451633 - protein, 357 aa, unidentified
MKIVGCDLHARQQTIAMVDTETGECVERTLSHEGNALREFYAALEGPVVVGIEATGSMQWFLELLQELGIQCRVGHPAKIRAKETRKQKHDRRDARLILELLIEDRFPQIWMPSIEERDLRTLLRDRHQWVKMRARLQHTLQAIALNHALRRGHALWSQAGQSTLQALPLPPYTSQRRTELLSLYEQLQQRIQELDKEAEAQARQRLQARRLLTHPGVGAVTALATDVFLGDPSRFDTANQVASYIGMIPCEHTSGKRQRLGKLTKQGNSLLRYLWTEAGMHAVRKDPELQRFYRRKLIQKGMGKARIAAARKLGIRLWIMMRDQIDYEQFCRRGRLRQKGKAHAGMPDFNSGPAMQ

SEQ ID NO: 451634 - protein, 368 aa, unidentified
MKEETVTSNGSSQANVVNKGNRVLKLGLDTHYRQVTVAMQEDGGRIKAAGKMRHADFLNWVYKKLEESWEIYSCYEAGAGGYWLHRQLEQMGVKNLVVVPKAMGQGGKKQKTDKRDSGELCDSLDRYLRGQDKALSIVAVPTEDQEQKRALIRYHRQIMADRGRCEARGKGLLCAQGIEVHGRWWQGDGWIEVQHNPRLKDWMKEQLIGWRNKILSADEEQSGLRERIAALAPAILPKGVGAYSAAVLEFEMRGFERFKNRRQVGSMTGLCPGIHLSDGRGKEGSINRCGIGIVRWTLVEMVWRLMKWQPQYPPVRRLALGLVKSKRAKKRLAVQAARRLAIDLWRLSTGQTTPEKLGLIMHCTHPEK

SEQ ID NO: 451635 - protein, 453 aa, unidentified
MARKAEKEKTKDGLKLKIVNPNAAGIDIAYGEMQVCVPEDRDGENNRCFGSFTCDYEEIASWLKACGITTVAMESTGSYWVGLFFFLEEKGFDVLLANAKDVKNVSGKKTDEADAEWIMLMHSYGLLKPSFHPDAAARSIRELARHRDNMLRSASKEVQHMQKSLVLMNIKVDTVISDILGKSGKAIIEAILNGNHDPKSLVQLVDPRCKASKETIEKSLEGTWDVVHLFELKQSYDLYKYIHTQIADCEAEMDRLLGEYTDGCGTDMQGYTATKKRVAKKNAISFDAEKHAFSMWGVNAMEIPGMGLGALAVLMGELGRGFTEKFTSAKSFCKWCNLVPNNKISGGKLLSSKVPKQKNRVGQVFRQCANSVKSVKTGLGIYFRRQKSKGGHLQAIVATANKIARIFYTMVVSKNHYDESKVGLDEKQLLERKIILAQKTLDRLNRKLSVTQG

SEQ ID NO: 451636 - protein, 368 aa, unidentified
MSEYTIWIAMDVHKDFVTVAILKGDQPEVEVVQLSSDLNRIRRFFRKLAKRGPIRACYEASGAGYVLQRRLQTDGFHCQVIAPSLIPRKPGDRRKTDRLDAIRLVRLFRSGHLTAVEIPGEEQEQVRTLLRLRLAHKRETKRIKNRIQGMLLYRGHRFTETKSYWTKKHRAWLQKLCDEFTDLFTLCLRTELEHLEYEEQQLQALDAEIDRYAQRGPFQAVVEALMCLRGVKTLTAMTLACEIGDIRRFASPRELMGWAGLVPSERSSGDLQRRGPITKAGNSHVRRLLVEAAWNNRHRMGATLILQRRRQGQPAPIVAIAMKAQTRLSRRLNYLRERKHINVAVTAVAREMCGFVWAIMNAAPQLNS

SEQ ID NO: 451637 - protein, 361 aa, unidentified
MRIIGCDLHARQQTLAMLETTTGEVVNLTLMHEGNEVREFYSQLPRPVLVGIEATGSMQWFLNLMQELGIECRVGHPATIRAAEPRKQKHDRRDADLILKLLVENRFPTIWLPNKELLDLRALLLHRHQWVRIRTRIQNALQAIALANGLRRGPSLWSYDGQAKIAFLPLPPHASYRRSALQAMYRKMKDEIENLTKQVAEQAEQRCGARLLMTHPGVGPVTALATEVFLGDPGRFVDGKALASYVGIIPREYSSGGTQRFGGVTKQGSPLLRFLWCEAGAHAVRRDPELQRFYRRKLVQKGLGKARVAVARKLGIRLWIMLRDEIDYEEFCRRGQKPQSGAACAGMLEVGNGANSHRPVD

SEQ ID NO: 451638 - protein, 341 aa, unidentified
MKNLFIGVDFSKEKVDVAIIFADGLTETAPRVFNEFKTTVSGYKQLVKWVEQNSCGIDSSLWLFCGENTGDYSKGLCNFLYGKGYDMWLENAKSIKDASGLRRLKSDRADASMIAEYAMRNYDKAIMYEPLSESLAQLRELFLYRQMVVRHRCSFQVRRGEKRLTMEKSPIKTMISQSGRHIVSELNKEVEKIDKRIAELIKSDEELTEVFTIVTSVPGIGTQNAVCLMVYTDNFRRFNYDSRKISCYYGIAPFGKDSGTSVHSDPHVHYMANRQIKAMLTQAALAAVNFNPVMARYYMRLVERGKKKQVALNNVKNKLVHLVTAMVRNRQTFTPEYKISA

SEQ ID NO: 451639 - protein, 358 aa, unidentified
MQRNKISFKGQRIFIGIDVHKKNWDVAIAPEVGNVKRHTQKASAKALFDFLKKHYPDGDYLAVYESGFSGFSTYYALKEVGIDCIVIHAADVPTTQYEEVMKTDRVDSVKLVRSLKAGLLNGIYIREKENIDDRSVVRIRKTIQKQLSGYKARVKHMLHCNGVLLPERFEKPGSHWSKAFIRWLKEDVTLLSSTRNSLDLLIRQVETIRMTLLEATKMMRFLSQTERYKHKFDLLMTVPSIGVAVSMCILTEVYDVKRFHNEKEFAAYLGLIPTSHSSGDKIAHGEMTFRGNKQLGPMIIEAAWITICKDAGLGSLYLRYKERMKPQKAIVRVARKLSNIIFAILKNEKEYVPYHTGK

SEQ ID NO: 451640 - protein, 365 aa, unidentified
MNCNQNFKISQVTEGTLVLGIDIGSNTHYARAFDWRGLELSKVFKFKNSFEGFQSFVLWVNDLCCKYNKSKVIAGLEPTGHYWFSLGELLKENNITIAIVNPYHVKQSKELDDNLQTKNDSKDPKVIAKLVIDGRYSFPYIPEGIYGELRVADKLKNDITQQIISIKNKIHRWLSIYFPEYEKIYSSIDSKSGFLLLKETPLPKDIVELGSEGIVERWKQTKLRAVGLDKAKKLEEAAKKSIGCKNITSSARFEIKLLIEDYEYKQNQLNSITEELNKLCEKIPMIKEIAEIKGIGIATAISFVAEVGDIRRFKSAKQVQKYAGLALKENSSGKHKGLTRISKRGRKKLRTILFRATIPLIGFNK

SEQ ID NO: 451641 - protein, 343 aa, unidentified
MELYIGLDVSLKLTSICVVNQSGAIVHEGVVDSDPEAIAAFVRSKAPGTVRIGLETGPTTTWLWTELRRLGLPVICIDARHAKAVLKMQINKSDRNDAAGIARIMQTGWFKEVRVKDLDSHAVKALLVSRALLVKIKRDLENQVRGLLKNLGLVIGRATFNVFTARAEELIKGRSEVVAAVGPLLKARKAIEQQLDDLDHKVLMLARHDAQVRRFMTAPGVGPITALCFKATIDDPARFRRSRSVGAYIGLTTRRHASGELDWSGRISKCGDAMLRMYLFEAAGVLLTRVPKWSALKAWGTRLTKRNGLRKAKVAVARKLAVILHRMWIDGTEFNWSKEEVAA

SEQ ID NO: 451642 - protein, 339 aa, unidentified
MSAIVTIGIDLAKNVFAVHGVDATGKPALVRPSVPRAKLLELIVSLPPCLIGMEACSGAHHWAREFEKFGHTVRLMAPKFVIPYRLSGRRGKNDAADAAAICEAVTRPNMRFVPIKSIEQQGQLMVHRARQGFVEQRTATFNRIRGLLSELGIVLPLKAAVVRREAMARLEDLPGWANTVIGDLLSEVSHLDERIAQYDRHIALMARQSIEAQRLMQLCGVGETTATALLSTIGNGRDFKCGRQLCAWLGLVPGQYSSGGKQRLGRITKAGDPYLRSLLVLGARAVLAAAKTKSDPISRWAVSLEQRRGYWKAIVAIAAKNARMCWAVLSRGEAFRLPA

SEQ ID NO: 451643 - protein, 345 aa, unidentified
MKEYSVIGLDVSDKTIEVAALDTAGEVVWQTTVNCTPTAVRHALLNVARTVVALETGMHTGWLARLLTELGHDVVVANARKLRAIWGDDQKSDERDAEMLARLARTDRKLLRPVTIRSAETQRAMDLVTGRDALVRSRTQMVNVVRSLVKNRGARLRRCSPQAVPKHCRVDLPEADLVELDPVLETIESLSKQIAAYDRLIEAIAKERYSEATERISQITGVGTLTALVFTLVIENPERFACRRTVGAYLGLTPRRDQSGETDKQLPITHAGHSMLRRLLVTAANYVMGPFGPDCELRRFGERLAQRGGRNAKKRAVVAVARKLAVVMLALWQSGEPYRPLRQAA

SEQ ID NO: 451644 - protein, 477 aa, unidentified
MVTHAPRPTETAAVGTPAAPPKPRRARRTTPKPLALGMTYPDACGIDIGSTSHFVAVPADRVDPQQPCVREFPAFTADLHRLLQWLRECRITAVAMESTGVYWIPLYEMLEAAGFEVHLVNARHVRSVPGRKSDVLDCQWLQQLMSYGLLRGAFRPSGEVCALRAVWRHRDMLLSYQARHVQHLQKSLTQMNVQLHHVISDIMGATGQAIVRAIVAGERDPAVLAQLRDRRIKANEAEVAASLQGHWRDEHLFSLRQALALIDAYGEQIADCDAELQRLLDALKDHELPEQGLGAPKRKAAARNAVGFDARTALFEASGVDLTRIPGIDTSTALKVISEVGVDLRRFPTVKHFTSWLNLCPGTKISGGKVLSAATKASSNRAAQALRMAAQALRKSQSALGAYHRRLCARMDRPKAITATAHKLARLIYFMLTKGQGYVEAGQDAYEQKYRERVVQNLTKRARQMGFELTPTAATIT

SEQ ID NO: 451645 - protein, 337 aa, unidentified
MNYSGIDLHSTNSVIVVSDETDRILCKRRVPNELGVVLTTLEPYRKELAGVVVESTYNWYWLVDGLQAAGYRVHLANPAAMKRYEGLKHSDDDTDAAYLAQLLRLGILPTGYICPVEERALRDLARKRLQLTRSRTLHILSVESNLARQTGARINSRAVKQLTEETLESFGLLENVSAAMAANVAVIQTLNVQIEKLEARLRAQVRPQEPFGLLTTAPGIGEVLATTIMLETGTIERFAAVGNFASYARCVDSKRVSNGKKKGEGNVKNGNRYLAWAFIEAANFARRYCPEAKRFYERKKAQTNNIVATKALAHKLARACYHMLKERKPFEVKRCFG

SEQ ID NO: 451646 - protein, 349 aa, unidentified
MSMVCGLDLHRGQITFDALEVESGEVWRGRLWQPDRARFRRWLTEELAPRAKGGPVALAVEGCTGWRYVAEEIIAAGFEAHVAEPADTQAARGRKKHAKTDRSDARLMRDLLQAGDLSESWIPPEAVLEWRERVRLYKTLLDQRRMWIQRIHAELFQHGVTLPEAQIVSTETRERLASDTVQLSSAARQRIAAGYQIIDATDAVRLPLRADLERFGRRQPACKVLAAEHYGIGPLTAVVVWAELGDCQRFSRSLQVVRHTGLDVTVDQSDRHRGHGHLSRQGPETLRWALFEAGMAASRVTSPDRAYYQAVKQRHDGKIAAISMARKLARRCYHTLRQMDPEVVYAMPA

SEQ ID NO: 451647 - protein, 408 aa, unidentified
MNPLYVGIDVSSKSNVVYLMLPDGSKHSNFSVANSHDGSTQLVKRILSAIKSLSLDTVIIGLEATSVYGDNLVYFLREDATLVPYDKKIHVLNPKQVKNFKEAYNDLPKNDYVDSYVIADCLRFGRINKEVYQSDYRYKALQNLTRARFFAVQNLVKEKQRFINVLFKKYSTMTQEKVFGDTFSTTALAVYEEFESAEALASMDLQELTDFIMEKGKNRFPNPDAVAKAIQKAARSSYRLPKTVNDSVNQVLSISITSIKALDAQIKEFDKAIKAQMELLPNVLTSIPGIGPVYSAGIIAEIGDINRFPSQAQLGKYAGLAWTQNQSGDFEAENTKLIQSGNRFLKYYLCEGALSLVKCDTEYRNFYHSKYKEVNRHQHKRALALTARKFVRLIFRLLKDNRLYRAAE

SEQ ID NO: 451648 - protein, 354 aa, unidentified
MSKVKQLSFEGETIYCGLDVHKTNWKVNLRIRDMELANFSQDPDAVLLSNYLKKNYPQAAVEVVYEAGFCGFEVQRSLTQSGLKCIVVNAADVPASDKERKRKDDKRDARKLSRELADGSLKGIYIPDKQMEHARSLVRQRHRLVQDQTRCKNRIKHLLLFSGLQIKDTKEHWSKKYIKELQELVCENQSLKTAIKIAIDQYLQLRNILKEATLAIRTLAQQPLFAPVQKWLQSICGVGLINGMIIQTEIQEIHRFKTLDRLCDYAGLVPDIYSTNDKIILRGITHRRNEFLREAIIESSWMLIRKDPAMLMKYNTYRNRMNQNKAIIRIGKHLLSRIRYVWANQKEYEKGIVQ

SEQ ID NO: 451649 - protein, 397 aa, unidentified
MSECYVGIDVSKAASTAQGIDEKGKKLFYVEFTMEAEGFSKLLDALRSHCKDLSMLKAAMESTGCYHTNLLCFLATEGIPCFVINPLVIANFAKLSLRKTKTDKKDAMVIAQFLLVHKDVLVKVEPSQSLQDLKDLARERESLTVLMSGLKNDIKRMLQITFPELESLCNVFSESMRDIIKQFPSARLVRIADFVVVKKALTPYDARRTSPFYPEDFIKAAQDSVATDSIAKELILPEKYATLEHLMKQRARITEALVEACQAMMIKDIEIITSIGGISDTTASAFLAEVGDYKAFSSYKHLIAFAGLDPSIHQSGKFEGRSKISKRGNRHLRHLSYLMTTCVVRLDNIFREYYLRRRAEGLPYKKAILATAHKLLRVIFTMLTNRTTFQVKEVISK

SEQ ID NO: 451650 - protein, 357 aa, unidentified
MESQEVKYVGVDCGKKSIEVVRINSENSLERRQFSTTESGINNLLQWLTLNDIVGLEAGSQSFRIAKSILNKGVQVIVLNPGNLATIYQSLKKTDKEDSLKIARLIQRHPIEELPTVPIPNDEEEDNRRLCTEQENWTKQLTQSKNRLHSLFTQAGLTHITKKHLRTKANREISVALLPSRYQKEAERILQVLDLVEQNLKLIEKEIQEALKKNKAYVQTIMSMPGIGMITSLAIMSYMGDCKRFSSAKQAAYYAGLVPRVDISGDTVRYGRIINRGCHSIRRVIVQAAWSLVRCQHGGKVKEFYQRLYLKKGAKKSIIATSRKMIEVLYVMIRTGKLFDSMPENILNRKLTQYGLM

SEQ ID NO: 451651 - protein, 349 aa, unidentified
MIVGVDVHRREHCAALIDERGVVLGTLSFPNTAAGVRKLRTWLGARDAGGAVVGIENGAGYGQMLCSALAAAGLEVLNVPAWRTKRDRGKHGPGKSDPGDAVAIARVVLCDRERLGPALEPELVRALAIVETLRRQTVARRTDAIQRLRALWTQFDPEAEVAVGNVLAARTLRRLRRLRLGSGVLGDVATSCLHRIAAEIARLDAVVGDLDKQLAELVAQSGNPLEDVCGAGLQVAATLIAQSGDVRRFRNRAAYARYGGVAPIPCGSGASAGRHRLHRGGNRQVNAALHRIAIVQAQWDPAAQAYLERKLAEGKTPREARRALKRHLANLVYRRLKGWAESTLPAVTS

SEQ ID NO: 451652 - protein, 457 aa, unidentified
MSRARKAPKTIKSVAEVDTLTILNRNAAGIDIGLDEMWVSVRADRDAEPVRRFGMNTPDLIAVAEWLKACGVETVAMESTGVYWIPLYEVLEERGFQVYLVNARHAKNLPGRKKDETDAQWLRRLHTFGLLNNSFRPAGEMCAVRAYWRHRADLIEHRAAHIQHMQKALHQMNVRLSPTVKDITGVTGMAIIRAILAGERDPLTLAQLRDPRCAQPEAEFVKALTGNYRDEHVFALKQAVALYDAYTQQILECDQELERKFSALKPVHDDDLPPLDTTDKRNTHSKNAPAYDGRSLLYQLLGVDLVAVDGLNEVTAQTIISEIGTDMSRWQDEKHFCSWLGLAPHNDISGGKLLRSRTLKTHNRAGQAFRLAAQAVSKTDTAYGAFFRRMRTMHGPMKAIVATAHKIARAVYFMLRDHKPFHDTNAEEYHQREREREIARLKKKATQLGFTLAPASA

SEQ ID NO: 451653 - protein, 388 aa, unidentified
MMIYYIGIDISKYKHDFCIISNTGEVIVENLFFENNKKGFQELLEKLKPYNKSDVHIAFEATGHYSKNLELFLIDQGYSFMKMNPLVIHQFLKARSLRRTKTDKADSLAIANYLMSVPYKPNSDLLYNIFTLKSLCRAREQLIKERSKYQVLLTNQLDLTFPELKPFLGNTISTTLLFILEKYTNTEHISLMRDYDSVRSISRGKFSYGKFAKLKELAKNSIGHHDENTDLLISTYVSIIKTLNDKIDPIEKQISTIIKELNPRMLTIPGLGEISAATILAEYGDISNFSSPNKMLAFAGLEPSIIQSGTIENNGKMVKHGSGHLRYSIMNAAMIILRYSPTFYDYYLKKRSEGKCHRVALSHVCKKLLRVIYTLEKNNIDFDPSLLK

SEQ ID NO: 451654 - protein, 340 aa, unidentified
MDVRTLGIDLAKNLFQVHGVDGQGRTVVQRQLRRRQLLPFVAQLQPSLVAMEACGSAHYWAREIAKRGHQVRLMSPRFVRPYVKSNKNDARDAEAICEAVGRPSMRFVAVKSQAQQDMLALHRVRSLLIRERTALMNQMRGLLAEYGIVVARGAIPLRRALPLLLEDRDNGISELLRELLAEMSERLRWLEERLKRYDQRIAECAGTDERAGRLMAVEGVGPLIATALIAAIGDARQFHSGRDLSAWLGLVPRQHSSGGRSVLLGISKRGDRYLRTLLIHGGRAALRFAARKRDPRSRWIQAVKERRGANIAAVALANKNARVLWALLARDEDYRVPAAA

SEQ ID NO: 451655 - protein, 373 aa, unidentified
MPKYSTAFGMDVHLRSTTVCALDADTGEAVTRRFPGNPWGEIAGWMDGFPGPSLAAYESGYLGFAPQRELAGLGVECAVAAVSKIPRSAADSASKNDRNDAARMAKAILAHDISPVWVPSPEVEGIRDLAGAYDGATARLATAKQRLLAFLAKRGFVYGGTTPAGNPRKYWTYDFLRWLDKVRPEDDGGVRTLAALRNEVEAAAEARADLLSEYRAAVDASPIAAEVAALQSIKGCAFALAAAFSAEVGDFTRFRSGRQVTAYFGLAPSQRSSGDSVRLGGISGAGNALVRKLGVEGSWCYAAARHQPKLMPRDTGVPLEIRMHGRKGSERLLRRREEMLARGMPAAKANAATAAELVRWLWALGMMCREGAE

SEQ ID NO: 451656 - protein, 309 aa, unidentified
MSSWVGIDVSKNTLAVWVRPSGVNFIVCNSSEGHQALLLNLADIQVERVLLEATGGYERAVMGCLVQAGHSVVRINPRRARAFAQATGKLVKTDPVDAGVLAHLAQVIEPSACQPVSLARDELQELVRRREQVVKLRDDERRRLTLARSGVVQESLQTNISQLNEQIARLNSAIEAAAQRTDNQLVKQLGAIAGIGPVTVASLLAYLPELGQLNRRQIAALAGLAPYNNDSGQHSGKRCIKGGRASIRRVLYMATWSVIRCHSSFGARYASLRARGKCAKVALVACMRVLLIRLNAMVRDHSSWRAEAV

SEQ ID NO: 451657 - protein, 456 aa, unidentified
MGHVPQRVGHDECPVGSRATERQYRDRQPSWRPVRNIGEDIRMVEETIAWFAGVDWGSAKHQACLVGAQGAIVGEREFPHSGKGLSELADWILSMTGRASAVAVAVEVPHGPVVDVLLDRGFIVHAINPKQLDRLRDRFSVSGAKDDRRDAYVSADGLRTDRHLFRRLQIADPRLIELRAWSRLAEELQEERVRLSNRLHQQLWRYYPQMLKLTDDLTATWLLELWLKAPTPAKAARLRVSAVERLLKQHRIRRVNAEVILRTLRRPAIKVSDGVAAAAGIHIHSLIVRLQLVSRELNDAKRKLDELCTAIGETGAASEERAEYRDVAILRSLPGIGRINLATLLSEASGPLSRRDYQALRTLSGVAPVTKRSGKSHVVVMRYASHVRLRNTVYHWARVATQHDHESRTRYAALRRRGHSHGRAIRGVADRLLAVACVLLQRQTLFDPHFRQATAS

SEQ ID NO: 451658 - protein, 355 aa, unidentified
MMIIGCDYHPGFQQIAFIDTETGECGEHRLPHREETEKFYRDLAAQGMKVRVGMEASGHAHWFERLLAELNFELRIGDAAVIRTKRVRKQKTDRQDAQLILQLLMEDRFPRIWVANWENRDLRQLLWHRHRMVQARTRIMNQLQAVALNEGLRCKKRLWREAGREQLESFSLAPWASRRRRDLLEVLDRLTPTITELSQAIEQEAEKCPAAQRLRTHPGVGSLTALAFVLIIGSAERFQCGKQIASYLGLVPSEDSSGERRRLGHISKQGNALLRFLLVEAAQVTVRSLPEWRNKYFHLAMRRGRKIAKVAMARKLAIQLFWMMRKGWDYEQVRKFGSQGRKLSSHAVATKGSIR

SEQ ID NO: 451659 - protein, 386 aa, unidentified
MSCTNDLCLENQTATRADHATLFVSLELSRKKWLVTSLSPGSDKMSKHTVAGGDGDALLALLRRLAAKALARVGKPVNIVSIHEAGLDGFSVHRLLEKNGVASYVVDPASIAVPRRARRAKTDAIDGETLLRTLLAWQRGEPRVCSMVVPPTPEEEDRRRISRERKVLLEERIKHVNRIKGLLASQGITSYQPLRRDRHQRLDELQTRDGRPLPTHLKSQVLREIERMEILLRQIVAVEEVRDTLVCPDSTETPALLLMRLRGIGPEFATVLWLEGFFRHFGNRRQLAAYCGLAPSPWKSGQIDRDQGISKAGNPRLRTTAVELAWLWRRHQPDSALSRWFRERVGAERGRIRRITIVAMARKLMVALWRYVTNGVVPEGAVLRTL

SEQ ID NO: 451660 - protein, 319 aa, unidentified
MIPTPVFVGLDVAKATLDVALRPSGERWSVSNDEAGVAALVDRLRPLPPTLVVCEATGGFERAAIAMLAAAGLPVVVANPRQIRDFARATGQLAKTDQIDAAILALFAERVRPTPRPLPDEAAQLLDALLTRRRQLLEMLVAEKNRLGFAPRPLHKGIQQHIRWLERQLDDVTKDLADQIERSPVWRAKDDLLQSVPGVGPIVSAVLLAELPELGALTHKQLATLAGVAPLARDSGTLRGKRMVWGGRAGVRTALYLAALCGRRWNPQLRVFYERLLAAGKPKKVALIACARKLLTILNAMLRDNTSWAAPAPAIQHSC

SEQ ID NO: 451661 - protein, 428 aa, unidentified
MNEVDSIRLEEFRQLKKGIRGSKEHLIVGIDVAKERHHAFFGTATGRTLFKRLVFENTIEGFERLLIQTEALKVQHGLTKTVFGLEPTANYHKPLGEFLIKCAHSVVLVSGVAVKKNRELLDGRWDKHDTKDSANVADLISQGKCLFFEYPPMALRELRSLLSLKRRLKKGEHGLRVRIRNHLLAQYFPEMDRYFARSGSEGLAMVRWCLAPSVIAGLDYEQFAQLVAPQNRTIGQQERLQAIWKMAADSIGCDAGEAVEFEAKVLVEGLEQIREAIRATDNKIEDLCLQFPEYSYLVTIPGFGPDVSSKVLGAIGNPFRFNTGAQVLKMAGWDLSANRSGKNSDAAIPVISKKGKADLRYALYQAAFIASSRNRYFIAYYTNKLLGREKERGIKTKMRVKLAAKLLIIAWTLMKKKELFNPDYLNID

SEQ ID NO: 451662 - protein, 313 aa, unidentified
MDDKIFVGVDVSKDWLDIAVHDGGVVRIANTGEAVAAWVGSLGRRPALVAFEPTGGYERILRAELRNAGLVFARVHPNEVAAFRLRRGGKAKTDRLDARLLAAFAALELAGRGLAPLTDDDETLREMIARRRQLVDALQAERCRAAIAAAPIVQETLKKMIATLQEALDDVETAIAAHIKAHDALATTAAMLQSLKGVGPVTVHTLLGELPELGRLTGKQIAALVGLAPRTRQSGKSAFRATTGHGRPGVRRVLFNAARAAIRWNPAMKAFYARLVETNKRPGKVALVAVMRKMLVILNAIARDKQPWKLAEA

SEQ ID NO: 451663 - protein, 458 aa, unidentified
MPRRPNEPRMANASLPAQLQHVNLHAAGIDIGSTTHFVAVPPDTDPQSVRQFGTFTADLHRLAEWLTACGVKTVVMESTAVYWIPLFELLEERGFQVLLVNARHVKNVSGRKSDVLDCQWLQQLHTFGLLSGAFRPADEIVVLRSYLRQRTMLVQGAAMQIQHMQKALQQMNVLLHQVVSDITGVTGMAIIRAILAGERDPKVLAQSRDPRCKNSAEVIAQSLVGTYREEHLFALQQAVTLYEVYQAQIVACDAQIEQYLASCTAVTEEPPPTAEKARSRSGNAFQFDAHAQLYRLTGVDLTRIDGINSVTALTILGEIGTDMSRWKTVKHFTSWLGLCPGTKVSGGKVLASKSKPMANRAANALRLAAASLSRSRSALGAYLRRMSARLGKAQAVTATAHKLARLVYSMLKHGTEYVDVGQDYYERQHRERVVHSLTRRAKELGFVLSPASPQQAVT

SEQ ID NO: 451664 - protein, 355 aa, unidentified
MNSSKYIAMDVHTQTISVAVRDAAKKLIMESVIETKASTILQFIRGLRGDLYLTFEEGTWAAWLYDLLKPHVTNIVVCDPRRNALLQEGNQNDRVDARKLSELLCANLLRPVYHGENGLRTLKELARAYLTISKDLARVMNRVKAIYRSWGIPCAGKSVYHPRHREEWLRKITQASVRRRAELYYEQLDALVLLRKQARQELLAEGKKHKAWNLLRSIPALGPIRVAVLMAIVQTPHRFRTKRGLWKYSGFGVVTQSSADHRYVNGQLERSKKPALVRGLDPAHNHQLKDLFKSAAIQASTRKGPFREFYEALVAKGMRPEMARLTLARKIAVIAFTVWKKGVAFNEKYLKPQTA

SEQ ID NO: 451665 - protein, 340 aa, unidentified
MNATTYGLDLAKSIFQLYWVDPETGETHSRRLSKTQLISFLSNRTPGKFVLEACGGAHWWARKIISLGHEAILLHPKYVRPFVRTNKTDAADARAIWTAAQQPGMRPIPVKTEAQQALLGLHRIRSELVDSRTRQVNQIRGLLGEYGLHFVLGRKAAMAQFVTRLSEIEQTIPAPLWRLLSRQLQRLRQLDAEILAAEQEIAAWLKTEPAAQCVDAIPGIGPITATALVATMGSPQAYRSGRAFAASLGLVPTQSGTGGKVHLGHISKRGDPYLRKLLIHGARIVLTRSKRRPCWAEALLVRRPTNVAIVALANKMARTAWALLAHRRVYEPGYVSARPA

SEQ ID NO: 451666 - protein, 341 aa, unidentified
MEITTLGIDLAKSVFQLHGVDDSGTVVLQKKLRRGAALDFLRKLEPCLIGMEACPTSHFWAREIAALGHEVRLIPPAYVKPYVKRQKNDAADAEAICEAVTRKNMRFVPVKTEEQQAVLVLHRSRDLLMRQRTMILNAIRAHLAEFGTITAQGPRKVVDLVRRLSDPNDGLDLPALARSALLSQAAQLETLTEEIRKIERELMAWHRQNQASQRLETIPGVGLITATALAASVPDPTVFKSGRQFAAWLGLVPRQNSSGGKDRLGRVSKMGNGYLRRLLVVGATSVTRRAPTTNTRSGAWVRSLLERKPTRLVTVAIANKTARTAWALLVKGETYRVAAAI

SEQ ID NO: 451667 - protein, 388 aa, unidentified
MIYVGVDIAKTNHYASIVNHSTGEIIENPFLVTNNKQGFDLLYSKIKDLDKENVLIGLESTAHYGNNFIFYFHEKQFKLGLINPIQTSTLRKTRIRKVKNDKVDSLLICEALSLGYYNLLSNYDIELLEIKSLCRFRKDLKDKVSSAKIQLDSFVDQVFPELNCFFKNNLDIKTAHELLKLYQSPQDISKINLTKLSNLLIKSSHGKYDKNRAIELKQLASRSVGINNSALCIQIKMTIELIELLESQIKDIEKQVSEFIKKSDNVITSIPGIADTTAAIIISEIGDINRFNNPSQVLAFAGLDPSVKQSGTFNESSTRMSKRGSSLLRYALILAANNVQLNTKTFSNYYNIKRAQGKLHYNALGHCAGKLIRIIFYMLKNNVKFNLD

SEQ ID NO: 451668 - protein, 328 aa, unidentified
MNNNNEVCDVLGIDISKAKFDVALIQGNAKIKSKVFANNPEGFAELQEWLNLQNVTNLHSCMEATSTYGNALARFLVERGYKVSIVNPSRPKAFGKSELSRTKTDRADAKVIARFCAALKPAPWTPPPLEIEQLQALVHRLDSLTAMQQQEQNRLTTADPILVEAITAHIDFLKEQIEMTKKLIRQHFDQHPHLKSQRDLLTSIPGIADLTATVLLAEIRDISAFDTADQLAAFAGLTPREFSSGSSIHGKPRLSKIGNSRLRKALFMPAIVARLYNSPIAAFCDRLTAKGKSKMSVIGAVMNKLLRQVFGVLKSQRSFDPNFVQIPS

SEQ ID NO: 451669 - protein, 413 aa, unidentified
MTRMSFGWYVGIDWATQAHHVILLDAERRVLGERAVPHTGSALAELAGWLTEVCGGEVDRVAVAIEVPRGTVVETLLERGFIVFAINPKQLDRFRDRYTVAGAKDDRRDAFVLAASLATDQPAFRPLRLDDPLVIRLRELSRLEAELHQEEARLTNRLRDLLHRIYPQVLRLAPAADEPWVWELLELAPTPADARRLTRPALSKLLRAHRIRRLAADAILAHLQAPPVWVAPGTVEAVSEHIGLLVPRVRLVHEQRTRCLHRIERVLETMAGDAPGQRGEHRDVEILRSLPGVGRLVAATMLAEASQLLAQRDYHALRAQGGIAPVTRQSGTRARVDMRYHCNHRLRNALYHWGRVSAQCDLLSRRHYEALRRRGHSHGRAIRGLIDRLLLILMAMLRSQTSYDATRRRAYAA

SEQ ID NO: 451670 - protein, 406 aa, unidentified
MEVLHERCCGLDVHKKSITACIITAKGKEIRTFPTMTQNLMELVDWVKQNRCTHVAMESTGDYWKPIYNLLELEELQPMVVNAQHIKAVPGRKTDVKDAEWIAKLLRHGLVQGSFIPNREQRELREIVRYRRSIIEERTREVNRLQKVLEGGNIKLSSVASNVLGVSGRDMLEAMIKGETDTSVLADFAQKRLKVKKEQLKLALDGRLGAHQLFMLEKQIAHIDNLNELIEQVDTEIDQRMAPFADDLKLLDSIPGVGKRTAEQIIAEVGTDMTRFPTPGHLCSWAGMTPGHDESAGKKRSAKTRKGNKKLRSALTESARAVARKKNSYLSAQYHRIAARRGKNRAAIAVGHTILSIVHILLTRKQEYVELGFDYFDQRKRDILIKSSMKRLESLGLIVTISEQTA

SEQ ID NO: 451671 - protein, 346 aa, unidentified
MSRSDSIFGTGMPVSPHSQGRSQEDHSMFNLGIDVAKAKLDCALRLPNGKHRNKVVENNYKGFIALSEWLLKQDASSPRVCMEATGTYWEKVAEYLAGLGMVVSVINPAQIKAFGASRLVRTKTDKVDAQLIADFAHERQPEPWLAPSPAEQALRAMVLRLEALQTMRLQESNRLEVAREAVRQGIVDHITWLDGQIKELIQAIKRHIDDDPDLRGKSELLDTIPGLGERSIPVLLSYYANPERFDSAKQAVAFAGLDPRQHESGSSVRGKPRMSKVGHSFLRKALYMPAMVTVYRTAWGKRFGQRLRAAGKAKKLIIGAMMRKLVHVAFGVLRSGKIFDPTLHAA

SEQ ID NO: 451672 - protein, 375 aa, unidentified
MTTIARLGIDTSKSLFQLHGVNEREEAVLRKQVRRSQFLRFVGKLAATEIGLEACGASHYWARELQALGHAVVLLPPQHVKPYAGHNKNDKIDAEAICEAMSRRKVRERFVATKSAEQSAAQMLLGTRDGLLHRRTQLSNTIRGHAAEFGLVAPKGLAHIKPLLERIAADQAVPALAKELFATLAEEFVELAPRIARLDKKLKAFQRSNELCRRLVEVPTIGPVIATSMAVKIANPAAFRSGRRCAAWLGLTPKDHSTAGKMRHGGITRAGDEGLRAALVSGATAYIQQVKRGRTRPSPWLAELLKRKPEKLAAVALANKTARIAWKLMTSGQRYDRARAEAREGLGATQRRGSTPSPSLQPHTAAHGTSAMTTA

SEQ ID NO: 451673 - protein, 414 aa, unidentified
MELLHERCAALDIGKKDLKACVRTPSPKGKRSRRQEIRTFATTTNALLELRDWLVAEQVSLVVVEATGDYWRGAFYLLEDQLNVILVNAAHAKGLPGRKTDVCDAAWLCQLGECGLLRASFVPPEPIRQLRDLTRYRTTLTAERSREAQRLEKELEDAGIKLSSVATDITGVSGRAMLAALIDGERDPQVLAEMAKTRMRPKIPHLVQALTGNFGEHHAFLCRLHLQRIDELTAAIAELSARIAEQMRPFARQLEHLMTIPGVGQTVAAGRQVRTGTDMGRFRTGANLASWAGVCPGHHESAGKRKSGKTRHGDRWLTGALGTAAMAAARTKDTTYLGARYRRLAPRLGKKKALVAIEHSILVAVWHMLTNNVDYHDLGGDYFARLDPERAMRRIIRQANSLGFTVRFDPIQAA

SEQ ID NO: 451674 - protein, 365 aa, unidentified
MKKSSTAKAASNKNLERKLTVGLDLGDRSSWYCVLDEAGEVISEKKLGTTPKAMKEAFAAMPRSRVALETGMHSPWVSRLVSELGHEVIVAHARNVRLIGESRRKDDRLDAKMLARLARIDPQLLSPVKHRSAQAQADLTVIRARASLVRARTALVNTARGLTKSYGERMRGCNPRNMDTEKAQTLSPELQAALGPLLQALQSLSERITEYNQRIEAIAQQSYPQTATLKQIKGVGTLIALTYMLTLEDPHRFRKSRDAGCYLGLQPGRRNSGQSEPQMHISKEGDPYLRTLLVQGAHPILGPFGADSDLRRWGLKLAERGGKNGKKRAIIATARKLAVLLHRLWVSGEVYEPLRNTKRTRLVAA

SEQ ID NO: 451675 - protein, 340 aa, unidentified
MKLYGAIDLHSTNSVLVVIDEEDKIVYQKRLPNDLALIHKELCVYQSRLEGIVVESTYNWYWLVDGLMAEGYQVHLANTAAIQQYEGLKYSNDDSDARWLAHLLRLGILPQGYIYPREERPVRDLLRKRSQLVRQRTMNLLSIQNLMTRNTGSSMTANQIKGLDKTQVDGLLPDADLSLAVKANWSVMCSADEQVERLEQRVTERVKLRAQFSFLKTVPGIGQILALTIMLETGDIGRFATVGNYASYCRCVGSQKISNGKRKGSGNTKNGNKYLAWAFVEAANFAIRFNSKIKSFYQRKKAKTKAVVAIKAVAHKLCRACYHIMKDRVAFDVTKAFGPK

SEQ ID NO: 451676 - protein, 371 aa, unidentified
MKSIIYIGMDVHKKTYSLCALLKETGEIIGETKIPADVSLIIKFIENTKKSVDSDDVQIKTGYEAGCLGYSLYWQLAAKDIECDILAPSTMHRSAKNKVVKNDRRDAKNIAANLANGTYKSVYVPTDEDVEIKEYIRMMHDFKIELKKVKQHINAFLLRFGHHYPGKSKWIPAHIKWLKELELSDMYREILDEYLSQLEILSEKIERFKHRLEELSQKETYNEKIGQLRCIKGIDTTAAMTMHAETSDFDRFPTANAFASYCGLTPGEDSSGESYHRLGITKQGNSMIRTTMVEAAQVLVRGTIGKKGKKVKSKQKDQDVKVIDYADKAVVRLQKKYHRMIFRGVKRNIAITAVARELACFVWGIETGHIS

SEQ ID NO: 451677 - protein, 492 aa, unidentified
MKPNHKFPSIYRNQNALLCALFERAGDARKVLCVALDYAKNKHVALICDGHGDILKAAFPVENNAAGVAFLIQEILATARHRKIPREGVFLGGEDEPSYVANFTAALRQEGYLVLRVNAHEAKENRVNLLASTDNLDLLGVAKTLLSRRARLSGDAGEQDAAYYQLREIGRCRRKLVAQQTAVANRIHTSADQLFPGFLNDSKSGLDSFTVASLELMKKRFSSGEIARRKPASLANFLHRHHIHHPEDTAAQIITLARAALPPAPHRIPALQRTLEVTVELYDCLQRNAAALRVDAALILATTPYAMLTSIPGIGFVLACGAASELGPPKRLPPLDSLCSYAGIVPSTSQTGGPGSPPVQGRASPRCNHILKDWIVQSAQKIHRHGPPELKDRITRWNAEGRHGLFAGARHYLRLLRTLTLTEIPYLDPAGRSRQASPDQLAAAAQATWQHLQNKWRSIPGGIDLITDENHPIGFWRRVIMETHGINLPARL

SEQ ID NO: 451678 - protein, 355 aa, unidentified
MDGDKYVALDVHKASVVIGIRDAAGKYIMESIVETKAATLLDFVKGLSGTIHLTFEEGTHSRWLYDLLQPHVAELVVCNPRRNKLLEEGNKADVVDVQKLSQLFRAGLLQPVYHGDHGTRTLKELAQNYESLVSDRVRVKNRLKAIYRGRGISCEGEAVYQRQQRRKWLGELTESGVRQRAESLYQQLESLEGLVLAARKQLLRESRKQKATKLLRQMPTLGSIWTALIVATVDTPHRFRTKRQFWAYCGLAVVTRSSADYCFDKKGELRKSRRPAATRGLNQNYNRRLKKIFKGAAIVGTLKEPFKPYYEQLLAKGLRPELARLTLARKIAAITLAVWKKGEQFDPEKLTKLTT

SEQ ID NO: 451679 - protein, 399 aa, unidentified
MAEYGVFVGLDVGKSAHHATALAPDGRRLHDGPLPNSEARLRQMFGTLGRHGELLVVVDQPASIGALPVAVARACGHQVAYLPGLSMRRIADLHPGAAKTDARDAYVIADAARTLPHTLRRVDTGDQTLAELSMLVGFDDDLAQEATRLANRIRGLFTTIHPALEAVLGPKTQHPAVLELLTRFGGPAGMAAAGRRRLSTVARRHAPRIADQLVEQILTALGEQTVTVPGSRTAETILPKLATSLRGVLDQRAQIAAQVEKVLDAHPLAQVLISMPGIGIRTCARILVEIGDGAAFATAAHLAAYAGLAPITRRSGSSIRGEHPNRGGNKRLKRALYLAAFAALADPASRAYYNRKRTEGKKHNAALICLARRRCDVLFAMLRDHTPYQPRPIPQPAAA

SEQ ID NO: 451680 - protein, 408 aa, unidentified
MSQNIIFGIDVSSRSSTVCVVIDRVKQGNPFTITNDSFGYQDLLDHLNQYLITPLVVFEATGVYSLSLQAFLEDHHIKYLRLNPLQAKKLMDNNLRHNKTDKLDAYHLALIQFSAPQKLQASQSREYHELQAASRYYEELTRALIVNKNQLHRNLQSTFPQIEHILSNPSGKIYWTIVSLFPHAQYVLDMNEDQVKQRLLSISGIGRQRAQYLTARLYAFARQAYPYDRKDGITVRAIQRTISNLLSLSNERDQVINYMEKLTKVVNARALTIYLSIPGIARTTALRLIAELGDLRRFNTSAQVDAFVGIDPGRSQSGDKDSRLGITKHGNHIARKILYRVITQMETVRATQPCHITDYYDKKKQSSHSPGYKKIAIASVHKLIRTLFALIKHNQLYDYNIATKNQRL

SEQ ID NO: 451681 - protein, 345 aa, unidentified
MHFIGVDHHKQTSTMTVLDSQGREVRTARLLNLRADIGAFIREVAPEGFLAVVEAGRASYGMADLLRELGGVVKMANPLQVKAIAHARIKTDKRDSRTLAQLLRADLIPEVYQRETWNREAQRVLRLRAFWISLRVQVRNKIRALLAQQPEEIRIAIEQRSGQLFGPKGQEFLGDLRLGDRDGEILRALLRGYQAFQAFQAESDQMVADLYRELPAAQLIDTAPGFATTFSVLVAVEIAEIRRFPRAEALHSYAGLVPSTYSSGARTYHGHIVKGNVWLRWALIEAVYPAIRKDAGLSILYHRLARTKGPNVAKVATARRLLTILYRMLTENRPYVPYRTNPTAA

SEQ ID NO: 451682 - protein, 439 aa, unidentified
MSRRAYRATGVNEVNWEQIAHGKEGLDVTLGVDVGKFDVLVVCRWADERFERPWRVKNPREIPTLVALAKRVQTDRKLVVAMESSGTYGDALRQALSDNGIEIQRVGGKAAHDYAEVFDGVPSQHDGKDAAVVAELAALGKGRPWPYEAPDSWEEELTYWVEEMVIQRQLVTFWQGRLEGLVARHWPEAFQVLKLSSGTLLRMLKRYGSPQALAADPQAPRQLARWGRALLSAKKIDQLLAGARSSVGVRLGPWQQRQIQECAEKALAARRQSNQAQRRLRQLAVGHQVLQAQGKVVGIPTACVLWVCTGDPSKFDSAAAYRKAMGLNLVERSSGTYQGQLRISKRGHARTRQWLYFAAMRLVQKRGVRPWYEAKKARDAGDARRLLVAVMRKLAVALYHVGVRNEEFQPRRLFGRIGKHRGRGAQRAIAVAEPSKIQG

SEQ ID NO: 451683 - protein, 359 aa, unidentified
MAGRVIDSAWVFRPCSSGIPAGVVRFSPNSRLGRCLASPHPQGRDNLMDSIVIGIDVSKDQLDVATPDGARQWPNAPDGHRQLVEQLAQWQLEAIVLEATGGYERAVVAELAAAGLPVVVVNPRQVRDFARATGKLAKTDAIDAKILAQFGQAVRPEQRPLPSEKQLELQQQLARRRQLVGMLTAEKNRSGQATDKLVRKTIDAVRTTLVKQRDRLDDQLQRTLEETPAWREKENLLRSVPGVGPQTALALLADLPELGTCSRQQIAALVGVAPLNRDSGKRRGQRVTWGGRASVRSALYMATLVATRHNPVIKAHYQHLQKVGKRKKVALVACMRKLLCMLNTMVREKKPWRNQFVNT

SEQ ID NO: 451684 - protein, 376 aa, unidentified
MSGVIIGVDPHKVSATIEVLGDGEQVLETGRFGTDRAGYRAMLAAGRCWPERTWAVEGCQGIGRHVAQRLVADGETVVDVPAKLSARARVFSTGQGRKTDATDAHSIAVVATRTAALRPVAREDELMALRLLADRREELANARTQAVSRLHRLLPGLIPGGAPRFLSATQARALLATVRPRGVAGRTRRQIAAELLAEIVVLDRKLKDSDKTLREAVAATGTALMSLHGLGPVGAARVLADVGDVARFPTRAHFASWNGTAPIDASSGEQIRHRLSRAGNRRINRVLHIMAIVQLRNDTEGRAYFRRKVAAGKNQDGSPAVPQTAAIRRALPPARRRGRPSPADTWRLNGNGPGRTRGGGYEIQRGRPQPHSRLFG

SEQ ID NO: 451685 - protein, 330 aa, unidentified
MTVIGIDVSKDKLDCLWIRDLAHKKVKSKVLTNSPQGHQALITWAQRLTGQAIHEVLFVMEATGVYHEALAHHLHAAGAKVAVINPAQVKDYAKGLGVRTKTDKKDSLVLARFGLAESPRLWQPEPPEIRHLKALLARLQALEQDRQREANRLEKVQSNHNAEEVIASIKAMLRALEKQRAHIEALIDQHIDSHPGLKQDRGFLNSIKGIGPVLSRVMLAVIRSRDFTRATQLAAFLGLVPVERQSGSSVKGRPALSKTGDGRVRAKLYMGAIVAIRHNPDIKALYQRLLKRGKTKMSALGAAMRKLVHICFGVLKHQTPYQAQTPNARA

SEQ ID NO: 451686 - protein, 373 aa, unidentified
MPDVSSTAPADVRLWVALDVHKLSIVAATLPPSGGQPELHRVETTERAIRRFVDRLGGPEGLAVAYEAGPGGFDLLRLLSTIGVACDVIAPSLVPVRSGDRVKTDRRDAKKLVRLYRAGELAFVQPPTPETEGLRDLMRCRDDLRCARTAARHRVAKQLLRHGRIYRDGKKAWTKTHHAWIARQRLDDPLAQAALEQMLIHLDGLDRQLDQLDRALEHVADSQPWRERVHNLVAFRGVSTRTALGLIAEIGDFRRFSHPRELASYLGITPTEYSSGEQQHRGHITKAGNRHARRLLIEAAWHYRHRPRRPDRGAQPSDRAWQAQIRLHHRWTHLLHHGKRPTVANVAIARELTAFLWAAMTDQPQRTEVTTTA

SEQ ID NO: 451687 - protein, 421 aa, unidentified
MGYIGGDLQERFVERIRGVDPARLLAVPIDVGKASAAAMVCDFWGEVVMPPFTFPLTTPGVQVFTSAVAKAEALRDAAWVRAGLEQAGHYHRTLLVRLEQVGIEVALLNPAQVKENRNQSLLRSLKSDATDLGAMAELLVRGKGHPPAPVDDAMATQAALTAHRARKVKARSAVKNHVHASLDLVFPGLSGCFFDLLETKLGRLLLDEGMGPERIRRLGVERMRTFCAHRGVMVHRRKALEILVAARGALSLAPQVREVHAGVLASDVALLGTFDTAIAEADEALGEVLPHTPAGILTSMPRVGVVRASSYGAALGDPSRFRTAAQVYRMAGLVPRLYESAGKRRSHTSISREGKAELRAAIIELGKALRQGDQDFARYAGELAARGKAPGIIACALGHRANRVAFALVRDQIPFDPELWR

SEQ ID NO: 451688 - protein, 407 aa, unidentified
MVAVMIGVDPHKGSHTAVVISAAEEPLGEIRVRASAGQAEKLVAWAAGWPDRTWAVEGAAGLGRLLAQQLVAAGEQVLDVQPKLASRVRLLQAGDTNKNDPNDALSVAVAALRSRTRRQVTAEDYRAVLKVWSKRHRDLSRLRNQVACRLHAVLCDLVPGGHPKEITAAHAARILEQAAPSGPVAVARAELAAEFLEDMRRLDAQLRDTRKKLAAAVKASGTTLTGVFGVGPVIAGTIIGDVGDVARFPGRDHFAAYNGTAPVEVSSGNRKIHRLPLRGNRRINHAIHMAAITQIRHRHSDGRAYYDKKIAGGKTHKEALRSLKRQISNAVFACLQADAKQAAAASAKGPGGQPGNGSASSVAGSHPARQLFGKATPGPGTTLRPATRRRSTPPPKPASTKKIQATT

SEQ ID NO: 451689 - protein, 404 aa, unidentified
MRYYIGVDWADTAHAVWVEDTQGTRVLERAVSHTAEGLAEWGRWLDEQRARGAELWAAIERPDGRVVDFLLDHGVLVYPINPKALDRARDRYRMNASKSDPFDAHVLAAFLRTDHAHLHALQPSSEAAQELKLLTRDYARLVRDQTRLVNQLTATLKEYYPRALEICGDVTTKRAAAFLRAYPTPAALAVGSRATGLRFATSHRWNTEQAAAFWDLLRHPQLPVPDHVVRAKRRLVLVLLLQLETVVQAVDDYRKAVMEFFAQLPAAAWALTLPASQGTLVPTIWAELGDAAGRWASWQHLQGHSGVVPVTRSSGKSHAVCFRFACNLHLRRALQQFAFCSLKSSEWARAYYDQQRARGHWQAALRALAAKWVKIIFVLWTSHVAYDEDHHLATMARHHLRQAA

SEQ ID NO: 451690 - protein, 408 aa, unidentified
MEVLHPHCAGLDVHKDTVVASVRIQEGPTARRVVETFGTTTKALLALSDWLGEHGVTHVAMEATGVYWKPVWHVLEASFELVLANAMHIKNVPGRKTDVNDATWIADLLAHGLIRSSFVPPTAIQEMRTLMRTRKQFVRERAQHVQRIQKTLEDANVKIASVVSDVVGTSGRAILKALIDGESRPEKLLEVTTGRLRADRSTLLEALRGCVRKHHRFMLQLHLCQIEALEKSIETIDAEVGPTLEPFREKAARLMTMPGISDVTAQVIVSEIGIDMSRFPTAGHLISWAGLCPRNDESAGKRRSTRLRQGAPWLKATLTQAAWSAARSKSGYLHAQFLRLKTRRGPKKAIMAVAASMLTAVYYMLRDDVDYRDLGTDYFDRTDRVKAARRLVKRLGALGYAVEIKEAA

SEQ ID NO: 451691 - protein, 434 aa, unidentified
MRIVYERCCGLDIHKASIAVCVVITRDGKIEEETRRFGTMTADLLELAAWLKARGIEHVAMESTGVYWKPVWNILEAEGFDLLLANAQEVKIVPGRKTDQKDSQWIADLHQHGLLRKSFVPPRQVRDLRDLTRTRATLAQEHSSTCNRIQKVLEDANIKLGTVASDVFGASGRAMLLAMMKGESDAEALAELSKGRLRSKIPELRRALEGRVTGHHRFLIDRHWRQMESLENQMRQFEEEIAERMKPTAEEIARMRESLPAEAPLPPSPREEAILMWMELPGVGLTTACSMVAELGVNMEQFPSSAHVASWAALCPGNNESAGKRMSGKTRKGNVWLRRTMCEAAWAAAHSKKTYFAAQFGRIAARRGKKRALLAVAHSLLVAAYEMLKHKEHYREFGADFFEGLNKDQVKRRLVQRLAKLGFQVTVTQTPTAE

SEQ ID NO: 451692 - protein, 366 aa, unidentified
MTSVPSAGELIHLGMDTSVNEIVVAVLRPGQEIPAVDRIRNDEESVRRLIGRFADRRVLSACYEAGPGGYELHRLLASMGVACDVVAPSLIPKGGSDRVKTDRRDSARLALTHRAGLLTAVRVPSAAEEAVRDLVRARADLVDDRKRVQQRLNAILLRHGCVWRGGSKWTYAHRAWVDKQVFAEPALAETLALYRGALEAREAELAAVDRQLSAWAHRDPLAGPVARLGGYRGIAELTGLTLAAEVIDWRRFACARAFMGFTGLTCSEYSSGSRTRRGSITKAGPQAVRTALVEAAWAYRSRPRIGADLRRRQDGLPPATLARSWKAQQRLHATYAKMTARGKPPGVVVTAVARELAGFVWAEMTS

SEQ ID NO: 451693 - protein, 351 aa, unidentified
MNIKHYIGFDVHKKSISYCVKTADGQILEEGKLRATHQGLREWAQKRTEPWHGAMEATLFSGWIYDTLKPFAAELQMGNPLMMKAIGAAKKKSDKLDARKIADLVRCNLLPVCYVAPAEMRDLRRLLRYRNLVVGQAVQMKNRMSGMLMEVGAEYSKQRLHGKQYFSELLDQLEEVPASVKDLLRLSRGALEMFETTQRQLLDRLQKEPLLVKRVKLLRSIGGVGEVTALTWVLEICDPRRFSSIGDAVSYCGLVSALVSSADKAKRGPISKQRNAHLQTVLIEAAKLAPRWNQQLAALHEQELKRGDRNQATLAVARKLVAYLLAVDKSGKRFEVRKPPAREMEEVAQLA

SEQ ID NO: 451694 - protein, 338 aa, unidentified
MKITTIGLDIAKSVFHLVGVDKAGKLIKKKMLRRKDLLPFVAKIEPCLIVMEACGGASYWAREFEQFGHVVKLIAPQYVVPFRQGNKNDYNDALAIAEAAQRPNMRFVKPKSVEQQDVQLLHRMRERLTKQSTALINQVRGMLAEYGIVMTKSKSAFKAQLPDILVDEANTLTTKGRTIFYQLYDEVIDIEKRLKSCDTQVLNETQNNVICQRLQTIPGVGPVTATAIYAAVGDGKYFSNGRHFSAWCGLVPKQHSSGGKDNLLGISKRGNAYLRTLFIHGARAVLRHSGNKSDKLSCWAIQLAERRGFNRACVAVANKLARMSWVIAAREEEFRLAM

SEQ ID NO: 451695 - protein, 349 aa, unidentified
MKKIFIGIDFSKEKFDATVIKAEDLSEMLSVGHQEFINKVSGYRKMLRWVDSLCGADTCEDWLFCGENTGGYSQMMSNYLYSKGYDLWIENALSIKRAFAMKRGKSDRSDSVMIAEYAMRYQDKACLYEPLNPALSQLREVFLYRHMLVRHKCSFEVRRIEKRLTQQKSSAKTMISQSSRHILTELKHEIQKCDQRIQELVRSDEELSRIFGIITSMPGVGTLNAVCLMVFTNNFTKFDYNARKIACYYGVAPFSCDSGTSVHSAPKVGYLANKMIKSLLTQAALAAVNFCPAMSVYYHRLLDKGKKPMVALNNVKNKMLTIITAMVKNDCKYQPEYISINARSEMLNK

SEQ ID NO: 451696 - protein, 344 aa, unidentified
MDHSAGLDVSVKETSICIVDDTGRIVREVKVASEPEALLQVLTNPGYHFKRIGLEAGPLSQWLFSALAEAGLPVICVETRHMRAVLKAQINKTDRNDARGMAQMMRVGLYRPVHVKTLRSQKLRMLLTHRKLLQSKAIAIENDLRGTLRNFGLKVGMVGKVKFEARIKELLGNLPDLALLVEPLLIVRRVLREQLVILHSRLLAIVRDDEVCRRLMTVPGVGPVVALTYRATVDVPARFRKSKAVGAVFGLTCSKYQSGEIDRSGRISRCGDEMMRVMLYEAAQSMLRSKKWSWLKAWAMQIARRRGMKKAIVALARRLAVIMHRIWVDGTEFRWTREQAAAAA

SEQ ID NO: 451697 - protein, 349 aa, unidentified
MSLPQPAAWAGIDTAKATFDASIAHPSQALVFDLALLHVMPVRTFARTRDGVNEFVAWARKQTQEVGTGLRVVMEATGNYSIELAAWLTEIDGALLPAIANPRRTANYIKSLGLRNKTDKLEARALALYGIQRSPAPYEPLTTERAELRSLLRYRDVLVDERVAERQRADETHVCKAVNAMQKRRIEQLDRDIKSIEKNMRILLTKTPTLKQDYELLTTIYGVAFVTASVILAEIGDLRRFTRARQLSAFAGLCPRLVHSGTSQRGSHLSKDGNRRVREALYMAVSTALRGDNQIAHFHRALVQKGKRPMAAHAAAMRKLLTIMRAILITNTAYDSQQGIGGKLCGKNT

SEQ ID NO: 451698 - protein, 403 aa, unidentified
MNAIGIDVSKGKSMVAALQPGGKLLARPFEVLHTKSGIQELVSFIRSLNGDTRIVMEHTGRYYEPMLQRLAVSDLFVCAVNPKLIKDFGGNSLRKVKTDKADAKKIARYALDNWCDLRQHTGMDTTRTQLKTMNRQFAFCMKQKTACKNNLIALIDQVYPGANTYFESPARADGSQKWVDYVSTFWHVDYVCAMSLSAFTERYRKWCHRHGYNFQPDKPRLLMEKAKDLIAMLPMDKTTKVLVQTSIAQLNVLSKTLEALRTQMIVLAEQLPEYPVVIAMNGVGPTLASQLIAEIGDVTRFPRRGSLTAFAGVDPGAKQSGTMQLKSNKTSKAGSPHLRRALFQIVSGLLMRSPDDPVYNFMDKKRAEGKPYYVYMTAGANKFLRIYYGRVKEYLSRLPKVQE

SEQ ID NO: 451699 - protein, 366 aa, unidentified
MRKVMAGMDLHGNNVMVGIVDDQGARLQHRRLACELPEIIEFLAPYKAELESIAVESTFNWYWLVDGLRAAGFTVVLANPAKIDQYSGIKHADDKNDAYFLAELQRLKILPTGYVYDPELRPVRDLLRRRMSLMRQRTTLFLSAKSLHQRTTGRGLELRRLKAMEPEEAAALYTHPANQLIAQIQKEHIDSLDQSIRQIEKAVLKVALQQPYYQRLQTMPGVGIILGLTISMEVGNVDRFAGPGQFASYCRTVDAKRISNGKTKGDNNQKCGNKYLAWAFVEAAHGARRFDATCRRWYDRKAGKKCTTVATKALACKLAKAAWYVMAKGTEYQAGKIFPGLTEPKAEEISGEQASASKGVGPNPED

SEQ ID NO: 451700 - protein, 382 aa, unidentified
MTQMALRMNDTTFASALYMALELSKSKWKVGFSYGHKRRTVNVEGGDVARLKAAIGEAKAKFKLPETVVIHCCYEAGRDGFWLHRLLTSWGIDNLVVDPASIEVNRRARRTKTDRVDLEMLLSKLRQHHGGERVWKVVRVPDQQAEGGRHLHREAERLKKERSAQVNRIKGLLFAQGIRLEQLNLKGWPAQVAGFRTFDGQPLAEDLRGELQRAGARLALLASQLKELEKEQDRRVRAVGESGGPLAMVRQLRQLKGIGRVAAWVFVMEFFGWRQFRNGKQVGALAGLTGTPYASGDTHREQGISKAGNRRVRSLAVEISWLWLRYQPDSALSRWFRERFGGTGKRHRRVGIVALARKLLVALWRYLETGLLPEGAELKAAI

SEQ ID NO: 451701 - protein, 370 aa, unidentified
MGKKVRHSGRGRKALAVLAHEEAFVGVDVHKATYSVSVWTEDRGEVARWVQPAAPMALARRLAGIRPQVAQVVYEAGPTGFALARTLRAQGLPAEVIASSKMPVARGPSNKSDRLDAQHLAELAAKGLLKTVYVPTEQEEADRQVVRRRHQVVRERRRVKHRIKSFLLQHHLPSPAGLERWSLAAVAALAELPMGPELRWSLDGLLADLAHFEHQLAAATSALAELGRAERHASAVALLRGVPGVGPVTALTFRTELPRPERFATGAELASYVGLAPLVRRSGTTTRRGPIVKAGNGTLRSVLVEAAWSWVRCDPSARAVYGRLLANTALSQKAVVGVARRLAMVLWRVVTTGEVYRPGDAAARDDELAL

SEQ ID NO: 451702 - protein, 408 aa, unidentified
MASVFVGHDWAENHHEVFVEDGEGRRLGGDRVPDGVEGVARFHELVGELVEDAAEVVVATETDRGLFVGSLVAAGYTVLAVNPLSVSRYRERHSTSGAKSDPGDARVLAELARTDHHNHRPIAGDSELVESIKVLTRAHQGLIWTRQRQLNQLRSTLREFYPAAIAAFPELGHSDALAVLALAPTPSLGRLLSISKIAAALRRGGRQRRIDERAAEIQIALRSEQLGAPELVSESMGTVVRALVAVAGELSTQIAGLETDLADRFDQHPDAKVIRSLPGLGMILGARVLAEFGDDPNRYANAKSRKNYAGTSPHHTGLGQEPRRPRPLRPQQTTRRRQLPLGLRRHHRQSGRPNLLRHPPSHRRHPQPSPTSPRQPPRRHPSRMPAPPNPLRRTHRLGPPHPTRRLTT

SEQ ID NO: 451703 - protein, 414 aa, unidentified
MTVLFVGDDWAADHHDVELMDQAGRTLARARLSEGAAGMAKLHALIGEHADVADGEDDLEVRIGIETDHGPWVTALAAAGYVVFAVNPLQAARYRERHVVSGAKSDTGDGHILADMVRTDAHQLRPVADDTDEAQAVKIVARAHKTLIWERNRQAARLRYQLRDFFPGALDAYGGLGLDSADVLELLGKAPDPAAAAKLTTAQAVAALKRAHRRHVAGKTTMIRAALRAPQLTQPAQVTGASAAVVRALAAVIVTLNQQITVLQGQVEAYFLAHPDAEIVLSQPGLGQILGARVLGEFGDDPARYASAKARKNYAATSPITRQSGKRKTVMARYVHNDRLRDALGRQAYSALTASPGARAYYDQLRARGIEHDPALRQLANRLVGILHGCLKTRTLYDEATAWPQNDRQYPSVA

SEQ ID NO: 451704 - protein, 391 aa, unidentified
MSKRFFGLDLHKKYATICGISQEGEVVVKEDHLPLDRLATWAAGTLTGEDAVALEASTNTWGAYDCLAAHAGRVVVVNPIKTRLIAQARISTDELSAEALARLLHSNFICEVWVPEERTRRYRQVISHRIRLAQEGTRLKNRIHATLHRQQLNSPYGNLFSRAGRAWLGKLELPEMEKLLVRQNLDLLKSSEEALAEVDQLLARLAQEDHRVPILMQIPGISIFSALAILAEIGEIGRFATPKKLSSYAGLVPSLHRSGQKWSTGPITKAGRSRLRWILVEAAHVAARHDPQLGRFYHRLRAKKGTNVAVVATARKILVVIWHLLSRDGIYRGRQVQMIARKFLEWGRKVGEKDRLGSNKEFVLRQLRQIHVNNLTHIQAVRHAYALTGPH

SEQ ID NO: 451705 - protein, 390 aa, unidentified
MMQHDVVVGVDVGKSFHWVYAVDQQDQVIYDQNVDQDERQLDALFAGLAGGGKRVLVVVDQPKNIGALTLACAVRAGCDVACLPGLAMRRAAGMLPGDAKTDHRDAQVIAVTAKAMPQTLRHVDTSGARADLVVLASFDRDCLVDRTRQVNRLHALLAEVNPVFEKTVYARIDSVFILALLARFGGPWGIKTAGRAKVTAWAGKQKRVPKEALAAVLDAAWAMDHQPAGAAVCEQIVIPAVVARIAELTLIRKTNQARIDALLSADPTYQVLRTMPGVGPATAAALVTTVDIDMFENHDKLASYAGLAARTRQSGTSIKHETASRAGNRQLKNALFLSAFAALNWDPQAKAFYDAKRAAGKQHNTAIIALARKRLKIMYAIMRNNTPYQT

SEQ ID NO: 451706 - protein, 412 aa, unidentified
MEQQRNKVCGADIHKRFLVATILSRDGIKITQRFKMTIEDLLKFKEWVIDNGCEQVAIESTGTYWYPLQAVLEGSIDLILAHPYKIKHIPGKKTDQLDSEWIAELCLNGLIEPSRVFPKEDRELRRLTRAREGYVKQMTQEKNKIHQALDSSCIKLSSVLSDIFGGSGRHVLNGLLDKRNIEDLLEGIPSKRVKKKADQIREAIKSNLEVSQIFLIKQALMLIDQIQKIIDEIDEEIKIRISKRKGNLAIALSVPGMAFISATAILAEIGNYDDFDKPEKLAAWCGLVPSLYQSADKCLLGGITKQGSRHIRRMLVEVAFAISRTKNCRLNQFFLKIQAKKGPKVAAVALARKILCILHHLLVNKEKYEEVGFKKWRIPKFEPARPPKEISLQEMIDLVIKAGYQVKKGDPG

SEQ ID NO: 451707 - protein, 362 aa, unidentified
MTIVEDTRVLAGGTDAHPGAPGITGGVDTHADTHVAAALDPVGGLLGVREFPATAAGYAALLGWLRGFGTVALVGVEGTGSYGAGLARHLVAADVGVVEAGRADRQDRHRQGKSDPLDAVSAARAAQSGRASGAPRGRDGTVEAIRALMVAKRSARHERTQAVNQARALIITGPDELRARFAGHTPAALVAELAALRPRPGDVPGYATRVTLRELGRRARFLDSQLDRLDELIVPLVTARAPGLLTLHGVGPDTAAMLLIAAGDHPGRLRSEAAWAHLCGVAPVPASSGKVTRYRLNRGGDRQANHALWRIVITRLSSRPGHPATRAYAERRAAEGLSKKEIIRCLKRYVAREVYRHLRDSL

SEQ ID NO: 451708 - protein, 434 aa, unidentified
MEEVTDEPLYRDRVCGIDIGKAQLYATIRVPSDSNPARRASETREFATTRRGVLALADWLRSWQVPAVVMEATGDYWKGPFYRLEAEGFECVLADAKQVKNLPGRPERDPSDSSWLAQCFERGAVRSCFVPDPEFRIIRLHTRYRRDLIEERTREKNRVEKLLEGAAIKLSSVVTDLHGVTGRDIMDHLIAGERNPKVLAQLARGRARRKITELEQALEGAEFFTDYHAGLLATMLARIDQIDAEITRLSEVIEQLLAPWEEQLAQAESQPGWGRRSAEDVLAETGPDMSKFPTGGHLVSWAGRAPLDHQSGKRQGRSRHKKGNKYVAAATGETAISAGKTATREGARYRKLARSRGKAKACVALGNTQLKVYHKLLSNPGMRYQDLGPDYYQRRAQARRKIAYHVRELEELGLEVTLCRPGPAHDDPKPTQAA

SEQ ID NO: 451709 - protein, 345 aa, unidentified
MKRVIGMDIGDKKNIMVVFNEAGDEVKVASITNTSKQVQKFFSQYPGAVVVMEAGTHSGWLSRLLESMGHEVCIGNPRKLRVIWDSKDKNDERDARILGMMYRLEPRLLHRIFHRGAQAQLDLELIKSRNMLVQSRTKLINHVRCAVKGIGRRIPACSAETFFRKAPEHIPSELQPALSELLRMIYEITERIKDLDRQITGLCEDRYPETAYLLQVTGVGPVTALAFVLTVEDPARFGKSRRVGAYLGLTPRRDQSGETDKQLRITKAGDIYMRQLLVGCAHYILGPFGPDCDLRSHGMRIASRGGKNAKRRAVVAVARKLAVLLHRLWSDQSEYVAIRNRKRAA

SEQ ID NO: 451710 - protein, 353 aa, unidentified
MSSDKYIAMDVHQATTVTSVLNAAGREVDQSVIATKAQPIRSYLEGFSGPLHVTLEEGTYAAWLYDLLEGRVAELVVCDPRHNALLKEGSKTDRNDARKLADLLRTGMLRPVYHGRHSLRPLQELVHSYEALLEDTTRAMNRIKALYRGRGIDCAGRGVYTQKQRASWLEKLPAGASRLRGELLHEQLDHTRSLRRQARLALLKESRQHLISARLREVPGLGPLRVARLIAWIQTPHRFRTRRQFWTYSGLGLVIFDSGEYRLVQGRIVRRAHPAKIRGLNRNHQPRLKEIFKSAALSAIRQPGPFKDYYDVRVSQGRDPALLRLSVARKLAALALSLWKKGGRYQAEDVKQA

SEQ ID NO: 451711 - protein, 456 aa, unidentified
MKIPQSTIRLLTGRLVTILLNREVSTMKSNTQNAKIEAITEKTLVLGIDVGSETHYARAFDYSGIEYSKKPFKFSNTETGFVTLKEWILDLKERHEKDKVVPGMEPIGHYWFNLGKFLQDNEMKLVLVNPHHVKKSKELDDNNPTKNDRKDPKVIAGLVREGRYMIPYLPDGVYADLRTASNIRFQLQAELTRIQNRISRWFNIYFPEYKTVYGKPDAKSGMLILKAAPLPEDILTLGIDGVNEIWRDAKLRAVGKARAKTLIEAAEHSVGSKEGVVSARMEIRMLLDDYESRNMRLQEVMVLMEELVKEIPMAEKLLEIKGVGIRTVSGFLAEVGDISRFNNPKELQKLAGLALVENSSGKHKGETTISRRGRKRLRYLLFEVAMSLVAKNPEFRELHNYYTTRKRNPLKKMQSLMAIAAKLIRVFYAMLTKGVDYDPKKMVSDIKRPAVYLQAA

SEQ ID NO: 451712 - protein, 355 aa, unidentified
MMPSMTQRTIGVDLGDKHSNFCELDETGAVLEEGRFPTTAAGVKRRFEHLPPTRIALETGTHSPWVARLLLACGHEVLVANPRKLRLIYQNDKKSDRVDAESLARLARVDPHLLAPIHRRSLETQRDLAALRARSALVRARTQLVNHLRGAVKAFGGRLPKCSTPTFHIRAAAHLPAELATALEPLLRMLAQLSTELRAWDKRITREMTTAYPETARLAQVPGVGPITALTYRLTIEDPQRFATSRIVGSYLGLRPRRRASGLQDRQLRITKGGDSDLRRLLVGCAQYILGPFGPDSDLRRWGLALATHGGKSAKKRAVVAVARKLAVLLHRLWVTGAPYEPRRHCSISSAPVVG

SEQ ID NO: 451713 - protein, 340 aa, unidentified
MGEITTIGVDLAKHVFQVHGVDAEGATVLRKQLRRGQVLAFFSKLPPCIVGLEACATAHYWARELGALGHEVRLMPAQYVKAYIKRNKNDAADAEAICEAVSRPTMRFVPTKTAEQQAALLLHRGRERLVRQRTALVNALRAHLAEFGVIAPQGLRNVGKLIGIVRNEEDARLPDAARQVLQVLAAQIEQLETAIAELEKQLMAWHKSNPVSQRLATIPGIGPIIATAIAATVVEPNGFRSGREFAAWLGLVPRQNSTGGKNRLGGISKRGNQYLRRLLINGASANLLRSKATNADPWVIGLRRRRPSLVVAVALANKTARIAWAVMHRQENYQRMAAAA

SEQ ID NO: 451714 - protein, 465 aa, unidentified
MTAGNKLWRNRKERKEWARRLQSADPGLEVVHPHAAGIDVGNSAHYVAVRPDRDSEPVRRFECFTADLHRMADWLQSCDVKTVAMQSTGVYWIPLYEILEERGLEVYLVNARHTKNLPGRKSDVQESQWLLKLHTYGLLNNSFQPVSEIRGLRTYWRQRGEHVRGAATCIQRMQKALTQMNVQLANVISDISGLTGQLIIRAIVAGDRDPRKLAGLSDRRVHASQEEIAKSLEGNWRPELLFVLQQEIDMYDTYQKRIVECDRQLQKQLARLTGVTPPGKEPRQKPKTKPAAAKNAPRFDLSSELQRVTGVDLTRIDGIDVMVAQTLLSEVGLDMSRWKTESHFASWLGLCPDNRISGDKVLARGTRRVVNRAATALRQAANTLIRSRSYLGAQYRRLRTKLGAPKAITAMAHRLARLVYRMLKYGQASVDKGTEYYEERFRQQQIQLLRKRAAKLGLQIAEIQA

SEQ ID NO: 451715 - protein, 410 aa, unidentified
MTKEDFIYVGIDLHKEIHTAVMIDCYNNKLGEITFPNRPADFPKLVTKVKKCNTDAKEVVYGLENAYGYGRALAVWLIDKGYFVKDVNTAISHRQAKHRGAMYRKSDSDDAEAIALATLNMLDKLPDACPNDAYWSLVQLVHRRDNIMKQRTRLVNQLHEQLCIAYPSYKSFFNDISRPTALYFWEHYPSRKYLRGKSVEDLRKELVPVSHNRCSTKNCEKILDAAASDKVKNNAYQDARDMVTLSIVSDLQHYDSQLAEVDKMLEQMYKMLGCTLTTIPGVNVITAVKILAEIGDIKRFSNANKLAQFAGIAPLHLSSSGKGKDVATKQGNRRLQATIYFLAIQMVQVSSKGTPRNSVVRAYYEKRKAEGKTSQQALICISRRLISIIYGMLKHGTEYRMPVVESAGEK

SEQ ID NO: 451716 - protein, 339 aa, unidentified
MTVKTVGLDLAKDVFQVHGISENGRIIFNKAIKRAKLLSFFETLPPCTVGMEACGSSHHWGRQLRKLGHDVRLMPANYVKPYVKRGKTDAVDAEAICEAVRRPTMRFVEIKTEDQQAILSIHRTRDLAVRQRTQLANMIRSLLREFGHILPIGIEAVTAFAKRHLDGDHPDMPEIANGMLGIQCYQFIGLNERIEGYSKMIEQHALLNADARRLMRMPGIGPVTASAIVATIGDAKQFRTGRDLAAWLGLTPLNKSSGGKERLGKITKQGDRYIRKLLVVGMTSRAVMAKRSPEKVDLWTAKIIADKPFRLATVAMANKAARSIWAMLTKKQEYRQPAF

SEQ ID NO: 451717 - protein, 375 aa, unidentified
MQEKLRFLGLDVHAETIAAAIAEPDGEVRSLGTIPNRVESIRKLIKKLGPAEKMRACYEAGPTGYVVYWQLAELGIQCEVVAPTLVPIKAGDRVKTDRRDAEKLARCYRSGDLTAVWVPDEGSEALRDLVRAREAAKQDQMRARHRLSKFLLRSGLRPPSGVRPWTRPYLIWVAQLRFPQIAQEATRQDYLHEVEHMRERVARLEQAITEAVKLASPALQQVINDLQALRGIADISAVTIAAELGQVSRFESARQLMGYCGAVPSEDSSGKRIRRGGITKTGNAHLRRIVVEAAWSYRRPPGVWYGLRRRQESISEEVKEIAWKAQHRLHKRYMKLGAAGKDQRKIVTAVARELLGFIWAIGTRAEAVASQQLAT

SEQ ID NO: 451718 - protein, 407 aa, unidentified
MSLKVLYERCAGCDIHKKAITIHVVVPEGGETRTYGTTTAELLEAVEWLRAHRVTHVAMESTGVYWKPLYNLLEATGLTVFVVNAAHMKAVPGRKTDVQDSVWICDLMRHGLLKPSFIPLRPQRELRELVRYRISLIRERADEANRIQKVLEGGNIKLGSVLSDILGKSGRAILTAIVAGANTPEELAALADRRVRATSEELAEALRGRLNDHQRMLLRMQLDHIRYLDQQVEVLDTEVAERLAPFEPQLKQLDTIPGINERAAENIVAVIGVDMGRFPNADHLVSWAGMCPGSNESAGKRRSSRTRKGNPILRSTLTQAGQAAGHTKNTYLSATYQRIAARRGKKRAAIAVGRGILEIAYFVLRDGVAYAELGANYYDERKKAAVVRNAVKRLERLGYRVAIEPAA

SEQ ID NO: 451719 - protein, 435 aa, unidentified
MPVMRADAAGIDVGATELFVAVPVDRDAEPVRSFPTFTQDLYALAAWLQRCGIKTVAMESTSVYWIPVFQILEARGFEVYLVNARHVKNVPGRKTDVSDCQWLQFLHSVGLLRASFRPEQAVCSVRSLLRHRESLVQMAGTHVHHMQKALDQMNLRLHHVISDITGVTGLAIVDAVLAGERDPMVLAKLRHQRIKATEETIAKSLVGDYRAEHIFTLRQSLFAYRSYEKLIADCGGEIQRALEEIDSKNDAPPTEGENANAEKEPFQLSQELERILGVDLTEVPGLGPLNIQILIGEIGPDLTKFPNASAFASWLGLCPANEVSGGAILRTRTRKVNSRAAKLLRLAAQTLYRSETALGHFYRRMRAKLGGPKAVTATAHKLSRIIYHLITTGQSYDETVFAQQQARYRKYQEAKLHSKAREFGFQLIPLTANPE

SEQ ID NO: 451720 - protein, 381 aa, unidentified
MKTIKQTTPISNKQIEVKAEVIKLGIDIHKNEYVVVQQTDGQAPKPPQRFKPEAFLQWVANLLERTKRIVSCYEAGCFGYVLHRNLEAIGVENLVVRPRNWDEYGSKVKTDARDARELCSCLDRYLAGNVNALSVVRVPTEEQERSRSLSRQRETLAKEQKRMQNVGLSNARYYGIELPMSWWKSCNFCKLEAELPQWLLAILRPIQSVLAVINAQLREVTAREERKANRKLPVGLGALTASVLDEEFRDYSRFTNRREVASFTGLCPGEHSSGTSRRQTSINKHGNPRIRHNLIEACWRLLQFQKDYKPILYWKERMCKEPFGASKKKKMIVAIARRFAIDWWRINTGQIQPEEVGLKVDYPSAYATKALREGRTSKIYA

SEQ ID NO: 451721 - protein, 365 aa, unidentified
MQKISTMRTSGKNIFEGQLTIGVDLGDRSSAYCVLNEAGEIVLEHKLATTPEAMKQVFGSMPRCRIAMETGTHSPWVSRLLTALGHEVIVGHAQKVRLITKSQRKDDRLDARTLARLARIDPELLSPVKHRSAQAQLHLTEIRARAVLVSARTALVNAARGLVKSYGERLRKCGTQQFRRETTNGLSTALREALEPLLREVESLNERIQEYDRRIEKMAKQTYPETALLKQVKGVGDLIATAYVLTIEDPHRFRKSRDAGCFVGLQPGRRNSGESEPQMRISKEGDEYLRTLLVQGAHYILGPFGEDSDLRRWGQKLAARGGKNAKKRAVVAVARKLAVLLHRLWVNGEVYEPLHNSQREVQAAA

SEQ ID NO: 451722 - protein, 337 aa, unidentified
METKLFMGCDIAQDTFAFCLRDQSKVVCQGEVSNSKKAIQAWLKELKQIYHVDLSSVIFCLEHTGIYGMILMRTLYTRSLIVCVEGASNIKLSLGLQRGKNDRVDARRIAEYAMRYTDRLKQWKPKREVLERLQLLNGMRSRLVKALKVLNSHTKEAGRFLGKNEYMLLKKGTQDSINAIESNIKKADKSIEALIKSDENLKRLSDLVTSVASIGMVTCAAILVKTNEFQDFREAKKFACTSGLAPFEHTSGKSVRGKTRVSHRAHKDLKTLLHMCALGAISRKGELQDFYQRKVGQGKNKMSVINAVRNKLIHRVFAVVRDGVMYQKNYQYNLVMS

SEQ ID NO: 451723 - protein, 416 aa, unidentified
MESQRNKVCGIDVHKRFLVATILSRDGKKETKRFSVTLEDLLKFRDWVIDNGCEQVAIESTGIYWHPIHAVLEGKVDLIVANAYKIKHTPGRKTDVSDSEWIAELCLNGMIEPSRIFPKDDRELRRLTRAREGYVKQMTQEKNKIHHSLDSACIKLASVISDIFGKSGMYLLNCILDGRDIDEIIEGIPSSRLKKKADQIKEAIKSHLEASQIILIRGSLSLIRSIQERIDELDREISARIERRKNDLTIAMSIPGTGFISATAILAEIGNYTDFKNPEQLAAWCGLVPSLYQSAEKVVLGGITKQGSKHIRRMLIQVAYAISRTKDSKLQRFFLRIQAKKGSKVAAVALARKVLCILHHLLMNQEIYLEDKARKNMRQKPLVSPSPIEMPIQEMIDCIVRAGYVVMKSDCRGGPG

SEQ ID NO: 451724 - protein, 369 aa, unidentified
MFYLGIDQHRKQLTVCLRDEGGNVVLRRQVSTEWQRVREFLREVDNKCISAGGYVVIVEVCGFNDWLLKLLPEYGCREFLLIQPEERDRRKTDRRDAHRLSELLWINRERLLGGQHVQGLRRVFIPSADDRHDRQLTTLRKQLGATRTRVINRVQHTLQKHNLQQECPTKSIRTQGARSWLEKLALPDIDRLELDQALAQWTSLDEQIAEAESRIAQRAARNPNAELIATLYGTKAGYAALALAASIGPIERFPRPRSLANYWGLTPGCRNSGETKQRLGSITKQGCATARFLLCQLSPHVLRRDAWMREWYKRIKRRRGSKIARVAVMRRLATIIWQMLKRGQRYMTGDPAEWRAAVETATQSKPDAA

SEQ ID NO: 451725 - protein, 341 aa, unidentified
MKITTIGLDLAKNIFHVVCCNTQGKIVKKRQLRRSQVLSYFANIPPCLVGMEACGSSHYWARELNKLGHHAKLIPAQFVKAYLRGNKNDYNDALAIAEAVVRPEMRFVAIKDIEQQDVQALYRMRERCIGTRTALSNQIRGLLAEYGIAIPKGLKALRERISDLLADGDNELSDFFRPLLAQSYLQLQQLDEHVAQYTRQLTHQSKQNIHCQRLQTIPGYGPIVSSVFASVVGNGSAYRKGRDVSASLGIVPRQHSSGGKDTLLGISKRGDRYLRSLLIHGARAVVSQAGKKDDPLSLWIQRVEARRGRNRATVAYANKMARMGWACLHNETVYQPCVTTR

SEQ ID NO: 451726 - protein, 404 aa, unidentified
MAAICGIDWATEWHDIYVCHSNSGEVLCQQRVTHDEAGICALIDLLIEHRVKLAAIERPDGLLVGRLLAAGICVLAIHPNQVKAARDRYRAAAGKSDRFDAFVLCELARTDRQRLPALAPSSDETMALRALVRTREDLVAARVGLANQLRAQLDAFWPGAKQIFADADSPIGLAFLARYPAPQDAHRLGPKHLASFLARHSYSGRKTPEELLERLRSAATASLGDLETDARRAAVLGLVAALEPIVCQIRELTSQIAGAVRDHPDGPIFMSVFKDPKSVVCAAGLLAEIGDNRHRYRTRDSLAADAGMAPVAIESGKRRTASFRWACDKRLRNHMSVLADSTRHWHPWAHDVYQRARDRGCDHPHAIRILGRAWTRILWRCWQDHTPYNPTQHRALTRHNQPAG

SEQ ID NO: 451727 - protein, 353 aa, unidentified
MITIGVDAHKRVHVAVALDDAGSELTQWRGPNSPNGWRKLAVWGSALGVERRWGVEGAWGYGRGLAQHLVAGADTVYDINARWTAAGRRRAKRPGKSDPLDARAVALVVRQEAPDLPAVHAEDETAILNLLTIEREGAIGEATRLRNQIHALLVQLDPEYELRLPALKTRAGLAVVIRYTTTSENAMHRERAAAVRRLAERLALVLSQADELARRIRDAATETFSPLTRLCGVNLLTAGALAGILGPGHRFATDAQVAAYAGVAPLEASSAGLVRHRLNRGGNRRLNAILYRIALTQAQHLDQAREYLDRRVAEGKTKREAIRALKRFIIRAIWRLWLECKAQTTEVSVQYAA

SEQ ID NO: 451728 - protein, 360 aa, unidentified
MRIIGCDLHARQQTLAMLDTETGEVVNRTLMHEGNQVREFYSELPGPVLVGIEAIGPMQWFLDLLAQLGIECRVGDAAKIRAAEPRKQKHDRRDAELILKLLVEKRFPAIWMPSKELLDVRALLLHRHQWVRLRTQVQNALQAIALANGLRRGPSLWSYDGLAKIAFLPLPPHTSLRRSALQALYRHMDEEVEKLTVQVAEQVEHHSGAQLLMTHPGVGPVTALATDVFLGDPQRFADGKALASYVGLIPEERSSGRRRRLGRISKQGNPLLRFLWNEGGAHAARRDPELRRFYRRKLVQKGLGKARVAVARKLGIRLWIMLRDQIDYQEFCRRGQKQSSAACAGMPEVGNGANRHRPVE

SEQ ID NO: 451729 - protein, 379 aa, unidentified
MAEGTTVFVGLDVHKATIAVALADAGGGEVRSHGVIPNTPTAVARLVKKVGAPARLRVCYEAGPCGYVLLRQLTKLGVACTVVAPALIPTKPGERIKTDRKDAAKLARLHRAGELTAVAVPTPEQEALRDLTRARQAAQQDLHRLCQRLRTLLLRLGVAEPAKTKRWSARWRVWLAGLSLEQAVQQTVLDDLRGAIGEAAARVDRLTAAVEAQAASGPFADLIGALTSLRGVGVVTAVTLVAELGDPGRFDSPSQLMAFAGLVPSEHSSGGREQRGRITKTGNAHVRWVTVEAAWHCRRKPHLSQELARRQRGQSAALTTIAWTAQTRLHARYVHLVVKGKPKPKAAVAVARELLGFIWAIARQVVAERAAGSADPIAA

SEQ ID NO: 451730 - protein, 457 aa, unidentified
MAPAYRAIPNLAKGVSMAKTLYLGIDVSMAENACCPLLQDGTEARRRFTVPNNLPGAEQLAKEILTLMDHYHLDRLLVGLESTNLYWWHLACFLNSSPKLAPFHPRVYAFNPRLVRGFKKALPNKGRSDIHDSYVIADYLRFGRLPSPFLPNELYQPLQRLTRFRYHLMHQITREKNYFLTFLFLKFSEYQNLDPVSNIFGAASQAVLTDYLTVDEIVATPLEKLVSLLAEEGNHHFSDPEAVARVIQRAAKDSYRLHPSLNEPLNLILSTTLENIRTLSCQVKKIDPAIEREVRKFPNPLDSIPGLGPVFAAGILAEIQDIQRFPDQSATAKFAGLFWRTSESGTFQAEETMLDKSGDVYLRYYLIEGANLVRMHAAEYGRYYQAKYNESTKHKHKRAVVLTARKLVRLVDAMLRHNQLYTPQLLNVTEEVMPALTRARPAKQHHYRQPGTCVPAL

SEQ ID NO: 451731 - protein, 338 aa, unidentified
MTIVMGLDQHRAQITADWVDTDTGEVKRGRVAPADRAGVRKFLGRFGGQELDVALEATTGWRFVVEELRSVGAEVHLAEPAEASARRGTKKRAKNDRADARHLRELLMAGRVPESWIPPEHILDLRARVRLRHTLVDQRGEWQQRMQAVLYHHGCPQRRALMTGEGREWLRSQPLPASAREQVTVAVAMVDALEAQIAPLSDELRSYARRQAGCKGLMAHYGIGALTAVTILAELGDCRRFSSSRHAVRYAGMDITVHQSDQRRAPGHLSRQGPPALRWALFEAAQVARRPGSPDRDYYTQAAARLGGNRACLSVARKLLKRSYHTLRELGEEALQPA

SEQ ID NO: 451732 - protein, 358 aa, unidentified
MERFYLGVDWADQFHQVWVSDFDGKKVVEKKVTQNIDGLAEFGRWLDEQRAKPIELWAAIEKPQGRIVDFLLDHGVEVYPVNPKALDRARDRFRMSRSKSDGFDAYVLAQFLRTDHGHLRALKPNSVQAQELKLLTRDQQRLGHQKTRLLNQLTATLKEYYSRPLEVFSDLETQIALDFLKQNPTPDDLSKLTRRQWNRFAKREHHLGAERAQELWEQLNQPQLTVPEHVVRAKAHLLRVLLGQLDPLRKAVKSYEERIKSFFGSMPAAELFKGLPGAKTGTIIATLWAELGDPKSRWESFRHLQAEAGVVPVTKTSGKSRVVQFRFSCNKIMRHAAYWLAFVSLNRSEWANHYYRDQ

SEQ ID NO: 451733 - protein, 358 aa, unidentified
MKTYFGCDAHKHYSIFASVDETGASGPFVRVENERSLFRRHLRTMPPGSEIAVETVGNWYWMIDEMERAGHMPLLTNAGKAKAMMGQVNKTDKLDARGLALLLRNGTLPSIWIPPGELRDQRELPRMRMTLVRMKTMLKNRIHATLAKYAIHIDEVRDPFGAAGRKLLEKRIRELPPQTGHSVEQQLELLDDVEDQIKETEIQIKTIIQDTPAMKLLMTLPGVGMILAVVISLEVGDVDRFSGPEKLASYAGTVPRVKASGGKIFHGPVRSDVNRYLKWAFIEAANTIVIFHKRWTGRHVAALYARLREKRGHAKASVAVARHLAEATYWVLKKGESYRERNAKKPVSSTREQARQFA

SEQ ID NO: 451734 - protein, 413 aa, unidentified
MTEHNFAWFAGVDWGSEGHQACLVDAQGRIVGERRFLHGGTGLADLCDWLLSIGGAADTVAVGIEVPHGPVVDTLIDRGFVLHAINPKQLDRLRDRISVAGAKDDRRDAYVLGDGVRTDRRLFRRLHVTDPRLVELRAWSRLAEELTEERVRLGNRVHHELWRYYPQMLKISTEDVAAPWVLDLWNLVPTPAKARRLRAAPVEKLLKQHRIRRIDADTVLRILQEPAIKVADGVAAAASVHLRSLFTRLGVVNRELRQAEAKLDALCAAIGETDADSGEGLQRQDVMILRSMPGIGRINLATLLCEGSGPLSRRDYPALRTLCGAAPVTKSSGKSHIVIMRYAAHVRLRNVVYHWARVATQHDPKCRARYAALRGRGHSHGRALRGVADRLLALACVLLQRQTPFDPNFAQAK

SEQ ID NO: 451735 - protein, 427 aa, unidentified
MSEVECVSQEPHFAAFVGIDWADQKHVWCLQAAGSEKRDSGELEHSPEAVEAWVGQLCQRFGNRPIAVAVEQSRGALVFMLSKYEPLHLFPVPSTMAANMREALYPSGAKDDPRDADLLLDLLVQHRDKLRRLSPDTEATRRVQNLVEERRKLVDEKTAQINRLTSHLKIYFPQMLDWFEHLDTELVGALLERWPTLEELQKVPPPKLRTFFRKHHGRDQELIERRILAIRQTIPALRDRAVIEAKSTVVKVIVQVIRSLVKGIADLDEKIEEAAAAHPDFFIFESLPGAGAVIAPRLLAAFGSQRERYGKAGEVQSYTGIAPVTERSGKKKWVHFRWACPKFLRQSFHEWAGHSIAYSVWARSYYQQQRSQGQDHHAAVRALAFKWIRIVFRCWKDGVAYDESKYLASLARRGSPLAALAATAKTL

SEQ ID NO: 451736 - protein, 430 aa, unidentified
MTELNPTPASAALVAIDIAKHRHEVLIEAAGHQRRRRLTILSNKADYDRLVEILTTYGCPVLIGFEATGDYHRGLAYRLLSAGFELRLVSSVALARTREALHNGWDKNDPKDAQVILHMLQIGATQRYVDPLAVGINDLQELSKTHEAISKAKTEIWHRILTHYLPLYFPEIERFAGNSRSDWFLALLERFPTPGSIMALDRESFVEEAWPVIGRKVSKSRLLNDIYETARASTALPVSESSAAITMFRMVLAEARSLIRQRDRIEKLAHAMLADHADYQRLCTIPGIGPIHALTILAEAGDLRRFGHHRQFLKFCGLDLATCKSGTFRGRTKLSKYGNARLRRALWMAAQVAARQRDNSFRDKLGRYTERDRQDADLRRKAVTALTAKMARVVHALIKGGVEYRPFFERPVPGGRTSLCAGREGASATL

SEQ ID NO: 451737 - protein, 343 aa, unidentified
MQTITTIGLDIAKSVFQVHGVDAGGQVIVRRQLKRRYVLTYFQKLSPCLVGIEACASAHHWSRELQALGHTVRLMPPAYVKPYVKRQKNDATDAEAICEAVTRANMRFVPTKTSGQQSGLLLHRARHLFIRQQTSVINAIRAHLAEFGIVAPVGRHGVEELLNVVTDPNDKRVPDIARACLSALGDQLQSIKQQILEFDRLIRAWHRSNEMSMRLEAAPGVGPVLATALVAAVADPKSFRSGRNFSAWIGMVPKQHSSGGKNRLGNISKQGDRYLRGLFVAGALSVIRYAKVHGTKHRPWLTALLARRPTKVAAIALANKIARMVWAMMATGERYKEPVALAR

SEQ ID NO: 451738 - protein, 379 aa, unidentified
MEEYSKYVGLDVHKDSISVAFTGMDRGDPVSYGKVANTQAAIAKLVKRFTKHGEDVGFCYEAGSCGYEIHRQITLLRCDCMVVAPSLIPQRPGDHVKTDRRDAKTLARLFRSGDLTSVWVPGDEQEAVRDLVRYRSDMKNNEKHAKQQLSALALRHGHVFQGKTTWSQAHFRWLENLKFPVPVQQIVLQESIDSVIDLSRRVASLTSEMEKVLATWIFTPVVEGLMAMRGVSMITAMTIVSELGDITRFDNPQQLMGFLGLVPSEYSSGCRQRRGGITKAGNKHVRRALIESAWSYRFPARKTAIIQRRAAKTSVAVQAIAWNAQKRLCGRYQHYIRKGKLRTQACTAVAREMAGFIWAIACEVMSKMDISAACKSRCA

SEQ ID NO: 451739 - protein, 361 aa, unidentified
MTSMTHDAREITGGVDTHGLTHHAAVIDPLGRHLADREFPATVRGYRDLLDWMRSHGALSAVGVEGTGAYGAELARVLAAAGVTVVDVDRPDRKTRRMKGKSDPIDAYAAATAVASGRATGVPKSRDGLVEAVRVLRVTRRSAVKARTQAMNQIRSMLVSAPAALREQVAALDRAALIRTLARLRSGGNLSTPLAATRAALRRLARRHQSLDSEISELDAEIGPLVRQAAPQLLALFGVGPETAGQLLASAGDNPERMRSEAAFAHLAGVAPIPASSGRTHRHRLNRGGDRAANNALHTIVLVRMRYDERTRAYVARRTKEGLSKKDITRCLKRFVAREVYRVLTSTPTEQITQTDLAPAT

SEQ ID NO: 451740 - protein, 312 aa, unidentified
MADQVFAGIDVGKDKLFVNIYLDSQVRDFPNTHSGLERMSRFLIKNAVDLVVMEASGGYERKPASDLRACGLSVAVVNPTYVRRFAQGMGTLAKTDTIDACLIAHFASVKQPKPQAARTVEEEELAALVERREQLVSLLSVEKNRLSKASDYSKNSIQNSIQFLAGQIDTIETEIKVLVAKSPERQAKLHCMSSFIGVGDVTAVTLLTEMPELGNESREHIAALAGVAPINRDSGKMKGKRRTYGGRARVRRTLYLAALSASKHNPIIRAFYERLLAAGKEKMVALVACMHKILTILNAMLKKGELFNPVYS

SEQ ID NO: 451741 - protein, 570 aa, unidentified
MIKNKNPYRGVWGDAGRHLRVFFIRAILYLATTLVAWEKSIMGNRRTRRKRKQHINKVQGQRLAAEFKGQDLSRVLVVAIDGAKKSHKALLADGFGEIITDTFGFPNDLAGAKMFAGSVRKAAVDINAFKIIVGLEPTGHYAENLVAYLLEQGFDVRQVNSFAVSREREAGLTWSKTDEIDLCAIGQLIINGKSSPLGHTEAIYDNMKYAARARRSTIQRTVLLESQIHAYMDRLFPGFLDRDLFSDPFGLTSMAFMARYSSANAACRAGATRIERWLSSRRGVSNPHEITQAVVELAQGALRRPADHEEALIEALRFRLREHDLLEEQIGNFNIRLAEYLVETPGIWLLAIDRVSVVSAAEYLGELGQISRYDGANQIIARAGMVPRETQSGMIGYSGGITKLGHPKLRYILGVIGHNLLTSNRYFQAFYNRLVDRGGKNERLAKTAVAGKFVRVSWAMMNLKGAFEAPTWCEDDLKKDIRTKMERFLKQFGASQIYRNSIGPRLDKVLVSGGQPSTSNSITGSHQLPSASGTHEEHDRASTKPIHIGSLIPVVLGQMAAEHDVEAHMA

SEQ ID NO: 451742 - protein, 337 aa, unidentified
MNWKYFIGIDVSKLTLDICINQGKEKIFSRSVENRPKALEQLWNELLKKIPDFIPAEILCCCEHTGIYNEHLLCFLNNKKVAICLENATHIKFSGGLTRGKNDKVDAERIANYAYKERESLRLWEPPREIIKTLKHLSVLRVRLLNVRKALVVPLEEMKRFQKDAAKMMHSHTQATLKSIEKDLAAVDIKILEVIKKDETLNRLFSITKSVTGVGKVTAVEILITTNEFKNIKTAQQYACYAGVAPFEHSSGTSIKNKPRVSHKANKRVKTLLHMAAMASIKQSGEMRDYMLRKLEQGKSKMSVLNAVRNKIIHRIYSCVMNERKYEKNYKKTLLYP

SEQ ID NO: 451743 - protein, 441 aa, unidentified
MRIMYERCCGLDIHKSSIAACALITEKGKPQEETRRFGTMTGDLRELAGWLQQKGIRHVAMESTGVYWKPVWNILEPAGFELLLANAQEVKIVPGRKTDQKDSQWIADLHKHGLLRKSFVPPRTIRDLRDLTRTRAILTQEHSSVCNRIQKVLEDANIKLGSVASDVFGVSGRAILRALMKEEKDPEVLAELSKGTLRKKIPQLRRALEGQITAHHRSLLTGHWNRMEFLERQIADFETQIAQRMKPTPEEMALTIQNAAEEVPLPLSPREEAIQLWMEIPGVGWTAACSMVAELGVNMDQFPSAAHVASWAGLCPGNNESAGKRLSGKTRKGNVWLRRTMCEVAWAASHTKDSYFAAQFRRIASRRGSKRALVALAHSILVTAYHMLKQKRHFLELGGDFFDVINRDKVRNRLVQRLTKLGFEVQLKPKDAVEKVTSVTN

SEQ ID NO: 451744 - protein, 406 aa, unidentified
MVQKLYERCCGLDVHKKSVTACIITPKGKDIETFGTMTEELFALIELIKSKGCTHVAMESTGVYWKPIYNLLELEEIEALVVNARHIKAVPGRKTDVKDAEWIADLLQHGLLTNSYIPDRDQRELRELVRYRKSLIHERAGEVNRMQKILEGCNIKLASVATDITGVSGKAMLKAIIDEAADPAVIAKLAKGRMKNKRKELEKALIGLVGPHQKMILSAQLKHIDFLDEQIKELDREIGERMHPFEQELELLDTIPGVGRRTSEEIVAEIGTDMGQFPSHGHISSWAGMSPGNNESAGKRKSGRTTKGNKSLRATLVIAARSAARTKNTYLSSQYHRIAARRGANRAAVAVGHTILVIAYHILKKHQPYIELGANYFDERKKNYVVNNALKRLESLGFKVTLEAAA

SEQ ID NO: 451745 - protein, 274 aa, unidentified
MNYVGVDIHKKYSVLCALDESGRKLREGRVEGNSARGFAQFFAGLEGPSKAVVEACWNWGLIHDELEELEPVEEVVLAHPYKTRLIADAQIKTDRLDAHALGTLLRGNLVARAHVPGRETRARKNLLRQRLYWARLRTMLRNRIHALLDRQRELELPQCSDVFGVRGLGFLRRLELAEPDATLLREQLALHDLIAQQMKAQEKRIAAEFKTEAVHQHLLSVPGIGITLAAVIGCEIDQIERFNSAEKLCAYAGVVPTTHASGVKTKSRPTPALL

SEQ ID NO: 451746 - protein, 407 aa, unidentified
MICVGIDVSKRKSTVCFMAPGDKIIRRPFDVKHTKEELQPLVDEIRVQAKYDEIKVVMESTGVYHLSIAYFLQQNGIFVSVVNALKVANFNKAENFRHTKTDSIDSTNIARYGIAYWAKLPQFDLNGDKYFLLKRLCDAYLNFSEERSRILLQLQSQLEQTMPGIFDLFGGFDINSGKDKLLDFLERYCHIEDIIAKSEAEFVASYREWAKEKGYRSNESKAATIYAQAKNGIPSIPNNPIVRKTIMWYVGLLRRADETLMASLTRMEDIAKDLPEYELVGEMGGVGRVTRVALIAQIGDVRRFKNKHSLICFAGLTPSIHESGKFRASQNHIVKKGPARLRKVLYQVMMSLVMHKIPKDDAVYRFIKKKEAEGKYKKVAKVAGMAKFLRIYYGRVMHLYRDLGLAA

SEQ ID NO: 451747 - protein, 420 aa, unidentified
MIPAVIERCAGIDVGRKFIDVCVMIGEADAEPTQETRRFSTLNEDLERMQQWLRENRCTHAVMESTGSYWRPIHNILDDGEMEVLLANSQHVKNLRGHKTDRNDARWLAHLLRHGMIRPSFIPDRETRELRDLTRRRKQMVGCAADERNRVQRVLQEANVQLGTVLSDVFGQSGLSMIDALMKPDATPEEIAELAVRQARKKIPVLKKALEGHRLTDHHRKLIRHSMEHLAFLEEEIAELDQEIREHIKSSTHLRQASELAQSVSGIQETAAAALIAETGADMGQFRNGGKLANWIGTCPGNNITGGKRKSGQTCKGNPWARRVLVECAWSATRKKDSEAQRHYQRLKPRLQHKRALMATAHLLTLNLYEALATGKPYTEHPQAELTTAKAQRLVRHHSRRLKKLNGWLQAHQQRCAQMT

SEQ ID NO: 451748 - protein, 405 aa, unidentified
MEVLHQRCAGLDVHKRTVVAAVRIVNGNKVTTEVRTFPTTMAGLLALSDWLSENGVTHVAMEATGVYWKPVWHVLSDGEFELVLANAAHVKNVPGRKTDVSDAAWLAELLAHGLIRASFVPDGQTQELRALLRTRKQLVRERSRHVQRIHKVLEDANIKIDAELSDMLGKSGRAMLNAMVAGETDPVRLAALAHPNVKSPQAKLAEALRGRVTHHHRFLLQLHLQQIDGLNTALGTMDGEIEANLTPFRSAVEIVSTHPGISTLSAQAIVSEIGTDMSRFATAGHLLSWSGLCPRNDESAGRRRSNRLRKGAQWLKTTLVQCAQAAKNKKGSYCQAQYLRLRSRRGPQKAICAVAASILTAIYHMLKNGTVYQDLGADHFNRRSKITQTQRLVTPKPSATRSEWA

SEQ ID NO: 451749 - protein, 344 aa, unidentified
MLVKVTTLKHDKIMEIKDTIGIDISKLTFDVRIHSNQMADVFENSGKGFKKLVEWAYGNSPFPKDRILFIFEHTGLYSQALALFLAERNIPFALVPGMEIKKSLGMARGKNDRVDAARIALYGYRLRDEIEPSELPQKDIADLGRLLSLRDRLVKQRAGYKTSLKEQGRVLPRKGNKVLFETQERMVVYLSKQIKSIEKEMADIIGKNKQLGQLYQLATSVKGVGPQTAMFMIVYTNGFTKFKNWRKFASYCGIAPFPNSSGTSIRGRTKISHLANKKIKSLLDLCAKVAIRHNTEMKRYYDRRISEGKNKRSTINIIRNKILSRIFAVVQRKTPYVDFMKYAA

SEQ ID NO: 451750 - protein, 424 aa, unidentified
MKRTQNEKILQIKNETLIVGVDIAKKIHHARAFDNRGVELGKLLKFENSAQGFAAFDAWLAKIQQKHGMTEAVVGFEPTGHYWFNLGDHLAECGHKLAILNPYHVKCARELDDNSPSKSDQKDPKTIAMLVKDGRYRDVYIPDGDYQELREMVRERERLQERLGSLSSQIIRWLDIYFPEFVTVFKDWRGKAAWIALRRFSTPKRMAEVGAQEILLAWREEMKRPSLKKAEALCSTAEQSIGRTQGSGAAVRSLQNIMTEYELLTMQMEQLEEEMQECLFRIPHAAELLAIKGVGMVAVAVFVSEIGDIRRFKDPRQLIKYAGLNLRTNSSGEFKGKTKISKRGRRRLRHALYKAMIPILATNEQFRSLHQRNLTRTQNPLTKMQSIIALCGKLLRVIFALLTKGVEYEPSKIKVVTTDVAQAA

SEQ ID NO: 451751 - protein, 407 aa, unidentified
MDSLKTVFGIDVSSRKSNVCIMVNSQKVNDYAISNDMVGFNQLLDDLKQVTNPQIVFEATGVYSRRLQAFLDMHELRYVMMNPLEAKRKTKDDLHQNKTDKLDAMYLAKMQSEHPQRLAYVQSEEYQELMANNRIYEQASHDLITNKNRLHKAIQLTFPEIEHLMANPRGKNYWSIVLKFPHPNIVLETKEADIIDFLKSLSGIGEKRANDLAQRLIRLAKLACPAVKKSSAHIRGLEMAINNILSAEETCQTALKEMAKLAPKRDLEILKSIPGIAENTALRIISELGDIRRFNNPNQLNAFVGVDPQVYESGNLTAHLSISKRGTAIGRKVLYLAINQIQSAKKAGNLCHIADYYEKRKRSSETASHKKAAIASIHKLLRTIFALITNDQLYSYDIAKHNQRLLS

SEQ ID NO: 451752 - protein, 331 aa, unidentified
MSNIIGIDVSKASLDCAYLRDLDQDKAMRKSCPNKAHSFAALVTWATARSGLPIQALAFIIEPTHVYHEQLVHFLFNAGATVYLVNPGRVRKFAEGMGILSKNDLVDADLLVRYGLMARNLIAYQPVAQEVNDLRSLLNRLDALEHNLRSELNRQEKVGKTMVFHRLEQQSIARAVKRLKAEIITFKRAIRECVKSTPSLQQNFNLLCTIPGVGAKTAWIMIVILASRSFMSAPEVASFLGLNPIEKRSGKSQYRRPRLSKSGSGHYRQKLYFPAMVATRKNPDIKALYERLLAADKTKMCALGAAMRKLVHICYGVVKNQTAYQAQTISS

SEQ ID NO: 451753 - protein, 293 aa, unidentified
MARRPFPLVALNAAGKVLLRRKFNQKQLILFTANLQTCLIGMEACSGAHFLGRALREQGHDVKLIPAQFVKPFVKSNQNDFLDAEAIAEAVDRQNMRFVPIKTDDQLDLQAMHRVRDRLVARRTSVINQLRAFLLERGMVFAKTPAKLKLAVPEILENNANLTLRMRNLVSLLWNEWKDLERQIVAMNVEVEQIASSDPACQRLRQIPGIGPLVATTIVAAIGNGAAFHKGREFSSLAGTCAATALDRRQGQTLRPQQARQQLSEEAACAWCPIRRPPRQARTIAVRSLAQRS

SEQ ID NO: 451754 - protein, 409 aa, unidentified
MNVLYERCAGLDVHKQTVVACRRVVAGAQVVREVRSFPTTTRGLLVLADWLREAGCTQVAMESTGVYWKPVWHVLEGEFELVLANAAHIRNVPGRKSDVNDATWIADLLAHGLIRASFVPPRPIQELRDLTRTRKQLVREVVQHQQRIQKVLEDANVKLDSVVSNVLGASGRRMLRAMIAGEQNPDKLAALADGRLAASRDTLAEALHGRITRHHRFLLKQHLDMVEHLEKTVGEFEAQIEAALKPFHAVIERLLTIPGVSATVASVIVAEIGVDMQRFRTVGHLVSWAGLCPGLNQSAGKVKSRTLRNGAPWLKTVLVQSAWAACRNKDGYLRAQFLRIKSRRGPKKAIMAVAASILTAAYHLVRDPVLYRDLGPVYLLRLDHERAAARLTQRLRNLGYEVQLRKVAA

SEQ ID NO: 451755 - protein, 338 aa, unidentified
MTLYAGIDLHANNSVVVLINEQDQVMYQQRLANHLPTILEQLAPYHAEIKGVVVEATYNWYWLVDGLMEADYRVHLANPAAMQQYSGLKYTNDHSDARWLAQMLRLGVLPQGYIYPKAKRAVRDLLRKRAHLVAQHTSNVLSVQNILVRNTGVRFGVKQIHKLSKKDLESLLPEAEQVLAVTSSLVILECLSRQIKTLEQAVRKHLKHTPAYEQLLSVNGIGEILAQTIILETGNIGRFPSVGDYASYCRCVRSTKISNGKRKGQGNVKNGNPYLAWAYMEAAQFAIRFNPKVPRFYQRKQAKNHLMVARKAVAHKLSRACYYIMRDLLPFDVHKAFG

SEQ ID NO: 451756 - protein, 436 aa, unidentified
MEVRMVNTPSAGMNNEPVDCFIAIELSKSGWVVGFQTPLSDKTSRYQVKAGDANGLLELIERVRTRVARQLSRPIEMMSCYEAGYDGFWLHRVLEAHGIHNHVLDPGSLQVNRRARQPKTDRIDADRMVRALIRHLRGEPEACSVVRVPSIELEDAKRLHRERRRLIAERVQHVNRIKGLCATQGIYDYSPLRKDRLTRLDDLHTGDGRVLPPQLKAEIVRELKRLELVLEMIATVETERDAILTNPASTYLNAGKIKMLAKLKAIGPEFATTLVGEVFCREFVNRRKLGSYVGLGSSPFRSGSLDRDQGISKAGNPTARSVMIELAWTWLRYQPDSALSIWFRERVGTLKGRPRRIAIVAMARKLLVALWRYLETGLVPTGAVLKASSCATWVARAQWAPALDASSTVNQKHIALKIGVAMRSMPHYAPPLREIS

SEQ ID NO: 451757 - protein, 352 aa, unidentified
MKQDSENAAVSTIGVDLGDKYSQLCALDGAGEIVEEGRIATSASAFTRRFKTLEPCRIVIETGTHANWVHDLLVGLGHEVVVANARKVRPISANERKCDELDARMLARLGRSDARLLQPVEVRPAQIRLDLCRIRARDALVTARTMLVNSARGLAKSMGARLPSSSTNSLHRKELDPTVELALKPLMKALEGLTSRIKECDKALGELSEKRYPQTARLQQIKGVGPITSLYFVLAVADPCRFKDPRAIGSYFGIVPRRDQSGGRDPQLRITKCGDPLGRRLLVQCAQYILGPFGADSDLRRFGLRLAAQGGMRAKKRAIVATARKLAVLLFALLRKGEVYEPLRNSTKGQAA

SEQ ID NO: 451758 - protein, 387 aa, unidentified
MKQYICVGTDVHDRWLVSKVALGLNPPERLSFGNTPAGRRLMIEELEKRSRAAGGAEVVVAYEASGQGFGLCDELTAAGIRCHVLAPTRIARSPRHKRDKSDDRDAEQLLALVRAHVLAGNELPAVWVPDPQTRDDRELVRMRLDTAGKLTRIKTQIRCLLKRNQVVRPEGLGEGWTHEYRAWLEALSGGGLAAGPALGPGGREALGSLLRQLESLEGEIARLDGAVAALSRTPRYARAVRELDGLTGVGVLTAMVFLAEMGDLNRFQNRRQVACYLGLVPSKAESGESDDRKGHITRQGSGRVRKVLCQASWARIGHDPHSTACYDRIVRKNPKHKKIAVVALMRRLAIVMWHKAQAARQETRAAPRAPGRRGRSERHGPELCSRR

SEQ ID NO: 451759 - protein, 446 aa, unidentified
MSLDCCYEHAGLCPGRGPSGPAPSGDGRLTGRGGTAMEVMFDRVAGLDVGKETVTVCLRTPGPRGGRRSETRTFKTMTGSLQVMRDWLVEAGVSIAAMESTSTYWKPPFYCLEEVMEVWLLNAAHMKAVPGRKSDVRDAEWIAQLLEHGLLRPSFVPPPAIRRLRMLTRYRVQLMGDRAREIVRLELMLEDASIKLSSVASSLKTVSARAILTAMINGESDPLRLADLAKGKMRRKIPDLAQALSGHFDANHARLARSMLRRLDLVEQALAELDAVIMDACQPWQHQIELLQTIPGVGPKVAETIIAETGADMSRFPSAAHLAAWAGLAPAMNESAGRQTPAGKRHGNKWLTAMLVEAAGSVGRMHGKNYLAVQHARLTKRRGMGRAQVAVAHSILVAAYWMLKRDEPYHDLGADWHSRRNDQAHTRRLIAQLEHLGHTVIIDPAA

SEQ ID NO: 451760 - protein, 505 aa, unidentified
MPAFTTRRQPATSSLPNGKQAKAKAQRQAYNRRKTRAKVKSEALRQKEAAQVEALPVQHPHAAGIDIGSRSHWVCVGFSIQADSCLIQEFPAHTAGLKAIAAFLREHQVNTIAMESTGIYWIPLYELLQAEGFEVLLIDPSYSHQLRGRPKTDRRDCQWIYRLHSVGLLAAAFRPDEQTCQLRAYLRQRANLVHQASQHVQHMQKALEQMNLKLTEILSDITGVTGRFIIRAILRGTRAPEKLAKYRDKQCKASEAEIAQALTGSYREEHLFELKQAYEAWQFSLGQVEKVDDQIALQLGRMKCDRALPPLKPKSRPKRRVNSPRFDVRTALYYVVGLDLTEIEGISDLTALTLISEIGPSVSQFATVKKFCSWLGLCPNWKKTGGRVKSSRTRRGVNRAAQALRLAAQSLHHSQGALGGFLRRMKARLGAQAAVTATAHKLARIVYLALKHGLTYVRQSQEEYEAQMREKQLKALKRKARQLGLEIIERTSGVVPTAAAALVQG

SEQ ID NO: 451761 - protein, 393 aa, unidentified
MIYVGIDVAKSKHDCFITNSDGEVLQDGFTIQNSMAGFLELYETICSFEPNPSSQNIRIGLEATGHYSNNLIDFLLAKNLNPVVLNPLSTNLFRKGQSLRKTKTDKSDARFITMMLITEDIKPYSPVSYHISELKSLTRHRFRLVQERTRFKISYSRILDIVFPELQGVVWATTQKSMLFMLLELPNTKAIGQCHLTRLTGLLEKNSHGRYNRNKATQIRELARNSIGSNSPALAFELQQIIRSILFLQDEIALLDKQIKSVVQEMDSPIMSIPGISYTLAAMILAEVGDVERFESPAKLLAFAGLEPSTYQSGNFTASHATMVKRGSKYLRWAVLNAARLVCMRDSTFKAYRDRKQLEGKHYFVASSHTAKKLIRVIFYMLKNNQQFVAQSA

SEQ ID NO: 451762 - protein, 410 aa, unidentified
MEVLHPRCCGLDVHKETVVACLRLVIDGKVVKEVRTFSTTTAGLMALSEWLAQNNCPQIAMEATGVYWKPVWHILADGEFELVLANAAHVKNVPGRKTDVKDADWVADLLAHGLIRASFVPDSQTQEMRTLLRTRKQLVREKSRHILRIQKTLEDANIKLDSAISDVLGVSGRAIIEALIAGEHSPSKLARLAHHRVKASQGTLREALRGRVTKSHRFLLRLHLDQIDALDASIATIDAEVEIGIAPFRTAVEQVTSIPGVKDLSARAILSEIGIDMSRFATDAHLISWTCLCPRNDESAGKRRSTRIRKGSPWLKTTLVQCAWAAARTKGSYLQAQFHRIRSRRGAKKAIVAVAASILTAIYHMLKHGTMYHDLGPNHFDTRTKERQKNRLVQRLAELGYVVELVPQAS

SEQ ID NO: 451763 - protein, 425 aa, unidentified
MKQSKSTTNVQGGEIMIYVGIDWADDHHDVAITDDSAKTLAQFQVSHDHSGFATLHGQLAKFKQSPGQILIALETSRGLLVHELLRSGYSVYAVNPRAVNRYKDRYVLSRAKSDALDALALAHLLRTDRQRFKALRPFPEDYRLLDRLCQDLRKLVEEKSRMSNQITSVLKEFYPKALELFSLDSHIGIAFLKAFPDPEALRTCHKKTFMTFFKKHHYSRPQKVEELWALIQAPALQPDVVVLKAGRFRLLALLDQLGPLREHLALYEKEVKAILDKLPEAKSISSLPGVGDRLTPELTAALGPKESDSQSRFQCAEEIMRLSGCAPVTRQSGRWKSVSLRYACVKNLRRTFRDWAFASLEQSVWARAYYDFYKAMNMPHSTILRNLGKKWARILFTLWSQGALYDEALYIQSLKDHNVRWAMAL

SEQ ID NO: 451764 - protein, 316 aa, unidentified
MSQSERVIGIDVSKNLLDVAVVPENDTWSVDNDEKGIRTLIKDAKRLRPRLIVLEATGGLEAAVVAPLAAARLHVVVVNPRQVRDFAKSLGKLAKTDKIDALVIAHFGEATKPEIRPLKDQQAQQLSALVARRKQLVEMLTAEKNRLMTALEPVDNDIKAHIAWLEQRLNDINKDLRKAIKASAVWRAKEELLRTVPGVGPVLSVSLLAGLPELGKLNRKQIAALVGVAPFNRDSGKFRGRRSIWGGRAHVRAVLYMGTLTAIRFNPVISAFYQRLCAAGKAHKVALTACMRKLLTILNAMMKNHAPWQPYFRETA

SEQ ID NO: 451765 - protein, 374 aa, unidentified
MMDYNEVFVGIDTSKLRNAVAVAEGGRNGEVRYYGEIENTEAATSKLVKKLAAQHRRLTFCYEAGPTGYGLYRLIKALGHECVVVAPSLIPKKPGDRVKTNRRDALNLAKLLRAGELTAVWVPDARHEAMRDLVRAREAAVDDLKSKRQQVLSLLLRLGRHFTGKRTWTRAHMNWLVSQKLAHREQRIAFEEMLLAVRQADERVTRLEKAIAAAVPDWSLAKVVTALMAVRGLDLISATIFLAEIGDLSRFASPRQLMAYLGLVPGEESTGDRVWRGGITKAGNHRARRILVECSWSYRHPPRVGKKKLAKVEAAPPAVQEIAWRAQARLTARYRALARRGKRPTLVVTAIARELSGFIWAVSRAVGAPATPAV

SEQ ID NO: 451766 - protein, 357 aa, unidentified
MRQQSYKKDFNGQNIFVGIDVHLKTWSVSVALPGGYLKTHTQKASPEELFEHLNKNYPNGTYHAVYESGFSGFSTCYALRELGVDCIIVHAADVPTTQKEKVTKSDPTDSRKLAKSLMNGELEGIYVHSKDNLDGRGLLRHRTMLLKLTGGIKSRIKHLLYNNGVSYPEEFAQKSKHWSRRFISWLQHDVQLLSGTRVTLDLLIEELLYFRARVLDVNKKIRVLAYTDRYREQYENLISIPGIGAIVSMCLLTEIDDIWRFNNQRQFASFLGLVPVMMASGDNSYVGEKTFRGNKILGPKVIEASWITIKHDSELAAKFGYLCDKGMKRNKAIVRIARKMSNIIFTILRENRKYVCR

SEQ ID NO: 451767 - protein, 366 aa, unidentified
MKKTITVQALKNEIFKGRKLTIGLDLGDRWSFYCVMDEAGQIILEQTLPTTPEAMKQTFGKIPRCLLAVETGTHSPWISRLLSELGHEVIVAHAQKVQWITKSSRKDDRHDARTLARLARVDPELLGPVRHRSAQAQLHLTVIRARAELVSARTALVNAARGLVKSYGQRLPKCGTYQVNQELAAALSTELRDVLVPLLKEIESLNGHIKEYDERMEKIAKEVYPEVALLKQVKGVGTQIALTYVLTIEDPYRFAKSRQVGCFLGLRPGRRNSGDSEPQKGISKEGDRYLRTMMVQGAHYILGPFGEDSDLRRWGLKLAERGGKNAKKRAVVAVARKLAVLLHRLWVGGEVYEPLHNSQKAMREVA

SEQ ID NO: 451768 - protein, 344 aa, unidentified
MSVVTIGLDLAKSVFQVHGVDAAAHTVLRRRLGRADLLPFFAKLPPCVIGMEACSSAHHWARELSRLGHHVRLIPPQYVKPYVKRNKTDAADAEAICEAVDRPNMRFVPIKSIEQQSILALHRVRALLVRQRTLAVNAMRGLLSEFGIVAAKGIRRVEELRQRMSRTEPALLPDEAREAIGVLFDHLDGLQERVDKIEARILAWHKASEASRRLASAPGVGPLTATAIVAAVDDGRQFKSARHFAAWLGLTPRIQASGGKEHIGRISKGGDRYLRTMLIHGARAVVGTAFRTDIRPKPWLTELLRRRPVNVAATAVAHKTARSLWAMLTRAELYRPRAAVVAAA

SEQ ID NO: 451769 - protein, 343 aa, unidentified
MQIHSVGIDLGKTTFHLVALSAAGKVLLRKKFTQKQLITFTANMQTSLIGMEACSGAHFLGRVLREQGHDVKLIPAQFVKPFVKSNKNDFLDAEAIAEAVDRQNMRFVPIKTDDQLDLQAMHRVRDRLVAHRTSVINQLRAFLLERGMVFAKTPFKLKQAMPEILENADANLTPRMRNLVSLLWSEWKDLDQQIVAMNEEVEQIASSDPACQRLRQIPGIGPLVATAIVAAIGNGAAFHKGREFSSWLGLVPRQHSTGGKARLFGISKRGNCYLRKLLVHGARSAVLRVKRERSPFGPWLNALERRSPVKVVITAAANKLARIAWAVLSSGQDYRAVPDAITA

SEQ ID NO: 451770 - protein, 355 aa, unidentified
MQKYKVSFKGQNIYVGIDVHLKTLHVTTLTESGYKYSFAQHADAKELFDRLNKKFPEAHFMSAYEAGFCGFSAHYALIEQGIENIVVHAADIPTTGKEKAMKTDAVDSEKIAWALKRDELTGIYIKDKRYMDDTNLMRLRQRFIMDLSRQKNRTKHLLYTQGVTYPERFRNCRTHWSRNFMKWLREEVELLSEQKLSLLLLCEQVENTRKAILKVTREIRRLSTTDRYKENYDLLITVPGLGLITSMSMLTELDNDIMRFPNERSFVSMLGLIPTCHDSGEKKVSGEKINRGNKHLGPLIVEASWVAIYRDYQLGAYYSNCCQTMKPHKAIIKVARKLACRAYAVLKTKTKYELL

SEQ ID NO: 451771 - protein, 338 aa, unidentified
MKLYGAIDLHSTNNVTVVINEHDQVVYQKRLPNDLSLIAQQLSTYRASLEGIVVESTYNWYWLVDGLMEKGHRVHLANTAAIQQYNGLKYTDDHSDARWLAHLLRLGVLPEGYIYPKQERAVRDLLRKRGQLVHQRTANLLSIQSLISRTTGNSISAKYIKALDIQHVDGVLPNPDLVLALKANLAVMNSADAQIEILEKAVQDRVKLRPQFRFLKTVPGIGPILALTIMLETGEIARFASVGNYASYCRCVGSRKISNGKRKGSGNTKNGNKYLAWAFVEAANFAIRFYPRIKSFYQKKKSKSHAIVAIKAVAHKLCRACYYIIKDQVAFDITKAFA

SEQ ID NO: 451772 - protein, 366 aa, unidentified
MESKKGDPPSLRHRCARVEMSSNHSQDRGSEMQVTMYGVDLAKQVLQVHWVEPDTGEVKRKVLARGEFAAFFAPRASGLVAMEACGSAHHWGRQLRALGHEVRLISTQFVRPFVKGNKTDAADARAIWEAAQRPEMRFVALKSELQQAVLGLHRMRAQLVKMRTMQANQVRGLLYEFGVVLPRSWRALLLQAAAILADDTRGEVPELIRGQLLQQLQGLRELTRRIDELERSIGTYRKQDEQCRRIQAIPGVGALSLTAVLASIGDARTFRSGREFAAFLGLVPRQSGTGGRVRLLGISKRGDPYLRTLLIHGARTILNHSTRPGRLPPPPAAGAFIAPTKKRDHCRASQQDSAHDLGAPGPWSRL

SEQ ID NO: 451773 - protein, 362 aa, unidentified
MTRHIGIDLHRNCFTAAVLSGNGRTYVTNYRMEQMGTFIERLRVDDEVAVEVTGNTRLFYKRVKPHVGRVAVVNPWQFKVITQSVKKTDTNDAKTLARFLAKDMLPEVRMKDEANAQLHSLVQTRDKLVKLRTTLKNKINNILSAHGINMKKESLSSERGLRDVLGMPLGAVVDLELKVLVDQIRSLNHSVAELEEVIRQEGEKLPGHKNLKSIKGIGDVGASVLLSVIGDVNDFADEGKLASYFGIVPRVSNSNETERSGRITKRGSKLGRTTLVQCSLIAKRYSPYLHSYYERIKGRRGTGKAIIALARKFLGIIYQTLKNGWIFEDFPNFLLAGGVRPQAYTPNPTRRQQMQAWFAQGT

SEQ ID NO: 451774 - protein, 422 aa, unidentified
MSYCPVAGIDVSKRFSDMCILSPDNKIFAQEKIYHDETSINRANALLQKAERLFFSKPVIVMESTSHYHLILFQFFSEHGYDVIVVNPLQSNSMKDFSIRKRKTDRVDAFKLAMMYRTKTLRPSQIPQTATRALRQLCRHRAELLNDVSSYKNRLTALLDQTFPGYDKVFSDVGGVTSCAVLVRFPTPTILLVEEESELVEVIAAASKSGYSFAKKKAGLLISAAQKAQTLGIHSCADETLIVCTIQMLRTLSESVLQIETAIDNLLAQRKEMRNNVSLLQSIPGVGSHSAAFLLGEIGDISLFKKPKQLAAYWVLDPTERQSGSFRGTKNKLSKRGFPYARAALHMGVVNSICKRGKDSAANPVLLSYYEKKCKNKPAKVAQAASMHKLVFIVFAVLRDQMPFELKTPEQHAVEQGFVKAA

SEQ ID NO: 451775 - protein, 324 aa, unidentified
MYLGLDVSKNTLDCCLNKDGFFYACKISNNQKGFEKLRAWLDGHGCDETLHCCCEATGNYYEAAAEYLAAHYKMSVENPRKIKAYSVSELKRSKNDKQDAKTIAEFCEEKSRKLKVWKPKNQTEKELQSITRYIARLKQQKASETVKRQTASDNIKDLIDETIDYLGSKIKEAEGRLKTYISQNPELKQKAANLTTIPGIGIQTAAIIMAALSGNNDFKTAKQFTAYLGLDPAEYKSGTSVKGKDRISKVGDCITRAALFSPALVAYRIGTFPRLVANMRQNGKHIMQILTAIMRKLAVVAYTLHKTNTTFEKQRHTRIQQKAA

SEQ ID NO: 451776 - protein, 341 aa, unidentified
MSEVSTIGLDLAKNVFQVHGADASGAVLVRKKLRRDQVLKFLAAQPACTVAMEACASSHYWAREIAKLGHEVRLLAPDYVKPFVRRQKNDAADAEAICEAAQRPTMRFVAVKSEEQQAAAVVFRARDLVVRQRTQIINAMRGHLAEFGIVAAKGPFHVAKLVTAIEDDRSGIPEMARPILRLLVEQLRSLDERVALLDRELARRAKEDAEAKRLMTIPGIGPITATALAALAPTAQAFKRGRDFAAWLGLTPLQRSTGGKQKLGETSRMGERTLRRLLIIGASATVRWAMRKGSTADPWLARMLNRKPPMLVIVALANKTARIAWALIARGGTYRAPAAAK

SEQ ID NO: 451777 - protein, 369 aa, unidentified
MKTPKVIVGLDVHKNTIVAAVLPAEGERVTETVRIENQPQAMERLATRVARRGTVAFVYEAGPCGDEVQRQLAGLGYWCAVIAPGLTPVRPGDRVKTDRRDAEKLARLYRAGALTEVRVPTPAEEAARDLVRSREDAVADRLRARHRLAKFLLRQGRVYRETNAWGVKHRAWLKSQQFEWAPLQQTFEAYVRALEETEARLQTLDQQVEELAHHDCYRTPVQYLRCLKGIDTLSALTLTVEAQEFRRFERAPACMSVTGLVCSEHSSGDTVRRGSITKVGNAHLRRVLVEAAGCSRHGPFISRQLRERRQGCPTPVVQIARKAQERVRRKFRRLLHRNKPPHVAVVAAARELAGFVWAMAQQFPVAPAV

SEQ ID NO: 451778 - protein, 376 aa, unidentified
MMDDTGKVVFKAFSFPNTSDGGNALFLKLASYSLNPTDFEIGMEATGHYWLSVYSFLFEKSFLLHVINPIQTDGWRRGTEIRRRKNDIIDSLLIADLIRYGQFMETRLADEDLFSLRTLTRFRTYLVESISDLKRKVVCVLDQVFPEYQSIFSDIFGKTSKEILLQFSSPIDFESVTSETLAQLLAQLSRQKVGAAKAEQLKAAASSSFGITFAKNSFTFQLKTLIEQISFIEKQVKETETEISGIMGKLESPITTITGIGSVTGAAILSEIGDISKFDSPRKLVAFAGLDATVTQSGEFEAAHNVMSKRGSPYLRKAIFQSALIASFKDPVLSVYYQKKKAEGKHHLTCVGAVARKMCNIIYAVLKSNQPYVPKA

SEQ ID NO: 451779 - protein, 353 aa, unidentified
MMVFVAVDVGKRRCVTCVMGEDGSILDSGSYPNTMFDASHYARQTVEKYGECKAVVESTGNMCMKTYEAFESNGVEVKLANPVKTRAIAEARVKTDKLDARILAHLLRADLIAECYVPSRDVRLSRALLTHRVNITREQTRIKNRIHSLLDKYDLECEYDDIFGAHGMRWLHTLQLNGHDHEILQSLLRQLEFLQDEEEKADSTIAKDALHSQYVPIIMSMTGFDYYGASVLVAYIADISRFPSPSHMVSWVGLCPSVYQTGESLYMGRMKGGSRKVKWIMIQAANTAIRSDHRLKVCYERKLRRHHHNVAVTHVANKMLRIIWHMLRENRLYNERKEQLYESKLKRMTHTAQ

SEQ ID NO: 451780 - protein, 351 aa, unidentified
MCLAIGMDVHSKKLTSFAVPQNDEDIEETEFCMEFNKEFRSTPADKATLSRAAYWLKDREHLILIENSTKTHEVFWILTDLGCTVVVANASDLFRITMSVKKTDYHDCRELAHYARRYLDGEKEFSTCLMVTAEQLNRRQLCRTYAHASSDLSDLRRRIRSYILARGIAVSVPGRDIVSEATLRELDKVADSSMRLLIDEARHQRDRMRRIKNEILKEFKDDETFQLIYSIPGFGIVTASYLSAMIIDIDRFTSPGAYAAYHGVVPKQRESADHSVRCGITRRGDDIAREMLVTGTFIHISQDKDRVSDVSRFYDRLRNRGFPHKKALLACSNKMAHKIYTILKTKTPYRS

SEQ ID NO: 451781 - protein, 316 aa, unidentified
MTDNSMICAGIDVGKSHLDIALHPGKARLRVTYDTAGLKALDAFLREHDVSRIGLEASGGYEWRLLAHLRAGKRPAARLQPAQLRFFAKSRLKRAKNDRLDAVLIALFTASLEQLPALPDARFDKLAAELTYLEQIEQQIALVKTFAETALSEAIKRRHLREVARLETCRKAHLLRLEKTVRDDCDLAQRLDLLISIKGIGLRSALCLIIRLPELGHASRAEIAALAGVAPYDDDSGKYHGRRRIQGGRERLRKSLFMCAFTATRHNPDLAAFYTRLRQNGKEHLCAVIAVARKLIVLANTILFRKTEWTPQYRKN

SEQ ID NO: 451782 - protein, 359 aa, unidentified
MNEITTVGVDLAKEVIAVCGADRSGKTVFTRVFRREAFAAWAVQLPPCVFGLEACGAAHHWARWLASHGHTPQLMAAEFVRPFRKSRAAKNDRNDAEAVLTAVRQPNMRFVAVKSVEQQACLSWHRMRQGFSEERTALINRLRGLLGEFGIWRGRSAAVLTRELPELEHDEALPLMVRRLLTEARPHLARLDAVIAACEVEIKSHIKTNAAAQRMTAISGVGALTAAAVLATVADARDFKNGRQFAAWQGLVPRQDSSGGHTRLGHITKRGDTYLRGLLTQGARSALQAALTKEPLRRTRLQAWIVQLHARVGYHKTLVAIANKHARMIWAILAKGEDYDPDAWRHWTRTAPATSGVTP

SEQ ID NO: 451783 - protein, 355 aa, unidentified
MDSKKYIGMDVHKESISIAVINGAGKIVMESLIETKASMILQFIDGLRGDVQVTFEEGTSAAWLYDLLKPHVTKLVVCDPRKNASMREGHQSDKIDARRLAELLRLNHLHPVYHGEHGLRSLKELVRSYLTITKDLGRVMTRVKAIYRSWAIPCTGKRVYAPRHRAEWLGKITEPGVRRRAEFYYQQLDALRMVRQEVRRELLAESKKHQAWKLLCQIPSIGPIRAAVLLGILQTPYRFRTKRQLWAYGGVGIEASSSADYQVRKGQLERKKKPVEIRGLNRNYNHDLKNLFKGAAIVAASKAGPFQEFYTALLTKGMRPEMARLTLARKIATIVLMVWKRGVCFDAQHLKPQTA

SEQ ID NO: 451784 - protein, 351 aa, unidentified
MERYIGLDAHASSCTLSVVGPSGKRLGSHVVETNARALIEELRGVPRNRHVCLEEGTLSGWLHEVLEPHVEDLVVAGVRKSRGPKSDKLDAFALAEQLRIGSLETVVYKGRGRCRRLGHLARARSFVVRDATRVKNRLKSVYRSRGVWPGKGRSVYGKGEREGWLAKLPEATRPLAELLYEEHDALVALNAKAEKALLAEARKHREWHVLKTCPGLGPIRTTELLPVVVTPYRFRSRSGFRAYCGLGIVMRSSSDWVRAPSGQWVKTAVQRTRGLNQNFNHTLKGIFKVAATTVIGRADDEPLYRHYERLLEGGTKPNLAKLTLARQIAAITLAVWRSGEAYDPKKLEATK

SEQ ID NO: 451785 - protein, 285 aa, unidentified
MNSKAFIPRDYDVFAGLDVDKRSISVTFTNHQGFIRSLRVPYSAEHLVNHVRKHFPDQKVAFAYEAGPTGYGLYDGIVAQDYPCLIASPSMIPKAPGQRVKTNRLDSRGISENLRGGQLKSIHVPAVLYRELRHLTQLRDTFVSAMVAMKQRIKSLLLMEGLEFPPAPAGSQWSFMVKAKLRKLPCSSMVRFELDQLLDSLEFNEKQIVKTTQQIRRLCQNDAELSQCIKYVMSVSGIGQIVASQLLARIGDWRELRNVRQLGAFLGLVPTENSTGELLTVRSMR

SEQ ID NO: 451786 - protein, 483 aa, unidentified
MKPKPGEKSKGATNHPTRHHWHEMNRKQKREMMRQIQSEDLSLEVIHPDAAGIDIGNESHYASVPPSRDSQPVREFGCTTAELKAMAAWLKQCRIRTVAMQSTGVYWVAVYDILEQAGLEVYLVNARDTKNLPGRKSDVQESQWLMKLHTYGLLRNSFRPPQEIRVMRSYWRQRNDLVQSAGRHIQRMQKTLTQMNLQLANVLTDISGATGQAIIKAILAGERDSHKLAEFRDPRVKASAEQIAQSLEGNWQEDLLFVLKQEHEGYEFCQQQMAECDRQLQQYLQQREDRSHGAPLPEEKRKGRLLKKKGNKPQFDLREGLFRLTGTDITRIDAIDVMTATTVISEAGYDMSKWETGNHFVSWLRLCPDNRISGNKVIGKGRLPTNNPISIALKMAACTLRESKTYLGAQFRRLRTRLGAPIAIKAMAAKLARLVYRMLRYGMKYVDQGAAFYEFQHREFQIKRLKSKAEKLGYRVIPIPAAA

SEQ ID NO: 451787 - protein, 316 aa, unidentified
MLGIDVSKDVLACSLLGGPSENWHRTVPNTSAGIAQLLQATDAAIPWVVEPTGRFSHLVVRTAQEAGRAVLQAEPKRARAFLQSVFPRAKTDRVDSLGLAQYAQAVMLRPFPQKSETVEQIEQLLAARSGIGRSLSQLRQQRDSLPYAREALEPAIIELKRQRAALDQQIAEARHQCHDLSDLTSRFMAVPGIGPVTANAVAACLSTRTFGHPDQFVAYIGLDIQVADSGQRQGARRLSKRGHAELRRLLYLAAMANARSRDPKNPFAAQYARELEKGLTTTGALCAVARKLARTCWSLHKHRTDYDPKRVNQQPG

SEQ ID NO: 451788 - protein, 398 aa, unidentified
MLSIGIDVSKGKSTVCGMKPGGEIVYTPFEVQHTREGMSELVSLLRGSGEEVRVVLESTGSYHCPVVAALLENGIFVSVVNSLRMKRFCSQSIRRVKTDQIDAMQIALYGLAYWQELQPTRLPENTYRELQLLARQYYQMTSLLIKAKVDFNALCDQVLPGMQELMSDHAGRHKLSDFVLRYHHTAHILKMGETRFRKDYCKWAEKKGYRNCERMAAHIFATAQNGIPVLPDAPSTQIVITEAIRVLHTVEASRDAILTQMQALAKTLPEYSLVREMPCIGDTLAPRLIAEIGDVRRFHSKRALIAYAGIDAPPYQSGKFSANNRHISKRGNRYLRKTGYEVMQSYVMHKPANDPIFTFIEKKRSEGKSGKLAMVAGLNKFLRVYYGKVTELYRSLPQ

SEQ ID NO: 451789 - protein, 409 aa, unidentified
MDQLIARVAGLDVHKATVVATVRTPAADGSRESRTETFGTMTADLIALRDWLQAYGVTHVALESTGVYWKPIYYVLEDGFELLLINMLELKHVPGRKTDVKDSEWLAQLLECGLLKASFVPPPAIRELRDITRYQVQQVRDRAREVNRLCKVLEDAGIKLTSVATDVLGVSGRAMVEALLAGTTDPTVLAELARGKLRKKLPALRRALQGRFRRHHAFLVEQILGKIDFLDETLDRITAELEERLAPFAPMLANLDTIPGVNRTTAVSIVAETGGDMTRFPTAGHLCSWAGMCPGHDESAGKRRSGKTRKANRYLRAALIQSALGASHTKSTALQARYHRVKRHRGHKKAVVAVGHQILEIAYHIMRDGLTYDELGADYFDRRHRDRTVRRHVRQLEALGFHVTIEHAA

SEQ ID NO: 451790 - protein, 362 aa, unidentified
MGPAEAPTIRRSCACKRLQQSVSISPSFDIAKSVFQVHGVDAAGQVVVRRQLKRRQVIALFQKLRPCLVGIEACASSHYWSRELQALGHNVRLMPPAYVRPYVKRQKNDMADAEAICEAVTRANMRFVPTKTAEQQSGLMLHRTRHLFMRQQTSVINAIRAHLAEFGIVAPVGRRGVEELLRVVADPSDKRLPEVVRACLAALGSQLLSLKKQILDFDRMILAWHRSNQTSKRLNCIPGVGPLLSTALVASVADPKTFKSGRNFSAWIGLVPKQNSSGGRDKLGSISKQGDRYLRGLFVAGALAVIRYAKIHGTKHRPWLTALLARRHTKVAAIALANKLARMAWAMMATGERYNYPASLKV

SEQ ID NO: 451791 - protein, 352 aa, unidentified
MQHFIGCDVHTRDQVVAWIEEETGEIKKRRLEHEGKEVKEFYAQFPRGTVVGIEATFPAYWFERLMGELGHELWVGDAARIRASEVRYQKTDSRDAEHILDLLRTGRFPRIWVPSLEERDLRQLLVHRMKLVRARTQVKNQLHALAISQGVCRKRKLWSAKGRTELEGLALLPWAARRRKELLESLDRLDEQVRELDRAVEEAGREREEVALLRTHPGVGMVVGLAFVLTVGPIERFRNSRKLVSYWGLNPRENSSGGRQRLGSISKQGNTMMRWLLVEAAQTAARLDPQLRRIYLRLKKQKTSGVAKVAVARRLAVRLFWMLRTRNNYAQLVHMSGSPSSAVVPPTAEPRL

SEQ ID NO: 451792 - protein, 343 aa, unidentified
MGMFAALDVSQEETAICLVRGDGGIVAEAKVPTCPDAIADWFRARAVALERVGMETGPLAVWLWNALKERQVPIVCIDARHASGVLKMMPNKTDRHDARGLAQIVRTGWFKTAQIKSHDAYVNRATLTAREALVSMRVKLENEIRGLLKTFGIMFGKRVGGFRRRAEEIISGELAVAPELLPIFEALMQARRDVLAQIAVLDSRIRAIVKRHETARLLMTAPGVGAITALAVVSAFDDASRFRRSSSVRAWLGLTPRRYESGEIRRNGRVSKRGDGFTRKCLYEAANAIFCRSLGGPRLRTWAKAIAERTGPRKAKVALARKLAVILHAMWRTKAPFREAPMA

SEQ ID NO: 451793 - protein, 424 aa, unidentified
MNCNQNFKISQVTEGTLVLGIDVGSNTHYARAFDWRGLELSKVFKFKNSFEGFQSFVLWVNDLCCKYNKSKVIAGLEPTGHYWFSLGELLKENNITIAIVNPYHVKQSKELDDNLQTKNDSKDPKVIAKLVIDGRYSFPYIPEEIYGELRVADKLKNDITQQIISIKNKIHRWLSIYFPEYEKIYSSIDSKSGFLLLKETPLPKDIVELGSEGIVERWKQTKLRAVGLDKAKKLEEAAKKSIGCKNITSSARFEIKLLIEDYEYKQNQLNSITEELNKLCEKIPMIKEIAEIKGIGIATAISFVAEVGDIRRFKSAKQVQKYAGLALKENSSGKHKGLTRISKRGRKKLRTILFRATIPLIGFNKEFSSIYNYYIERKDNPLKKKQALTAICCKMIRIFFTILSKGIKYDETKMLHDIKRPVAA

SEQ ID NO: 451794 - protein, 339 aa, unidentified
MKDIKILGVDIAKDVFQLCGIDEWGKVIYTRRVKRAQYVSTVASLKVGCVVMEACGGANHWYRTFMGMGIPTQLISPQHVKPYVKSNKNDRNDAQAIAEAASRASMRFVRGKTVEQQDVQALLKIRDRLVKSRTALINEIRGLLQEYGLTMARGAKRFYEELPLILASEAVGLTPRMKRVLNCLYTELLNRDEAIGDYEEELKAVAKANEDCQRVQSIPGVGYLTALSVYASVGDIHQFHRSRQLSAFIGLVPRQHSRGNKEVLLGISKRGNVMLRTLLIHGARALLRHVKNKTDKKSLWLKALIERRGMNRACVALANKNARIIWALLTRQETYRCGA

SEQ ID NO: 451795 - protein, 479 aa, unidentified
MNAKTTRQKNQEAKGFSVINTLSAEERQSRIDELLNTMQAKTWHDLETSGKFDKNAKLSFITEDMLIVGCDIGSETHYLRAIDIRGRELSKKPFSFTNDEEGFENAKEWMVGLAVVNGKKQIVLGLEPTGHYWFCVATWLISNGISVVQVNPYAVKQTKEVEDNSQLKDDRKDPKVIANLVMNGNYGMPYLPEGVYADLRSLSLLRNQLTENRTRCTNRLHRLMKIHFPEYKDAFGKTDGSFAVEILKVAPFPEDIVELGEDGIRKIWHDAKLRGRGYSRASEIFRYASASVGRKEGAESDRYSVKCFVEEMASLDEKISIIEAAIKDKCMEIPHAEKVLEITGLGQNIVAGIISSMGDIDRFDDVKEIQKLSGLNLVACSSGKHNGETKISHRGRKELRTWLFQGAKSVVAHAEEFQLLHEYYTTRNKNPLKKMQSLIVIACKLLRIIFAILKKGVTYDPQKMLDDIKRFEETEVVVA

SEQ ID NO: 451796 - protein, 379 aa, unidentified
MTKTATLIAGMDIGDRFSYLHVLDSEGEVLEETRVPTTPQGLRQGFESRPPLRIAIEVGTHSPWISRLLHNLGHDVLVANPRQLRLIHSSTRKNDRLDAERLARLLRLDPSLLSPVEHRDEEAQAALALVRARSALVSARTKLVNHARGAAKSRGHRLPSSSTAAFPRHLTELPDELRQSLEPVGACITQLSIEIRSYDTRIKELSAERYPETELLRQVAGVGPVTALVFRLVVQHPARFPRGRQVGAYLGLVPRQDQSGGSDRQLRITKAGDRMTRTLLVQCAHRMLGPFGEDSDLRRWGLQLAARGGKAGKKRAVIAVARKLSVLLLALWRTGAEYEPLMLADAEAKRVAAPEQEPTSPDSGPNQRAGHGAAEQVPA

SEQ ID NO: 451797 - protein, 367 aa, unidentified
MEETITYVGLDVHKETISVAVADGGKRGDVRAFGEIANTPTALARLVAKLSQPGRTLKFCYEAGPCGYGIQRQLSAAGHDCVVVAPSLIPRKPGDRIKTDRRDANNLARLHRAGELSAVWIPDRAHEAMRDLVRARLAAVRSLRQARQQLSGFLLRHGFHYSRPAWTQMHRRWLAGLRFEQPIHHIVLEDHLATIEAATDRRDRLTKQIEMMLSEWSLAPVVHALQSLRGMALVTAATMIAELGDISRFTNPRQLMAYLGLVPSEHSSGGTRRQGGITKAGNGTARRMLIEAAWSYRFPAKISREQLLRQEQLPKTIRDTAWKAQVRLCSRYRKLTKAGKPATTVTTAIARELSGFVWAVACQVAPR

SEQ ID NO: 451798 - protein, 464 aa, unidentified
MGHARARKIPAQLVEDEEYQLRHERVAGIDIAKAKADVCTRLPPQRDGGRRASRVEEVPATAKAILALAVRLIADGAELVVMESTSDYWRMWYYLLEGAGLSVQLVNPAHARQLAGRPKTDRLDAQWLARLAEMGLLRPSFVPPPEIRALRDLTRTRLQLVRDRSREWQRLEKLLEGALVKLSSVVHSLAKVQSARAILEAIAAGERDPKALAALAHPNVKGGRAAVEEALGGMALGDHHPMLIRVHLDYITLLDRSVAEVEDEIEAALDAIPAAWGTDPGGETGPDAGRGPDPAVLPAAERLAEIPGVSPALARAIIAETGLDMTRFQTADHLVSWAGLAPVARQSGPRSRKPKKGQGDAYLRGYCTQAANGAARTDTFLGERLRRLSRRLDGNRARCAVARSILVIVWHLLASPDDRFADLGPGWHQRKTDTDRRTRSLMNQLRALHPDADVNITIVPGTAA

SEQ ID NO: 451799 - protein, 350 aa, unidentified
MEVLIGVDPHAKSVNAVAAIDEYGEMVGNEVFPANRNGLRALERWAKRFPERRWAVEGAGGIGRPVAQKLVASGESVVDVPPKLSSKTRLLSTGNARKNDRLDATFTAQAAAGSGNLARVSPEDATDGRAEVLRLLTERREDLVAERTRALNRLQVLLRDLLSSGVKKGLSAETAAKLLRRARPRHATGRTRKRLASELVRDVRALNRRIVRLEEHIREEVEASGTTLTGVFGVGPVLAAKIVGIVGDVARFPSKGHFASYAGVAPIEASSGEVVRHRVSLAGNRRLNKVMHMIAVCQARSDSRGGAYYRKKLAEGKSRREAMRCLKRRISDAVFKALVADSECASQAVT

SEQ ID NO: 451800 - protein, 346 aa, unidentified
MLYAGLDLSRQRLDVHLLDEEGLTVEVTAVRPDSDALRTLVATIARHRKPVTAAIESMTGARFVHDQLEQFGWDVEIADAVKVKGIAPLAAKTDRIDARVLAELARRELVPAIWLPDPTVRAERERARFRLHLVHHRTALKNRIHATLMTFGHPVPVTDLFGVAGRDLLTSLEVPEPWATSLTTSLALVDQLDREIEGCATDLRAMGADHPYVPLLRTAPGIGWVLAYTIAAEIGDIGRFARPKQLVGYSGLCPIVRQSGGRDDRGPLARNGPKYLRWALIEASVHAARHPKYRDRFERTRQRLGRQRGPKVARVDLARQLCEAIWHMLTKHESFAPKGPTHAQVA

SEQ ID NO: 451801 - protein, 349 aa, unidentified
MSVDPVYKVARSGARVEEMRWRDRTVIDGILGIDVCKNTLDVSISSYTKVRTKSFTNSPDGWRHLLDWLIAQKIQRVHACLESTGRYSLGIACALYEADHVVSIINPAQIRDFVRTKLGRNKTDGVDASHIREYCELFKPSPWAPPSEAHRRLGELQTIRSGIIAGLTEWKNRKNSGIVDAEAQALADATISHFTSQLGAVDKAIALTIDNDCDLQSKRDLLLSISGVGETLAGVVLAELPGPDVLRSSAEVVAYAGLNPRRHQSGTCIDRATRISKIGNAVLRAALYMPALSAMRYNSAIVALVTRLKSRGRLKPKQIVVAAMRKLLVLCFGVLKTGRPFDAAIAMGG

SEQ ID NO: 451802 - protein, 342 aa, unidentified
MHTTTLGIDIGKRWFHVIGLDTAGIVVRREKLNRAQLYELFATHSPCLIGMETCCGAQHLARLAASHGHDVRLLPAQHVRPFVKSQKNDFNDATAIAEVVRLPSMRAVPLRSLEQIDIQALHRARQRLVEQRTGMTNQIRGLLLDRGLPIPQGLNPLRNAVPEILEDATNGLTPLFRSLLARLLSMWQQTDSAIEELTDEIQSVARASDQCRRLQSIPGVGPLVATALVSAVGNAGTFRSSRDLAAWVGLVPRQHTTGGKPKLLGLSKRGNSHLRRLFVQGARALWVWKEKRNDPLHQWMRRLAQRMHPHKAVCALANKLIRICWALLRNDQMIFRNAAAAA

SEQ ID NO: 451803 - protein, 347 aa, unidentified
MKILALDLGKYKTVGCEYEMFSGVHRFKTIATTPTALAQLVREVKPERVVIEVCNIAGWVCDLLRELGVAVQVANTNEDAWRWRKVKKKNDRCDALKAAQLSAVNQLRTVHIPQVEVRQWRALIGFRQQLVRRRGKVKNHIRDLLVSEGQILPRGARCWTQLGLAHLTALAKDFGELGMHELWRGQLDIELRQLQALQREIEQVEEKLNAIAKAEPRIALLRTIPGVGPRLSEAIVALLDQPERFQKAREVSAYVGMVPKELDSGETVRRGRITKHGSRLVRSLLVEVAWAGLRYNPWVRATFKRISGGKKSRKKIAIVAVGRRLLVRCWAMLRDGTSWRPPLIGTV

SEQ ID NO: 451804 - protein, 388 aa, unidentified
MYYVGIDIAKYKHDCFIFTSEGEIVLESFTFENTREGFDKLKLVLDALDHSQKIKTGLEATGIYGKNLKLFLSSIGYDFDELNPLQVKRFTNALSNRKTKTDKIDASQIARFVSTGASRTYVYSSYHTEALKQLTRARNSLIDERSKHQTVLTGILDVEFPEFKGFFNNKFTDTALYLLNKYKTVKRISKLSHNDCVLLHNKSRVISTSRFEELRESAKNTCGHHFDYNDSLISANLQIIKCLNNEIDKIEKEINSIMSTLDSPIVSIPGISAISAASIIGEFGDFARFDNAKQLCAFCGVEPSIYQSGTSYHEGKMVKHGSSNLRRTLFNVVPYIIMHNETFKTFYDKKRSEGKAYRVAQSHVVKKLLRVIFTLEMTGSTFAPSKLY

SEQ ID NO: 451805 - protein, 349 aa, unidentified
MVVQALNLGKGGSMTQYIGMDAHMSTCSFCVMDESGSEVDNITLPTNGRLIIDYLRNTGGIKKLVFEECELSNWLYGMLKDEVDELIVCNPAANKEYKKKKTDKFDARQLANLLRGNFLTPVFHDGSKREKFRGLMSGYQDLVNDTVRLKNRYKSLFRKSGIRVEGEAIYKDRSLLEKINRPDLQFIGIQLYYLLERMDESLGIYQKQILRSKKHFEEIDNLMSIPGIGYIQAAKIVSQVVTPERFPNKYKYFSYCGLIRHKKESGQRRYGTEKVWGNRTLKCVYKMAGHSAIKGTSALKKHYDHLRSKGLDDNKAYNAVCRKIAAISLSVWRNNKKYDDNIVSNNLIK

SEQ ID NO: 451806 - protein, 394 aa, unidentified
MSMAIQSGKDKVVIAVDPHKASWTASAVDSSLQPLASVRVPVSRDGYQVLRRFARRWPTAGWAIEGAAGLGAPLTTWLRTDGIEVVDVPAKLAARVRVLSSGHGRKNDDADALSVGIAALTSPALRTAEIDAATTAVRAIVEHRDDLVKTRTQTINRLHVVLTRLVPAGAKRHLSADHAAEVLRGVRPRDPAAKTLRALAVDLVSEVRQLDRRIAKAANDIQMAVSASGATLTELHGLGVLTAGKILGRVGDVRRFRSAAAFASYTGTAPIEVSSGEVVRHRLSRAGDRQLNFCLHVMAIAQVRHNTSGRAYYLRKRSEGKSRNEAMRCLKRRLSDIVYRQLIGDADTKGGLGRTLGGCSIVSRGRLIPRTPALQTSHFPSPPPKSTTRHKPTT

SEQ ID NO: 451807 - protein, 413 aa, unidentified
MIELEVQRCAGVDIGKEEVVVAVHVPGPDGRRQRMLRTYSTMTRQLLRLRDWLVEQGVTRVGMEATGVYWKPVFYLLEDVIQECWLVNPQHVKQRRRGRKTDVTDAEWICQMVEHGLVAPSLVPPPPIRELRQLTRRRAVLIAERTREKNRLHALLEDAGIKLGVVVSDVFGVSGRRILAALITGQRDPYLLADLAVGTLIHKTPALVEALTGRFVQHHALLADQILAHVDYLDTAVEQLDQHIDAAIAPFRHLIELLITLPGVLHRTAQVIIAETGGDMTVFPTAAHLAAWAGLCPGIHASAGTHHPTRTPKANKWLRRALGEAATAAARTQTHLGARYRRLAKRRGTGRARLAVAHSILTAAWHMITTDNPHHDLGADHYIQHINPDRRRYRLTAQLEQLGYTVTLTPNAA

SEQ ID NO: 451808 - protein, 325 aa, unidentified
MDVPALGIDVSKDTLDVNVIIAGKPLGKQFANADEGYRSLIGWLKHRKLGQVHVCLEATGRYSLGVALALHEAGHIVSIVNPAQIRDFARTRLGRNKSDKADAAHIREYGALFSPPPWRPPSPSLRRLCDLQAMRAGFVVSKVAWQNRASSIGSDDDVARALANATVVHFAAQIAAVDQAIAETIDHDDDLRGKRDLLLSIDGVGETLAAVILAELPGPQVITSSVQAVAYAGLNPRQFQSGSSINHPTRISKIGNAVLRAALFMPAMVAMRHNAAVAALARRLRERGRLTGKQIVVAAMRKLLVICFGVLKSGKPFDATIAMAP

SEQ ID NO: 451809 - protein, 340 aa, unidentified
MGQATIIGIDLAKNVFQIHGATADGAVAFRKKVSRSKLLPFLSSQALCLVAMEACGSSHHWGREIQALGHDVRLIAPAYVKPFVKRQKNDMADAEAIAEAASRPTMRFVAVKSVAKQASAMVFKTRDLLVRQRTQTINALRGHLTEYGVIAPQGLPNLDRLVSEVRSSSSGLPAIVTELSELLLEHIAALDERIAGLDRQLREQVRTDETAKRLVTVPGIGPICAAAILALAPAPETFAKGRDFAAWLGLTPRQHSTGGKAKLGSVSRMGQRDLRRLLIIGAMSVVRWAARRGAPAGSWLARMMAKKPRMLVATALANKMARVAWALLAHGGIYEVPAAA

SEQ ID NO: 451810 - protein, 457 aa, unidentified
MSQRKRKPRKSKINVNNLPQHLRHINLHAAGIDIGSDRHLVAVPEGSDDISVRQFGAFTSDLNDIADWLEKCGVTTVAMESTGVYWIPLYELLERRGFEVKLVDARHVKNVSGRKSDVLDCQWLQQLHTYGLLQGAFRPPDEVCVLRSYARQKEMLTQASSMHVQHMQKALQQMNLLLHNVVSDITGVTGMKIIKAILAGERDPNILALNRQEGCRNSKETIAKSLVGNFRDEHMFALKQAVELYEFYQAKITECEQALIKHLGTQPEVTDDQPPDSGKHVRARERMRADVDVREKLFKMTGVDLFATPGLAADTLLTLASEVGFDMTPWKSVKHFTSWLGLCPGTKFSGGKVLDRRTKRNANRGAQAFRMAAASLARSQTALGAFYRRIRSRTDGRRAITATAHKIARIYYSMLTKGTAYVEAGQQAYEQMYKERRINALKKQALSLGYQLLPSLS

SEQ ID NO: 451811 - protein, 338 aa, unidentified
METYAGIDLHSSNNFIGVINDKDKILYGKRHANRLDDVLKALDPFKDSLKGVVVESTFNWYWLVDGLQEHGYRLHLANPSAIQQYEGLKHTDDQWDSFWLAHMHRLGILPEGYIYPKEHRAVRDLLRRRLLFVRHSTAHILSLQSMISRNLGFKMSNNEIKKLKPADIESLFDCSNLVFMANNSLAAIEFLKKITKGIEKKVKSQVKMRKEFEMLLTIPGIGNILGLTINLEVGDIGRFPKVGNYSSYCRCVESKRLSNGKKKGENNKKNGNKYLAWAYVEAAQFARRYCVKAQSFYQSKEAKTKPVVAIKALSNKLSKASYYIMRDQVAFDEEKLFG

SEQ ID NO: 451812 - protein, 399 aa, unidentified
MSNVSQQVSDCRDRELFVGIDYADRVVQVCAMDAAGRVLLNRPCGNHWRALVGAVAGKGVVRRAAIEACSGAADLAEELIEHAGWHMELGHPHYVARLKGSPDKHDFGDAQLVADLTRVGYLPRTWLPPTYIRQLRQLVVHRQQLVDQRRAVKLRVGAVLREHRVVFPKQLAKSRWSRAWVSFARCTMALGEHAQWIVNQSLDQVLELDKRVTAAEQRLAQATKGDAMIDRLMDYPGVGEVTAWVIRAFIGRFDRFGSGKQLSRYCGLSPRNVSSGNKQSDGGLIKASNKILRATMIQAAHRLIRTEPRWRTMAEQMRRRGKPPCVIVAAVANRWIRRMHYDLRGFEQQQQQQQQQQQQQQQAKAKTARTAAYRGQVCGSPPEDTAAANGRCLLGAIRA

SEQ ID NO: 451813 - protein, 390 aa, unidentified
MHKLFVGIDIAKLNHQATVIDETGKVLGGSIRFPNTTKGGTTLLEHVTKFRDGDTPIVFGMEATGHYWLALYSFLVGKGHTAIVINPYQSESWRKVYMSAVKTDKEDAFLIADLLRFGSIKKSQVPSEVTIALRNLTRFRVSMSLQLSDTKRRILTVLDQVFPEFPALFSDALGKTAISILEEYQTPEALETLSSRKLTNLVSKLSRGRFGKAMAQSLHAAASDSFGITFALDSFSLQLKLLLHQLELLVGQLNLLDEEISKLFGTESKLLTIPGIGPTTAAAITAEIGDIQRFKTSAQLVSFAGINPTVRQSGNFIGNKNKMSKKGSPYLRLALWQASVVASRKNPILKAFYEQKVKEGKHKMTAIGAVSRKLTGIIFAIMRDNKSFMI

SEQ ID NO: 451814 - protein, 418 aa, unidentified
MDVVHRRCAGLDISKKDAKVAVRVAGGGRAGTKTTVTTWSSMTGQVLALREHLVAQQVTCVVMEATSDYWKPFYYVLEDGPWELMLVNARHARNMPGRKTDVSDAAWLAQLGAHGLVRGSFVPPAPIRARRDLTRTRTALTRERAREVQRLEKLLEDAGIKLSAVATDIVGVSGRAMLEALIAGQRDPEVLADLAKRKLRWKLGELSEALDGRFADHHAFLARTHLDLIDHLTGTIDQVTTRIEEAMAPFRGVRDLIVTVPGISTGVADVIIAETGADMTRFASPGHLASWAGTCPGANESAGRVKSTHTRPANPYLKGALGVAAMAAARTKGTYLAAKHRRIATRRGPLKAVVAVEHAMLVAIWHMLTEQAPYRDPGPDYYARRNPDKTRDRAIDQLRVIGYDVTLTPRAVTDPLHQ

SEQ ID NO: 451815 - protein, 391 aa, unidentified
MIYVGIDVAKDKHDCFITNSDGEVLFKAFTITNNLDGFNDLYQKIETVMKDITKVKVGLEATGHYSYNLLGYLIDKGLPTYVINPLHTNLYRKSLSLRQTKTDKVDARTIVSILMSDVNLKSYSDISYHNEELKSLTRYRFDKVKERAKLKSSVSRLICILFPELEKLVPTLHMASVYALLSEFPGAKQVANAHLTRLTNLLSEASKGRYSKDTAITFRDAARTSIGSNMPAKSLELKHTIKLIKELDSEIDEIENEIKIIMDEINSPILSISGINYRMGAMIIAEIGDFSRFDSPDKILAYAGFSPSTYQSGHLYGAYAHMEKRGSRYLRYALYNAAKYVCHWDPTFTAYLAKKRAEGKHYNVAISHAVKKLIRVIYHLEKTNQQYIKAS

SEQ ID NO: 451816 - protein, 401 aa, unidentified
MSKKNTRNALDTSLSYAVIGLDLAKADCAVAAVPCADDELGLIDRMDYESLFEQAEKLEPTLFAMEPCCGYSQISLRLQNMGHEVKVISGHAVKNWIATHKSNQKTDLNDATALAKLALYDHDLQPIRVKNVEECRIASVQAIRIQLRTQATKSLVCFKSLCQCWGIVIRRGSLNTKKMAEAVAAVEKLLGAEVASSLMILRDAYKFTMKQINALDKLLDALVEANEQARTMKTVLGIGTQTAARLAVTTGDIKRFPMPRSYAAYFGLAPRNIITGHSGTPSPSKRGALKPVSSRGQGKVSRRGDRVARSFIIQGAATIYMLYCKDMLPECQLRRWLHEQIKRGKPYGKIIVSLAAKLLRIVWALLTYGEKFDSHKAGVPRSVLAAMEKPLKHDAAAESAA

SEQ ID NO: 451817 - protein, 343 aa, unidentified
MKLQVLGIDLGKAVFHLVGLDSTGRVVIRKRCSRTQLLAFTANLQVQWIGMEACSGAHFLGRALREQGHEVRLMPAQYVKPYVQTNKSDYIDAEAIAEAVQRPRMRFVPIKTEEQLDLQALHRVRERWVMRRTAVVNQIRSLLLERGLTLPKGRSHLDEQLPGILEDAELNLSGSFRVLLAQLQLELEQLAARIEEMDQVIEKTARENETCQRLTEIPGVGPVTATALIAAVGNGSTFQKGRNLAAWMGIVPREYSTGGKQKLLGISKRGNKYLRRLFVQGARSVLQQRHKQAPGLGHWLAQLLGRTHQNVVVVALANKLVRMAWAVLCKNERYRPPAFAVTT

SEQ ID NO: 451818 - protein, 333 aa, unidentified
MHMLSPSNLLWIGVDVSKATFDAALWGHQDFQKMATAAFPRTEEGVRAFRTWALAHGGDAVGVVMEATGCYSQELARWLQRDLPGSRVAIVNPSLVKAFGRSLALRNKTDRLDACMLARYGQERAPEAWMPMAPERAELRDLIRTRAKLVRLQVTIRLRLDDALGRIGSPAGKAQQKVLKVLQGQVEALDKAIDRQLRQVAELGHAVELLTTIPGVGKVTAATLLGEAGDLRSFRRGRQLAAFVGVSPRRYDSGSSVRGRTRMCRIAGVHARTLLYMAAVSASRTATPLGDFYRHLVNQGKPKKSALGALMRKLVLVMRAVLIQDKPYSPLPA

SEQ ID NO: 451819 - protein, 341 aa, unidentified
MAHAVTIGLDIAKSVFQVHGVDAAGEVVIRRQVRRAQMLAFFAKLPACLVGIEACASAHYWGRELGRLGHQVRLMPPSYVKPYVKRQKNDAADAEAICEAVTRPTMRFVEVKSPEQQGVMVLHKVRMMLMRQRTQVSNAIRGHMAEFGLVAPIGREGLAGLLQLIQAEDDRLPQEAMGCLALLAEQFALVNRQILETDRRIRTSARATEAGRRLMTIPGVGPLLASALVATVADPKGFKTGRNLAAWIGLVPKQNSSGGKERLGGITKQGDRYLRQLLVVGALAVVRYAQRHGTRRPWLVKLLERRPTKVATVALANKIARMAWAVMTTGQDYREPELRAA

SEQ ID NO: 451820 - protein, 390 aa, unidentified
MLYLGIDIGKFHHAAALMDQRGKVIATLPSFSQTQNGFQKLLALISSQLPPTEELRIGMEATGPYWIPLAEWLKTHGWTPVILNPIKTASLRNYGVRGSKTDNIDSVLIANTLRIEGEQPQPASPKHSDELRHFTRLRADMVKDRTRIALRVTSLLDRLFPELLSSFSKTLSPSCLALLSEASTPSNVLALGEEKLTTLLHKASGGKLGATRAKEIMDKAAVSVGVTSQALEEVLALLLEQINLIDSQLRTLVHRITELYEQANLYFTSIVGVGTLSAATILGEFGSVSKFAQPKQMVAFAGIDPKLRNSGQHQGQVHISKRGSRYLRRALYLACQVAVRNDDYFHSIYQRHRDKGKSHKEAIIAVMNRFIHVLYAIWRDNRPYYPLTSA

SEQ ID NO: 451821 - protein, 364 aa, unidentified
MKEEKTKTRYVGIDLGKRTYQMAVVGKGGKVTMSNGTTYTAGRQGLYKKLRPEDKVAIESCSLAFIMAKEMEAAVGCKVYVLNPGRLSIIYKSMKKTDKEDALKLAHILQDFAEERLPVVPVPSDKEMNRRKILANSRRAQNNRTSLINLLHALFVAQGITSKVRKDLATEVVRKEAIKELTGIERDEAEYLVQCLDLSEKRIEKLDQMIAEESAGDEEIERLQSIPGVGPKVAFAFVSHVGVARFENSGQLCNYLGLVPRVYMSGDTVRYGPITKRGNSYVRALLVQGSWALVRSKTGGKLKELYEYMTIEKSKNKKKAIVAVARKLAEMMYTMMRDKTWYAIRKFKPGKEAAAELAQLAMSA

SEQ ID NO: 451822 - protein, 431 aa, unidentified
MNRSVEFLSVGIDVGADFSLMAFALPSQELLGKPYKIIHSSQRSLNGAVEKIKTLSQKYQLPARVFMESTGIYHYPLYHKMKDAGFDVFVLNPLVTHAGRDLNVRNIHNDKYDSQKIALLGLRSGLKTSLIPSDQVISMKVILREYYAVKKEISMYICRLKNQLRQAFPQFLPLFSKVNGVTAMAILCEYPNPESLLNAGEHAVADFMKSVSHNGPLKVQKKAAALIQAAQDARSFGHWNHGISILIRHYIEMIRLLDVRAKTLLAQAKALLAEQDSKTLAHQTELLQTIPGIGFLSALTLICELGDFSAFKRPKQLFSYFGLDPIVRQSGNYNGTNLKLSKRGSPFARRCIFVIALQSISLNIHKEPKNPVLRTFYEEKCMCKAKMTAIGAVMHKICNLIFAVLRNDAPFVLQTPEQHNAAYLSKTHSVA

SEQ ID NO: 451823 - protein, 401 aa, unidentified
MNTTTILYVGIDVSKDKSDICIKDQSGNDLIQRFKITNTKADLGKLYETIERIKSKTQGNSDVVFGMEATGIYSLPLYSALRRDGYKVKLYNPIQTNGFRKMRIRKTKTDPIDASIIADMMRNSEPPQVNEIKDLNLYQLRELVRIRHRLIEKQTVCKIQMIRNIDMIWPNYVSLMPKVFGTTSITVLKKYTVPSKMIGKSFEQFYELVRKASRSKISRTKAEEIYANAGNILTIPEIEPIVSIEIKTLITQLELYDGQIQSVDDKIDQMMKLIDSKIMSIPGIGGILGPMILGEVGNIDRFSNAKKLVAFAGLDSIVSQSGRFENKTGKISKRGSPLLRQALFLAANIARMNDDVLKQFYDKKISEGKHHYSALNAIAAKLLRIVYSVLKNNKEYQQQPN

SEQ ID NO: 451824 - protein, 341 aa, unidentified
MEEYVGLDVSMKETSVSIRRAGERIWRGKCASDPRIIAELIRKRAPAVRRVVFETGPLSIWFYHSLRTEGLPAICIDARHAKAALDMATNKTDANDADGLAQLAEVGFFREVRVKGFDSMLTRTLVGARTRLVRITTELSNQIRGVMKTFGLLVPAGKGSIFEKNVRSLLTDQDGLASIVLPMLEAWRGIRIRAAELGRQLVRDARQNQACRILMSIPGIGAITATAFTTAIERPDNFKKSRSVGAWIGLTTRRYQSGEVDYGGHISRRGDAHLRGLLYEAAAVILTRSSTDSTLRTWGLKLRERIGFKRAAVAVARKLAVIMHTMLKTGELFNPNAGAIA

SEQ ID NO: 451825 - protein, 461 aa, unidentified
MNKSRPRGKHNKSAPQQMDWKALDVVHPDAAGIDIGGREHWVAISPERDAEPVRCFGCFTADLQGMARWLVEKGVRSVALQSTGVYWMPAFEILEQHGLEVYLVNAQHTKNVPGRKSDIQECQWLLKLHAFGLLNNSFQPSDEIRTARTIWRHRGNLVAEASSTIQRMQKALIEMNVQLSNVLSDLSGVSGMTIIHAVLKGERDAEKLAALVQPEVQATQEEIVKSLEGNWRPELLFVLRQHVELYRIYQEKIGACDVQLRRHLESLEGKVDLEAQPIGSKPKGKRGSRNAPQFDLRSELYRLTGIDWAQVNGIDVLTAQTVMAEAGPGLEEFASEKHFTSWLGLCPTNERSGGKILNRKTRKVVNRASAAFRNAARTLLRSQSYLGAQYRRLRTRLGAPKAITAMARKLACLYYRLIKRGQQYVDKGTAYYETRYREQQIRAVVKKAQKLGLQVLMPNAA

SEQ ID NO: 451826 - protein, 408 aa, unidentified
MSQEKQAPTRFIGLDVHKHYLIAIGVDAQRNQVLGPQRVQLVHLEHWMRKTLTPQDAVVLEMTTNAFPLHDELLPHVGSVTLVHPPHVKLITRAQVKTDKIAALVLARLHAVGMLPSVWVPSLEVRDQRALVSQRAKMVRLCTQAKNRLHAVLHRHHLLPPAGDLFASSQHQWWLALPLTLVERVRIHSDLETLLFAQSQMALLEEALAQVAAQDERVPLLIQLPGVGLITAMTLLAAIDDVARFPEDKCLVGYAGLGSRVHDSGLTHHTGRITKAGRRDIRAAMVEAAHTASRIHPHWKAELARLEPRLGHNKAIVAIARKLLVAVWHVLTKACADRYAQPQMVARKLLAHSERLGKANRPSGQTRAAYVRQQLDRLGLGADLLAIQRGQRTIVLPPSRLNDALAAP

SEQ ID NO: 451827 - protein, 339 aa, unidentified
MRKFIGIDLHSNNSVVVVADEDDRVVYQKRLPNNLEAIAAALAPHRDDTVGVVIESTYNWYWLVDGLMGRGYRVHLANPTAIKKYEGLKYSGDFADAAYLAHLLRLGLLPEGYIYPREQRGARDLARKRMQLVRHCTAHILAIEGILMRQTGACRSSGYALKRMTVEQVEALGFAPDVALAVQANRAVSAVLQQQIAVLEQRLKERVSLHPDYRLLRTVPGIGEVLATTIMLEAGPVSRFGAVGNFASYCRCVDTLRESNGKKKGEGNGKNGNKYLAWAFVEAANFALRYCPQAKSFYERKKRKTNVVVAIKALAHKLARACFHILREQQPFDVNRCFA

SEQ ID NO: 451828 - protein, 423 aa, unidentified
MMKLKYSICCGLDVHKNVIVATIVTTNKDGISEYLQKSFSTINSDIQRFHNWLIENNCYHVCMESTGKYWIPIFNYLENDIDVCLTHPKYVKAIKGKKTDKKDSKWIADLYKFDLVRCSFIPPKDFRQLRELSRYRFKLVCMKSSEKNRIQNCMTVSNVGIASVLSDPFGKTATEIISYLLEHTADSMDEKAVRKFIKKGAKSKSDEIIEAIKGYTIETDQAKKLELARGHLEYLDDMITQTEVELYVRIKPYYKFVEFVSTMPGMTELSSTIVLAETGVDMDIFDDAKHLCSWCGLSPANNESAGKKKSVRIAKAGDYLKPMMVQCALAAIKSKKQPYFAIKYGRIKKRRGHKKAIIAIARMMMVCIYHMVSEKKPFTPTDYEELMDPQNHVESVVLNENNVFAYLESLGYDSSKLVKRNDN

SEQ ID NO: 451829 - protein, 339 aa, unidentified
MKLYTGFDLHSSSSYFGIIDEDGKRIWKKKLRNDPILISETLRRFKSDIAGVVVESTYNWYWAVDLLIEEGYHVHLANPSRIQQYSGLKHADDEHDAFWLAEMLRLKILPEGYIYPKEQRPLRDLLRKRGHLVRLRTSLITSLQNILARNLGSKMNTNDMKALTEDRVTPLLAGNDDLSLAGKVSKDAIDSLSRQIIAIEKAVEKKLPLKKPFDLLMSMPGVGRILAMTIVMETGPLDRFPKVGNYVSYCRKVPAARFSNEKKKGRGNRKNGNKYLSWAYAEAAEFARRFDPGARAYYDRKLRRTNAPIAYNALANKLSRAAYYIMRDGVLFMPERMFT

SEQ ID NO: 451830 - protein, 477 aa, unidentified
MSKGSGTTRGDRRRNERRARLRRVLPRDGAVIGIDLAEEKQAIAVIDHDLRVLARKTVRVKVFRLGEALDWAVAQARAKGFGPVSVACEPTGPRWLQVQQLCAERGLPLVCIQPLVSHIAREQQDFTSHKTDEADCVMIARLAVELHCYLPEQLDETWAHLRHLGRRRNQLITAATASVQRIRDFLSVAWPVAAETCVRPFESVTWLAAMQVVMSRCGADPAKLAPCGVEAFAVLVRRAVPCWGGVRPSGRVCQAVFAALTDTQGVVASHRRGLLRRCTDELDDLQRTRARLRAVEADMVTVLAQLGLVRLADIPGLTAVGAAAILAEAGDPRRYDSSSSLVKHAGLSPADNASGAFSGQAHISRRGRPGLRLTVWRAVWAVLIHNPVMAAKYQAMTQAADTAAAQAASASADAGSRQVSAAAAAARARRAKARVACAASLLRWIYSMVVHGTGWDPAVASGAAACQHASSSRQQAA

SEQ ID NO: 451831 - protein, 405 aa, unidentified
MFEIEDVGVFLGLDVGKSAHHGHGLTPPGKKVFDKPLPNSEPKLRAVFDKLTAKFGTVLVIVDQPASIGALPLTVARDAGCRVAYLPGLAMRRIADLYPGEAKTDAKDAAVIADAARTMPHTLRSLELTDEITAELTVLTGFDQDLAAEATRTSNRIRGLLTQFHPSLERVLGPRLDHQAVTWLLERYGSPAALRKAGRRRLVELIRPKAPRMAARLIDEVFDALDEQTVVVPGTGTLDIVVPSLAASLTAVHTQRRAMEAQINALLEAHPLSPVLTSMPGVGVRTAAVLLTTVGDGTSFPTAAHLASYAGLAPTTKSSGTSIHGEHAPRGGNRQLKRAMFLSAFACMNADPASRAYYDKQRTRGKTHTQALLRLARQRISVLFAMLRDGTFYEPRTPKDVELAA

SEQ ID NO: 451832 - protein, 314 aa, unidentified
MSTDGTWVGIDVSKAHVDVAVYGGRQWRETTDTAGLARLTSQLVEVRTTLVVLEASGGYEVAVAAALAAGGVAVAIVNPRQVRHFGRATGVLAKTDRLDARILAHFAAVVQPEPRPLPDAAQMELVELVQRRRQVVEMLAAEKLRRRAASGRVGQQIQAHIRWLEAQLHDLDRDLNNAVRSSPLWRDKDDLLRGVPGVGPTVSATLLAELPELGHLNRRQIAALVGVAPLARDSGTYRGRRHCWGGRASIRKVLYMAALAATRWNPCIQATYQRLLQAGKLKRVALVACMRKLLVILNAMLAQNTAWHTEVQTP

SEQ ID NO: 451833 - protein, 409 aa, unidentified
MSNDASAEVFVGLDWAVHTHAVCLIDASGSVLDRFEVAHDRDGLAELMRRLARHGQCLRIAIERPSGLIVDALVDAGHEVFPIHPNAVKASRPRYRSHGAKSDASDAYLLADLLRTDGHRWRELSPQSDSIRALRALVRSRDDLVATRVALGNQLQSTLEAFWPGAACIFADITSPIGLAFLKRYPSPASAARLSEAALGRFCRSQHYSGRRSPAELMARLHSAAVGLAGPLTNEAAAQLVRSMVAVLHPLVEQIAQLTRRIERFVESLPDGQIIMSFPRAGHVCAAQILAELGDVRERFPSLDQLASEAGAVPVTYQSGKTRSVAFRWACNHRLRKAVTCLADNSRHANAWARGIYTAARGRGCDHPHAIRILARAWLRVIWRAWTDRIPYDPGLHVSAQKLASDQGG

SEQ ID NO: 451834 - protein, 343 aa, unidentified
MDQYIGLDISLKDTAISIRQDGKRIWRGKCPSDPKLLAEMIRKHAPHAKRVVFETGPLSTWFYHAPTAEGIPAICIEARHAQKVLNETLNKTDANDADGLAQLAEAGFYKVVRVKAFDSMLTRTLVAARNQLLTISTQLSNQIRGLMKTFGLIVPKGKGRIFDGNVRQLLDGNDGLARIILPLLAAWRDIRRRAADLDRQLLAAARESRETKLLMTIPGIGAVTAISYVTAIEDPENFRTSRSVGAWLGLTTRRYQSGEVDYDGHISRRGDNHLRGLLYEAATVLLTRTSARNENSLRSWGLKLRERLGFKRAAVAVARKLAVIMHSMLKTGEVFNALAGATA

SEQ ID NO: 451835 - protein, 423 aa, unidentified
MEVMHERVAGLDVHKEAVVCCVRIVAGGKASRECRTFETTTAGLEALLSWLTQSGCTHVAMEATGVYWKPVWNILSDGKFELILANAAHIKNVPGRKTDVNDAMWIADLAAFGLIKASFVPEEKIQELRSLMRARKQLVREQTRHIQRIQKTLEAANIKLDSVISDIMGLSGRRMIEAMVAGVRSPQKLAQLADRRIKASPKALYDALHGRLTDHHRFMLQLHLGQYDALGSSIAQIDAQVDAAIARIDEEAAAGRGSFRDLTALLDGIPGIASLAATSILAEIGTDMSRFASDGHLVSWAGLSPGQNESAGKRKSSRLRKGAPWLKTLLVQCAWAAVKKKDSYYKAQFNRLKSRRGPKKAICAVAASMLTAIYHMLKNGVEHNDLGASHFDRRPAAIKANRLVAQLAKLGFRAELQPLAEAA

SEQ ID NO: 451836 - protein, 319 aa, unidentified
MQTKVHVGIDISKNSFDVALPVTTKKEYRHLKFSNDANGFKKFIEQIDPNSNCVMEASGVYYLQLAIYLHQQGIIVSVVNPLTIKRFSQMRLMRAKTDKKDAAIIAEYGKVENPAQWKPRTEHMLQMQQFQALQDNFTNQLARLKNQQESFKQSGVKNKIAEQLLDKELEHIGKQIKMLDNELLKITLMFHQDLFERLQTIKGIGKRTAITLIIITDGFTRFENCKQLCAYIGLSPRVFESGTSVKGKAKICKMGMARMRKLLYLCSLSAISANKACKEMYERLKGRGKNGKLAIIAVANKLIRQAFVIGTSQKIYKEF

SEQ ID NO: 451837 - protein, 388 aa, unidentified
MPYRIAGIDVHKRMLAVVVADVEVEGEYQFERRLFGSNPEQLRLLAEWLIEQPVEEVVMESTAQYWKPVWGVLERYWKPIRQKREDASPMSGTLHLAQALSNRGRRGRKNDFRDAERLLKRLVAQELTLSFVPYAEQRLWRTVMRGKYQLTRDHARLRNRVESMLEEAHIKLSSLVSDLLGVSACTELNPVYRRLLKMALEELQFLEQQIGKLEQEMASLLSQHQDAVQRLAEVPGLGVDSAQQIIAEVGAEAATFASAKNLSSWAGACSGEEESAGVNPNHRSPKGNRHMRRILHQSANAAVKHKGSIFEVVYRRLVPRLGHNQAIGAIAHRLCRLIWLLLHRGVRYEERGPAVNQRSKQQRTARMIRELRRFGYRVEPLTVQLNPA

SEQ ID NO: 451838 - protein, 343 aa, unidentified
MANHTLVAVDLAKAVFEVAVSHHPGQVARQKRYSREQFQLALAQLPQATVVMEACGSAHFWARRMLALGHRPVLLPPHAVRPYVRRNKTDRTDTKGMLEAYRNEEIRPVPIKSVAQQTVASLHRLRSGWLAERTARINTLRGLLREFGILIPLGAHHAATSAWAQLEDAESEIPDPLRPALAELCSEIRDLERRIKMIEHQLTALAAQTPAVAQLMTIPGIGLLIATALVAFVGDIHRFPSARHFASYLGLTPRENSSGLRRRLGAISKRGDVYLRTLLIHGARSVLNAAKRKTPDRLRAWALAREAARGHNKAATALANKLARIAWAVWKHDRPFHSTPHAA

SEQ ID NO: 451839 - protein, 340 aa, unidentified
MQKDVKFYLGIDVSKLWFDLSLICVIDHKKCPMLTERFDNTSQGLGQLDKWLKDQQVAFNENSLVVIENTGVYHRLLWEYCSIHDLPIHIGNAAHIKWSLGITRGKNDVIDSKRLCSYACKNADELKATAALDPVFIRLKDMMTSRNRLISQANSIKVYLGELKLSNSKEIHKLMEQAHKAAISGLARSIKQVEAQISKIIKEDSQINKNYELLISVPGIGHLTATYIICCTNNFAGNITGKQLASYAGVVPFKNTSGTSIRGRDKVHKMANKELKKLLHLCAVSAIGNYPEFRQYYDRKKAEGKHPMSILNAIRNKIVLRAAAVIKNQRKYVDNYQKAA

SEQ ID NO: 451840 - protein, 466 aa, unidentified
MEKAKESSKPRRSGVPMALQAIRPMVAGVDVGSRENWVCGPARPDGEPNVRVFGTTTEQLKALVDWLAEQRTESVAMESTSVYWIPLLELLEARGIEAVLVNAHQLHNVPGRKTDFHDCQWIQLLHSCGLLRASFRPGPAVVAMRAIHRQLANLVEERTRCVQWMQKALDQMNVQVHRAVTDLTGTTGMAIVRAIVAGERDPVKLSTLRHHRCHKSVEDIARYLTGTWREEHLFNLGSALQLFDAVEQLIATHESRLLEAMAALQPDDRTDASPPPHPNPLKERAIKGRGDQPVRTALWRFAGLDLMRIDGIGTGAAKIVLTEVGPDLSAFPSENHFVSWLRLCPRRPISGGKPLKKRRNSMGANRIAGALRMAACSLQRTKTALGAAYRRIASHKGADVAIFAIARKLAQLVYRMIRYGQDYLDLGEAAYDRQFEARRLAALKLTAKSMGFQLTRESAPAQPSAG

SEQ ID NO: 451841 - protein, 407 aa, unidentified
MEQSRTNGRDKVFRSVAIKQFELANTPMKKELYLGLDVHKDCIMRAVAEEGRKGEVRDTGAISNDLHAVEKWIGRLRKVHGKETQLRACYEAGPCGFGLARRLRQLGVECEVVAPSMTPTRSGDRVKTDKRDARKLARLLRAGELTPVYIPEATDEAIRDLCRARTDAVDDRRRSRHRLKGFLLRHGYRYQGKSAWSAAHERYLRELVLPHPAMKVILEEYLISIGAAGERIARCEEAMSDLLEKWRLAPAVGALMAMKGFQTVAAMILVSELGEVHRFDHPRQVMAYLGLVPTENTSSDKRRQGQITKCGNAHARWLLVECAQHYAAPPKVSKELSRRQQGQPREVLAISWRAQNRLHGRFARLSARRLQRNKALVAIARELCGFIWELLRTQSCYQAAVPLGLKR

SEQ ID NO: 451842 - protein, 359 aa, unidentified
MLTQINKIDFSGQHFYVGLDVHLKSWKVSIMAEKLTLKTFSQDPNPELLHHYLVKNFPNGIYHSAYEAGFCGYWIHNRLIALGISNIVVNPADIPTTDKEKVNKTDKRDSKKIARSLRNGDLKGIHVSSLKSLEDRCLLRIRKTLVKDLTRYKNRIKSFLYFHGIEMPEAFSKSATHWSKRFMNWLGSIELTEISAKKSLNLLIVESQHLRLTLLNALRGIQELSRSEAYANNVRLLQTIPGIGTLTAMIILTEMDTINRFASFDQLCSFIGLIPSTNSSGEKENIGEITHRGNNFLRSAIVESAWIAARWDLSLNKCFHDYCKRMESNKAIIRIARKLLNRIRFVLKNNQPYVCSVIK

SEQ ID NO: 451843 - protein, 314 aa, unidentified
MVGIDVAKAHVDIFVLGAEFKPQRFVNEAEGHSDLATALAPLGVQLVVMEATGGYEAALACALQAAGFAVAVVNPKQARDFAKGMGYLAKTDAIDARALAAFADALSRQPDLASYIRPLTDEAQRDLAGLVTRRRQLLAMMLSERQRMQLAVAKVRPSIEAMIEHIKAQLDEIDAEMVGHIQEHFGKLDALLRSTKGIGPVASATLIAELPELGKLNRRQIAALVGVAPMANDSGNSKGRRRVTGGRFEIRRTLYMATLTATRHNPAIAAFYARLLAAGKLPKVALIACMRKLLTTLNAMAKSGLAWDPEFKTA

SEQ ID NO: 451844 - protein, 339 aa, unidentified
MKVYAGIDLHSNNSYVVLLTEEDKIIFQKRLPNDLNAILDVLKPHQENIQGVVIESTYNWYWLVDGLIDNDFQIHLANPAAIQQYSGLKHTDDKTDARWLAKMLLLGILPEGYIFPKGLRAVREQLRKRLWLVHKQTMFVLSLQSMITRYRGIRLGGEKIKKLNTEDLKRYFPEEPLYLAAYSQWIILETMLNEISHLEQSLLKQLKIDKRFNCIKSIPGIGEILGMTILLESGPMDRFNDVGNYASYCRCVNSKRISNGKKKAENNRKNGNKYLAWAFIEAANFAIYRHSDITRYYQRKLAKTCRVVALKTVANKLARACFYVLKNEEVFEMKRAFRS

SEQ ID NO: 451845 - protein, 410 aa, unidentified
MHKKQNYIYIGVDTHKHSHTAVIINCWEDILEEITFEARPSIYPDVLKKVKKHCKGLTPVFGLEDVKGYGRSLAVYLLENKQIVKEVNSALSYAERKSAPTTQKNDNYDAFCVASVLLRRLDRLPDANPQDIYWTIGQLVNRRSALVKAMTSLANQLHEQLSCHYPSYKKLFAVVDGKTALEFWEQYPAPYLLDNITPEDLAEFLRKHSHNACSTNKAQKILDTVKADGDTKRGYQDSRNVIVRSIVRDIKFKKQEIQAIEKELKEILKVLDYKLESMPGINTVTASSLIAQIGDIHRFTSPDKLARYAGIAPVKFSSAGKGKEQSSKQGDRTLFGLFYVLAWQHIQTAKGSGKPRNPVSYAYYQKKLKEGKTKVQALVCLMRVLVVVIYGMMKNKTEYNPPALPENIAV

SEQ ID NO: 451846 - protein, 400 aa, unidentified
MVWYVGIDWATEEHAVCVLDDGGRVKKALSAAHTAAGINGLCRELGALGDRAQVRVAIERPTGLLVDTLVDAGFVVVPLHPNAVKACRPRYSAAGGKDDPGDAYMIADILRTDGHRFRELQPLSDDTRALRAAVRARDDLVAERVGVANQLRALLESFWPGAAEIFADIDSPIALSFLARYPKPQSAAHLGEKRLARFLAEHRYSGRRPVAELLERLRAAPAGKAGVVECDVKADLVRAYVAVLGPLVAQLTTLTALVEHLVGQHPDGPVVTSFPRAGKVNAAQILAELGDCRERFATEEQLAAEAGVAPVTHASGKHRGVAFRRACNKRLRQAVTCFADNSRHASPWAADVYRRARDRGHDHPHAVRILARAWLRVLWRCWRDGKPYDAALHGGAQRVA

SEQ ID NO: 451847 - protein, 367 aa, unidentified
MVRPVLPPQSGAPLTGGTDMIRNKPRATIYGIDLGKNLFHVVGTDPAGNVVQRVKLRRETVLVFFELAQPSLIGMEACPGSQWLARMLQTFGHTVRIIPAQFVKPYVKSNKNDTIDAAAIAEAVTRPTMRFVEVKQPEQADIQALHRIRDQMVAHRTKLICQMRAFCLEYGIAIRQGVGAFKASLPAILADSSNDLTPTMRRVLADLSDDLKGLEARIAEISRELESAAASNERARRLMSIPGIGPLGATALIAAAGDGQQFKKARDLAAWLGLVPQQYSTGGKSRLLGISKRGNRYLRRLLIHGARSCVFNLDRSRDRLGAWIDQLQQRMHVNKVVVALAAKIARIAWVILTKPGVLYDQHGKAVA

SEQ ID NO: 451848 - protein, 431 aa, unidentified
MEVIHPRVAGIDVHKKIVWVAVRLPGERPGERTVTAKRFKTFWRSLRQMAAWLAELGVTDAAMESTGVYWWPVYHALVQAGIEVCVCNAAHMRNVPGRKRDIADCQWIAELHEHGLLRPSFIPTGAVAELRSRTRYRKKLIEQRTSEGQRLAKVLEDAGIKIDSVASRLLLKSGRAMIEALIAGERNPGRLAGLALGRLRRKTEELQLACDGRFTAAHGQMCRLHLDAYDHLTAKIAELDELVAEAAAPFAALIARLETIPGIGRRTAEVIVAETGGDMARFATAARLAAWAGLAPGDNESAGKRKHAAARKGNRHLRVAMVESAWATARTRTRPGARFRRLARRFGKGNEKKAAIAVAHTLICIAWAVLSRGQDYADAGEDYYEQRDRRDREHLIRHHQQALARLGYQVTLIPPGDGSPPPSATSKQPAA

SEQ ID NO: 451849 - protein, 418 aa, unidentified
MSILTTLFVGIDVSKQSNYIRALDFNQNQFLNFKALNNEVGATSIKDKVIPILNQNKFDSVVFIIESTGVYSYHIATFLSTNDELLKYNSIVYCVNPKVVKKYIESYNDSDKTDPDDALALADFGRVGRCKNLSPWRGPQLLALQRLTRFRIHLTEQVTREKNYVLNNIFLKFSSFSTDEDDFPFSNKFGATSRAVLTDFMSTEEIINSSLEDLTSFIISKGKGRFSNPSKTAELLQKTARDSYRLDKVAYLPINIAIASSLNCIKTFENEIKDISKAIELNVKGINPQGYEILKSIPGIGPIFASGILSEIGSIEQFDNDEGLAKYAGITWRKHQSGKFDSEDTYMTKTGNAYLRYYIMEATASVVRNIPEYNDFFNRKFKEAKTHQYKRALALTSRKLIRLIYGLLRKNQLYSKNN

SEQ ID NO: 451850 - protein, 340 aa, unidentified
MAFEKISVIGLDLAKNVFQLHAVDEAGDVIIRRQLRRNQLLQFFEKLPRCLVGMEACSTSHYWARELGRQGFEVKLMPPAYVKPYVKRGKNDAADAEAICEAVTRPTMRFVPVKSCERQALLMQHKTRDLLVRQRTALINALRGHLAEFGIVTSQGRLGLRAAIEALSAAQEFLPEPSWQPFEHIRKQLEELTHKIAELDRIILRWCRNEAAARRLMTIPGVGFLTAAAIAASVGDATEFKSGRQFAAWLGLTPRQNSSGGKERLGRISKQGDRTIRRLLVVGATAVVRRARLDAASFPWIARLLGRKPAKLVSVAIANKTARIAWAILTRMENYRFATT

SEQ ID NO: 451851 - protein, 412 aa, unidentified
MDVYCGIDWAEDHHDIALVDRDGQLLARRRIGDDAAGLAMLLALLAEHGDTPDDPVPVAIETPRGLLVACLRATGRQIYPINPMSVARYRDRHSVAGRKSDHGDSVVLAGVLRTDLHAHRPLPAGTELAQAIAVLARAQQDAVWDRTTAHNKLRSHLREYYPGFLAAFVPVSGGIMRPEARTILAAAPTPADAAKLTLAQLRGLLKKAGRSRGIDTEAARLREAFRAEQMRQLPLVEAAMGRQALALLGQLDTACAAAADLEHAATESFNLHPDAGIITSFPGLGALTGARVLAEIGDDRSRFQDAKGLKAYAGAAPITRASGKTRSVTHRRIKNNRLNAAGYNWAFSALTASPGARAHYDRRRDDGDRHAAAQRNLFGRLLGCLWHCLITGQDYDETIAFPATAKKISQAA

SEQ ID NO: 451852 - protein, 380 aa, unidentified
MRRLILASYDKIMLNINAVIMLQKRGESAMRNVTIGMDLGDKNHIITILDEAGVIVKSCSLENVRASIVKFFRKYKGSTVAIEAGTHSPWISRELKALGCNVLVGNPRKLRSIWNSDDKTDVHDSEMLARIARFDSGLLYPITHRNEQAQADLELLKARDMLVKTRTSLINHVRGAVKSFGERLPKCSAASFHKQCGDFLPANLKTVLKEVVETIEHVTGRIKEFDKRIEKISREVYPETELLKAIGGVGPLTALAYVLILEEPGRFGKGRQVGKFLGLTPRRDQSGETDKQLRITKAGNRFLRRLLVGAAQYILGPFGPDCNLRRFGLRLMERGGKNAKKRAVVAVARKLAVLMHHLWRNGEIYDPFYKSHKVVMKNAA

SEQ ID NO: 451853 - protein, 335 aa, unidentified
MKEITTVGVDLAKSVFTVHGVDAAGRTVLRKTVRREKLMELMVALPPCLIGMEACGGAHDWARKFEAHGHRVGIMMARFVAPYRKSSKNDGNDAEAICEAVARPNMRFVPVKSAEQQAILSLHRVRQGFIEQRTATSNRIRGLLAEFGIVLPQRAEQVRRAAVVVAEELPILAREAVADLRAHLSYLDQRIAQYERQLIELARQREAAVRVQRLPGVGPLTASAITASISDGHEFANGRQFAAWLGLVPRQYSTGGKARMGRITKRGDAYLRTLLMLGARAVLQSAAHKTDRLSRWAMALRARRGYHRAIIAVAAKNARIIWALLANNREFAPPA

SEQ ID NO: 451854 - protein, 453 aa, unidentified
MYLSPLHRNGHPEVSFRNAVYHPEKRSDTKRREVLPGIHAFIRKGGIRMDGPIITVDVSKGGCHYQPFLEKGKPLRKPKVLYDTIEGFEELQKSIDQTEEKSGSKVSVVFEATGVYHRCLQKYLDDHDIPYFIISPLLSATYRKTNLHANKTDALDCAHIAKAYYGDERLHVFEKQEDRFISLQRLNRMYEDELQHLRKRKVSFRSTLDIIYPRLDKCFNGKASLYDPVVMEILKKYPHPKLLLKRKEETIAKAIERRTDHGFLFISKIVHKVYECAMKCYSGCDINDIEVKKLPDMIEELQDQMERCGSLLSELVNEASRIEYFNNVASIIGIGVNLASRIIAEIGDISRFRNHRTLSAYAGLNPFIKQSGDEDGLHLKISKKGNRHLRCLLYLGATCNYRLKKGDPLYEFNQKKRQQSQSPLKSKAANIAAAHKLLVIIYVLCKNGEQYRF

SEQ ID NO: 451855 - protein, 341 aa, unidentified
MADVRVIGLDIAKSVFQLHGVDEAGAIVLQKRLTRSRLLPFLEKMPPCVIGMEACSTSHYWARELARLGHQVKLMPAQYVKPYVKRQKNDMADAEAIAEAVTRPTMRFVAPKSPAEQSAMMLHKVRLMLNRQVVMIANAIRAHMSEFGIIAPVGRGGVDRLIEHVEDENDDRIPETARHCLQMLVTQLKLVKLQILDNDRQVLSLARSTELGRRLMEIPGVGPLVASALIACVPDPSMFKCGRNMAAWLGIVPKQNSSGGKSRLGSITKAGNRYLRQMLFTGAMAVVRRAMQGTRRTWLVRMLERRRPKVAAMALANKNARIAWAMMMSGEAYREPMMLAA

SEQ ID NO: 451856 - protein, 416 aa, unidentified
MKEVVEFVQVVQRGCGLDVHKQTVVATIDGVGLKKETREFGATTRSLTELKEWLVRSGITHVAMESTGVYWKPVYHVLEPSGITVWIVNARHVKYVPGHKTDKRDSQWLCKLLLAGLLKPSYIPSREQRELRDLTRYRRKLIQQIASEKNRVIRILEDCNIKLSSVLSDTHGVIGTKLIDKLCETGKITMEYIEEVYHSKLKSSKEDIYLACEGSITPHHVFMLTAIKDDILSCEGIIAKITARIKTILSPYENVLELLKTIPGLGDKSTEDLISEIGLDMSVFPTEKHLASWAGVSPGNNESGGKKKSGRTTHGNKQVKAVITEVAWAATRTKNTYYSARYHRLAARRGKKRALIAVGHSILKSVYHILTSKEQYKELGADYLNSKIESKRKSYLKKELEKLGYTVELNPLPKAG

SEQ ID NO: 451857 - protein, 405 aa, unidentified
MGAEQVAHGWAGIDVGKGHHWVCLVNEAGSTLWSSKVVNDEAAILDAIAEVLARAQQVSWAVDITGTSSALLLALLSAHGQAATYVPGRTVNQMSTAYAGEAKTDARDAYVIAETVRLRGDLTPVDVPATLVAELRLLVTHRTDLVADRVRMINRLRDVLSGYFPSLEREFDYATSRGAVVLLTGYQTPAAIRARGRARLTTWLRARKVRSAEQIATAAVKAANAQHTTVPGQDVAASIVAEIATALLELDQRIRVLDARIGDTFHAHPQAQIIESMPGIGTILGAELIAAAGDLSRYVDAGHLASAAGLVPVPRDSGRRTGNLHRPLRYSRKLRRVFYLSAQTSMMREGPNRDFYLKKRGQGHGHVQALIALARRRVDVLWALLRDNRVFELTPPTREKLPHTA

SEQ ID NO: 451858 - protein, 400 aa, unidentified
MSGSRRPFQGFVGIDVSKDKFDACGIREDGAKLFQFSATMDRNGFENLKSHLSSVSMGSVLIGMESTASYHVNLFSYLVSEGYAAVVLNPLLISNYVKMQLRKTKTDKKDAWVIAQFLLANKDSLIRRATSPLISDLRELARQRESLVDQMTSLKNDIKRILNITFPELEHMTGIFTKSILKLLQRYPSAYALQEVDPDQLTRMLIEDSYGRKRGAFAEALLKAARSSIGTPSPMKDVILKQKVSLHFHLEEALQEITEMLLQTSRGMMGDDMDILNSIKGIGEKTAASFLIEMGGDIQQFDDPNKIIAMAGIDPAVRQSGKHEGSSRITKRGNRHLRRIIWLMTTQVIHYSDVFKVYYQKRRKDGLPYKKAVLATSHKLIRVIYAMLTQRTFFCQAVNS

SEQ ID NO: 451859 - protein, 514 aa, unidentified
MSEGTAQPPFSRLCPRLLRKHSAWLIRHIPLTQKFHPQPLAPARMADWVHAHYARVRSPYAAQDKPFASDFTNPYRNGGDIMVKINYISTLFVGIDVSSKTNSVYAMDFEENKYLSTSFGNNQPGADELVNRIAACMQKHKNLDTLLIVLESTSVYSVHISNFLASSEVLMPYKPYVFCVNPKTTANYRKSYIGMEKTDPTDAYLIADFGRVGRTKKLEPWRGGQFIALKRLTRHRMHLSECITREKTYMVSNLYLKFSELQLLEGDDKPFGNLYGATSSAVLTEFLSPQEIIDMPEEDLLAFLAQKSRNRISDLSKTSELLRKAARDSYRLDKCMYEPLNISLASSFNCIQAYQKEIRLIEQAIDKCIKGMNTNALIILQSIPGIGPVWASGILSEIGDITAFHSSDALAKYAGLYWPKGDSGDFISEDNQMSKAGNPYLRYYLGEAANSVRKHIPEYADFYARKYAEVTKHQHKRALALTSRKFVRLVFGLLAKNQLYTGEKLDTEYNIESN

SEQ ID NO: 451860 - protein, 361 aa, unidentified
MEKVAKRHGKEKRMQVNFEGKACWIGVDVHKVNYAAAILDEDGQRLEFSTPAEPKKLLLQLLKMGMTIKALAYESGPTGYGLAWACQKLGIPVLVAAPSRIPRPISKTGKTDRLDSMKLVEFLARDMLKSIAIPSREEFALREMERVRQRLVRKRREARQNIRAFLLRNGLEEPAGLGNWGATALGLLQEMPLAEYLRLSLDSYLEEHATILASLTKIAKQLEKAAIKQGHGERIKNLCTIPGVGMTIAHTFTSEIFRPERFKRAEDICAYVGLAPITSHSGSSKEKSWLRPVGQNYLRSILVESAWRLIVAESSYRDFYNRIRNKTGLTQKAITAVARKLLVLIWRIAIEGRAYRPATAN

SEQ ID NO: 451861 - protein, 425 aa, unidentified
MTTRNDATPAATWVAIDIAKRTHAVLIETPDGKHRRFRMNSLQEDHQRLVDLLHLCPAPVRIAFEPTGDCHRTLAYRLLKEGFDVCLVSSIAGARYREALFNSWDKNDPKDAAVILALLKQGVTQRYVDPLIAGHHGLQELSKTHYQISLARTRLQHSLMTHYLPLYFPESERYFHSTQAEWFARFLIRFPTAASVRALSFEAFEREAWDVVGRKVNKRSWIRELYDTACTSVGLPIAGDDVAIETFRLQLRRYQQLIEQREALAETAHRLLQGRPDYESLRSIPGIGPVLALTILAEAGDLRRFSHHRQFLKYCGLDLSKSQSGQFRGQEKLSKRGNARLRFAFWFAATIAVRMRENSFRQKYERYVQPDPLNADRKRKALTAVAAKMARVAYSLVKHRTTYRCYFETSLPRGSTPLCRAVGTD

SEQ ID NO: 451862 - protein, 475 aa, unidentified
MDISFRIFSCFQYTFSLGFFINLKPKIMAKRKLEMEIINANAAGIDIGSRSHFVAINQVHADVREFGVYAEDMKDLLRWLLENDIKTVAMESTGSYWQNLFTELQNSSIEVILTNGKFTKNIQGKKTDVLDCMWIQKLHTLGLLRGSFLPDLQTEQLRTLVRHRGNLIDTTSKASKRMAQNMRLMNLRLDVVVKDIVGLTGLRIINAICNGEISGEELAKLRHGNCKKSEEEIAKALQSNNRQDYLFVLKQELQKYQDAQKLILECDLEIKKLLDECINHDDVKKSLYIDKKVHKRINKNTPKNIDLNLISYQYFDGIDLYAIEGFSHGTVLTLISELGENGILKFQNAQHFTSWLRLAPNNKISGGRILSSRTPKGSNRLKIALRQAANAIGNLKDTHLSNFFNRIAYRKGRAVAVSATARKVATILWNMLYKKQQYNPPTIYEYLDQKRKRKVIELQKQIANLDARMSKVKPA

SEQ ID NO: 451863 - protein, 379 aa, unidentified
MSLRIKSSCFDSDLSSVFHQQSLIEIRDFRSPLSRSRVIDDHLSFIKKYYKVMKRIHVGIDISKDTLDFCVMEAKGVTYHRIQNKVTTIRKLLKAISKLDPDAIICMENTGYYNFNLYEVLEKFDFETYVIDPKHIKRSIGLVRGKNDKVDAKRIAVFIERNHGDFESWEPASETIKTIKVLLGQRRHKIKQRRALKQQNSDLRSISFNRSTKRLIAINQKSIKEINSHIKEIEALIRKEIGADPELGKEIKRIKTIPGLGDVTAWTLAVKTEGFKRLRDPRKLACFAGVVPFEQQSGSSLRTKPRVSKMADMQLKSVLQMAAMRAVRMNNDLQKYYLRKVKEGKNKMSVLNAVRNKMIHIAMALIKNQDYYKNRLELS

SEQ ID NO: 451864 - protein, 370 aa, unidentified
MHSISYVGLDVHKTTITVAVADGGRSGEVRQLGAFANRADVLRKMVERLERRGERLRFCYEAGPCGYGLHRFLTGLGHACAVVAPSLIPIKAGDRIKTDRRDAVMLARLHRAGELTEVWVPDAGHEAMRDLVRARATAARVLTKARQHLGGFLLRHGKIYSGVRTWTQAYRRWLTTVRFEHPAQQIVLQDYIDAVTDAERRVDRLTRQIIEHLPEWSMAPIAAAIQAMRGVALINAVTIVAEVGDFSRFGTARQLMAYLGLVPSEQSSGGAVRRGGITKAGNVQARRALIEGAWTYRMQARVSRKLYDRLEALPQNIRDIAWKAQVRLCSRWRRLAASGKPRVIVTTAIAREMAGFIWAIARQVQPQTAG

SEQ ID NO: 451865 - protein, 394 aa, unidentified
MKRNDLSRSLVAFDQTSTLVSVVELSLKTWLVGGVVPGLERTPLKKQGPDAEALLALLHRWRNEAIKAGSKIERIVVAFEAGRDGFWLARWLQARGIEVYVIHPTSIPVSREHRRAKTDRLDAGLLIRALLGWLRGEPKHCGMVAIPTLAEEDARRPNREHEHLVGERSRIINRLKAATIRHGIRNFNVTLSKAAECLDELRSAEGVPVPPNTLDEMRRDMARLRFIREQIKEIERMRLERLQRAPREGTHPMVLLLAKVMGIGVETADMLVHEVLSRSLRDQRAVARYGGMTGAPDESGGKRRDKGLARAGNARVRRGMVQLAWRWLMFQKNSALTHWYRARTANARRDIRKTMIVALARKLLIALWRYVTTGEVPAGAVLRPATGAVPRLAA

SEQ ID NO: 451866 - protein, 315 aa, unidentified
MTKHLPPVNVGVDVGKNQLDLYLLERDRALTVPNEEQAILVLVRSLSRYRVERIVVEATGRLEQPFVRAALAAGLPVIGVSPLKIRRFADVIGQLAKTDQIDTRLIAQFAATVKPLPRPASDANAQAIKDLVVRRRQLTSLRTMEKNRRQVMPNDLKPSFDRILKALDRELKSLEQLINHAIDQHASSRHKRELLTSTPGIGNCVAATLIGDLPELGSLDRRQIASLTGVAPFNRDSGTLRGKRRIRGGRAHSRTALFLSAMVATRFNPDIKRFYQRLLTAGKHKKVALTACIRKIVTALNAMLRDNLPWRSAIA

SEQ ID NO: 451867 - protein, 378 aa, unidentified
MTVALQEKAYVGEVVLYMALELSNRSWKVCFGNGRRRRRVSVEAGDVDKLREQIENAKKKLGLPQGCPVRSCYEAGRDGFWLHRYLLSQGVENVVVDSSSIEVNRRRRRAKTDRLDVEALLRLLIRYSGGEERVWSVVRVPSRADEERQRLYRERDRLVKERGAHTSRIKSLLVTQGVRLELRGDFEGALARVRLWDDSELSADLKAELIREWRRREQVQEQIQALEAEQRARIEAAVERPELLVRQLMELKSVGWQSAWSLVMEIFGWRQFANRRELAGCMGLSPSPYNSGDSERDQGISKAGNRRARKVVIELSWLWIRYQPDSELTRWFNRRWAGQGKRARRVGIVAVARRLVILLWRYLESGVVPAGVILQASR

SEQ ID NO: 451868 - protein, 346 aa, unidentified
MLYAGLDLARKRICFDARRPDGEIVDRGASPTDSEGLDRLAERLLAHDPQVLAVVESMNGARFVHDQLELHDIDVQICDAERAKGLAPLACKTDKIDAGVLAELARRDLVPEIWLPDPGTRADRERARFRLHLVRKRTALKNRVHSTLIAWGKPCPVSDLFGRRGRGLLGRLSIPEPWRSTLQASLQLIDSIDGEITAQERELRLIGTAHPYVPQLTTVPGIAWVLGFTIACEIGDITRFPSPKKLTGYTGLCPKVNQSGEHDWRGPMKKNGPRYLRWALIEAAQHAGRSPHYRELYERTRKRHGPQRGAKVAAIVVARKLSGAIWHMLTNDEPFAPGSAAGTLAA

SEQ ID NO: 451869 - protein, 385 aa, unidentified
MTDQLQQSTFIPRDYDIFGGLDVDKKSIAVTFTDHGTMQKSLRLPYSADHLLNYTRKHFPGQRVAFVYEAGPTGFGLHDELRATNHPCLVVSPAMVPRAPGQRVKTNRLDSKKLSEGLRGGQLRSIHVPTQSYRELRHLVQLRDTQVAQLTATKCRIKSLLLYEGIPFPAANGKWSGRALRELESLPCSAAVRFKLDRLLDALQFHFESAAVVQKEIRHFCQNDPELRQCISFLASLPGIGSITSTHALARLGDWRQISNVRQIAGFLGLVSSEHSTGDKENRGQITRIGDSRLRNKLIQCAWTAIRKDPELRAFYRSIYERQPKKVAARKAIVAVARKLTTRMYAVLKQQRPYVIRPDSSIAPLTAEETVGPRERLDGAQNEQP

SEQ ID NO: 451870 - protein, 325 aa, unidentified
MRIYGIDLSKDKFDVSYVLAGEEKKRFVRNDFKGICNFLKQVEDSCILVAEHTGSYGDLLVHLCYQFQIKIALVPGYNIKHSLGLQRGKSDSKDAYRIRKYGERFVEELRFMEPRSESVKELKELYSLREQLSKSRTSLLLGQKTRKLSPSQSIVAHRGYQRAIANLENEIDAIEKEIEKIVQNDSDLNDNYKLITSIKGIGPVIANNLIIKTENFKRINTAKKAAAFAGVCPYPNSSGKMSMKSKTSHMADKKLKSLLFLAAKTAVTHNKEYSLYAERKKLEGKPYFLIMNNVSNKMLRTVYGVIQSRKPYDMNHICNDPRQLN

SEQ ID NO: 451871 - protein, 387 aa, unidentified
MANGLAKNSVPVGEMAIVMGIELSKKGWLVALRGPLADKISLHRLSAGDANGLLALAGRAQLAATEALGTVVTIASCYEAGYDGFWLHRVLTAANIENYVVDPASIHVDRRARRIKTDRIDAQALLRTLMAHRRGEGRVWSIVQPPTPEDEDRKRPHRERQNLLKERGRHVNRIKGLCSQQGILDYEPMRADRHERLAELKTGDGKQLQPLLLAEIRRALARLEFLLVQIAELETARESAISAVSSDDTTPVQTQHVRSLRRLIAIGPETSTVLANEVFYRRFESRRHLAGYVGLTPSPHMSGGLSREQGISKSGNPRARTALVEAAWLWLRYQPKSALAKWFAQRVGEQRGRIRRIMVVALARKLLVALWRFIETGLVPTGATLRV

SEQ ID NO: 451872 - protein, 418 aa, unidentified
MSRTLAKKLAKIEPGTLYVGVDLALDRNVAVVLDEGAKQLARFTFPHSRDGYDYFYRRLEAVRARQQAPAVLVGMEPTNYFWKLLAADLEVHGSEYRLVNPYTVKKNREGEQLDRSKDDQRDAFTIGDLLRTGKFTETRLLHGRYAELRQYVTLYERLRRDIRRQKTLIRNTAGQLFPELSSVCKDFTGDTALAMLRRHAAAVSTQTLPQEVFIAGVRADFQGKRLQVTKLRRAHALAATSVGLKDGTQALQLALRLHIKALATLEGQVEQVHAALRDTFLALPEAPYLLSMHGLGLISAAIILAEIGDPSHYSRGCQLVKLAGTQPVANTSGRKTRSRTPMSHKGRPRLRTVLFFAVMRLVQVDDAFARQYQQLQTREKNPLVKMQALGVLMNKLLRILWALMRDRTFYDPNFQATA

SEQ ID NO: 451873 - protein, 412 aa, unidentified
MARKTSTNDWSTMSRIWAGTDCGKTHHHCLVLDAEGDTLLSRRVANDEPELLKLLGDVLDLAGGDQVTWALDMTGGEPALLIALLVNHGQELVYLPGIAVNRATDSYRGADKTDARDARVIADQARMRLDLEPIRPGDEATIELRLLTDRRIDLVGDRTRTINRLRSLPTSMFPALERAVDLGGSTGPLILLSGYQTPAAIRRTGTRRLTTWLRNRKVRSPEAIASKAVEAAERQHTAVAGEQAIAKMVHTLAKEVMALNEKIAETDKLIEGRFREHELAEVILSMPGVGAILGAEFLAGIGGSLDAFPTPDRLAAFAGVAPAPRDSGQVSGNLHRPQRYHRRLQRVFYTSALISIRCDPNSRRFHDRKRAEGKRHVQAVMALARRRVNVFWALIRDRRCYQVTPPPAPHAA

SEQ ID NO: 451874 - protein, 387 aa, unidentified
MPQPNDLSRSLVTLEQDSTLIAVIEMGQSSWLVAGIVPGIERQPLKKLAADQDGLLQLLHRWRKEAAQAGHPIKRIAVAYEAGRDGFWLARWLRAREIEAYVIHPSSVPVSREHRRAKTDRLDTELLKRAFLGWLRGEPKHCSMAAIPTVEDEDARRPSRERESLVGECTRIVNRVKANLARLGIRGFRPRLAHAPKRLETLRTPEGTAVPANTLAELQRDMVHLRFVKQQIKEIETARAKRLEQASEGGRDAMVRLLARVVGIGIETADMLVQEVFSRKLRDRKAVARYAGLTGAPDESGQKRRERGLAKAGNARVRHAMIELAWGHLLHQKDSALAEWYQKRTVDARGGTRKTMIVALARKLLIALWRLVTTGEAPAGLLLRPAA

SEQ ID NO: 451875 - protein, 324 aa, unidentified
MMYVGLDVHKRVCHGTVMDEEGHVVKRERFSNDPVSLRSFMKDIEEAKVVMESGYCWQPIYDRLEEAGYDVRLAHPLKVKAIAEAKIKTDEIDSETLAHLLRADLLPESYVPPKEIRDLRELVKRRAFLVGMRTRLKNRIHAELAKRDIDPGSPLFTRRGRALLACLGVDAVSQLLPVMETLDRQIGEISAVLKRAAAEDGRARILTTIPGVGYYTALLLVAEIGDVNRFPDAERLCSYAGLVPSVRRSGGSTVYGHITKEGSRWMRWALTEAVHSHLRYDTELSRFHKRLALRKPGQVATTATARKMLKAIYCMLKAGEPFQP

SEQ ID NO: 451876 - protein, 348 aa, unidentified
MRFYTKQHKYYCGIDLHARSMYICILDQEGKTALHRNRKASPEAFLKAIEPYREDIVVAVECMFVWYWLADLCAKEKVPFVLGHALDMKAIHGGKSKNDKIDSKKIATLLRGGNIPVAYVYPRKMRSTRDLLRRRNHLMRKRSELLAHIQNTNSQYNLPEFGRKLAYKANRDGVAEHFPDPSVRKSIEVDLKLLDFYDQLLSNLELYIVKKAKADDVYSWYRLRSIPGVGKILGLILLYEIHDINRFPTVQDFVSYCRLVKCPRESAGKKFGTKNSKIGNGHLKWAFSEAACLFLRGNEQAQHYHARLVSKYGKGKALSILAHKIGRAVYFMLKRKEPFSMNVFFQQT

SEQ ID NO: 451877 - protein, 342 aa, unidentified
MDHFAGLDVSVKETSICIVDDAGKIVREVKVASEPEALLAVLKNLAYHFKRIGLEAGPLSQWLFSALAEAGLPVICVETRHMQAVLKAQINKTDRNDARGIAQMMRAGLYRPVHVKTIRSQKLRMLLTHRKLLQSKAIAIENDLRGTLRNFGLKVGLVGKVKFEARIRELVENLPDLAVLVEPMLIVRRTLREQIVILHRRLLAIVRDDEVCRRLMTTPGVGPVVALTYRATVDVPARFRKSKAVGAVFGLTCAKYQSGEVDRNGRISRCGDEMMRVMLYEAAQSMLRSKKWSWLKAWAMQIARRRGMKKAIVALARRLAVIMHRIWVDGTEFRWTREVAAA

SEQ ID NO: 451878 - protein, 358 aa, unidentified
MQIIGVDFHIRQQTIAMFDTETKELVKKTLKHDGAEVREFYSALPRPVQVGIEATGSMYWFLDLLEELRIDRQVGHPAAIRAAEPRKQKYDGRDALLLLRLQIENRFPAVWIPSKELRDLHALLRHRHQWVRMRTRVQNALQAIAVSHGLRRGPSLWSQIGQHAIASLPLAPHAADRRNELLTLYGTLSTKIDELDEQVKDQALQRSGAKLLLTHPGVGPVTALATDVFLGDPTRFTDGKALSSYIGMIPSEYSTGGRQRLGGLSKQGNPLLRFLWCEAGMHAVRRDPELKRFYRRKLHQKGLGKVRVAVARKLGIRLWIMLRDQIDYQEFCRRGQLRQKSGAARAGMPEGVHGPAIS

SEQ ID NO: 451879 - protein, 351 aa, unidentified
MKTDSTLILAIDLGKYKSFACVYEPEGGEVKTATVDSNRFELVRVIERWRPAVVVIEACALSGWVSDLCGELGVRCRVANTASEAWKFKHAKRKTDRDDALRLAQLQALGQLPEVVVPPKATREWRALISARQALVCRRVALQNRVRGILLGQGLPMPRGGRAWSATGLKGLDQLARPLADCAATELWRGLLHSALAEYRQVLTLIDDMEAQLDAIAAADAGAQLLSSVPGVGPRTAEAVAAHLGDARRFATGKQVSAYAGLVPKQYQSGETDRRGHITKRGPAVLRKLLVECAWCCLRYNAWARALYLRLTHGGKTRKVTHEPDRTKGRRGVYRMAGAACHRPRSRPDLE

SEQ ID NO: 451880 - protein, 375 aa, unidentified
MRAFGLDVHRDFCEVAIAEGGAIRSAGRVATRVGSLELFAQSLVAGDVVALEATSGADRIVSLLQANGIRVVVANTRKLRSITEAKAKTDRLDARTLARLLVSGLLDEVWTPDERTRSLRRLTNRRERLVRARTRAKNEAHGVLARNLCERPPVTDAFGKAGRRWLARLDVPVDERLTLNGCLRQVDFLDAEIAALDSEIARAALAWPEVLRLMTVPGVNVQTAATFMAAIGDIRRFPSPRKLVSYLGLDPRVRQSGSTPARHGRISKAGASEPRHMLGEVAWKVMLTPGPLRAFFERVRARRGPQVAATATARKLTVLLWHLLTREEDYAFARPAMTRNKVRRLELLATAATYVGIPLLMFIRLPDLCWGEGAV

SEQ ID NO: 451881 - protein, 433 aa, unidentified
MHEVEDEPLFTERAAGIDIAKAGVEVTIRVPSDTRRGGRQQETQSFRTTRKDLLALADWLRCWGVTRIGMESTGDYWKPVFFLLEAEGLDCVLYHAAQVKALPGRPKTDKLDSVWLAKITERGALPGSFVPPEDIRRLRTHTRYRRHLTQARTAEKARAEKLLEDAHLKLSSVISDIHGVSGRAMLEAIAAGERSPKALAQLARGTMRGKIARLEEALDCAFVTEEHAAVLTMMLATIDYYTARIEELTGKIEALCQPYLRQIEQLDAVPGTGVITAQDVIAEIGTDMAVFPTAAHLVSWAKWCPQVAQSGGKRKGANASGRGNRYLGAALGEAAVSAGRTQSFPGAKYRRLVKRMPKKKALVATGNSLLTIYHALLSDPAATYTDLGTGYYEQRANTRRQVRNHIRAIERHGYKVTIQAIDPETGELQAAAG

SEQ ID NO: 451882 - protein, 349 aa, unidentified
MKIVGCDFHPSFQQVAILDLSTGEVRELKLMHADGEADRFYRELEGPALIGMESTGNTLWFERLMEQLGHELWIGDAAQIRASYVRRQKTDKRDAGHILQLLIDRRFPRIWVPSSLERDQRQLLLHRHRLVRMRTAVKTELQHLALNQGLQQKRGLWSVRGRADLEKLPLECWTGRRRADLLKVLDMLEAQVADLDEAVDKVAFSNAQARLLMTQPGVGPITALAFVVTMGDVARFKRGKQVASYLGLIPRERSSGAKRRLGAISKQGNVFLRTMLVEAAQSAVRYDEEFKKEYAHRCHQKPKGVAKVAAARKLAVRLYWMLRTQTLYAKAVASKAVHNEGSPSHSLVG

SEQ ID NO: 451883 - protein, 344 aa, unidentified
MSKVTIGLDIAKSVFHLVFMNQSGRVLRKKKLRRHQMLSYFSQLEPCIVVMEACGSCHYWCRELTKAGHEVKAIAPQYVVAYRKGNKHDYNDAEAIAEASQREGMRFVPFKSQDQQDIQLMHRIRERMIAQQTALSNQIRGLLSEYGIVYVRGVATLVKELPFTLEEADNGLSMLARRQFQGLLNDLRGLREHIKEMDKELKAFSQSQPVCERLMSMTGIGPLIATALYAGIGQGQAFNSGRHLAAWLGVVPKQHTMGDNPRLLGISKRGNTYLRTQIINGARAALRHIGDKTDKVSEWCRACLARMSFNKACVALANKMVRMAWAMLHYQQDYQPGLINKAAA

SEQ ID NO: 451884 - protein, 428 aa, unidentified
MSNQEIIRRKQFCQIVKEVRSSNEYLVVGIDVAKDKHHAFMGTATGKSLFRKLIFENNIEGFSRLLKTADEIKSQNDLSKIVYGLEPTGNYHKPLSRHLIRCDCNVVMVTGQAVKKNRYLLDGRWDKNDIKDAANIADLVSRGRCLYYDGPSPSIIEIRSLLSLRRRLKREEHGLRMRIRNNLLAQYFPELDRFYSACESESLSIIRYFLDPDTIAAMELGEFFHLVTRTRRGTAQTLRLRKIHGLAIESVGCPMGPAGEYEAELLVEKLNQVREQIKKTADLIKDFCLEFYEYSYLLTIPGFGPYISARVLASIGDPFRFENRKQLIKMAGYDLCANRSGRTSDNAIPVISKKGNGELRYALYQAAKVASARVDLFRTYFTKLLHGRERERGIKTKMCVKLAAKMLVIAWTLMKKREPFDPAYLNIE

SEQ ID NO: 451885 - protein, 400 aa, unidentified
MDERQRFKWFLGIDVSKETFDVCCIPSHGERLFNLSASMDRKGFEELIKQLSTLSIPQESVVVGMESTACYHINLYSFLISLGYSVMVINPLLISNFVKLQLRKTKTDKKDASVIAQFLLLNRDSLSQTILSSDISDLRDLSRQRESLVDQMSSIKSEIKRLLTMTFPELEHISGIFTKSMLRLLCHYPSAASIKQAKRSKITKVLIPGSYGKQTDVSVDRILKAAQGSIGTSSATKEIILKQKASLLIQLGEHLQELTDILIGLCQGKIQGEMDILTSMKGIGEKSAVNFLIEIGGDIKQFESHKKLIAMSGLDPALYQSGKIDRKGRISKRGNRHLRRVIWLMATKVIQFNERFKQYYLKRIKDGLPYKKAVLATAHKLIRVIFAMLTNKTLFNPKMN

SEQ ID NO: 451886 - protein, 393 aa, unidentified
MERPMSQPFDASRSLTALEQDSTIIAAIEMAQSKWLVAAVVPGIKRQPLKKLDADEESLLKLLHRWRKEADQAGHPIRRVVVAFEAGRDGFWLARWLRTRGVEAYVIHPNSIAVSREHRRAKTDRLDTELLLRALLGWLRGEKRHCSMVAIPTIEEEDAKRPNRERDSLVTEQTRIGNQIKAILTRFGIRRFRLKLRKAEQQLKELHTAEGSLLPENTRAELFRHLARLHMVREQIRAIEKARLQKLEANCDRKKSPYAMVHLIARVVGIGVETADMLVTEVFSRQFRDRKAVARYAGLTGSPDESGKRRREKGLARAGNARVRTGMIRLAWRVLRFQNGSALAQWFQTRTADGRGNTRKTMIVALARKLLIALWRLVTTGEMSDGIVLRPAS

SEQ ID NO: 451887 - protein, 432 aa, unidentified
MNRKAAAIDVGSEKMHVAIAEQGPAKVFECFTDSLRQLRDHLKEQQVTTVAMEATGVYWLPVYDILEEAGLEVFVVNGAHVKNVPGRKTDMQDSQWLAQLHAQGLLQSGFVPPANIRKLRQYVRLRQDHIRSAAQHILHMQKALDLMNIKIHDVLSQTIGVSCLRMIRAIVAGQRNPEVLLGLCDVDVIRRKTKPLLRALEGTWDEEHLFALKQALEAWDFYQSQIGACDVEIQKVLESLAGQKPERPAGENPTIKKRRANSPAVPKMEQLLHRLTGVDLTALPCITAYSQMMILSEVGTDMSRWATERHFTSWLGLAPGSRQSGKRRRHQRRFRGTAGKIFCVVARTLGRSKYLALSGFYRRIKAKRGAQVANIACARKIAVLFYNALKHGIGYVEQGLQAYEKRYREQSITRLKKAAAHFGYQLTTQPVP

SEQ ID NO: 451888 - protein, 475 aa, unidentified
MANLGGRAQKGYEMPGADEIASAGKRREQLAGLPIIRRNVAGIDLGSEQHWVCAPTLDRSGREVASFGATTAELIRMAEWLKARQVESVAMESTGVYWIAPHEVLEGQGLQMLLVDTRQLARVPGRDKKSDPTDCEWIQRLHSCGLLRGSFRPEEAVCMLRTLVRDKASLVAERSDWVRRMQKSLDQMNVRVHRAVSDIDGVTGMAILRAIAGGERDAQKLAKLRNRGCSKTEQEIAEQLSGHWRADHVFSLQQALKMYDAVQERIAAYEQEILRKLGEMERNEPHEPTAAPLQNANKARTIKNRGQEAKRQALYRMSGVDMTQIDAIGVETVEVVVSEYGSDLSRFPTEKQFVSHATLAPHVPKSGGKPVRKKKRNSASTRVAAALRMAALSLRHSQTALGAYYRRIAQRRGGDIAVFATARKLASLVYRLLRWGQPYVDEGAAAYENRYRQHRIGRLAATAKELGYQLTPVTA

SEQ ID NO: 451889 - protein, 351 aa, unidentified
MSHQSMPAAVATFGIDIGKSTFHLVGLDQRGNIVLQLKTSREQLQRRLTNIPRCLIGMEACSGAHHIGRQLVALGHDVRLIPAQYVKPFLKGHKNDCRDAEAIAEAVQRPTMHFVSIKTPEQMDLLALHRVRSRLVSQRTGVINQIRAFLIERGITVRQGPAPLRKAMPEILSSTSGVLSPRMIYLIVDLTEDWRRLDERIATVSAEIEALAEQDGSCRRLMTVPGIGPVISSAVVAAIGNGTGFKQGRDFGAWLGLVPKQESTGDRTILGKISKRGNKYLRTLFVQAAHVVLARRPNAAMRGLWPWIEQAAKRLHRNMLAIALANKLARIAWAVLARGRDYQPTIMPHAA

SEQ ID NO: 451890 - protein, 373 aa, unidentified
MRWGGCRPPGTVSQCAKKVVLKPLSGKDGTVMKDTMIGVDLAKSVFQLHAASMAGELKFRKKLSRQSFLKFMAELPPAAVVMEACGSAHYWAREMIRLGHEVKLIAPHYVKPFVKRQKNDAADAEAIVIAAQRPEMRFVDPKSAEQQSRAVLFRARERLVHQRTELVNALRACLYEYGYVVPHGIHQLKRIEEILAAASGELPDLVREECLDLMEQIGEKTARINVRTGKIKALAAEADTARRLQTIPGVGSLTAMAVEAFAPSMESFRCGRDFAAWLGLVPRQFSSGGKERLGRTSKAGQTDIRRLLIIGAMSRLSWLGRKSIPEDSWLARIAARKPRMLVAIALANKMARTIWALITKNQDYRVPAQVAAA

SEQ ID NO: 451891 - protein, 354 aa, unidentified
MKQEYFIGLDAHGSFCELAVVNGTGELVERGRCRTSIAALRALIEKVASPRYVVFEEGPLANWLSRNLTDQAESVSVAQPRRNRLICCDGDKDDPVDAEKLAQLLRGRYIKTVHQIASLEDTVFKQLVAQYVRRVRRRVVVGQQLSGLFKQHGVIAQAKHFAKEEDRVVLLGQLPEQALLRELLQESLTEYDAALECEQAWRQRVVERAKQDEVVVRFTALPGISWIRAATLRVYLDTPWRFRSPKALWKYLGIGLERRHSGTGPEILSVPRQVNRLLKSTILGAARSAVAQGDNPFADQYRRWLEHGLSAKLARRNVARSMAATLWGLWKSGTVYHPEWVGVNLAATKGIEKS

SEQ ID NO: 451892 - protein, 350 aa, unidentified
MIIIGVDFHPEFQEIASVDTDTGEYQEKHLAHPAEAEQFYRSLASMSQPVRVGMEASGHGRWFEQLLEELRIELWRGDAEVIRAKRGRKQKNDREDARHILKLLLKDDFPRIWVPSWENRDLRQLLWHRHRMVQARTRVMNQLQAVALNEGLRCKKRLWRASGRQQLESFQLAPWASRRRSELLELLDRLNPRIAELSQAIEQEAEKCPEAQCLMTHPGVGALTALAFVVIIGNAERFGCGKQVASYLGLVPLEKSSGNRRRLGHITKQGSSIVRFLLVEAAQVTVRIVPEWRSKYHHLMIRRGRKTAKVAMARKLAVRLYWMWRKGWNYEQWKTFGSHVGQPVHRYGVQ

SEQ ID NO: 451893 - protein, 451 aa, unidentified
MAEPTPLFVGLDVHKDSIAVAHAPGHSADPPVFVGTVGTRQADLSKLVRRLQAKKPDLVFAYEAGPSGYVLHRYLTGKGFACQVVAPSLIPKKPGDEVKTDRRDAIELARLLRSGDLTRVSVPTVEDEAIRDLCRARDAARLTLKHAKLRLKGFLRRLGLHYVGRADWNAAHMRYLAKVVCPTPTQQIVFQESVRAVDEQVDRLSRLEAELIERAPAWRLYPVVQALQALRGVPCLVAITVVAELGDLTRFDSPRQLGAFVGLIPSEYSSGASRRQGGITKAGNGRARRALIEGAWAYRHPANVSQHMQTRIDGLPKPIHDLGWKAQVRLCTRVRRLVARGKHPNAAVTAIARELIAFMWAIAKGVPVTASPPSFTLLGSASGCGPGFRATLDDVKRRLRPTLVPRVRPARDGSQYGGTQPTDISRINRRHYWLHLGVDPGRSRDEQRKER

SEQ ID NO: 451894 - protein, 406 aa, unidentified
MRSIALDIHRDFCEVAIKEGGEVRSRGRIKTSPEDLKLFAQSLAADDQVALEATGPASEIARILEPHVARVLVANTRKVRAIAESKVKTDKVDAHTLCELLDAGFLPAVWRPDEPTRALRALLGRRERMVRSRTRAKNAVHAALQRNLKGRPPMSDVFGVAGRHWLAALELPAHERRIVESCLREVDFLSREIGALERELARLALSSEAIRRLMSVPGVSLISAATFVAVAGDIGRFSSPKKLVGYVGLDPKVRQSGELPARHGRISKQGSAAARHMLCEAAWIVVRTPGPLRAFYQRLRARRGPQVALVATARKLCVLFWQLLAKEEDYAFGRPSLHRHKLRRLELAAGDPPRRGRRSGSAASKREQRHERELSEQFELAYRRLTDDWQAKPKRSGAGATRGRAS

SEQ ID NO: 451895 - protein, 337 aa, unidentified
MKYCGIDLHWNNSVVLVSDEKDRIVLQKRLPNELGQTQAALEPHRDELVGVVVESTFNWYWLVDGLMDAGYRVHLAHPSAIKKYEGLKYSGDFADAGYLAQLLRLGLLAEGYIYPREERAVRDLSRKRLQLVRYRTAQVLSIENILARQTGARLSSEAVKRLTAAQVEELGFAPDVALAVEANRAVSQALAQQIAALEQRLKERVRLRGEFKLLKTTPGVGDTLATTIMLEMGTPTRFAKVGNFSSYCRCVDSLRESNEKKKGEGNAKNGNKYLAWAFVEAANFARRYCPQAKSFYERKKRKTNGILATKALAHKLARACYHMLREQKPFDVSRCFG

SEQ ID NO: 451896 - protein, 338 aa, unidentified
MGSYVGIDLHRRRSVVVVLNEDGDRVSWCRIDNTAANLAAEIVSAGGSEAEVAMEACWGWYWAADVIAECGARLHLAHPLGIAGYENRRVKNDIRDATLLADLLRLGRLPEAWVAPPEVRELREAVRYRAKLSRLRSGLKQQVHQTLGKEGVIPEVDSIWRGGGQRWLDELQLGDVYVDRIESLRDLIELYDREIRQCDGRIHRRLKGHPGYEAIQALRGVGPVLAAVFVAEIGDVGRFDNPRRLCSWAGLTPRLRESDAHSHRGHITKMECGGAGLARRFCLSFGGDCDDRWRYRHPSGPADLRLCRSGHGRGPRRAGDAGAPRPVARLVGAVPRGR

SEQ ID NO: 451897 - protein, 433 aa, unidentified
MLTLPQTKEANMSEVTFPRLVSRGCGIDVHQKVVVATIDGEGLTKETREFETFTSSLTEMRDWLEGNGITHVAMESTGVFWVPVFTVLEKSIPNVWIVNARHIKYVPGHKTDRKDSDWICKLLLAGLLKPSFIPPLEQRNLRELTRRRRQLVQEISSEKNRMMRLLEQCNIKLKSVMSHMDGKVATQLLAKLCSGEEVTMEYINSVYHGRLNATPEELYKACQGKIDNDNLFLMYVIKAHIYEMEKLVVQLSERISAKLSPQRAILDMLKAVPGLDLRTSENLVAEIGFDMSKFPSAKHLGSWAGLCPGNNESAGKRKSGRITHGNKQVKAVMTEAAWASTRTKNTFYSERYHRIAARRGKKRALIAVAYSMLTTVYNILANNVTYNELGAEFVTLLIEKKRKRYLTAELAKLGYEVQIVKKQLPLKTDGCST

SEQ ID NO: 451898 - protein, 394 aa, unidentified
MGKDRHHVCIRDLSKDMYCKTFSITNGRSGFMELIAALEKLSPKKSDFLIGVEACSYALNLSYFLMAIGFDLVEVNPFRVGQFRKAQGKKAKTDKIDARTIAAILLLGDHKPLSIPDPILDNLKELTRFRVDLINEKSTMIIHLREALSVLFPEYEKVFRQLDSAGSLALLAAYPGPEHMIGAGEEAVGKTLSLASPRRMSRGMARRIIEAAKRTVGVVQKQPSLGVKISVLAKTIADLQSTIRDLDKQITTLFNSLPCKPRGFPVGRAPSLATIISEIGDIHRYPTLKKFLSHLGWCPQSFQTGNYHLKHPKMSHAGNKYVRRLIWMLSIFAIQFVPRYREYFQRRVSEGKAKMHIIVAVGRKLLSALYAMLKSGMAYDPNWEVNSRPALARR

SEQ ID NO: 451899 - protein, 315 aa, unidentified
MAEQHFVGVDVSKKQLDVAIFPTGKSFSCPNSYAGHKKLVQQLRRFKPALIVLEASGGYQGAAARALAQADLPVTVVNPRQVRDFAKATGELAKTDKIDAAVLALFAYQLRPQVRPVPDAVAQQRRDLALRCQQLTKQLATERTRQHQASGAHRDSIARHIAWLQQELQQLQAQWQTSLQSDQQLCQQQRLLRTVPGVGPHVSAVLVTYLPELGQAGRQQIAALAGVAPFNRDSGQHQGKRCVYGGRAQVRCALYMAVISAIRHNPVIRAFYQRLKNNGKATKVALTACMRKLLCILNAMVRNQTEWQPQTLPGA

SEQ ID NO: 451900 - protein, 392 aa, unidentified
MVVSVGVDVSKDKHDCFIVSSEGEVLADVFTIPNTMDGFHYLLQRIRHCTAPQDKIKVGLEATGHYSYNLLGFLLDNGLTTYVLNPLRTNLYRKSLSLRKTKTDRVDARTIASMLLSDAGLKPYTDTAYHNEELKSLTRYRFDKVKERAKLKSSIARLVCILFPELEKLVPSLHIASVYALLEEFPGAKQVAAAHLTRLKALLETASKGRYKRDMALEIREAARTSIASPMPAKSLELQHTIRLIRELDREIDEIEEQIQSIMDELHSPLTTIPGLGFRMAAMILAEVGDFTRFDSPDKLLAYAGMSPSTYQSGQLKNCYPHMEKRGSRYLRYALYNATKYVCHWDPAFADYLAKKRAEGKHYNIAISHAAKKLVRLIFAMEKSRQPYCSAA

SEQ ID NO: 451901 - protein, 383 aa, unidentified
MNDAKYIGLDVHQATITVAVRDSAGKLVIEAILETKAETILQFLHGVRGSLHVTFEEGTWAAWLHDLLKPHVTRVVVCDPRKNALLKAGNKNDRIDARKLSELLYMNKLSAVYHGEQGIRTLKELARSYLTITRDLTRVMSRLKAIYRGWAIPCAGEQVYAPHYRAEWLAKISEAGVRRRAELYYVQFDTLAALRQGVRRELLAESRKHPATRLLRQIPSIGPIRAALLVALIQTPNRFRTKRQLWAYCGLALRTYISGEYRFVSGRLKRSKKVLAVRGLNLNHNHDLKNIFKGAATRAAATAGPLQDFYEARVAKGVKPHLARLTLARKIAAITLLVWKKGERLCAGINRHEVENARVSRERTSDSPGPEFCAAYREVHSEA

SEQ ID NO: 451902 - protein, 344 aa, unidentified
MYQYGGIDVSLECSSVCVVDGTGKILREAKVASEPEALIAWFRSLGLTCERIGLEAGPLSQWLYAALREAGLAVELLETRRVRDAFKAMVVKSDRNDARGIAQLVRMGWFRPVHCKSIAAQETRAILTARKLLQSKLHDVENSLRGVLRGFGLKVGPTTERTFAKRIRELVAGHPGLEVVARALLEAHAVLRREFNSLDKQVQKLARSHPQAGLLMTTPSVGPIVALTYASAVDDPKRFRSSKATGAHFGLTPKKYQSGETDYTGRISKIGDASVREALYQAAHVMLTKPVRNCAALKGWAMRIARRAGMRKAKVALARKLAVILHRMLADAQPFNPMAKAMAS

SEQ ID NO: 451903 - protein, 347 aa, unidentified
MLADELDYVVGVDTHRDERVVAVLAAPAGAVVAGKTAAANARGYRELLRVAEQYAVGRRAWAIEGSGSYGAGLARYLAERGERVLEVSRTPRAERRLRGKDGALDAARTARAALAAETLAQPRAGERREALRLLLIARRSAVDVRREALTQLRAVIVTAPERLRQELRGLPTGNLLDRCSRLRRTDSTADEVATRLVRSLARRVQAATLEADELERELLTHVRALEPALLDEPGGGPIVAAQLIVAWSHRGRLRSEACFARLAGVAPIPASSGQTQRHRLSRGGDRQLNRALHTIALHRRQHDPRTKDYIANRIAEGKSRRDATRLLNRYLARHLYRLLEQQQPLMT

SEQ ID NO: 451904 - protein, 429 aa, unidentified
MEVMHERVAGLDVHKATIVGCVRVQVGREVRRECRTFATTTDGLVALLAWLTASRCTHVAMEATGVYWMPVWKILSDGDFTLIVANAAHIKNVPGRKTDLNDAMWIADLMACGLINASFVPEEDLQELRSLMRSRKQLTREQTRHVRRMQKTLTEANIRLDSVICDIMGASGRRIIEAMIADVRDPHQLAALASKRIKATAQQLHDALHGRLTDHHRFLLKLHLGQWDGLDAAIRGIDVEVDGRITRIDQQLKAGAGQGAKAVPFRELIRLLCTIPGVSVLAAITILAEIGRDMSRFPTAGHLVAWAGMCPGQNESAGRRKAARLRKGDPWLKTTLVQCAWAAKRKKDSYYKAQFFRIQSRRGPQKAICAVAASILTAIYHILKDGTEHRDLGADYFNRRSTAAQTTRLVAQLTKLGFEVQLQPIAKAA

SEQ ID NO: 451905 - protein, 330 aa, unidentified
MKIHPGFCGIDISKHHLDIFDGSVGRAERIANTPEAIDLLTERWKGAAVLVLFEATGSYDGRLRAALRAAGIAFTRINPARARDFARSAGRLAKTDALDARMLAAMAQSLQPAPTVERDDERDRLAALHKRRDQLVATRKQERTRRKDCEPQIADSIEAHLIWLDAQIRGLDGRIRALIRRAEALKSAARLLRSVPGIGAVAATTLLALMPELGQCSPKEIAALAGLAPFNVDSGQYRGKRRIRGGRRRVRQALYMAAVTAATRFQIPLQSLLSRLVQSREASKARPDRGRPQNPRNRKRHHARPAGVPAMITLNTVAGSPLRYGRDDRE

SEQ ID NO: 451906 - protein, 331 aa, unidentified
MYVGVDYHKRYSVATKMDDGGNILERVKIMNTAQSLLQFAASLPEESTIAVEATSIWYYFYELMETRCPNIVLAHPLKTRAIAEARIKTDKIDSTMLAHLLRTNLLPTSYIPPRAIRDTREILRYRASLISMRTALKNRVHAILEKNGTRIEASDIFGKKAIRQLRELPLRDCYRVGIDGYLRVMDVLASLIDEVSSIIEARVREQSDASLLCTIPGIGPFSALLIMSEIGDIHRFPSAKKLCSYAGLVPSVHASGGKTRYGSLTKRGSKWLRWILIELSHHFARSSEKMRALYQRIAYKHGRNTARVAVARQMLTIIYAMLKEGRPFVKG

SEQ ID NO: 451907 - protein, 343 aa, unidentified
MQTVTTIGFDIAKSVFQVHGVDAAGQVVVRRQLKRRYVLAFFEKLPPCLIGIEACASSHHWSRELQALGHKVRLMPPAYVRPYVKRQKNDAADAEAICEAVTRANMRFVATKTPEQQGCLMLHRTRHLFIRQQTAVINAIRAHLAEFGIVAPVGRNGVEELLGVVADASDKRLPEIARACLVALGAQLRMLKAQILEFDRMINAWHRSNETSKRLDEIPGVGPALATALVASVADPRAFRSGRDFSAWIGLVPKQHSSGGKDKLGGISKQGDRYLRSLFTAGALAVIRYAKIHGAKHRPWLTALLARRPTKVAAVALANKIARMAWAMMARGERYKEPVALAA

SEQ ID NO: 451908 - protein, 302 aa, unidentified
MNFYNSSHPYYCGIDLHARLLYVCIIDLQGEIIVHTKIKADKSQLLGLLEPYIGNIVVGVECMHCWYWVCDWCEQQGIDFVLGHALYMKAIHGGKAKNDKIDSFKIAALLRGGNFPLAYAYPHEMRATRDLLRRRTKIVRHGAMLKGHVVNTNSQYNLPATELNLKNTSARKQLRSQFKDPIVQRNIDLDIVLLDCYAKELAQVEWFIEQKAKQHNPVFYELLKTVSGIGRILALTILYEIGDIKRFETVQNFASYSRLVKCKAESAGKTYGTQGNKIGNAHLKWAFSEAAVLYLRDNDKNA

SEQ ID NO: 451909 - protein, 361 aa, unidentified
MSESMALVGLDVHKSRTVAAVLDRVTGELRMERLRGAPERVVPAFLEELDRPVEAVYEAGPTGFVLAREAEQRGLDIRVVAPGSIPRAPGDRVKTDRRDAKRLARLFAAGELRFAFVPSEADERFRDLVRCVDDVRRDLMRARHRLSKFLLRRGVRWQGKTWTQPHERWLCTLHFEDPLSQAVFVDYLAAVQGLAQRRKTLGSVLEGAVPNSSHAETIKRLRCFRAIDTLTAAGLCAEVGDFTRFAKPALLSGFLGIVPSEYTSDEKRTQGQITKAGPTNARRLLVEAAHNYRHRPAIGENLKARQSGQDPRVAQIAWRCQQRLHQRWMHLGGKRGKPTGKVAIAVARELAAFCWEAATLN

SEQ ID NO: 451910 - protein, 387 aa, unidentified
MAQVIIGVDPHKRSATIEIINAREKALGQGRFGTDRDGYQAMLAAGRKHKDRLWAVEGCNGIGRHVAQRLVSDGETVVDVPAKLSARARVFATGQGRKTDPVDARSVAVLALRTEGLRQVVTDDTTVALRLLVDRRDQLGRARTDVVSRLHHLLLELVPGGAKKDLSAQQARALLGTVRPRDVVGKTRRRLASELIGELVVIDKKIKIAKQELTDLVNSTGSRLMDLTGIGPSGAARLIGDIADIARFTSRAHFASWNGTAPIDASSGEQNRHRLSRAGNRRINRALHIMAIVQLRRDTEGRRHYRRRLASGKTPMEALRALKRQLSDIVYRQMVADAKLVKTGPGGHAGATLKSSAADLNPEIDTSEKSLPGPATPQPRTTLAAAC

SEQ ID NO: 451911 - protein, 372 aa, unidentified
MKKNNTAQNHKEAKGNKSWQAMEGLTIGIDLGDKRSCYCVLDGAGNKIEEGSLSNTAAALAKHFGGLRPARMALETGAQTGWISRELAALGHEVIVANARELRAISGNARKSDRRDAEKLARYARVDPSILRPVRVRGAQAQLDLGRIRARDALVRARTLLVNAARGLAKTRGQRLVRSVTASFGERSQALLDAELATVLEPLLEQIDALGKQIQRYDKQIEQQAAERYPETAALDAVPGVGPLTALSFVLTLEDAGRFPHSREVGPYLGLCSRRRQSSSSDPKLRISKEGDEYLRRLLVQCAHGILGPFGADSALRRWGLRLAESGGKDGPKRARVAVARKLAVLLHHLWVTQQPYRAFPQSEAAVEPVSS

SEQ ID NO: 451912 - protein, 371 aa, unidentified
MKQQGSKINFNGEKVFVAMDVHKNDWKVAFCTVNRQPSRHPITITHPFIENLSSYLNKHYPGAAFEICYEAGFCGFWIYHELTALGHKVLVANPADIPTSDKERKHKEDKRDARKIARGLKEESIIGIYVPDEEVLRERSLVRERYSIAKSLRRIKTQIRSHLMLYNQELRDYPSKNHWSKRYINDLSALAEKESDLTLQLQLTRLNDLRVLMLKANRSLRAIGKSAKYEKLFGILMSVPGVGMLTTMQLITEIIDMKRFSNFDKLCSYVGFIPMTHSSSDNERVGPITKRSNKRLRTALVESSWTAVGSDPELLLKYEQYRKRMKGQQAIVYIAKILLRRIRYVWLNEVEYKKGVNLETQIENKTSQKSK

SEQ ID NO: 451913 - protein, 357 aa, unidentified
MKKLFIGIDFSKEKLDATIILACGMNEIGSREYGCFPNNTTGYRKLCNWVKTNAWNTIAEEWLFCGEDTGSCSIGLSKWLYGKGYDIWIENAYAIKHSSGIQRVKNDKADSAIIAEYAWRQQDKVVPFEPLNESLAQLREIFLYRHKLVGQRVAMELRKEDKSQSNKSKAISFINRKSKHLIAEINKTIAECDKAIDSIIEADEELKENYAIITSIKGVARQNATCMLVYTNNFKKFGYDPRKIACYYGVAPFGKQSGTSVNTPAHTSHFANKLIKSLLGQAAHIAKIYNPEIRDYYQRLISKGKKPQVALNNVKNKLIRMIVALVRKKVPYDQNTYKYYEEREVIERKKNEKLIYC

SEQ ID NO: 451914 - protein, 341 aa, unidentified
METVYFTGIDQHKRTSFLTTLDHNGDIVRSTKLKNNPDVIRAYFQTLPGEHHATVETTTGWYWMNDLLEKEGVDLSLAHAKFVKAISYAKVKTDKVDAHTLAQLLRVGMIPEAHKISTGLRDVRDTLRTRLHLVEKHTSAVNSVHRVLEKFNTESLDDLPKLFRLQAVMHTERAEFIKVQIKTFDSTLNGLLLDTQDIQRLLWIPGIGRLNAFTLYLEVDGIERFASVKNFYSYCRLVPGAHNSGGRVRHRSSKEGNKYLKIAFSHAATRAIQYYPVVKKYYHRMARKKGAPIARALVAKEIAKSVFFVLQMKEPYNRMFKGMKLERQKLASWPRRASPDS

SEQ ID NO: 451915 - protein, 377 aa, unidentified
MKDFSTFIGMDVHKETIAVAIAEKHGTPLYYGEIANTAEAITKLVKKVASNGGRAAFCYEAGPCGYGVYRQITDMGYRCDVVAPSLIPKKAGDRVKTDRRDAVTLSRLYRADELTAVWVPDQEQEAMRDLTRIREDMKSMERHARQRLSGFLLRHDKRYSGKSKWTPGYFRWLETVRFKNSVQQIVFQEYVDMVKVLQGRVASIQQEMRNALSDWSLGFVVEALMALRGINLVTAMTIVAEIGDMSRFESPRQLMAHLGLVPSEHSSGSRQKRGEITKTGNGHVRRVLVESAWSYRLPARKTAHLQRKAAKTPEAVQEIAWKAQKRLCRRYWHLIHKGKLQVQACTAVARELVGFIWAIAREVMEQKNLCAVSAQKQ

SEQ ID NO: 451916 - protein, 369 aa, unidentified
MTDLTLFIGLDVHKKTISVALIDAAASATVRFYGTIANTPDALRGLCKKLSKDGQALHFCYEAGPCGYGVQRQLTRLGHRCDVVAPALIPRKVGDKVKTDRRDAMMLAQTLRAGQLTAVWVPDEAHEAMRDLVRLRAQAMRDLRKTRQQLLSFLLRHGLVSPYGHWTKMHRRWLGELVFAHPAQHLAHEEMLHRIERAEALCDRLKGAILELVPQWSLAPVVQAIQALRGVSLIVASVIVAEVGCFSRFDNPRQLMAFLGLNPSEHSSGATIRRGAITKTGNALARTCLVEAAWTYRFPARVTQIIRDRLKNLPEPIRNVAWKAQVRLSARYRKLIAAGKPAPKAVVAIARELVGFIWAIARMVEPKFA

SEQ ID NO: 451917 - protein, 347 aa, unidentified
MEQIIRIGMDTSKYIFQVHGVDASEQPVLRKRLGRKQILEFFAKLPPTVIGMEACGSSHHWARELKQLGHEVKLIAPQHVKPYVKRNKNDGRDAEGLCEAMSRPTMRFVAVKTLEQQAALMLAGLREQMIARRTQISNAIRGYAAEFGITVAQGLNQIEPLLARLAQDDNVPELARDLFALQGRDYAQLQMELKAIEARLMAWHRANADSRRLAKIPAIGPIGATTLVMKTTDPGAFASGRHFAAWIGLTPKDHSTAGKTRHGKITRAGDERLRSVLVAGATAVIQQARHGRGHPSPWLIALLKRKPPKLAAVALANKTARIAWKLMVTGESYDGARMPKASVVAAA

SEQ ID NO: 451918 - protein, 341 aa, unidentified
MNKCHLNTELSSHEGTRGQFNGGRCAIKLGIDVHQDFYVVVEQMGGTNPKPPQRFGKQAFLHWATKLKQSGAEVQAVYEACGFGFALQRQLSALGIVCHVVCPQKLDERNKRVKTDGLDAKALCLKLDRFIQGNRDAMALVRVPTEQEEQQRAIHRQREQLVGARKRLEAQRRSLMVNHGFEPVKSWWKRGNFGALQVPEWMKELLGNSQPILLGLQQKIAALTLQLQVAAASKQPRGLGAMTSVIIDREIGDWNRFNNRRQVGSYTGLCPGEYSSGNTRVQSCVTKHGNPRLRAALVELAWRLVRFQPSYKPVLKWRAILAKGALATGAARKKAIVAVAR

SEQ ID NO: 451919 - protein, 350 aa, unidentified
MTASPPAYRLYVGIDIAAATFTAAWQLVGGKPSAPLTREQDAAGYAALQQRLRRTAVAPADTLVVLEATGSYWVALAVTLHEAGFGVSVINPLQAHHFAKAQLRRAKTDHLDAQALAQLAAALRPARWSPPPAIFHEVRQRLLAREALITMRQQARNQRHALRQWPVVVASVCQHLDAVIADLDTRVDGLEAEIATALQDSAWAASLGYLTSAPGIGLLTAAWLLVTTLNFTLCSGPDAATAYAGLAPMPRESGRSVRGRRSIGHAGNARLRTALYMATLSAAQHNPLIKPFYDRLVAAGKLKVVARCAAARKLLHLAWALVTKQQRFDPTKQQQQYATPADQPATPEAA

SEQ ID NO: 451920 - protein, 368 aa, unidentified
MKKNSISAGPWRAKARAQKRKLTIGMDLGDRSSRYCVLDEQGEAILEGSVATTKKGLDQVFGALPRCRVALEVGTHSPWVSRQLRDLGHEVIVANARRVRLIVESSRKDDRLDARTLARLARIDPQLLSPIEHRSAQAQADLMSIRARAALVEGRTALVNSARGLAKSYGERLPKCSTQRVSEELGVELSGELRIALGPLLAEVESLNERIKEYDRQIEAVAGERYPEVERLRQVSGVGTLIALTYVLTLEHPLRFRRSRDAGCYVGLRPKRRESGDSHPQLRITKEGDRYLRKLLVQGAHYILGPFGPDCDLRRWGQKLAERGGKNAKKRARVAVARKLAVLLHKLWVSGEVYEPFHHSLRQRQAAA

SEQ ID NO: 451921 - protein, 459 aa, unidentified
MRTIGIDLAIQGSHKAIVADEGGRYITPVIKLHTRASEIDKLLARAREGAEGCPLQVVMEPTGMAWFPLAAYLARQEGVTVYLVNSQQVADLRRFYKRHAKSDRIDARVLARVPLVNPEKMHPLVLPPAGAFGCQRGCNQLDQMQTQITAIKNRLRAVDRFAWPGLEELIFADPFSPTARWFRQHWYDPRQVIQAGAQTIRHQWQDSSLAGGDKGEWAEQLVELAEQVLALYGHDTGYLDFALLQAEVGREQEQLAFLEEMHHNLRLQTVRPLYRQIHPSRNLETLKGVGQDGAAVYASFIGDPDRFGSNRRFRGWHGLVPGSKQSADSETKGLHVTKAGPNLLKRYAYLNAEVARQWDPQIAAIYYDQMVNKGKHHNQAVCTCATHLLDRILVVLREDRSYQLRDVDGTPITVEQARAIIAERYTVPEEIRRRNNKRHRRERAERRSERKQKRESRPR

SEQ ID NO: 451922 - protein, 340 aa, unidentified
MDITTLGIDIAKSVFQLHGIDADGAVVVQKKLRRGAVLNFLGKVGPCLIGMEVCATSHYWAREIAALGHEVRLIPPAYVKPYVKRQKNDAADAEAISEAVTRPNMRFVPIKTEEQQSVLVLHRARDLLMRQRTMILNAIRGHLAEFGIIAAQGPRQVMGMIARLRDDGDASLPEIARSALLALGAHLEALAGEIRALERQLIVWHRADPTSQRLETIPGVGLITATALAASVSDPSVFKSGREFAAFLGLVPRQNSSGGKDRLGRISKMGDRYLRKLLVVGATSVIRRAGSNPTKTGAWVRSLMERKPARVVTVAMANKTARIAWAVMTRGEAYRASPIA

SEQ ID NO: 451923 - protein, 320 aa, unidentified
MTAFTPVGIDIASKKFDAAIWVEGKKYKNKVFANTPTGFHAFLLWLAPYGPCHICMEATGAYSLPLATYLYDAGYPVSVENAARIHAFGQSELIRNKTDKGDAKMIARYCHLHKPPEWKPVPVNERKRQVLINRLNTLKEMKRMEENRALTSETIVQDSIQKVIAALDEKIKEIEQAIKKHIDNDPDLKKNQALLESIPGVGEILSTTLLGYVGDMSRFSSNKALVAYAGLNPMLKESGCWKGSTKLSKKGNALLRKALYMPAITALKYNPVVAALCNRLKEKGKRGKCLVCAAMKKLLQLAYGVLKSGKPFAAEIPLAR

SEQ ID NO: 451924 - protein, 429 aa, unidentified
MKNSAANKLKQVPVGYLVIGIDPHKKKHAAVIMTQDFTTHSKFKFNNSKEGFEMALERARMEMVRTGSRGAIFAIETGGHYWRNLAYFLDERGIPFRFINQFTLKRRREGKDLNRRKNDYRDSEVAAQLLCTGEFTETQLRHGVYAELHAAHNAYRRLVKERTRIINLVKGLLDGLFPEFTQVFKDPCGLTALTVLSICPVPEGIAAMTEDEFVNTIRTGHRGLLMRKKLCALHYAAQTSIGVKADAQSVSYELSFLVEKLQLIKRHICRIDETLVRLVNETEEGKYLLSIIGLNYISVAGLLAELGSFEQYRSAKQLIKMAGSNPTESESGGKRSAHTPMSKKGRPVLRYCAWTAVIPMLRFNPDFRAWTKKLRERPVHANPLKGREVVGAALNRLLRLAFVLVKNQTFYQVPEIESMPEPELLPVAS

SEQ ID NO: 451925 - protein, 348 aa, unidentified
MVVGIDVHKRSHVAALLDERGGEIGTLSFTNSPEGMRRLQAWLVAHDAGEAVVGVESPAGYGRLLVASLEAAGHEVLNVPAWRTHRERRRHGPGKTDPGDAIAVAQVVLRKRAELGPALEPELVRALALLELQRRRLVRDRTQAIQRLRADWNQVDPVGEARVVNLSRQRELHRLKRINFGDSLVEQVAARCIRDLARDIEDLNQRIAVLDGEIAQLLQEHGNPVGDLHGAGPQIAAAVIAHAGDVRRFRDAAAFARFCGAAPIPCGSGQTAGRHRLHRGGNRQLNAALYRIAIVQARHHPPARAYLARKIAEGKTPREARRALKRHLANVIYRRLHAWAETTPALNT

SEQ ID NO: 451926 - protein, 405 aa, unidentified
MGEGRFAGIDWASQEHAVCVNDADGRIVEGRRYRHDERGLRAMCNRLIELGVLLVAVERPDGLLIERLLDCGLHVIAIHPNQVAAMRPRFSNAGGKSDSFDAFVLAELARTDSHRFRVLVPDSDATKALRALTRAREDLVDTRVALANELRAQLECFWPGAAAIFAEIDSPIALAFLKRYPSPADARGLGEQRLERFLARNHYCGRRPVHQLLARLRGAADGRAGTLQSEARRQIVLGLVAALEPLVTQITQLTSEIRSALHDHTDGETFSSLFRDPKTAICPATILAEMGDCRPRYPTVAALAGDSGQAPVAVESGKSKRARFRWACDHRLRDAIATLADTSRHTNPWAADLYDRARARGCTHPHAIRILGRAWCAVIWCMWQDHSTYDPARHGALQRLTAQQG

SEQ ID NO: 451927 - protein, 408 aa, unidentified
MDVVYSHVCGLDVHKKTVVACILTPNEKEIRTFSTMTDDLLQMVDWIKSKGCTHAAMESTGSYWKPVYNLLETEEIQTLVVNAQHIKHVPGRKTDVKDAEWIASLLRHGLLRGSFIPPRDQRELRELIRYRRSLIDERAREANRIQKVLEGANIKLSSVASDILGKSARSMLEALIAGNEDPEALSELALRRLKNKKQDLQRALKGLIGPHQRLMLQTQLRHIDELDRLIQQLDEEIKRRMLPFEEALERLDTIPGVARRTAEQIVAETGTDMSRYPSAAHLCSWAGLAPGNNESAGKRKSGRTTKGNPKLRRALVEAARAAARTKNTYLSSLYHRIAARRGANRAAVAVAHRILVIVYHLLKDKQNYNELGPQYYEERRREQIAKQALRKLQSLGYNVMLEPVNHTA

SEQ ID NO: 451928 - protein, 339 aa, unidentified
MIGLDIAKYVFHAHGADERGRAILSKRISRRKLLDFFAAQPKCTVALEACGGAHHWARQLTQLGHEVRLIPPAYVRPFVKRQKSDSIDAEAICEAAQRPNMRFVAVKSEQQQAAGLVFRTRDLFVRQRTQLINAIRGHLTEYGWIAPKGPSHVAMLADLIEEDEMASTLPEAARAMFRLMLDLLATLNGEIADLDKEIARRAREDEVSRRLMTIPGIGPISATAIAALAPPIETFAKGRDFAAWLGLTPLQRSTGGKQKLGATSKMGERTLRRLLIIGSSAVVQQASKRGAAKGSWLEQMLARKPRMLVTVALANKMARIVWALLVKHEVYRAPVAARA

SEQ ID NO: 451929 - protein, 392 aa, unidentified
MISVGIDVSKDKHDCFIVNSEGEVLADVFTIHNTMDGFNFLLQRIRECTMPQDKIKVGLEATGHYSYNLIGFLLDNGLATYVLNPLRTNLYRKSLSLRKTKTDRVDARTIAHMLLSDAGLKPYTDTAYHNEELKSLTRYRFDKVKERTKLKSSISRLVCILFPELEKLVPTLHMASIYALLEEFPDAKQIAAAHLTRLKALLETASKGHYKRDMALRIRDAARNSIGAWMPAKSLELQHTIRLIRELDAEIAEIEERIQSIMNDLHSPITTIPGMGVRMAAMILAEVGDFTRFVSPDKLLAYAGMSPSTYQSGQLKNCYPHMEKRGSRYLRYALYNATKCVCHWNPNFAAYLAKKRAEGKHYNVALSHATKKLVRLIFAMEKSKQPYSQLAA

SEQ ID NO: 451930 - protein, 339 aa, unidentified
MKLYTGLDLHSSNSYLGIIDETGKRVYKQKLPNDRERILEALNPYRNDIVGVVVESTYNWYWLVDLLMEAGYQAHLANPAAIKKYTGLKYADDQHDAFWLAEMLRLGILPEGYIYPKEDRPIRDLLRKRMHLVRLRTSLIVSLQNILSRNNGFKLKTSDVKALTEDRVAPYLAGSEDLALAGLVSKESIDFLTRQIKKIETVIVDKVELKPSYEKLQSVFGIGKILALTIMLETGPITRFAKVGNYVSYCRKVSSKWLSNDKVKGKGNKKSGNKYLAWAYSEAAEHARRSYTQARTYYNRKMQKTNFMAAHNALAHKLARASYYVMRDDVIFIPKKIFV

SEQ ID NO: 451931 - protein, 363 aa, unidentified
MIYSLGIDISKDDFSACLQRYLLNEQTHQVVTRKTFKNNPSGFKACMSWLERHTNDQPAPIRMTMEATGVYYEPLALFIQQHHRQVHLSVVLPSQSKKFIGSQGYRSKTDKIDARGLAMMGAERKLDAWKGIDSFWRELRAMSRTRSQLIDQRTRLKNQLHALAHGGYSTPQVTESLLVCVDTISNQIDELTKLIGKHLRSRKDLAESIACLRSIPGVGTLTIATILAETNGFTQFHSISQLISFSGYDVVIRQSGKWSGKPKISKQGSKYIRKAMYMPASAIVRKENGPIYAFYKRLLSVHNVKMKAHVAVQKKLLTYIYVLWTKGEVFNSDEIRNERIRHKRSVAPPKSEATVDTSVALAQ

SEQ ID NO: 451932 - protein, 342 aa, unidentified
MTIVTVGIDLAKNVFAVHGVDAAGKPVLVRPSVARDKLLELIASLPPCLIGMEACSGAHHLAREFDKLGHTARLMAPKFVAPYRLSGKRGKNDAADAAAICEAVTRPQMRFVPIKSADQQGQLMVHRARQGFIEQRTATLNRIRGLLSELGIVLPLKAATVRRQALQHLEDLPGWANTVIGDLLSEVSHLDERIAQYDRHIALMARHSTQAQHLMQLAGIGETTATAIVSTVGNGHDFVCGRSFSAWLGLVPGQYSSGGKQRLGRITKAGDAYLRSLLVMGARVVLAAAMNSKAPKQDPLSRWARALAERRGYWRAVVAIAAKNARLCWAVLQRGDNFKIPA

SEQ ID NO: 451933 - protein, 407 aa, unidentified
MPLFVGIDVSSKNLEACLMDAAGETLVTRTVTNNFPGASELKDVILQHAKPGDTIQIAMEATSVYSWHPAMFFHEDPELKQRQTKVFTLNPKLVKNFKKAYAEMDKTDPKDAWVIADRLRFGRLPKSVIQSEQYLALQRLTRMRYHLVHSLTREQQVFLNHLFFKFSAFNLEVDTSAFGHAITELLLEAYSLDEIAQMPLEDLAKYLQTKGRGRFSDPEDVVSSIQKAARDSYRLSKCVEDSIDLILGSSIEIIRHLKRQIKDLDKAIARVLDGLPNTLETIPGLGPVSCAGILAEIGDIERFENQAAIAKFAGLFWPRHQSGDYEADDKMLARTGNRYLRYYLVEAANLVRRHEPEYRAFYQKKYREVQKHSHKRALVLTARKLVRLIDALLRNGQIYAPKKKVTR

SEQ ID NO: 451934 - protein, 414 aa, unidentified
MNKFCGIDWAEDHHDIAVIDADGQLVIKRRITDDGDGFAELLGVLESVGDTSGDPIPVAIETARGLLVAALRATDRPVYAINPMAVARYRERHSMTGKKSDHANAMTLANILRTDAHMHRQLPADSDLVRSIAVLARAAQDAAWRRTRATQELRALLREYYPTFLDAFAGTLHTNLAKPEARAVLAIAPTPQQGAKLTKPRIIAALRRAGRQRMLDETATRIQHALRRPQLRQAAIVEQAMGRQAVALLATLHTECANADNLIGASVEAFRQHPDYSIVTSFPGLGESTGARVLAEIGDDPRRLADARGLKAFAGSAPITRASGRSMSITHWRVKNNRLAAVGFVWAFAAIPRPGPAKDHYERRRALGDRHAAALRHLFNRFLGQLWHCLQTRQTYDETKAWNLVMTTPEPNAA

SEQ ID NO: 451935 - protein, 434 aa, unidentified
MSQVITIGLDIAKHVFHVHGADGRGRAMFSKRISRGKLLDFFAAQRSCTVALEASGGAHHWARQLTQLGHEVRLIPPAYVKPFVKRQKNDAIDAEAICEAAQRPSMRFVAMKSEQQQAAGLVFRTPDLLVRQRTQLINAIRGHLTEYGWIAPKGPSHVATLADLIEVEAMTSSLPEAAHTMFRLMLDLFAGLNGKIADLDKEIARRAREDEVSRRLMTVPGIGPISATAIAALAPPAETFAKGRDLAAWFGLTPLQRSTGGKQKLGATSKMGERTLRRLLIIGSSAVVQQASKRGAPKGSWLEQMLARKPRMLVTVALANKGADRLGATCKAGKLQSSGRRQGVSLAGLRSSQVQSVEGEYGATVGETGLEEPDVLIVPGARIFDLVPVRELPYRPAAPSLHQKPDRWQHPTTCQSSSKIPLASGGASTDEYAP

SEQ ID NO: 451936 - protein, 393 aa, unidentified
MSTSVGIDIAKELHWVAAIGGAGEVLLDRKLANTPEDLLRLVDELKALPAPVRIGIDVVGGIAALAQAVLLEAGFELVHVPGLAVNRARQGTVGGESKSDPRDARVIADQVRTRRDLRPIEAQSEIDVELRLLVSRRRDLTTDQTRRLSRIHDLLASIFPELEQALDLTAKAPLVLLSTFVTPSQLRQASDARLRKLFGPRAKHPYVTELIATARACAQRQPMQLPGESLTASLIRELALEALQAMEKLAGFDTQIEQRLARHPDAALIRSLPGMGAVLTAEFIAQAGSIERFKSSDGLAAAAGLAPILRQSGKVRFLRRAAGGNKDLKRIFYQSAFASLRCPQSKAFYARKRQEGKRHHQAVLALARRRVNVLWAMLHNRQPFSPHPSSKSG

SEQ ID NO: 451937 - protein, 461 aa, unidentified
MPDGGGENSSPRRTKQIEGLPVIRRNVAGIDLGSERHWVCAPVAGSISREVADFGATTPELIRMTKWLQACGVESVAMESTGVYWIAPHEVLEAAGLEVLLVDTRQLARVPGRDKKTDPSDCEWIQRLHSCGLLRGSFRPREEVCMLRTLVRDKANLVAECGDWLRRMQKSLDQMNVRVHRAVSHMDGITGMAILRAIAEGERDAQKLAKLRDTRCHKSEEEIAEQLSGHWREDHLFSLRQSLKMYDAIQQRLADYDREILQRLAAMQREEFRQQPPPPVKNPHKAKNMKKRGEEPMREALFRMSGVDLTGIDAIGVETVQVVLSEYGPDLSRFPTEKQFVSHVTLIPHKPMSGGKPVRKKRRSSASTRVAAALRMAAVSLRNSATALGAYYRKIARRLNGDVAVFATARKLATLIYRLLRWGQPYVDEGAEAFERRYQETRLKTLKAKAKDLGYQLVASN

SEQ ID NO: 451938 - protein, 343 aa, unidentified
MKLSRVGIDLAKNVYQLHGVDCSGETMWTRRLKRHRWLKVLLDKTEADCVIGMEACGGAHHWARELQACGYTVRLIPPQFVKPYVKSNKNDANDAEAICEAMSRPNMRFVAVKSVEQQDIQATHRVRAECMAHRTAKGNQIRGLVSEYGLVAPQQSAALRTAIPCWLEDAENGLTSRFRALLHGLWEDLIRLDERVAALDADIALIAKTDPVAKRLQQLRGVGPLIATALVASVGTGEQYAKGRQMAAALGLTPKQHSSGGKDRLLGISKRGDCYLRGLLIHGARSTLWHAKHKEDRLSRWMNDLSARRHPNVAAVALANKTVRMAWAMMRNESDYDPEFATA

SEQ ID NO: 451939 - protein, 359 aa, unidentified
MIHVGVDVHKGYCQACLKDEHGTILEEIRFQNNLEGADKLAVILGKHREARVALESTGNLWVKLYDRLDQEENIDVILTNPKKTRVIAEAKIKTDKIDARLLADLVRADLVARSYVPPIDIRMQRALLRERISLVESRTMIKNQIHALLDKYELTSSYTDLFGKKGMEWLRSLNLPGIDETILEVNLQRLEELEVHIEAYTCRIAREAVVKPEARLLMGFTGIDYYSAMLLASEIGGITRFPSAKKLVSYAGLAPGTRQSGDKTIHGHIVKEGNRRIRWILVEAAQHASRHDPRLRQFYLRILKRRGYQKAIVAVARKMLVSIYYVLSKQEAYRGENINLLERKLKRLEWKVSQSPHAR

SEQ ID NO: 451940 - protein, 346 aa, unidentified
MRFYQQQHEFYCGVDLHARSMHVCIVDHAGQTKVHKNIDATPDRFLPLIRPYREGLVVAAECMFAWYWLADLCAVEGIPFVLGHALYMKAIHGGKAKNDRIDSQKIALLVKGGMLPVAYAYPKAMRATRDLLRRRNKLVHTRAEALAHIQNTVSQYNLPPLAKKLTFAANREGVAERFTDTSVRRMVASDLALIGHIDEQLKGLELYLVRHAKVDDPQAYHLLQTIPGVGKVLALILLYEMHDAGRFNDQRHFVSYCRLVRPCHESAGKKSAGKGHKIGNAHLRWAFGEAACLMLREVPAAQTYVARLEKQHGKAKAISILAARIARTAWLMLKRKEAFDATQFLN

SEQ ID NO: 451941 - protein, 343 aa, unidentified
MKVSTLGLDLAKNVFQVHGVDDEGNVTVRRQLRRQQMFSFFSELPPCLIGLEACGTSHYWARELAARGHDVRIIPPSYVKPYVRRGKNDAADAEAICEAVGRPNMRFVPVKSEDQQAALMQHKARELLIRQQNMLVNALRSHMAEMGMVAAQGRERLDRIVDVIMEEEDESLPALARASLRPLVAMLQANEAAIDDIDRAIKAAHKENEVSQRLASIPGVGVLTASAIAATVPDPSFFKSGRQFAAWLGLVPRQNSSGGKERLGRISKQGNRYLRKLLVIGATSMLSVVRRKSSRQADWAKRLLERKPTRLVTIAMANKAARIAWALMTKKETYRTTAIATAA

SEQ ID NO: 451942 - protein, 341 aa, unidentified
MAVAGGLDLHRGQLTFDYVDTGTGESWRGRICPADRESLRGWLRRFHGVPDVEFAVEGCTGWRYVAEELQRAGITPHLAEPAETAGLRGRKRRAKTDWADARHLRDLLLDGRIPESWIPPGHVLEARALVRLYKDLLEERTSWQQRVHATLFHQGIPVVPKLGTADGQQRLEAAELSAAGRRAVQAGLRQIERLTQEMASLRRELARLSSRQPGCRALRRAHYGIGGLLSVAVWAELGDCRRFSSSDDAVRHTGLDITIYGSDGRRARGHIARQGPPVLRWALYEAALYASRPASPDYAYYCGVRDRIDGQRALLSVARKLARRCYHTLRDLGEDALAPAA

SEQ ID NO: 451943 - protein, 338 aa, unidentified
MEKYIGMDAHSSICVFSVVDKNGTEVHQAKIATNGQLLVEYIRSIQGAKKLVFEECELSAWLCETLRGEVDELIVCNPTRNMQYKRAKTDKLDAQNLARLLRGGYLSPVYHDGSKTEHLRALMSGYQDVVDTGVSVKNRYKSLFRKAGLPARGTKLYDDNSLLENLPRPDQQFVGRSLYRLLETIEKEREQYVVAIKKCGRTFPEIKLLKTIPGIGDIQAAKVLSQVISAQRFKDKHKFWSYCGLVRHRMESGGHIYGSRRGRGNRVLKCVFKMAAKSVLTGETELRVYYDELRAKGTSDKSARNAVSRKLAAISLSVLKTKRPYDETRILPQTEQAR

SEQ ID NO: 451944 - protein, 440 aa, unidentified
MNDLRVLDAHAAFVDVGSEQMFVSIAGGSPEVFGTVTSQLHALRDWLLTHEVRSVAMEATGVYWLPLYAVLEAAGLEVLMVNGRQMRNLPGRKTDMQDCQWGATLHAHGLLHAGFVPPAHIRRLQDYLRLRADHITSAAAHVQHMQKALERMNVKLHHVISSLTGTSGLAVVRAILRGERNPEQLLALCDTQIQRAKAQRVKESLRGTWAEEHLFALRQALASWEHYQNQIAECDRQIEALLPASADDHTPPNTAVHPRPRKRAGPNAPEIPQLREILTQMCGGQDLTRLPAHTEYSVLQIVSEVGTDLTKWATEKHFTAWTGLAPGSHQSGKRKGSVKRQRNRAGRMFCVMARALARSKDIALGGFYRRMAARRGGLIANIALARKLAVLFWRVMVKGTDYVEHGLAQYEAKVLQTKQRALRRLARQLGQQLVPSPVPT

SEQ ID NO: 451945 - protein, 465 aa, unidentified
MTTAKLWRNRKERKDWARRLRSEDPGLELVHPRAAGIDVGNSAHYVAVRPDRDPEPVRRFECFTADLYRLAEWLESCGVKTVAMQSTGVYWIPLYEILEDRGFEVYLVNARHTKNLPGRKSDVQESQWLLKLHTYGLLNNSFQPPAEIRVLRTYWRQRAEHVSGAATCIQRMQKALTQMNLQLANVISDLSGVTGQAIVRAIVAGERNPQKLAQLSNPRIEASREEVAKSLEGNWRPELVFVLRQEVEMYDAYQRRIAECDQQLQKHLASFADTELPQSPKAESKEQRAKSTKNAPRFDLSSELKRITGVDLTRIDGIDVMVAQTLLSEVGMDMSRWNTEAHFSSWLGLCPDNRISGDKLLGKGTRHVVNRAATALRLAARNLIRSRSYLGAQYRRLRTKLGAPKAITAMAHRLARLVYRMLKYGQQYVDKGTEYYENRYRQQQIHLLQKNAAKLGLQITVAAQS

SEQ ID NO: 451946 - protein, 334 aa, unidentified
MSKKVIGIDVGKKDLYLAHKYFTTTGKVKVKRKKFSNNLKGYKALIEWSKNIAKKEGDKSLHFIMEATGVYYEGIAYFLFEKGFAVSVINPSYIKSFANSSGVRTKTDQKDALVLVEYGEAMKPELWSPPAEEYRVLLNLCRAISSLKNRRDAVSNRIESLKSSRVIAQAVLEEEERLFNEINKSIKRLEKQIREHVNKYPSLKKETKLLMSINGVGWNTAVLMVAIMEGGRRFKSAKEAAAYLGLSVQEYTSGTSVKKRSRLSKKGAKDIRKALYFPAITAVRCNADVKALYERLLKRGKLKMVAIGAAMRKLVHICFGVLKNKTAFQPQTIG

SEQ ID NO: 451947 - protein, 341 aa, unidentified
MKTNRTVVGVDTAKRVFQLHWVDMETGEIEDLKLTRARFLEHFANRVPCVVAMEACGGSQHWARELRELGHDPWLLPAKAVRPFVSGNKNDAHDARAIWAATQMPGIRTVAVKSEEQQAILALHRMRQQLVKFRTAQINGLRGLLTEYGEVMPQGRAGMRRGMADALERVAERLPAMVIDTLREQWARVDRLDEEIAEIERRIGVWHRGNADCKRIAEIPGVGVLTATAVVAAMGDPAAFRSGREFAAWLGLVPRHDGTGGRVRMLGISKRGDRYLRTLLIHGARAALTSSKAPPEWAVRLAERRPPNVATVALANKMARTIWALLAHDRAYQANFVSQPA

SEQ ID NO: 451948 - protein, 349 aa, unidentified
MEHYAGIDVSLELSSVCVVDAKGKIVKEAKISSDPVALVTFFRGLGIAIERIGLEAGPLSQWLHARLTQAGFEVVLLETRHVKAALSAMTVKTDRKDARGIAQLIRMGWFRSVHCKSVGSQEVRALLVGRKLLLGKLLDVEFSIRGILRGFGLKMGVVTRRNFEARVRELCAGHSMLEQICAAMLAARSALQTEYTKLHKAMLTIVRKDEVCRRLMTTPGVGPLVAITFKTGIDDPSRIGKSKAVGALFGLTPKKYQSGETDVTGGITRVGDEMVRTALYEAANILLSRVTRFSALKRWGMDIARRRGTKRAKVALARKIGVILHRMWVDSTNFRWTKEAPNAPRLIQA

SEQ ID NO: 451949 - protein, 388 aa, unidentified
MEARLVDTTPTARNDALARCLIAIELSKASWVVGVQTPLSNKTSQYRLAGGDWQSLLKLIERIRRQVSRELGRPVEMISCYEAGYDGFWLHRLLEAHGVRNHVLDPASLLVNRRARRAKTDRIDVERMLRALGRYLRGEPDACSVVRVPSVEQEDARRLHRERHRLIRERVQHVNRIKGLCATQGIYDYEPLRSDRKAQLDGLRTGDGRTLPTRLKAEIIRELQRLELVLKMIAQIEAERDAIVKEAAPQHLNAGKIKALVNLKSIGPEFATTLVGEVFYRSFDNRRQVGGYIGLAPSPYSSGSMDRDQGISKAGNPKARSTAIELAWMWLRYQPDSTLSIWFRQRVGDRKGRVRRIAIVALARKLLVALWRYLETGLVPAGAVFKTR

SEQ ID NO: 451950 - protein, 402 aa, unidentified
MHYLGIDVSKASHQCIILDTNGEALGKSFTVQSSKDDFFRLAKKLSELNIPKADLVIGLEATGNLWENLYSFLKEQGFNVILLNPYQTNKFHEAMLKKAKTDSIDALVIAGLLRSGCASSSYVPDEDIQSLRDLVRLKDGYLKDIKNYKRKAYSLLNLVFPEFLNMVKDPFNIVSTDMLLKYQTASDFKNLRPKDLIKIFRHRQGNNYDDSWANKVISSAKDSIYSGKAHKARGIVLKSLIQNIKYLKEQIGLLDNEIQLLLKPDNNLPNSNVDNLLTIPGVGPKTIAVFLAEVGNIQRFLSCKDFIGYVGFYPKIEQSGSSLNKAKLTNKGSGILKHALYMASVASLIHNPYLKSVYHDKVSQGKCPKQALIVVARKLACIMYSMLKNNSVYNPERVAIAI

SEQ ID NO: 451951 - protein, 392 aa, unidentified
MKKALTRVVIGMDPHKRSVTIEVMCSDESIVGTGRFSTDAQGHAAMLRYVEAWLDRIWAIEGCQGIGRHVANRLLAEGERVVDVPPKLSARARMFATGQGRKTDATDAHSVALVGTRMAGLRPVINDEQLAVLRVLVDRRRSLGDEHTRTMSQVDHLLLELIPGGAKKDLSAAQAKALLATVRPRDLAGKTRRRVAAELIADLERIYQRKKAANKELTTLVEATGTTLMDLHGIGPSGAARLLVEVGDITRFPDKNHFGSWTGTAPIDASSGDNVRHRLSRGGNRQINRVLHVMATVQLRNPTEGRAYFDRSKARGKTSNESMRLLKRRPSDIAYRTMINDAARHMTTGPGGQRGNVSDSSAAGLQPHTSTSDKPLPGPATTNTTTTLPAAS

SEQ ID NO: 451952 - protein, 317 aa, unidentified
MSDVFVGVDVSKARLDVAIRPAGAAWSVANDEEGIAQLVTRLKELAPKLVVVEATGGLEVALVAEVATVVAVAVVNPRQVRDFAKALNQLAKTDRIDAEVLALFAEKVEPEPRPLKDEETRHLAALVSRRRQLRDMIVAESNRLGAAPKRLHKSIQKHIDWLRRELRLLEKDLDDTIKSSAVWREKEDLMRGMKGIGPVSAATMLAEVPELGSLNRKQIAALVGVAPLNRDSGTYRGKRSIWGGRATARAVLYMATLSAIKSNATLKAFYRRLVDNGKPKKVALTATMRKLLTVLNAMIRDGRPWDATLGLDAQHSC

SEQ ID NO: 451953 - protein, 331 aa, unidentified
MKKIFIGIDFSKKTLDATVMRENYLHEKGEHLSFSNNKTGAMKLIKWVKGFGSIEECLFCGEDTGLYSKIASETLVEQGCFMWLDSALRIKRSLGISREKNDKKDSRDIALYAARFKDQAECYIILDQATEALKKLFTMRKKLVEAYNRLLVNYNESKKYFDNELLSDAFAIHEELIAQIKEKIKALEKEMKKIIKSNSELNNTYNILSSMPGIGLINATAFIVYTNNFKKFDYDARRIASFWGVAPFGHTSGTSVKGTPHVSHYADSYLKSILSEATLCATRFCPIISAYVARLKQAGKHKNVVLNNAKNKMIHILVAMIRNNEKFRKAA

SEQ ID NO: 451954 - protein, 325 aa, unidentified
MEKVFIGVDVSKLTLDFYVKSNSSQQHYQINNSVKAIKKLLKPFQNNENTIIAMENTGRYNFALYEFLAVNNFSVFVVNPLHLKRSIGLLRGKNDKIDAQRICLFIEKNHMDLESWNPSSIDIQKISLLNTERRHRVKLKSGLLRQTQDLKLLKNIADKEIIKLNQQLIKTIEKQIKVIEDKILELIFSNDELKEQFNRMISIPGVGKVLATLMIIKTKGFSEVKSARKMACFAGVVPFEHKSGSSIYYKPRISTMADKELKKVLHLAALSTIRLKNDMAAYFNRKVNEGKNKMSVLNAVRNKIIHRIYAVVKNKSVYENCLVVS

SEQ ID NO: 451955 - protein, 338 aa, unidentified
MFYSGIDQHKLFSVITTVNDEGIIIKQAELKNNDFDILNYFFSIGNEHSATVETTGGWYWMNDLLSSHGINLKLAHAKYVKAIAYAKVKTDKVDSHILAQLLRLNFIPEAYKISDDVRPLRDTLRARLRLSQKRTSCLNFMNRMLEKFNINDPSLLSDFYKLQYQQFDNQEHLLKEQMLTLEKSLYPSLIPNDDIQRLLWIPGIGKMNAFTILLEVGDINRFADVKHFFSYCRLVPSARNSAGKLKQRSSKDGSKHLKAVFSDAAVHALQYYPPIKKYHDSKLRRKKKQVAHAIIAKEIARIVYYVLKDKSDFNNLFKGTKIDHKKLGQWPRITSPVV

SEQ ID NO: 451956 - protein, 338 aa, unidentified
MSLYGGIDLHSNNSVVVLLDDHDQVIYQKRLPNQLPAILDQLAAYRAEIQGLVVESTYNWYWLVDGLMESGYKVHLANPTAMRQYSGLKHTNDYSDAHWLAHLLRLGVLPEGYIYPKADRPLRDLLRKRGHLVAQQTANILSIQNILVRNTGSRLSAKQIKELRPHEAAFLLSHEDQALAVSSVLRVIHCLADQIRIVEQRVRSEIKRTPLYQLLQTVKGIGAIIAQTIILETGDIRRFASVGDYASYCRLVGSAKISNGKYKGRGNRKNGNQYLCWAYCEAAHFTMRFNPEIQRFYQRKAAKTKVPIAHKSVAHKLARACYHVMRDEVPFDVGKAFG

SEQ ID NO: 451957 - protein, 316 aa, unidentified
MLYVGIDVAKNKHDVTALNVQGKTVLKPLTFSNNKAGFELLDLSLRQLNQDCLIALEDTGHYAFNLLNFLHEQGYKVYTYNPLLIKEFAKSLSLRKTKTDKKDAHGIALKLLSDPNREQFQHDNRQVELKILARHIHRLKKKQSDWKVQYTRCLDIIFPELDKIVGKHSEYTYQLLTRYPNPQKRLEARFDKLIEIKRLTASKIQDILSVAPRSIGTTSPAREFEIIEIIKHYKRLIDKAETCVNDLMAEFNSIITTVTGIGGRLGAVILAEIRNIHAFDNPAQLQAFAGLDSSIYQSGQIDLAGRMVKRGSPHLR

SEQ ID NO: 451958 - protein, 371 aa, unidentified
MKQFIKYVGLDVHKETIAVGVAEPNAEEVRYFGQISNTPQSVEKLVNQLRKGGAHLSFCYEAGPCGYGIHRQLSDLGWDCQVVAPSLIPKKAGDRVKTDRRDALCLARLHRAKELTAVWVPDGAQEALRDLTRAREDMKHLQRQAKQRLLAFLLRHGKRYDGKSKWTQAHTRWLEGVKFEQATQQIVFQEYVDTVVALSKRLDGLDGHFQRAAGESVFWPVIEALMALRGVNLLTAATIVAEIGDLKRFASAPQLMAYLGVVPSEHSSGPKQTRGGITKTGNGHVRRVLVEAAWTYRHPARKTAVLQRRAERTSEVVQEIAWKAQKRLCARYRTLEARGKLKVQACTAIARELAGFIWAIGQVMPQPAAKA

SEQ ID NO: 451959 - protein, 402 aa, unidentified
MNAVGIDVSKGKSMVAIMRSFGEIVSAPFEIKHTASDIHSLVELINSVEGESRIVMEHTGRYYEVLAHQLSKANLFVSAINPKLIKDFDNDSLRKVKSDKADAVKIARYALDKWQNLKQYSVMDELRNQLKTMNRQFGFYMKHKTAMKNNLIGILDQTYPGVNTYFDSPARSDGSQKWIDFASTYWHVDCVRKMSLNSFIDHYQNWCKRKKYNFSQSKAEEIYGKAKELVPVLPKDGITKLIIKQAVDQLNSASTTIESLRTLMNETASQLPEYPVVMAMKGVGTSLGPQLMAEIGDVSRFTHKGAITAFAGVDPGVNESGSYEQKSVPTSKRGSSDLRKTLFQVMDVLIKTHPQDDPVYQFIDKKRAQGKPYYVYMTAGANKFLRIYYGRVKKYLSSLPES

SEQ ID NO: 451960 - protein, 457 aa, unidentified
MMETKRRREQRSMLPVHPDAAAIDIGATVHVAAVGPARDPEPVRSFGTFTGDLHRLADWFAQCGIKTVVMESTGVYWIPVYEILDQRGFEVWVVNARDAKHVPGRKTDISDAAWLQRLHEFGLLRGSFRPQGAIAALRAYLRQRERLLDYAAAHIQHMQKALTQMNLQIHHVISDITGTTGMRIIRAIVAGERDPDTLASYRDIRCHSSVETVRQALIGNYREEHLFALAQAVELYEVYQAKVATCDEKIEGVLERLKQPCRAPAKPLRAARHKTRQPNAPTFDARGALYAVLGVDLTQIHGLGPYLALKLISECGTDLSAWPSAKHFTSWLSLAPGNKISGGKILSSRTRPSGNRAAALLRLAATTVGRTETALGAFYRRLSARIGKAKAVTATARKIAVLFYNAVRHGMDYADPGASYYEERYRQRVLTNLQRRAKALGYVLQPTEIKGVSIAVS

SEQ ID NO: 451961 - protein, 311 aa, unidentified
MQLTIGIDISKETVVAYRLPDNQSIQVANDRAGQKTLVRWIGKQNGSLVVFEATGAYHRCLEAALAANGTPFAKINPRQARRFAEATGRLAKTDRVDAIMLAKMGAILGLKADQPKSEVLYILRELLTARRALMKDKVAAKARLQTTRQTLLKNQIKARLKQIEIQIRQVDAAIAEKVQLDEALSNKLAILISIPGIAETTAFSMLIEMPELGTLEGKQAASLAGLAPMSRQSGKWQGKERIQGGRAFLRRAIYMPALVATRRNPGLKAKYDQLIRAGKSGKVAVTAIMRKLIVMANALLRDGRKWSEIRP

SEQ ID NO: 451962 - protein, 428 aa, unidentified
MNNQEIIRREKYCQIVKEITGSNQYMVVGIDVGKDKHHAFLGTATGTCLFKKMVFENNLDGFDRLLATVDQLKTQNSLEKIVYGLEPSGNYHKPLARHLIRCACNVVLVAGQAVKNNRQLLNGRWDKNDTKDAANVADLVSRGKCLYYDCPSPQINELRGLLSLRRRLKREEHSLRMRIRNNLLAQYFPEMDKFYSACESESLAIVRWCLDPNKISVMEFDKFFNMVTKTRRGIAQTLRLRNIHNLAVESIGCPMGPAAEYEAELLVEKRWQVAKQIQKTEDLIEDICLEFPEYNYLLTIPGFGPYISAKVLASIGDPFRFNNRKQVIKMAGYDLSAKRSGKTSNQAVPVISKKGNGELRYALYQAANVAAARTDLFRAYFTKILRGRERERGIKTKMRVKLAAKMLVIAWTLMKTKQSFDPEHLNID

SEQ ID NO: 451963 - protein, 388 aa, unidentified
MEPTSIHPTAVRTDLGAIFVSLELSRSTWLVTSLSPGSGEKMSKHVVDGGNVAELLDRFEQLQQKARLRTGKSFPIVTIQEAGLDGFWIHRVLEANGVESYVVDAASIATSRRRRRPKTDKIDGEALTRTLLAFKRGEPRVCAMVRAPDPEDEDRRRICRERKVLIAERVRHVNRVKGLLFAQGISGYQPLRKDRRKRLEELQTGDGREIPRHLKAQVNRELDRLELLLEQIATVESERNSLLSTHEQPAVEAITPAAMLLSLKGVGAEFAAVLWTEALSRHFDNRRQIAAYAGLTPTPWMSGTIDHEQGVSKAGNPRLRTTMIQLSWLWLRNQPASALSRWFVDRVQSNGGRLKKAAIVALARKLLIALWKFVTAGVVIEGAVIKTA

SEQ ID NO: 451964 - protein, 353 aa, unidentified
MITIGVDAHKGVHVALALDEAGQELGQWQGPNSAAGWQAISEWAASLGSPRQWGIEGAWGYGRNLAQHLVAVGETVYEVNPRWTAMGRRRARKPGKTDRLDARAVALLVRQEASALPRVHAEDDTAVLDVLTSEREAAIAESIRLRNQIHALLLQTDPEYRAYLPTLKSQAALDVLESYTAAGCNPVQAQRAAAIRRLALRLRLVLSQAEELAQQIRDLARGRFSPLTNICGINLVTAGTLAAILGPGDRFATDAQLAAYAGVAPLETSSAGLVRHRLNRGGNRRLNAVLYRIVLTQAHYLPAAKAYIERRLSEGKTRREAHRALRRFVIRAIWRLWQECKPAEATISLERVA

SEQ ID NO: 451965 - protein, 454 aa, unidentified
MLKKRKGKTSEPMLYCLQPNAAGVDVGATEIYVAVPADRAPQPVRSFPTFTDDLHAAADWLKACNIETVAMESTGVYWIPFFQILEARGFKVFLVNARHVKNVPGRKTDVADCQWLQYLHSVGLLRGSFRPEQAVCTVRSILRHRDSLIRMASSHIQHMQKALDQMNLQLHHVISDITGMTGMAIIEAILSGERNPHRLAKLRNWRIRATEKTIAKALVGDYRREHLFTLRQSLTAYRHYQELIAACDIEIEQYLETFESKVDTTQHPLPKSKEGQKQRSSEARFDLRSHLYRIFGVDLTRIPGLNVLTAHTLLAEIGPDLSRFANASAFASWLGLCPDNRISGGKVLSVKTRKVKNRAATALRMAAQSLHRSQSYLGHYYRRMRVKLGTPKAITAAAHKLARIIYHLVTTGQSYDETICAQNEWRNRQRLEARLRKQARQLGLEIVAAATGTL

SEQ ID NO: 451966 - protein, 435 aa, unidentified
MKKIRTHAAGIDIGARKIFVGLEGKEVKSFDTFTDDLEAAASYLLENNVDTVAMETTGVYWVILYDILEARGLDVWLVDGRSTKQVPGRKTDVKDCQWIQQLHSYGLLNKCFVAEALIKELRSYQRLREDHIRSAAMHVNHMQKALTTMNIRLKEVLSQVHGASGLKIIRAILAGERNPDILVKMCHSSILKTKKELIVKSLKGHYNEAGLFALEQAVTCYDFYQEQIVRCDRKLEEVLIKMSYNSPLQNNPKASRKPIRHHKPEIKNMDNYLLRIFHNRDATVLPGITDYNWLQLLSEVGTDLQKWKTEKHFTSWLGLAPKQHHSGKMRKNYKSKGQPKAGLIFKQAATSLLNSKNIALGAFGRKIRARKGPSLAIKAVARKLAELYWKLFVRGLTYVEEGIKAYQEKILLNKQKSLFKMANEMGMVISYNTAT

SEQ ID NO: 451967 - protein, 433 aa, unidentified
MLKLNYMSTLFVGIDVSSKTNAVYAMDFEENKYISSSFGNNQPGADKLVNMIAECMHKHKNLNTILIVLESTSVYSVHISNFLSASEVLMPYKPYVFCVNPKATSNYRKSYIGMEKTDPTDAYLIADFGRVGRTKKLEPWRGGQFISLKRLTRHRMHLSECITREKTYMVSNLYLKFSELQLLEGDDKPFGSLYGATSSAVLTEFLSPQEIIDMPEEELLTFLAGKSRNRISDLSKTSELLRKAARDSYRLDKCMYEPLSISLASSFNCIHAYQKEIKLIEQAIEKCINGMNPNALLILQSIPGIGPIWASGILSEIGDITVFHSSDALAKYAGLYWPKGDSGDFTSEDNKMSKAGNPYLRCYLGEAANSVRKHIPEYADFYARKYAEVTKHQHKRALALTSRKLVRLVFGLLVKNQLYTGEKLDTEYNIESN

SEQ ID NO: 451968 - protein, 417 aa, unidentified
MESTAQTTLPDVPPNGITCGIDWARDDHAVSIVDARGREVRRATVEHNAAGMRELLDLLSRTGAREVAIERPDGPVVDNLLQAGITVVVISPNQLKNLRGRYGSAGNKDDRFDAFVLADTLRTDRTRLRPLLPDTPATATLRRTCRARKDLVGHRVALANQLRAHLRVVFPGVVGLFAEIDSPISLAFLTRFDCQDRADWLSVKRLAAWLAAASYCGRVDPAVLHGRLTRAPRGAAGDEGAANAHVTRALATALTSVATQIRTLDAQIAEQLALHADAHIFTSLPRSGTVRAARLLAEIGDCRARFPTPESLACLAGVAPSTRQSGKVKHVGFRWAADKQLRDAVCDFAGDSRRANPWAADLYNRAIARGHDHPHAVRILARAWLYVIWHCWQDNTTYDPDQHQALQRLIHLKTAAA

SEQ ID NO: 451969 - protein, 369 aa, unidentified
MAETTEAFVGIDVAKLRNAVAVADAGRDGEVRFYGEVDASPESMRRLAAKLAGKHERLHFCYEAGPTGYGLHRLLTGLGHSCVVVAPSLVPRKPGDRVKTNRRDALSLARLLRAGELTPIWVPDTAHEAVRNLVRARAAAVKDVGLKKRQVGAFLLRHSRLFPRKKNWGARYRSWLETQSFEHPADQIVLQEGIESVRLAEERLARLDRALGEFLPTWSLAPLVEALQALRGVDLVTAVTFVVEVGDIRRFESPRQLMGYLGLVPGERSTGETVRRGSITKMGNARVRHLLVESAWTYRHPPRVGKAKLPKLERVSPKVREIAWKAQSRLTARYRALTARGKKTTVTCTAIARELAAFMWAVAREARPA

SEQ ID NO: 451970 - protein, 370 aa, unidentified
MKKKILYIGLDVHKNTIDVAVATGRANGKVRSYGKIDSTVDAIDKLIKKLKGKDVELRFVYEAGPCGYQIYRHLRSKKINCAVVAPSMIPRRSGDRIKTDRRDAINLVRLQRAGELTSIYVPSVEDEAIRDLVRCRDDMRRFERKARQRLLAFLLRHGHRYPGNRHWTKGFFNWLATVKFSHPADQIALQEYIDTANECSQRLKRITEQIRAHVEHWSRAPFVKAYQALRGVSFVVAVTVVAEIGDMNRFANPKQLMAYLGLIPSERSSGKTIRRGSITKTGNSHVRRALVEAAWTYKLPARKSTILLKRQQGLPKSVCDISWKAQTRLCARYRRLIARGKSRKNVVIAIARELGAFIWAIDKQMQLSIA

SEQ ID NO: 451971 - protein, 369 aa, unidentified
MKKNSKNSKEKARQKALQAKSRKMKLTVGIDLGDEWSHCCFLGEEGEIVEECRVKTTREAMKSRFGELKLAVIAIEVGTHSRWVSQMLSEFGHEVVVANARELRAITGSDRKSDRVDAEKLARYARVDRRILRPIKHRGEEAQVDLMVIRARAVLVKARTQMVNSVRGMVKSFGYRMRNCSTERFGKLTTEVPEKLREQVAPLMEVLEQVQKQIEEYDQRVEKLAKEKYPETTVLRQIWGVGEITSVSYVLTIEDKGRFEKSRDVGPYLGLRPRRSQSSESDPELRITKAGDCFLRSLLVECAQRILSKKGPDTALKQFGLRIEGRGKKKAKKRAIVAVARKLAVVLHKLWVTGEVYEPFPETTQRKAA

SEQ ID NO: 451972 - protein, 488 aa, unidentified
MAQLGKNATLLNWAGEPKTARPARSRTTKGRKGKADPTEGLQVANPNAAGIDIGCSEHWVSVPTGRDQRSTQRFGCCTAELNRLAEWLKGCGVDTVVMEATGNYWVVLYDILEDRQLNPVVVNPRYAKNMSGKKGDIPDCQWMQKLHTYGLFANSFRPGKEIRILRAYLRQRERLVVASSQEIQHMQKSLTEMNVQLANVISDISGETGMAIIDAILTGERDPAVLAKLKGPRIVASKAVLERALEGHWKQEELFVLEQARLSYTHFQEQIQQCQQCIEQQIQAIQSRLPKVGAKPPSSQVSCQNEPAVSQPANTKLPSFDLGAQLKRVLGVDLTQIDGVGPVAAQVILSEVGTDMSRWRSEKHFSSWLGLCPDHRISGGKILGRSTRPVVCRARNALRLCAYTLAHSKSWLGAKYRRLKSKLGAPKAIVAMAHHLARLIYRMIKNGEDYVDKGMEVYEAKYRAQRIKWLQKQAKEMNMELVQMQTVA

SEQ ID NO: 451973 - protein, 448 aa, unidentified
MKTPKPNFESLAQINLHAAGLDIGAHEIYACVPAERDPKSVQVFRTFTPDLYALADWFAECRVQTVAMESTGVYWIPIYEILEARGFEVNLVNAQQLKNVPGKKSDLLDAQWIQQLHTYGLLRASFRPPGEICALRALVRHRENLLRYRTAHVQHMNKALQQMNIKLSSVISDLTGRTGQDIIRAILAGEHDPQRLAQYRNVRCHRSEEEIASALTGNYRAEHLFTLQQAVELYDFYNEKLAECDQELARMYATFIPVVDPETEPLPSAKTYRKTKGNALTFDARTYLYQISGVDLTAIDGIHVGLAQTILAEIGVDMTPWPTVKHFASWLRLCPYRDISGGKVLRTKTQKTSSPATQAFRMAAQAASRSNSALGAYYRRMKAKLGPSQAIVATAHKIARIVYTMLKTKTPYYDMGAEVYEAQRRARAIQQLERKARKLGLQLSPSSG

SEQ ID NO: 451974 - protein, 406 aa, unidentified
MTAVMIGVDPHKGSHTAVAIGAGEEPLGKLRVRASTAQIQKLVAWAAAWPERIWAVEGAAGLGHLLAQQLVAAGERVLDVPPKLAARVRLLEAGDTNKNDPNDALSVAVAALRSKSRREVTAEDYAAVLKVWSKRHRDLSRARNQVACRLHAVLCELVPGGLSKEITAGQAARVLEQVTPSGAIAQARYELAGQFLDDLRNLDAQLRQTKKKLAAAVRASRTTLTEIFGVGPVIAGTVIGDIASISRFATRDHFASYNGTAPVEVSSGGRITYRLSLRGNRRINHAIHMAAITQIRNRHSDGRAYYDRKVAEGKTGKEALRSLKRRISNAIYARLQADTRQAALTDAMGPGGQSGNGSVSSAAGSHPGHQLFGQATPGPATSLRPTTRPNPAPSPKATSRKTQRSP

SEQ ID NO: 451975 - protein, 339 aa, unidentified
MKAISVMGIDLAKNVFHVYAEDRNRKGVVRKRFSRSQIIRFVANTSKCLIGVEACGGANFWVREFKKFGHTVRMIPPQYVKPFVKTNKNDFNDAQAICEAVQRPSMHFVSEKSIEQQDIQILHRVRNRLVRNRIGVCNEIRGFLAEYGIVSGSGVSKLRKKVQEILSTDEGQFTGRAKTVIGELYGEWIQMEERIERLNEQIKGVFEGDESCQRISKIPGVGPITATAIVAAVGNPSVFKNGRQMAAWLGLVPRQSSSGGKSTLLGISKRGDNYCRMLLVHGGRSVVKYAPNKLDKQSLWVSEKRRTRGYNKAAVAVANKNARIIWRMLMTGESYRPAA

SEQ ID NO: 451976 - protein, 388 aa, unidentified
MYYVGIDIAKYKHDCYICTSEGVTVLESFSFDNSNTGFKELQSALDHLDHSQQIKIGLEATGIYGKNLKLFLSSIGYDFHEFNPLLVKRFHDSLSNRKTKTDKIDARIIALYLSTGASRTYLYSSYHTQALKQLSRTRNKLIRSRSDQYVIITNVLDVEFPEFKAFFHNKLSDTALFLLNKYKTVDRMKRLTYQDCVLLHNKSRRIPTSSFEELRDLAKHTIGHHFNYNDLILSSALQIVNTLERQIESIEKEILAIMEELHSPIDTIPGISTLSAATILGEFGDFSKFSNPKQLCAFCGVEPAIYQSGTSFHNGRMVKHGSSELRYVLFNAVPYLVIHNITFREFFYKKLHEGKNYRVAQSHVVKKLLRMIYHLELTGESFDPTFLY

SEQ ID NO: 451977 - protein, 485 aa, unidentified
MAKHKMSTFERLKSGRLNRKQRRELERQVAAADPGLTIVHANAGGIDVGNESHYVAVPPDRDPNPVREFGCWTAALNQMAEWLKSCRIDTVAMQATGVYWIALYDVLEQHGIRVVLVNAQHTKNVPGRKTDVQECQWLMKLHTYGLLRDSFRLAQEMESVRTIWRLRDRHVKEAGRTVQHMQKALTKMNLQLANVISDINGVSGQEIIAAILKGERDPWKLADLKDYRVRASREEVARSLEGNWREDVLFELQQAVDSYHFAHRQMQACDRKLEDYLASLPARMLDIPAQPEGAQAATPKKNRKKAKKPTGNEPHLVLEAELKRICGVDLTSIDGINVMTALTIISEIGTDMSRFKDENHFASWLGLTPNKDVSGGKTVGRGKRKVKNRVAVALRTAATTLLRSNSYLGARYRNLRRKLPSLAAAVKAMGHHLAILIYRLLTKGEAWVDRGATQFERRRTEHELASLNFKAQAKGFKLIPITEAS

SEQ ID NO: 451978 - protein, 371 aa, unidentified
MKKIAYVGIDYHQNTLTIAVRVEGSKKIQETVHLRNEDKLIRKYMKKLSKEFEIKACYEASSSGYYFQRKMQSWGYRCEIIAPCSLPKKRANRRKNDFRDARDLAHNYANGTLSVVHLPTEEDESVRSLVRCGMAFKETEKRAKHQINSLLLSQGLRWARSKWTFQHRKWLWELKMPNEYLQQVLDEHLSHLDYLQSRIEHLDQQIEQVAASDLYAPVVKDLRAFKGIGTLSAMLLIAEIIDFRRFSNPRALMAFLGLIPSEHSSGEKQRGGPITKTGNSRCRSQLIECVQHYVKKPQISYLMKADLAQADPHSAGIAVKCLKRLHKRYWALTMKGKIRSVALTAIARELVGFIWAVMQPQTVRAQQCPVH

SEQ ID NO: 451979 - protein, 355 aa, unidentified
MTAGAIEPGNECGAPFAHSPKSPDSRLGRRRPSPNSQARAAGATREGPVFAGIDVSKDRLDVHVRPSGECFSVARDGAGIAALAERLRAAGPTLVVLEATGGFEVTVAAGLAGAGLPLAVVNPAQIRAFARAVGRLAKTDRLDAEIIARFADQIRPEARPVAGEEAQALAELVARRRQVVEMIGMESHRRRQARSARVLKGVDRILAALRAELAELDGEIDGRIKSSPAWRAAEDLLTSVPGVGPITARTLIAELPELGRIDRRRLAALVGVAPVNRDSGTMRGHRAIAGGRTDVRNVLYMAALTATRSNPVIRDLYERLRLRGSPAKAALVAAIRKLLTILNAILRDRNPWQSA

SEQ ID NO: 451980 - protein, 349 aa, unidentified
MWSIGIDVHQRSFAVCILDEHGKMVKQMRLRGTLAKLLDTIRSIKEPFAVCYEASCGYGHLHDLFGKLAQRVVVAHPGQLRLIFRSKKKNDRVDAKKLATLLFLDQVPTIHVPSVDVRSWRSLIEFRHRLVAKRTRVKNALRAVLRGHGVEQPLGKKLWTRGGVAWLGAVELPTRQTALQRDVGVDELEHLETQIKRVEKELNAMAEEQPGVYLLRTIPGVGPRTAEAVVAYIDRADRFARNKQVGSYFGLVPSQDQTGDQNRLGHITREGPATVRKLLTEAAWQGIRRSPHIRAYYERVQGGDKERKKIALIATAHYLVRVMHSMLRSGELWRFDGEKTEHRVDQQAA

SEQ ID NO: 451981 - protein, 387 aa, unidentified
MPQPNDLSRSLAALDQDNTLIAVIEMSQASWLVGAIVPGVERHPLKKLMPDGEALLQLLQRWREAATQAGHPIARIAVAYEAGRDGFWLARWLRARDIEAHVIHASSVAVSREHRRAKTDRLDVNLLQRAFLGWLRGEGDHCTMAAIPTLEAEDARRPSREHEALVGERTRILNRMKSALARLGIRAFKPNLRKAAERLAALRTPEGSALPPNTMAELRRDMARLQLIKEQITDIERARLERLRQLPADPAHARLALLTRVVGLGIETADVLVHELLIRNLRDRRAVARYGGITGAPDESGARRRQKGLARSGNARVRRAMLQLAWRFLLFQKQSALVKWFQARTADGRPTTRKTMILALARKLLIALWRLATTGEVPQGVVLRPAA

SEQ ID NO: 451982 - protein, 407 aa, unidentified
MEVICPRCAGLDVHKQTVVACARIVGEGPALQEVRTFATTTSGLLALADWLESLGVEHVAMEATGVYWKPVWHVLEGHFELVLANAAHVKNVPGRKTDVNDAMWLADLLAHGLIRASFVPPVAVQELRTLTRTRKQFVRERSAHAQRIDKVLEDANLKLGVVLSDILGKSGRAVLQALIDGHTDPERLASCISTRVKASRAELLEALHGHVSAHHRFMLKLHLGHIDALDQAIADIEKEVGLGLEPFRQAAKLLSTMPGLSAVGSNVVIAEIGIDMSRFATPGHLLSWACMCPRNDESAGKRRSTRLRRGGKWLKTTMVQAAWAAVKVKGSYLQAQFHRIRARRGAKKAIIAVAASMLTAAWHMLRDGTEWHDLGAAHFDRADAHKTANRLIRRLQQIGYTVQVTPA

SEQ ID NO: 451983 - protein, 298 aa, unidentified
MRLYAALDVSLNKTAVCVMDHEGHLHREAEVATCPDALAEFLRGYADGLERVGLEAGPMSEWLVRGSGGHGVEAVLMETRQAHKALSAMTVKTDRNDARGLAHLLRMSWFRPVHVKAVSAREQRALIRARETLIRQLRDLENSVKGLLRGFGLRLPPLLRARWANAVRALIEGHPSLPMIFAPLLQTREALREQLAGLDRQVRNAAREDPVCRRLMTVPGVGAIVALTYRSTIDDPGRFRSSRSVGAFLGLTPRRYQSGETDRVGDISKAGDPAARVALFEAAHVLLTRVARWSTLKA

SEQ ID NO: 451984 - protein, 340 aa, unidentified
MEEVSIVGVDLAKQVFQVHGAASDGRVLFRKKLSRLQFPKFMATLPPCVVAMEACGTAHYWGRELAGLGHDVRLIPPVYVKAFVKRQKNDAADAEAVAEGAMRPTMRTVAVKTSNQQARAMLFRTRDLLVGQRTQMVNALRGHLAEHGVIVGKGLGNVERLSTLVTSDNLPELVQSMSRLYLSQIAQLNEEIDQIDRRIAAEARQSDVVRRLQKVPGIGPICAMAITAFAPSMEEFRRGRDFAAWLGLVPRQHSSGGKQKLGRTSKMGQRDIRRLLIIGAMSVVHWKGRGGGRPGSWLSNMLARKPRMLVAIAMANKMARVVWAMLVRNEDYRDPTGAVC

SEQ ID NO: 451985 - protein, 343 aa, unidentified
MKQQQYVGLDVSLEQTSICVVDDAGATIWRGKCRSTPESIHTVIAKHAPEAVRIGLESGQLSTWLFHELKARRLPVICIDARHAKAALSLQINKTDANDAHGIAQIVRVGWYREVAVKSMDSHAIRAVLVARAQLVTQKVKLTNCIRGLLKTFGIVLGGGKGRRFEAMVRERIAENPMLTTSIEPMLVVLLTTREQLAVFERLVRRRARADHDVRRLMTVPGVGAVIALAYTTTIEDPARFKRSSSVAAYLGLTPRRYQSGEMDRAGHISRCGDAMLRTYLYEAANVMLRRSTRPSQLSLWGRALSERIGARKSLVAVARKLAVVLHSMWRDRMEFRFEQAAA

SEQ ID NO: 451986 - protein, 370 aa, unidentified
MTEPTPLFVGLDVHKDSIAVAQADGATTAPPVFLGSIGTRQADLNKLIRRLQTKTPALVFAYEAGPCGYQLYRDLTAQGFDCRVVAPSLIPKKPGDQIKTDRRDALALARLLRSGDLTPVYVPTVEDEAIRDLCRARDAARCTLRDAKLRLKAFLLRLGLHYVGRADWTAAHRRYLAKVVCPTPAQQIVFQELVHAVEEQVARLQRLEAELKDLGPTWRLYPVVQALQALRGVQWLVAITVVAEVGDLTRFDSPRQLSAFVGLIPSEDSTGRRRRLGSITKTGNSRARRALVEGAWAYRYPAKVSEIIQRRLELLPTPIQDLGWKAQVRLCKRFRRLVSRGKHQNVVVTAIARELLAFMWAIAKAVPIPA

SEQ ID NO: 451987 - protein, 316 aa, unidentified
MTPQECYVGIDVSKKHLDIAVRPGDEHWTVANDEDGIDELVTRLRSIGPRLVVLEATGGIELAATGRLAGAGLLVAVVNPRQVRDFARAIGKLAKTDRLDAQVIARFAEVVQPTPRPMRDAEAQALSALLSRRRQLVGMLTQEKNRLHAAQPSVQHDIRGHIVYMEKRLAKLDDDLGSTLRKSPMWRERDDLLRGVPGVGQVLSVTLLAEVPELGKLNRKQIAALVGVAPLNRDSGLLRGRRTVWGGRARVRATLYMATLTATRYNPVIRVFYKRLCASGKAKKLALTACMRKLLTILNSMFRHHTAWQPDYALNA

SEQ ID NO: 451988 - protein, 320 aa, unidentified
MTSRGAEKMNNDTIGVDVSKDHLDAHRLADGASRRFANDKCGRKAFVKWFAQTPVQRVVFEPTGPYHRAFERALGAAGVPFVKVNPRQARRFAEAIGKLAKTDRLDAAMLARMGAMLELKTRPPQSEALLELKELHLAREALVKDRTAAKNRGKVLAAPLLKRHNAQRLEQIKRQITAIEAAILEQVQADPDLAQRFAILTSIPGVSAITAFALLIEMPELGALEPGQAASLAGLAPVARQSGRWTGRAFIRGGRANVRQAVYMPALVATRFNPDMKAKYKQLINAGKPAKVALTAVMRKLILLANALLKANRSWAPKPA

SEQ ID NO: 451989 - protein, 385 aa, unidentified
MFQFSGSTQAAVDYDSTIIGALELSEKKWVLAVQLPGVSRHSRHALEACGDGLASFVERLKAKCAAAGRKIGRVILTHEAGRDGFWLARFLSRRGIEVHVIQPSSLPVDRRARRAKTDIIDVEMLLRTLMAWLRGEPRVCSMVPIPSEADEEARRAYREREDLTGERRSIVNKIDGILATLGIKAYKALRRDRREQLTSMRQPDGDPLPEKAKARIERLLDRLELVLKLVEQVEATRDAVLKKDRPADEAERMIRSLTELRSIGPDFATLLVREAFVRQFRNRRALGGYVGLGGTPFSSGGSEREQGIGKDGNRRLRAAMVELAWMWLRWQPDSALSIWFRARVGAMGGRVKKIMIVALARKLLVALWRYVKDGVIPEGAKMKPA

SEQ ID NO: 451990 - protein, 444 aa, unidentified
MGKPQVFDDQEQGRVFERVAAVDVAKASGVVCMRLPHPAQPAGRRSQVWEVPATMRAVTELAGRLAAEGVQKVTLESTSDYWRIWFYVLEEAGLAVQLVNASQARNLPGRPKTDKLDAMWLARLTEMGLLRPSFVPPAEIRVLRGYARARTRLTHDRTRCLQRLEKLLEDALIKVSAVASKLTTRSVQDMIRAMIAGQRDPQVLAGLARTRMKAKHDALAEALAGLFTDHHAELAQLLLDQIAFLDTQIARLTMLTGEQLASIRAAWGIDADGATGPSPGAIALPAIARLDEVPGVGAELAASIISETGLDMTRFPSPGHLASWAGLCGRTIQSGARTRTGKGQGNAWLRGYLGRAAIAAARTSTFPGERYRRLARRRGAARAQVAVARSILIIIWHLLNDPTARYHDLGPGHYQARTDKSRKARNHIRQLQALGYTVTITQTA

SEQ ID NO: 451991 - protein, 334 aa, unidentified
MITYNYFIGADIGKKTNAVCVIDAQEKRQLELSIPNTKAGMEALLKQLIKLPHFGLETTLFCMEHTGIYCQPMINFFYPIGANLWLQSAVHIKRSLGLTRGKTDKADARLIAKYCIRHQRDQSLFKLTDKVLATVRQLAQQRERLMEMAKAFTDLSQDYQAMGLLAELKLHQQTSEVALVALQKQIKLVEAQIEGHIKASPELKSNMDLLMSIPGVGRQTALFMLIFTGNFTRFTDAKKLASYAGVAPFAYESGTSVRGRTKVSRMANTKLKHLLHMAALAAVKAKGELRDYFERKVAAGKRKMSVYNAIRNKLVHRMVAVMERRTAYTVAFEK

SEQ ID NO: 451992 - protein, 381 aa, unidentified
MDILHPSCAGLDVHKKSVTACVTRLVDGELLKETREFDTMTGGILALADWLEQLGVRQVAMESTGVYWKPIFNLLEDRFEVMVVNAQHIKRVPGRKTDVKDAEWIAQLLQHGLLAPSFIPPPPFRELRDLTRCRTQLVRQRATVANRIQKELEDANIKLASVASDILGASGQAMIEAMIAGDDDPAELADLAKRRLREKIPQLQKAPRGRVTEHHRFVLRSFMDQVRHLDQQIARFDERIGELTTPLAEAKTRLQTIPGVGPASAEVIVSEIGVDMSRFPTSGHLSSWAGMSPGNDESAGKRRNAKTTKGNRWLRSTLVQVAWAATHTKATGFQAMYGRWVKRMGKKKALVALGHKILVLVHKLLTTGTDYQEPELPPQLA

SEQ ID NO: 451993 - protein, 502 aa, unidentified
MEMVCGLDLHRSQITFRTVDLRTGEVQRGKIHPGARDAFRDWPGGFEPGTDAHFALEGTTGWRFAVEEIERLGYAAHLADPAELSERRGPKRRAKTDHADCELMVNLVLQGRLPESSIPPAHILELRALVRLRKTLVDQRIEWQQRLQAQLFHQGVVPGLRLCNVEDRRRLGGMEISPAGRQMIGTGLVMLDHFDAQLNPLSTQLVGLAKAQPGCRALEHELYGVGWLTAVAIVAELGDCRRFHSADQAVRASGLDITVYESNAQAPGWPPGPAGSAGAALGAVRGGPVRRPEELAGPRLLPQGQGPHRPQPGLPVGGPQDLPPGLPHPQGPRRRRHGATRAGIGSPRPPGCLRSFGEGARPAHHQDDDLPPGSRNASAARVPTLGDLQRSSGRSCAWGPPPSTIVSPGHPPEHRDKTGRPAHFPPPDPVGTSSTGGAYGLILLLLPAGSSCCSPPTSRSFVLAALRALHLDPCVAQQEPCSHEGRRGNRQQNALDLGPLYS

SEQ ID NO: 451994 - protein, 354 aa, unidentified
MKSTKNKFNGTAFVGIDVHKNSWKVCLLSEGGFKKEFSCNPETQVLISSLLKLLPNFYFKCTYEAGFSGFWLCDQLNEHEAFECMVVNPADIPTSNKDKSQKEDRRDARKIAAQLKAEALQGIYVPSEEDLALREIQRIRYTITSDLTRWKNRIKSFLFRHGITPPKEQFPCSSSHWTGKFIKWLKSIEFRWVALRFSLDQLITSVEVLRDKKKEILRELKYQIAASKYNASYLKLIEIPGIGTIGSATIMTEIIDIKRFSSYEKFHSFIGLIPSTNSSAETERVRGITNRSNKRIRSILVEASWIAIRHDTDLFNLYHQFKQRMNANKAIVRVAKKLATRVRYELLNLETMTM

SEQ ID NO: 451995 - protein, 391 aa, unidentified
MTFYVGIDIAKFKHDCFIVDEQGCVIRDSFSFQNDKDGFVSFLSILKNLKPKGQIKIGFESTGHYHFNLKLFLETNGFDYVEFNPLLVHKFVTTQTLRRTKTDKKDSFMIAKYLMTVDYKPYTNTFYHISNLKSLCRLRETLITDRTRFLNQITAYLDQIFPEFKVLFNHHLNKSAFYILTNYMSPKKISRITLDGYNKMKKKLKNPISYQKFSQIKEAALNTVGHSSEALEYVLKTSLSTYLFLVKQIETLEGKIVKIYESLDYHIHTIKGVGILTAAGIASEIGNFNRFSNSNQIQAFAGLDPSRNDSGIALNKVGKMVKHGSSYLRKYLMNSAETFYVFNPEISDFYWKKRSEGKHHRVALSHVARKLVNTIFSLEKHNKDFNPSFVK

SEQ ID NO: 451996 - protein, 375 aa, unidentified
MKEKVRFLGLDVHAETIAVAVAEQDGEVRSLGTIANREESIRKLVKKLGPVEQLRACYEAGPTGYVLYWQLTQLGVECAVVAPTLVPVKAGDRVKTDRRDAEKLARSHRSDDLTAVWVPDEGSEALRDLVRAREAAKQDQLRARHRLSKFLLRTGRRPAMGLKAWTERYLAWVQQIQFSQPAQEFTLLDYLHEVQHMDERVKRLEQAITEAVKLAPLQVQEVIRGLQALRGVAHLSAVTIAAELGNLSRFESARKLMGYSGAVPSEDSSGQRQRRGNITKTGNAHLRRIAIESAWSYRFRPAIGPRLRQRQEGVPEEIKEIAWKAQIRLHKRYLKLTAAGKDKKKIITAVGRELLGFVWAIGIKAETAGKLQMAA

SEQ ID NO: 451997 - protein, 348 aa, unidentified
MLIIGCDYHPGFQQIACVDTETGEADERRLTHREEAEQFYRALKTRRVRIGMEASGHARWFERLLNDLQFELWIGDAAEIRTKRVRKQKTDRQDAQLLLKLLMEDRFPKIWVPDAENRDLRQLLWHRHRLVQMRTRIMNQLHVVALNEGVRRKKALWRPAGRSELESLVLAPWALRRRRDLLDLFDQLTPKIHDLTRALEEEVEKRPIARRLMTHPGVGVLTALAFELVIGTPERFGCGKQIASYVGLVPTEESSGDRRRLGHISKQGNALLRFLLVEAAQVTVRSQPQWRSKFFHLALRRGRKIAKIAMARKLAVHLYWMWRQGMDYGQFEKLGSHAGEPGNRHGAQ

SEQ ID NO: 451998 - protein, 404 aa, unidentified
MISVGIDIAKRKSTVCALKDGKKILWKPFNIYHQRSDVESLIAKIKALDEEVKIIMEATGIYHKPLLISLKDAGLFVSVINPLRMKRFCQALSFRNVKTDNSDSLSIAEYGLINWFELKEAFEDNDKFKELKELNRAYQHYQEIRIKEINYLGKEIEKRHPGLKKLIAHSNNDYKKDKLLDFVERWPNSQKIRKRSEIQFIKEYENWARKKGYHPDSSKARLIYENTQKSIPTISSSNSILDANVLESIKIMRTINKALNNILSQMQKIATGLEEYEVLKDFTGIGDKLALQIASEFGDLSKFKNKKSLISYVGIDSPAYQSGEFKGTRRKISKRGNAILRKVLFLAMMCMKRSKKINDPIYVYVLKKESEGKAKKVANIAGINKLLRIYYARVMEVKEYKKIS

SEQ ID NO: 451999 - protein, 359 aa, unidentified
MKATLSKKQRFFNKINLTTDDDLYIGIDVHKASYHVALYLNGVHAIDFITPANNTKLCASLKKLKPAIKNIVYEAGPTGYSLARQLQLKSFPVQVIAPSKTPQYAARDSKTDRLDGRKLAEFAAKQLLRPIAIPTRRQEADRQLPRLRIQFVKKLKQTKLQIKSFLLQHGISEPQNLRYWSQLAIEELNKLQLLDPLRYTLDLLVTEYKFLNEKIKDIDRKLEEIFAQIPYAKKIQILQTHPGVGRVTSMMFAAEVFNPKRFNNKEELAKYVGLAPTIIQSGQSLRDGPISKTGRPQLRSTLIQAAWVWVIKDQQARQVYLRIARNTGQKNKAITAMARRLAIHLWKMLCNNEPFRKVA

SEQ ID NO: 452000 - protein, 478 aa, unidentified
MVTARPSHLNRKQRRELARRLRVEDPGLTVMHPHAAGIDVGTSAHYVAVRPDRDPDSVRRFECFTADLHRLADWLVHCGVTTVAMQSTGVYWIPVYEILEARGLEVYLVNARHTKNLPGRKSDVQESQWLLKLHTYGLLRNSFHPTAEIRVVRTSWRQRGDHVRAVSTCIQRMQKVLTQMNIQLANVISDLSGWTGQRIVRAMLAGERDPEQLAALSHPGIHATRQTIARSLEGTWQPDLLFVLQQEVTMYDAYLQRIAECDQALEQHLKGVADKVADTPSGAEPQPPARETRRAGPKRRRKAGSHAPQFDLGRELHRISGVDLTRIDGIDVGVAQTMISEVGLDMARWEDEDHFASWLGLCPDNRITGGKILRRGTRHVINRAATALRLAATTLLRSQSYLGAQYRRFRSRLGAPKAITAMAHKLAVLVYRMLKWGHEYVDRGMQYYEERHRDQQIRLLKKRAAKLGLQIVEPQAAA

SEQ ID NO: 452001 - protein, 407 aa, unidentified
MNNMQRYFGLDVHKEKTVIVGVNQNQEVVMPAKQISTRALLTWARINFRAGDKVALEATSNTWWLHDQLKALPFEVDVLVANAHKIKLISSSRTKTDKHDALVLAKLLAANLIPQVWVPPLHVRELRRLVAHHRHLTRDRAAAKNRLHGLLYRYNLSLPQGNPFHVDNQVWWDKLPVSSVEKMCIRHDLSFLQQLDIWIHEAEAEMARLSVQSPWREQVGFVMQLPGIALQSAMTILSAIGEIERFPAAKQLVGYSGLGASVYASGETHRTGGITKQGRRELRKILIESAWSAVRYSPHWQRQYCQLTKRMDKNKAICVIARKMLVVVWHVLSKRQADRFADPQAIGRSFFNWGARHQLATGLGLSRAQFVWQELDRIGFGQNMSEFRYNDRMVRRPTMPSVSISAA

SEQ ID NO: 452002 - protein, 415 aa, unidentified
MQFILFGGANMYNAVGIDISKGKSTVAVLQPGGIVVKKPYDISHTASDLKDLTDYIRSLDGETKVVMESTGRYHEPILRTLSGAGLFVSAVNPHLIKNYGNNSLRKNKSDPIDSKKIARYTLDNWTELREYSSMDTTREQLKTLNTQMSFFTNQKVAAKTNLISLLDMTYPGVNDLFDSPTRDDGSEKWVDYAASFWHVDCVRKISLNAFTERYRAFCKRHGYCFQPSKPEELFNASKELVPVFPKEKEYKEMIQMCIKQLNVISANVERTRQKMNQLASTLPEYSTVMGMCGVGPTFGPQLIAEIGDISRFNHREALTAFAGVDPGVNESGKFKSKSNKASKCGSARLRKTLFLIMSCLLQTQPVDDPVYCFLAKKRSEGKPYHVYMTAGSNKFLRIYYGKVKECLRAQAETDN

SEQ ID NO: 452003 - protein, 370 aa, unidentified
MSVRRILAKTIDTDLEYEAIGIDLAKNCVSAALLTTDGEVVCIDRLDYSELEKSAQALSSTTFAMEPCTEMNYLVQKLEAWGHRCLVIGGKNVQNYVENHFSGQKTDLNDAQALAFLAQDTQLRTIKAKDIEQQKYASLTTLREQYIKQYRQTIVSLKGICQAWGLNISKGISGKAQLKDLIENHAAFPEELRESLVDMVTHAQTAQKALNKITKTLEELAKSDKVCQLIQTIPGLGSICSCRLRATVGDIKRFKSPKDFPAYYGLVPRSIATGHNERKGKITHRGDRTMRSLMVQGAGCVIRLATCGKLKSKQLTKWILKKQKEKMPWGKLVCAVAAKLLRIVRAVLISSKPYNPKIAGVAKCSLSKGS

SEQ ID NO: 452004 - protein, 328 aa, unidentified
MTDSTSASSTSASTEVYVGIDVSKTRLDVYVDPTGQTLSVDNTPAGIRSLRATLQSLNVKLVLLEATGRYERRLASDLLDAGIPVTVVNPRQARDFAKSLGKLAKTDKIDAKVLAQFARLDHHRLAEKTPENLALLDQRVTRRRQVVAMLATEKTRLEQLDDKLAIRTVKKVMRVLDQQREDLDRDIARMIESDDDWRNKAQILDSAPGVGPDTANQLVVDLPELGRLNRQEIAALVGVAPMNCDSGSMRGQRHIRGGRADVRTTLYMAAYNAMRCNPTIHAFAERLKKAGKPFKVVATACMRKLLIILNVMVKTNQHWNPQLFLKTA

SEQ ID NO: 452005 - protein, 390 aa, unidentified
MRRPCILPEGGEKTQTRQRRGRSNALEVNKPVGERDRRAAAKPAGNPNSRRGREGEPELRKAGGRPGRKWVKVMNQYTELFVGIDVAKRTLEVALSSGESWRVNNDAAGVARLAQELAARAPALVVLEASGGYEREVWLALIEAGVPTARVNPRDTHHFAQAHRQLAKTDRLDARGLVLFAAQIRPQPDAAPGAADEQLRELVMRRQQLTAMLTAERNRLQQAHSAANRRGIQTVIRFLERQRQAIAEAIEKHLRANASLHEVSELLQTVTGVRAVVAGTVLALLPELGRLSGRQAAALVGVAPYDRKSGDWDGRSHIFGGRTEVRCALYMATLSAVRWDPYLRAFYQRLIKRGKEKKVALTACIRKLVVMLNAMVKTRTPWSPPCPNLE

SEQ ID NO: 452006 - protein, 356 aa, unidentified
MSRDLKYIGMDVHKEAVVIAVRNSTGQLVMESIVETKASSLLQFIHGLQGELHVTWEEGTWAAWLYDLLKPHVHEVLVCNPRRNALLKEGSKNDKVDAGKLSDLLRTGMLRPVYHGEHGLRTLRELARCYQTISQDLNRVMNRVKALYRGWGIACAGTQVYAPRYRQEWLEKIEHAGVRRRAELLYQQLDSLQALRRTLRSELLAESRKHKASKLLRQIPCIGPIRAARLLALMQTPHRFRSKRQLWTYSGLGIETRDSAQYRFVRGQLQRAKKPQQIRGLNQNHNHEMKEIFKGAATRASCGVGPLRDFYVALLDKGMKPEMARLTLARKIAAIALILWKKEEGFDAEQLKTQAA

SEQ ID NO: 452007 - protein, 370 aa, unidentified
MNPIYIGVDFHSRQQTICYLKTETGELVIKELKHQDKAQILAFYQQFLAPLIIGLEASGYSPWFEEMLAKLNCEVWLGDAVEIRRRARWRQKSDRRDAELIWDLMVHNEFPRLHQPSLASREVLRMLRYRQKLIKMRTMAKNSLQAIAMQAGLAKGARLFSTAGQEEFRKATMSPVLQWQRDHWFSLLKPLNEQLLETMVWFKAQSKNDSQVTRLRTHPGIGLLTALCLVHTLQPVSRFRNQRKVVAYAGLDPMVRSSAERAIYLGISKAGSRMLRYLLVEAVHTTVRYDEDLKRFYKRVAERRGRAKAKVATARKLLIRAYIMMRDEIDYAEFQRRAVAVRLARTGQGTSPTTGGLPGVLIGQSTSPGV

SEQ ID NO: 452008 - protein, 413 aa, unidentified
MKLLEYIEELIAQESITMENVIIGIESTGHYWKNLYNFFLEKNIEVVMVKNKTVKLKREIKYPYKGKNDSLDSVCIALSLKDDDYIRIRKSNENYESLRILSKIKDERVKANTQNKNRIIKWLDKHNQTYLKTFVDPYCKTGIELLKCFPGEADIKEKTVDEIIEILRSNNSKNKLQYRKISEYYELLIDILNNIKEIPIGARKEIENLIRLFEDTENYLETLQKDIDELSNEMELPVERFSRLKGLGKNEILDLISEIGMIENYKTSKHLQAYCGLRVIAYKSGEYQIKKPKISKAGNRKARRILFYMALILIARNPDWRKLFAYYLSYNRENQKSKKEMLIAVASKLCRTIFGMLKNDTEFDRKLLFRGLDFSKCNKERFINEYVGEKRNWVITDEELEELFGKSNTKKLF

SEQ ID NO: 452009 - protein, 342 aa, unidentified
MTMIGIDPHKATHTAVAVDDDENVIGEFTLGASKDQVERLTGWAEGLGKREWAVESANGLGYLIARQLVTCGETVFDVPPVLASRVRLMGSGKSQKNDPNDARSIAIAALRSDRLGIVKPDDHVVVLRLLVKRHRDMARLRNKHCSRLHALLLELEAGGIGVKISVSNASELLDRISVTDEAARYRILVAREVVDDIARLDATLSASKKRIAVAVTASGTSVTNIVGVGPIGAATIIGYTKDVSRFPTKGHYATYNATAPIEVSSAGNTRHRLNLRGNRILNHAIHIAAVTQLRHDTIGRVYYQKKIAEGKTPKEAIRALKRRISDAVYRALIADTRRTPTS

SEQ ID NO: 452010 - protein, 418 aa, unidentified
MQMELSQFAAIIGIDWADKKHDICIQVTDTGQRKTYQIQHKADKIDEWARSLHRQYGGPIAVALELSKGPLVSALQKYDFFVIFPIDPTTLANYRRTFTPSGAKDDPTDAEYALELLLTHTGHFTALRPQSVEMRTLMTLVEQRRRLMDDRVRITNRLRSALKQYYPQALEWFDRIDTQLFCDFIKRWPSLAQARRARKSTLEKFFHEHHMNRKALLERRMTAIKSALPLTEDEAIILPYRLQATTLVAQLEVALAAIRIYDEEIASLAPQHPDYCLFDCLPGAGPSLAPRLLVAFGEQRERFSKAAELQKYAGIAPVTERSGQSTWIHWRWQCPTFLRQTFVEWAAQTINKSYWAGLYYYQQRAKGCSHQAAVRALAFKWIRILYRCWVTRTPYDEAKYLKALQERGSPLLKIAEAA

SEQ ID NO: 452011 - protein, 424 aa, unidentified
MNNNTEFKATIGLDWADQKHDVWIHPCDGSKAEHVRLEQTPEALHEWVARLRQRYGQGQLAVGIETSRGPIISALMAYDFIVLFPVNPKALKDYRGAFAVSGAKDDRTDAQLLEQFIRLHADKLRPLRPDTELTRKLAGLVENRRHLVDERTRIINQLHAKLKTYYPLAEALLRGQMNSAMAAEFLIRWPDLQSVRAVGARALRAFFYKHNSRSPRTLEKRLEAVKKAQPLTSDAALIEPARQLVVALAAILKILHRSVAGLDQAIQQAMDGHPDAPIFRSFPAAGPALAPRLLVAFGTQRDRFQSADEVAQFFGIAPVVIESGNSKTTYMRHRCPKFGRQTFHENASCAAKLEPWARCYYQRQRKRNQDKHHQACRAMAYKLIRIYFACWKNRQPYQSDIFVRALARNGSPLHAELAKSNSGE

SEQ ID NO: 452012 - protein, 468 aa, unidentified
MIGSGSCFFTAPKGFICATVRLSGAPVTTKGYMVTESDLKAFLRWVKDQGDIIVAIEGANGFSRPLEKALREAGVIFYSFKPADTNTFRKAVLGQNKDNRKDAESVARYAMALEAQGKLERYRRVWFADAELQLLTRFYERKSQAMTAETNRLWKLLRVACPDLYLALGGDHPEVELSENILKSQGILTLFSEKPQLGEWKLLTEKQLLEAMGGGKYKGREKLIQQLRILAPSLPPVSAAMALLIRSSAQQIQRLKAEQAEITKMLEELTRQNAAVQVLKQIRGIATRTAASMIAEIIDIRRFPREDSLACYSGLGMAEHSTGDSFRMVPTRMFNHRLKDAFMTAARNFVLYNPQSHLAGYHRNLVKRRMSSMEATKRVARALVRVIYRTLITLVAQQSDTPEADRTKEGEGEMASGLSRSDQSHKSNISPSSPRTSKTPGTKGVKRATARTVRNRSRGRKGVSEKTA

SEQ ID NO: 452013 - protein, 387 aa, unidentified
MQKLHDNSKASPAAFMQDSTLIAVIELSLSSWLVAGLIPGVSREPLKKLEPNPEDLLKLLHGWRDEAIKAGRPITRIAVAYETGRDSFWLARWLRERGIDAHVIHATSVAVSREHRRAKTDRLDTAMLKRGFLGWLRGERGHCTVAIVPTMEEEDAKRPHREREGLVHEQTRVVNRMKSALIQFGVRNFNPKLRKASVKLETVRTPEGKSLPPNTIAALRRDMERLRIIKEQIKAIEQARLQQFAQKPEALANRMIYLLVRIYGLGLETADLLVHELLSRTLRDRKAVARYAGLTGSPDESGSKRREKGLSRSGNARVRKIMIQLAWRMVKFQPDSALVQWFKQRTENAKRSRKPMIVALARKLIIALWRYANDGVIPAGFRLHSAA

SEQ ID NO: 452014 - protein, 451 aa, unidentified
MQKKELSLQIVHPHAAGIDVGSRSHFIAVDQDPKHVMEFGVYTRDHLLIIEHLGKFGVTTVAMESTGSYWQTLFNALQSAGFDVHLVNGSQTKNVKGRKTDVIDCMWIQKLHSLGLLSGSFLLNDYVQQLRTYYSHRQHLLEQTSKYISKMQAVLRLMNIRLDVILRDTTGKSGIAVIQAILDGERDPVMLSSFVSKGVKKSRDEITASLQGQWRDDFIFELRSCLSLYWIYEKAILECDAKLESELLAKAPSVDTQVDLSQTRKKPLKHSPKFNIQQVSFAFFKTDLYQIPGVSHTTVLCLLTNMGNDIQKFATGKQFASWLRLVPNNKISGGKVISHKTPPGKNQIARCLRMAANSIGNQKNHPLTPFFKRIAFRKGRVAAITATARKLAIIIWNMIAKQQAYSAFEYEKLDQRRKYSQMKNIQTRLAKLSLTPEELRGVFERASLSTI

SEQ ID NO: 452015 - protein, 343 aa, unidentified
MTEVSTIGLDLAKNVFQVHGVDGLGETVIRRQIRRRQVLPLFKKLPPCLVGIEACATSHYWARELDALGHEVRIMPANYVKPYVKRNKNDAADAEAICEAVTRPTMRFVTVKTAEQQSVMMVHRTRALLIRQRTMLVNAIRAHLAEFGIVAPVGLKGLRTLLAVVSDPKDERVPGVARHCLVSLATALMIIEQEIAGAELRIHAWYRSNEASRRLESIPGIGPITATALVASVTDPSNFKSGRELAAWIGLVPRQSSSGGKERMGRISKQGDRYLRWLLVAGAMSVIRHGRKNNFEKRPWLAGLMARKPAKVAAVALANKNARTAWALLVSGERYRPPVTSAN

SEQ ID NO: 452016 - protein, 409 aa, unidentified
MPLTSPLIDQALALKASGSGVNECNRSDDNVGSQVRVELVVPKPTNGLGERSRAMIIIGTDYHPSFQQIALVDTESGEFQEKRLTHREEAESFYRALAGAEKKVRVGMEASGYARWFERLLTELQIELWIGDATEIERKRARKQKTDREDAQHILQLMLKDDFPKIWVASWENRDLRQLLWHRHRLVQARTRIMNQLQAVALNEGLHYKKRLWRGSGRQQLEGFQLGPWASRRRRDLLELLDRLNPTIEELSQAVEQAAEKCPEAQRLMTHPGVGALTALAFVLIIGNAQRFECGKQVASYLGLVPLEKSSGQRRRLGHITKQGNSILRFLLVEAAQATVRKDPEWRSKYFHLALRRGRNIAKVAMARRLAIRLYWMWREGQEYQQTKSSVRTQDSPEIPMVCSRTPSY

SEQ ID NO: 452017 - protein, 359 aa, unidentified
MSTQSKPFSFKGQKIFVGLDVHLRSWSVTVLSEQSVLKKFTQDPSPAALNKFLTNTYPGAEYYSVYEAGFCGFWIHWELHNLGINNIVVNPADVPTMAGERLRKTDAVDSGKLARSLRSGELKGIYVPDSVATEIRSLIRLRDSLTKDQTRHKNRIKAHLRYLGIDIPEEFCRPGHTWTNRFVIWLKGLKLETKYGKKTLDLLIAQYEDLRGQQLKMMKELRVLSRTERFDKPLQFLMSIPGIGQLAGLTILSEVDDISRFKDAAHFASFIGMVPMCHSSGEHDGTGNITVRRHAKLRWLIVEAAWIASRKDPVLSAAYVEYCRTMKPSKAIIKIARRLVNRIYFVMKHQQPYVNCYVS

SEQ ID NO: 452018 - protein, 432 aa, unidentified
MNPQEKRQRAMQAGGFVAVDAGKFEHTLIVRTRAGADSKPFPFKTTRPAFDGAAAFIAKQLPGVAAQDILVGIEFAGSYGFTLAHYLQQLGFPVVSVLPAHTKRQKEITHNQALKTDAKDAISIADLLVQGKFVSFPFLNTVYADLRYLVSAREHVAVLKNAALTRLLAVLDIVFPEYGRVFSHIDQPTALAILKQYPGPDAILRAKKRSVVALLKRESRGHLGEKRYETLCAAARGTLALPGAQGVLADELALIIARLEVFTAQLETLKQRMIVAMERTPEATFLLTIPGVQPVTAATFLGSIGDPQAYESAKQVLKVAGLSLVERSSGIHKGKERISKRGRPTLRRHAFMFALRGIREHGMYRAEFERLLKNNGGKKMPAIVAISRKGLKLMFRIAKERRPYVPMEEMEAGRVPAATVTPVAVATKEGTP

SEQ ID NO: 452019 - protein, 419 aa, unidentified
MSKSLFCGCDVASDNNTIWLMLDDGSQPVKLFSVDNNQPGAEILVERVYSIAKEHCVSDILIGTEATSMYDWHLLEYLAESKLALEFNFKLYRFNAKWIKNFKKSLTPRGKTDPIDSFAIAERLRMGRLPKEYVPDIKYQPLRKLTRFRFHLMQQIAREKDFFLANLFLKASAYSQIKPFGSTFSATSLSIINDFFSVDELAAASLEELTEFILEKGKAHFSKPDEIVDNLKRVARESYRLKPELAPTVNLILASTFNNIRCYKEQVKLVDSAITENLKAFKHTLESISGIGPVYAAGILAEIGDVHRFQDDSALAQFTGLTWPKHQSGKFQAEETRMSHTGNQYLRYYLVEAANSVKRCDATYKAFYEKKYKEATKHHHKRALVLTARKLVRLVWTLLTKQVLYQPGYCSFEDLSKIG

SEQ ID NO: 452020 - protein, 354 aa, unidentified
MDKTTAQATVATIGIDLAKKVFQVHGVDSFGKLVIRRTVKRRELLPFAAKLPPCLIGMEACASAHHWARALTQLGHEVKLIPPAYVKAYVRRQKNDTADAAAICEAVTRPAMRFVPVKSAEQQGVLMLHRVRELLVGQRTALINALRGHLAEFGVVAPQGARHVAELVAVVADAGDARLPDIARGALAPLVAQMQRLEVEISHLDRRILAWHRADATSRRLATIPGIGPVTASAIVASVTDPSMFGSGREFAAFFGLVPRQSSSGGKERLGRISKMGDRYIRKLLVVGATAVLRYAKKGGSPSQAWAQALLQRKPFKVAAVALANKTARIAWAVLTRGGTYQAGKTGAAAIEAA

SEQ ID NO: 452021 - protein, 404 aa, unidentified
MYYVGIDVAKEKHYVCILDDTKEFALKPFWIYSDIVGLTEVVKRFAELSLNNDDFIIGVESTGAFSENLYEYITDANYKVILLNSYQTAKYRDFSTMKKIKNDSIDAYVIAELLATGKYKESHISNDDYHSLKVLGRLKRSLDDKIKTIKREISTVMATVNPEITKVFPNIFSKTALEIIKVYPTAVDISKATPKKLTKLFRHIKGNNFNEDKANQLIDLAKNSIYTGRAQESRALMIKTNIKILELLSQEKSEIELQIDLLVYGKIDYVDSSIDNLKTIPGVADKTIAALLGECGDIKRFSSAKAFIGYLGLYPTQYQSGNSLSVGRLAKRGIPIAKHALYMAAVSSVRHNTQLKKIFMDKVSSGKSKKEALIIISKKLATIIYSVFKHNKPYEPNRVFIPSR

SEQ ID NO: 452022 - protein, 421 aa, unidentified
MKKAGTGKVKFVKDDTLIVAIDVGMEMNRGYCTTPDGRDIRPFKFDNTREGMDKLWGMVMASKNGFQCEEIIVGYESTGPYGEPMVHYLMKKPVMLVQVNPMHTKRIKELNGNSPLKTDDKDPRVIADIIRWGHSLSIIIPEGDAAYLRRLNNSRERHIRERTALLNQLQQLVFLLFPEFKKVMKDISCKTPIYLLKKYLTPMAISVLDKDELGAEMRKKSRGKFKEQHAERLISFAKNTVGIKEGVLGLSLDIQHILIQLEMLNTLIAEIESEMEMALGRIPYSPKLLSIKGLGVVSVAGIIGEVGDFKKFQKLAEIMKLAGLDLYEISSGKWKGRRKISKRGRSLMRKILYYAAIQTIRNNGILHDYYTRLTERGMKRMMALVAVSRKLLGIIYAIVRDDSEYIANFESIKRQVIKKAA

SEQ ID NO: 452023 - protein, 351 aa, unidentified
MKTMTKQLQGEELFVGINLHKHRWHVTIRTADVEIFSNSIVGRWEDLRRVISRYKDCQIHAVYEAGYFGFWLFDHLTQYGVECIVTPPSLIPQEHGNRVKTDRLDSRKLARLLAKGLLKSIWVPSAKERFHRQVIRRRRQLVGDRVRTQNRIKSELCFYGIDLPAARSKWSQVYFANLQRIKFKNHWMQKSFNQLLEQYEFLSTQIDKQTQLLKQLSQLPLYCDRVKILCSIPGIGILTAMEILLELQDFSRFRRAQQLAAYVGLTPSQYSSADKIRMGRITGAGKNSVRSALVESCWHLIRKDKAMRKKYEQIKARAGGKRAIVAVSRKLILCIRRLLLDNRPYVYEPVI

SEQ ID NO: 452024 - protein, 374 aa, unidentified
MNFIGIDLHTNKFTCCYRDEASSTEDPKKGRVIETFTLDAEGLRSFYMTLTVDTYVLVEATITTFSFVRLFKDRVKQVMIANTYELKQVSLARCNTDKIDADKLCRIVKAQVLSGEQLVSPVTVPPVEIQELRGMFSTYRLFKKQNTQLKNRIHSLLKEQLHGFTQEEIFAKRDRQEIRAISSGSPMHFQVNLLLDRLERDEADVKLLQDKILLHASPFMAQIDILTSMKGVSVFIAIAIIADIIEVSRFKNSKVFTSYLRSAPRMSNSNTSTSNRGTNKMGRKLAATLLVNSLNHVLDASPKLNRWYDRLCQYKKPGIVRTGLRRRVFAEIYQMLKKGEYHYCRDTMKHEIKMAQYRRFLEKANKNKILKINA

SEQ ID NO: 452025 - protein, 347 aa, unidentified
MVTDLLDVVIGVDTHRDAHSLAFVRSRDGVLIAEQEQPATRAGYRAALRLGKRAGERRLWALEGTGSYGAGLARFLAERGERVCEVERPAREGTRARLKSDSLDALRAARAALAGQALASPRAAGRREALRVLLQAREGAVAIRRSGLNQLRALVVSAPEELRERLRGQSREALVSTCSHLRPHSRQQAELYATALALRSIARRVEQATREAAGLQAELARLVCELAPQLLALAGVGPISAAQVLVSWSHRGRLRSEAAFARLAGAAPIPASSGKTVRHRLDRGGDRRLNRALHTIVLTRRRGDAATIAYIARRVSEGKSERDAVRCLKRYLARQLFRLLEATPTTG

SEQ ID NO: 452026 - protein, 392 aa, unidentified
MIYIGIDVAKDKHDCFITNSDGEILFNPFTISNNREGFETLFQRIKSVAEDFSKIKVGLEATGHYSYNLLGFLLDKGLPTYVINPLHTNLYRKSLSLRKTKTDKVDSRTIATMMMSDVSLKSYSDASYHNEELKSLTRYRFDKVKERAKLKSSVSRLVCILFPELEKLVPTLHMASVYALLSEFPSADAVANAHLTRLSNLLSESSKGRYGKDTAVMFRDAARSSIGSHMPAKSLELKHTMKLIQELTVEIDEIEAAIKRIMDEQIQSPILTIPGISYRMGAMIIAEIGDFSRFDSADKILAYAGMSPSTYQSGQLDNCYAHMEKRGSRYLRYALYNATKYVCHWDESFGTYLEKKRSEGKHYNVALSHAAKKLVRLIFAMEKAGQAYMPAA

SEQ ID NO: 452027 - protein, 395 aa, unidentified
MFIVGIDIAKRSHEAIIIAEDGQVVRKAFSFRNNCTGYNLLLEQVRRLTLVKSQIVFAMESTAHYWLALYARLLKDGYAVMVLNPIQSHSLRELYIRKAKTDARDSLIIADLVRFGRCKASNVPQDKILALRELCRSRAYLVDMAADLKRKLIALLDRIFPEYESLFESVFSKASIAVLSKYSTPQKVKNANLRKLTDILMESSNGHFGEWKAHQLKEAACSSFGIDDSGGVYSTLLGMFLEQILSLTAQADSLEKQISVFFQEFNNPLTSIPGVGTVLAATILSEIGDITRFSSADKLLAYAGLDPSVKQSGEFKSNQNRMSKRGSPYLRRAIWLASTVAVHRDPMFQTYYEKKISEGLHYMNVIGHVSRKMTAVIFAVLRDGQPYQPILQSAG

SEQ ID NO: 452028 - protein, 348 aa, unidentified
MPYKIAGIDVHKRMLPVVVSDVQVDGEYNFTRRIFGSLPEALRSLAAWLLEQQVEEVVMESTAQYWKPVWGALERCWKPICQMREGALATSGRLHLAQAQSNRGRRGRKKDFRDAERLVKRLVAHELVLSFVPDVEQRLWRTVVRTKYQLTRNRVQLQNRLEALLEEAHIKLSSLVSDLLGASARRMPAAVANGETNHETLAALADRGFRATQEQLRDALGVCQELNPVYRRLIRMVLDEVASIDKRIEQLNQEMANLLRPHEDQVRRLAEVPGRGVDSAHQVIAEVGATAATFPSEKHLSSWVGACPGDEESAEVNRSRRSPQGNRQMRRDSESSCQCGSQIQRKHL

SEQ ID NO: 452029 - protein, 340 aa, unidentified
MGCSQKIRRRKATATSVYAALDLHEKSIQCVLKDGTGKVVRESRLGKDEGRILEFLEGTHASVVMESGYNHQHISDVLKEKGYDVKVAHPLMVKAIAYAKVKTDKVDARTLADLLRADMIPESYVPDEKTREVRDLVRRRHDLVETRTGFKNRVKAELAKRWVKHQGEVFTVEGRKFLRSLHIDAVDDHLDTIEFLDRKIGELDVKVKAIAEQDRYAKLLVTIPGVSHYSALLISSEIADVNRFADHEHLCSYAGLVPGLRQSADKSHATKSRTRSAMLNWIMIQCTRVHVRWCDSAITRFYNDLAKRRGEKVAIVAAARKLMRAMYIMLKEEQAFRLDG

SEQ ID NO: 452030 - protein, 334 aa, unidentified
MENIALIGIDLGKNSFHIHCQDHRGKAVYRKKFTRPKLIEFLATCPATTIAMEACGGSHFMARKLEELGHFPKLISPQFVRPFVKSNKNDFVDAEAICEAASRPSMRFVQPRTESQQAMRALHRVRESLVQDKVKTTNQMHAFLLEFGISVPRGAAVISRLSNLLEDSSLPLYLSQLLLKLQQHYHYLVEQIKDLESQLKRKLDEDEVGQRLLSIPCVGTLTASTISTEIGDGKQYASSRDFAAATGLVPRQYSTGGRTTLLGISKRGNKKIRTLLVQCARVFIQKLEHQSGKLADWVRELLCRKSNFVVTCALANKLARIAWALTARQQTYEA

SEQ ID NO: 452031 - protein, 351 aa, unidentified
MEETGAEKADESMFYGAIDLHSNNSVIGIINAGGQRLCKQKLPNDLEMIKAALVPFAAELQGIVVESTYNWYWLVDGLQEVGYQVRLANTTATQQYSGLKHTDDESDALWLADLLRLGLLKEGYVYPRQTRAVRDLFRKRTNLVQQRTRNILSIQNLTSRNRGVRLSGNQVKGLTPEAVEKTYQNEEDLALAVSSSLRIIEALDREIKIIEKRVKGKINLSQPYQLLQTVSGIGAILAMTIMLEAGDIHRFPTVGDFSSYCRCVNSVRLSNQKKKGSGNTKNGNAYLSWAFVEAANFAIRYDPTIRRFYQRKTVRSNIVVARKAVAHKLARASYYVLRDQVPFDVTKCFGD

SEQ ID NO: 452032 - protein, 355 aa, unidentified
MESKKYIGLDVHQASISVAVRDDAGKLVMESVIETKAGTILGLIRGLRGSLCVTFEEGTSAAWLYELVKPHVAQVVVCDPRKNALLKVGNKNDRVDARKLSELLRAGLLTPVYHGDSGVRTLRELSRSYLTVTKDLTRVMNRTKALYRSWAIPCAGEKVYSPRHRNTWLEKLSEAGVRRRAEQLYQQLDALMKIRREARRELLTESKKHSAQKLLRQIPLLGPIRVALLIALLQTPHRFRTKRQLWAYSGLALETRTSGEYRFTGGQLQPAKRLAAPRGLNHNHSHDLKNVFKGAAMHASRSSNALGDFYKDLLATGMKPTMARLTLARKIAAIVLKIWKKGGRFDPEQLKRQAA

SEQ ID NO: 452033 - protein, 355 aa, unidentified
MVGMVVVGVDAHKRTHTLVAVDQVGRKLAERTVATSSDGHLQAVTWAAQWPQPQVTFALEDCRHLTRRLEADLLRAGHRVVRVPTRLMATARRSGRQPGKSDPIDALAVAQAALREPDLPVAHLDGPTRQVKLLCDYRADLVVERTTLCNRLRWHLHELDPELHVPSRGLRRYKVIDELAARLAGVDGTVAQIARELLARCRELTVRINQLERDLRDLVRVLAPGLLAIPGCGVLAAATILGETAGASRFRSRHAFARFNGTAPIPVWSGNSVRVRLNRGGNRTVNWALHMIAVTQVRGVGPGQAYVERLLGAGKTRTEALRLLRRRLSDVVFRVLLADEHRQATTEPAEAPIAA

SEQ ID NO: 452034 - protein, 349 aa, unidentified
MKRTTIGLDIAKRVFQVHAVDHETGEVVRRQLKRAEVLEYFAQLPAALVVMESCGTAQHWARELTKLGHEVKLIAAQFVRPFVKTNKNDAADAQAIWTAAQQPEMRFVAIKTPEQQAILALHAIRQRLMKNRTAYVNQLHGLMAEFGVCLPRGWRAMLPQAVAALGEEESPIPGVLRTELQRQIERIKEVSAQMTDVERQIGCWKRKERECERIAAIPGVGPLTATAAVATIGDARTFKSGRQFAAYLGLVPRHSGTGGRVQLLGISKRGDTYLRTLLIHGARGVLSRMEPAAKNTWLGRLASRRPNNVATVALANKMARQIWALMAYRRTYEPNYATVATATVAKEST

SEQ ID NO: 452035 - protein, 360 aa, unidentified
MEEKTRYVGIDLGKRTYEMAIVGKGGKVSMSNGKTFPAARQALYKKLQPNDKVALEAGNLAFIIAKEIEAAVGCKVYVLNPSNLALIYGSMKKTDKEDSLKLAHILEDFNEERLPVVPVPSDKEMRRRKILSSYRRAQQERNIYINRLHALFVSQGITTKVRADLADSDSRKEAIKELCDIERDEAEHLVAILDLCEKRIDKLDKLITEEAKGDEVIERLQSVPGVGLITSFAFAAHIAAERFGNASQVSNCLGLVPRVYISGQTVKHGPITKRGNGYLRALLVQASWALIRSRNGGKLKELYQYMTIEKSKSKKKAIVAVARRLAELLYLIMKDEVRYVKMPFIREKEESEKKTELLCA

SEQ ID NO: 452036 - protein, 420 aa, unidentified
MTDQNVTAPELVAYIGLDWGDERHAVYLQTAEGGAVERIVLEQKPDVLHAWVAQIRERFHGRPVGIAIEQRKGAVIHALMMYECFVLYPINPKALARYREAFRTSGAKDDPADAALLLDLLRKHRDQLRPWVPDTVEARTLQSLCEQRRKLVNHRVALTNRLTGLLKQYFPQALDWVGDLASRQGCDFLMKWPTLAAVQRVRSPTLRTFYQQHNCRTATVIDERIRQIAIACPLTSDPAIIDPLSLSVQTYATQLRVVIEAVQAFDTRIAEVFARHPDQALFASFPGAGPVCAPRLATAFGTDRSRWQSATELQSHSGIAPVTERSGKALWIHHRLACPKFVKQTFHEFADQSIRFSQWARAYYDQQRGRGNDHHAALRSLAYKWIRILFRCWKDGKPYDEATYLDALRRHGSSLVKNNA

SEQ ID NO: 452037 - protein, 346 aa, unidentified
MDKVGRSTGPRCEEASEEGADMTQTVLGIDVSKEILDVVLLRPGRPAQAARYPNTPTGFKKLNKWLRKRKAGQVHVCLEATGLYGDEVAWFLHEEGHVVSVVNPARIRAYGESRLQRNKTDRLDAALIADFCLRQEPPAWTPPEPAWRELRAMARRLLALKDMRQQERNRMEARVLSETVLQTLEEHIAFLQEQIDELEKCIKEHIDDHPELRKQRDLLESIPGIGSLTASLLLAEIPDMKRFERAEQVVAFAGLNPRQRRSGSSVRGRSSLSKTGSAILRRILFFPAMVARQCNPLIAPWCDQLAARGKTKMEVIGAAMRKLLVLAYGVLKSGVPFDPNYQQTTA

SEQ ID NO: 452038 - protein, 334 aa, unidentified
MKKRYFMGIDLAKATFDFCLLSSSGRCLRRGQCHNDALGIERFLAQLGTCGWKLSQIHFGLEATGVYGKGLIAALHQGGLALSVLNPAQVKYFAFSVLRRTKNDRVDAQIIARFCRERKPLATRPLRPSEEQLKVLVHERESRVGEQTRERNRAKKDPFQTQLPTLIRRQRQQRLKQLAKEIAQLDAAIDSLIASDECLKAQRQLFCSIPAIAAVTAAKLLAELAGKEFQSARQLAAYAGLTPAQYRSGCYLYGKTRISKIGNAFLRKALYLPAAVARRWCKPLQPWIARLETRKLHPLAIRGAIMRKLLHIAFGVLKHQKPFNPLLLSFPKTL

SEQ ID NO: 452039 - protein, 338 aa, unidentified
MELYVGIDLHSRFCWIHVMDETGRKLFDKKLPNSLDLILLSLADFKDRVCGVVVESTFNWYWLVDGLMENGYPVHLANPSAIKRYEGLKHVDDRRDARWLAEMLRLQVLPEGYIYAKADRPVRDLLRLRGFFVRKRTSLITSFQSMISRNLGGHMSGAEIKRLGRLDAAELFPHEHLNLAAVYLVHLIQGLSLVISDLEKEVLNTAKLQPEFELLQTLPGVGRILALTIMYEVGDIRRFQSVGNYSSYCRCVAANHFSAGKRKGKGNRKNGNRHLAWAYAEAAHFANRTYPEVQRFYRRKAAQTNHVVAHNALGHKLARASYYIMRDQIPYNAPKLFG

SEQ ID NO: 452040 - protein, 413 aa, unidentified
METLIDRCAGLDVHKDTVAACVRAPGPTGGREQLVHTFGTTTAGLLALRDWLAGHGVTVVGMESTGVYWKPVYYVLEDVFECRLFNARHLRNVPGRKTDVADAAWICQLLEHGMVRPSFVPPKPIRELRNLTRYRTAQVEERTREAQRLDKVLQDAGIKLSSVATDVLGVSGRAMMAALVEGTRDPALLADLAKGALRKKLPQLRAALHGRFGPHHALLVGTILTKLDFLDEAITALSAAIEEAIRPFAPEVELLRTIPGVERRTAEGLVAEIGVDMTRFGAASRLASWAGMCPGNNTSAGKHGRGTTRKGSKWLRTYLRQSAKAAARTKVTYLAAHYARLRGRRGSAKATVAVGHSILVATYYILTRREPYHDLGPDHFTRRDSREHHARRLTRQLRALGYCVTLQPEEAAA

SEQ ID NO: 452041 - protein, 333 aa, unidentified
MVKYIGMDAHSSSCTLSVSDANGCEIDNVVLETNGKTIKNYLRSIEGVKKLTFEECELSRWLHSVISPEVDELIVCNPVANKQYKRPKTDKLDARQLARLLRGDFLTPVYHDGSERERFRNLMSSYQDIVDEGVRIKNRYKSLFRKNGQRIRGEALYNDESLLEDLPRNDDRFIGSHMYKLLASLEESRQAYVKEICQYDKKFKELKILKTAPGIGDIQASKIVSQVVNPHRFKTKYKYNSYCGLVRHQRISADKKYGSTKVWGNRILKCVYKMAGKVAIRGSGPLRDYYDKLRERGITNDNAYNAVCRKLAAITLSMWKHNKRYDERMIRAI

SEQ ID NO: 452042 - protein, 415 aa, unidentified
MEPVLDSCAGMDVHEKKVDVCIAHGPLEKSPKFEIRTFLTMTADLEDLKSWLKKYNVTTIGMESTGVYWKPIFNVMEGEFTIVLANAQRLKAIPRKKTDIMDCKRIAKLLRYGLLPNSFIPPREIRELRDLNRTRRKLVGMMTSEKNRMTKVLESSNIKLSSVVSKISGVSSMAMIRSLQEKDKLSKEEISQLAKGSLKKKVDLLEKALDGKLTDHHRFLIKMHMENLDHLARQIEKIDEQIESKMIPFQKEANLIQSIPGISKVSASAILAEIGADMSQFPDEAHLSSWAGVCPGNNESAGKKKSGKTQKGNSFLKGTLTEAAWAASKVKRSTYNAFYHNIVRRRGKKRALVALAHRMLMDIYRVLKTGTPYQDTSAEEANERATKKKERSMIRLLEKAGYSVVKTSTAEIAVA

SEQ ID NO: 452043 - protein, 350 aa, unidentified
MIIIGVDFHPEFQQIASMDTSTGEFQEKRLAHREEAEKFYRSLAAANQKVRVGMEASGHARWLERLLAELQFELWIGDAAEIRTQRVRKQKTDRQDAQLILRLLLEDRFPQIWVPSWENRDLRQLLWHRHRMVQARTRIMNQLQAVALNEGLRCKKRLWREHGRQQLESFRLAPWASRRRHDLLEWMDRLNPTITELTQAIGQEVDKCPEAKRLMTHPGVGALTALAFVLIIGQAERFGCGKQVASYLGLVPLEDSSGHRRRLGHITKQGNSLLRFLLVEAAQVTVRSIPEWRSKYFHLAMRRGRKIAKVAMARRLAIALYWMWRRGWDYEQAKKFGSHAGQSGNRHGVQ

SEQ ID NO: 452044 - protein, 416 aa, unidentified
MSLLSAIAAGIDVHKKFLAVAILSSEAPNHPLSTRRFGTTWQALEELENYLRAYQVTHVAMESTAQYWRPVWDWLEGKFELFLAQARSTQAPHGRKTDNADALRIARRLIAGDLTLSYVPPPPQRESRLLTRHVVTLKAQISDCRNEIETLLEQAHLKLTSVVSDTFGCSGRRILRALVAGETDPEKLAALGHQRLKVSREDLAEALRGTLTAAQKLVLRLILDRVDRLEKDIEEIDRALLSHQSEHAEALRRLCEIPGVGLWAAQQLVAEIGPSAAAFDSPGRLASWIGVCPGMHESGGKSASSRSAKGNRYLRRLVCQIAWAATLAKQSEARTRYFRLRARLGPLKAVWAVAHYMVRVIWKVLHCNEDFRHMQPQSLDPRTALQRAATLKRNLAKLGFTLTLTGPDLQPVPLPS

SEQ ID NO: 452045 - protein, 404 aa, unidentified
MPTYYVGIDVSKFKHTCCIINENGEVIKKSFDFSNSKEGFDSLIEIFKSIDQSESSFQIVMEATGHYHECLFRYLVANNYLAQIKNPVVIARFKQSEYLDKAKTDNLDALLIAQYASKHPFSPSMLKSYNIERIRRISRAKYFLYQNKERTINHLHRYLDESFPELIPFLRKRGDIKRYQGRNLFDSKTTLWLLENFPSAKKFSNARSETAEKLRRMSKGAFSLIKFNELRNIAKNSIGVSFQETEEIIIQLVQELRNIQERNDKLDELLIPLIDETSPNLLTVPGIGYRLAGLLISEIGDASEFPSADKIIKFAGLDVRVYQSGTVEKHGAIRKRGSPLLRYALFQAAEKARIHCPEIAEFYSKKKSEGKHPICALTHTARKILRIVWALLKTGQNYSQSISD

SEQ ID NO: 452046 - protein, 355 aa, unidentified
MSQEKYIGMDVHQATISVAVRDVHGRLIMECLLETKAATILEFIQGLRGTLALTFEEGTSAAWLHDLLKPHVSRLVVCDPRKNALLKDGNKNDRVDARKLAELLRTNQVKSVYHGKHGTRALKELGRSYLTVTKDVTRVMNRIKSVYRSWAIPCAGTSVYTPRHRGDWLEKLVEPGVRVRAEHLYQQLDSLQPVRLEARRQLLLESHKHAAVKLLRQIPSIGPIRAALLVALLQTPHRFRTKRQLWAYSGFAVEVHDSGEYRWVRGKLQRNRERITVRGLNDNHNQDVKNLFKSAAISASTRPGPLHDFYVARIESGMRPTMARLTLARKIAAITLTMWKKGVSFDPKQLQPQAA

SEQ ID NO: 452047 - protein, 360 aa, unidentified
MDTNHSSSLSFKKQDFFIGLDVHKKQWTLSIMSMNMMLKRHQTIDPSPSILLKYMQRHYPDGNYYVAYESGFSGFWAARDLNKLGVSCMVIHPSDVPSSQKERFNKNDRVDSRKLARSLSNGDLIAIYIPEKMAEEYRHLNRHRLKTIKDQTRLKNRIKSTLNQFGFTIPLQYQERRWSGVFIKWLLTIKFDTEYAQFAYEDLIDQYIQIRARITKQLKKMRIMAKEQTPFNIIVPLLLTAPGVGFITSMTLATEIIDMSRFKTLEHLASYVGLVPSIASSDETEINYGITPRRNKYLRTMLIEAAWKAVKIDPALTMKFNQLSRRMNRNKAIVRIAKILLSRIRYVWNNQKPYVLSVVN

SEQ ID NO: 452048 - protein, 354 aa, unidentified
MSQKSASAIAVIGIDIGKNSFHIVGHDERGAIVLRQKWSRGQVEARFANMPPCLVGMEACVGAHHLSRKLNSLGHNARLMPAKYVRPYSKGQKNDFRDAEAIAEAVQRPTMKFVATKTADQLDLQALHRVRERLVSQRTGIINQIRAFLLERGIAVRQGQRFLRAELPRILATPPDVLSSRMVRIIEDLAGDWRRLDERVEGLSNEIEAIARQDAGCERLMSVPGIGPIISSAMVAAIGAGDVFTKGRDFAAWLGLVPEQISTGDRTILGKISRRGNRYLRVLFVQAAWVVLIKPKIWERHGLKPWIEAARKRLHHNVLAIALANKLARIAWSVLARGRAFEARKMDQAANQSA

SEQ ID NO: 452049 - protein, 479 aa, unidentified
MARHRKNRNEPVAAPAQPKGFKKVNPSAAGIDCGSDEHYVAVPDDRDPQPVRRFGAFTADLIALAAWLEACRVDTVAIESTGVYWIPLYEILEARGIHVQVVDPRRLAQVPGRKTDVLDCQWIQQLHMFGLLAGAFRPANEIVVLRSYMRQREMLVAYAGQHIQHMQKALEQMNLKLTEVISDISGATGTRIIDAILAGERDPKKLATLRDERCHNDEATIALALEGNWRAEHLFALKQAVQLFRYYHAKLGELDEQIESHLKTFADKSAGVPLPPRTVKRSPHANQPRFDVRQYVVQLSGVDLTTLDGFKSGYAALDLISEIGTDMSAWPTEKHFASWLGLCPGIKKTGGRRLSGRRPKKAVRAANILRLAAYPLVNAKCALGAFLRRLRAKLGMPKAITATAHKLARIVYRMLKYGKAYSDVGVEYYERRYRERLLKSLQRRAAEMGFDLTPLPTTELELVGTGMTVTATELPSPGQ

SEQ ID NO: 452050 - protein, 408 aa, unidentified
MIYCGIDWAEKHHDVALVDNTGQLLAKRRISDDASGYQLLLELLAEYGDTEGSPIPVAIETSRGLLVAVLRSGKRHVFAVNPMAAARYRDRHGVSRKKSDPGDAFVLANILRTDMPMHRPLPTDTDLARAIAVLARAQQDATWNRQQIANQLRSLLREYYPAALDAFTGWANGLCRPEARELLKVAPTPTQAARLTRTQLRSALKRAGRSRGIEAEADRLQKVFRGDYATQSRLVEDALGKQALALLRQLQAACLAADELAEAVEESFLQHSDAEVILSFPGLGVQLGARMLAEIGDDRERFTDARGLKAYAGAAPVTRASGKKHHVGRRVIKNDRLNHAGYLWAFSALRSSPGAEAHYRRRREQGDWHAAAQRHLFNRMIGQLYHCLQTSHLFDENVAFPSQLATAA

SEQ ID NO: 452051 - protein, 397 aa, unidentified
MYIVGIDIAKRKHEAAVIDGEGTVIIKPFSFTNNCSGYNRLLAMLAKAKLPLDEVSFAMEATGHYWLALFTRLQKEGFRVQVINPVQTNSIRSFYIRQAKTDPRDALLIAEVIRFGHFSESTLHPENIYELRELCRGRHAIVSMQADVKRKVVALLDQVFPEYETAFTNMFGDTSMAILQTCPTPKELSEMPFEELCHLIEVSSHKRFRMAKAQELQELARNSFGFAMAGDVFSTMIRLYARHLDFLKQQVREMDRKIAEIMDTLDTPITTITGIGPTLGAYILSEIGDISRFSSAAKLAAYAGIDPTMRQSGEYNGVRNRMSKRGSPYLRHAIWLAASSAVLHDPALKLYFQKKRDEGKPYMASVGHACRKMVSIIYAVMRDNKAYTPYIPNEISA

SEQ ID NO: 452052 - protein, 391 aa, unidentified
MNEAWAGIDAGKEAHWAHVLNASGAQLLSRRVENDEGDLSLLIDEVLALAEEVVWAVDQPGGSAALLLALLWERGQRVLYLPGLSVDRARDAYRGESKTDARDAHVIADQARMRADLGVLAPEEGDLAELQLLLARRRDLVTDQTRTITRLRETLLALFPALERALDLNTKGALTLVCHYQRPQQIRRTGQGRLAAFLKNRGVKGAEGLAGKALAAARAQSVRLPAEGVAATICAELAEEALALKGRISTLDRELGRRFFARPEARILSSLPGMGPILGSEFLVSVGNLCAFESADQLAAYAGLVPAAQDSGKRVGNHRRMRGGNKVLKRVFYQSAFASLRSSPHSRAFYDRKRREGKKHTQALIALARRRVNVLWAMLRDETTFEVPPAA

SEQ ID NO: 452053 - protein, 347 aa, unidentified
MNLYSNMHPYYCGIDLHAKLLYVCIIDQDGNTRVHKEISADPNKLATLLEPYLGNIVVGVECMHCWYWVADFCDDIGVDFILGHALYMKAIHGGKAKNDRIDSFKIANLIRGGNFPLAYVYPKDMRATRDLLRRRMKIVRHGADLKAHVVNTTSQYNLPPNKVNLKNTTAREQLKNTFSDNVVQKNIDLDMVILDCYAEQLSKIEWFIETQARQHKPIHLHILKSISGIGRILSLTIIYEIGNIERFDSVQKFASYARLVKCKAESAGKSYGTQGNKIGNAHLKWAFSEAAVLYLRGNDKAKNYLTQLQKRMSKAKALSALAHKLGRCVYFMLKNETVFNEERFLKG

SEQ ID NO: 452054 - protein, 355 aa, unidentified
MSQEKYIGMDVHQATISVAVMDAGGKLIMECLLETKAATIVEFIEGLHGTLWLTFEEGTSAAWLHDLLKPHVNRLVVCDPRKNALLKDGNKSDRIDARKVAELLRTNQVKPVYHGEHGVRTLKELGRSYLTITKDVTRVMNRVKALYRSWAIPCAGATVYAPRHRAEWLAKIAEPGVRVRAERLYQQLDLLQPVRLEARRELLVESHKHSAVKLLRQIPSIGPIRAALLVALLQTPHRFRTKRQLWAYIGFAVETHDSGEYRYVRGKLQRNRERITVRGLNDNHNNDLKNLFKGAAISASTRPGPLRDFYVARVEKGMRPTMARLTLARKIAAISLTIWKKGVEFDPQQLHRQAA

SEQ ID NO: 452055 - protein, 398 aa, unidentified
MNAVGIDVSKGKSTVAVIQPFGVVIAEPFDVSHTESDLNKLVQLVKSLSGETKVVMEYTGAYYEPIANALHNQGIFVSVVNPLLIDDYGTNRVRKVKTDKKDSLKIASFAIDKWLDLREYIPANDIRKTLKILNRQYVQYNKILVMQKNNLISLLDSCFPNANTLFTSPRRESDGHEKWVDFVLKFPHIHSISKLSLSAFKVKYQSWCRKNNYNYSDKKVADIHSYCKTQISVLPMTDSVIKIITEAAVMLNSTLETLCTFRDEMDRLSSTLPEYNAVMGIYGVGKVLCSQLIAEIGDVRKLNNSKSLVAMAGIDPPPNQSGKVDTKSRSISKRGSPVLRKTLFQIMTIIIQNKPVDDPVYQFLNKKRSEGKPYRVYMIAAAHKFLRIYYARVMQALN

SEQ ID NO: 452056 - protein, 306 aa, unidentified
MTVIIGMDPHKRSATIEIINQSATILATGRYGTDAAGYREMVTAAQQFPDRVWAIEGCNGVGRHLAHRLIHDGESVIDVPAKLSAQVRVFATGNGRKTDPVDAHSVALAALRSPNLRRVQADPELIALGLLVDRRDKLGRTRTELLNRIHRLLVELIPSGAKRFLSAMRALADSIIPADPAARVRLRLVLELIDDLEVVDRKARAADKELKQLVLERGSTLMDLDGIGPSGAARLLADIDGIHRFATRDRFASWNGTAPLDASSGQQQRHRLSRAGNRKTNRVLHVMAVVQLRYPTAGRVWPVPGE

SEQ ID NO: 452057 - protein, 408 aa, unidentified
MAATIGNLYAGIDTHKDMHVVAVIDHLGKLVETRSWPTNSAGYKNMWEWMGSLGAIAVLGVEGTGSYGAGVTRYLQDHGAVIKEVNRPNRQMRRQRGKTDAVDAEAAARAVLAGYATGDPKTQDGIVESIRLHRLMLVTFRKERTALINTLRNVLLTGPAGLRQQLEPLSSETLFRRCSRLRVVGNMSEPVGAARLTLRTLARHIIELGTQLGEIRARLTDLATQANPELMSARGVGVDTASTLLVAAGDNPERLRNEASFAAFCGVSPIEASSGKNSRHRLNRGGNRQANNALWRVAMVRLQTDQRTQQYAARKRAEGKTPRHTLRCLKRFIVRDIYRILTDPQPVISTNDLRPARLALRLRMQAAADHFGVALTTISRTERGINANHEFAQQYRAWLDQQTQQNAA

SEQ ID NO: 452058 - protein, 401 aa, unidentified
MNQHSRAFVGIDTSKLRNAVAVAEDGRDGDVRYLGEIDTTEAATRKLVAKLAAKYRQLTFCYEAGPTGYGLYRLIRKLGHDCIVAAPSLIPKKPGDRVKTNRRDAVGLAKLSRAGELTAVWVPDERHEAMRDLSRAREAARKDLKGKRQQISSFMLRLGRHYPGKKTWGPAHMNWLMLQKLEHREQRIVLEELLGAVRQESERVERLEQAIRDAVPEWSLAEVVTALQAMRGIDLVAAVTVLAEIGDLSRFQNPRQLMGYLGLVPSESSTGDTVNRGGITKAGNGRARRILVEAAWSYRYPPRVSREKQMKVAAAPRAVREIAWKAQMRLCGRFRSLTRKGKRPTVVATAIARELSAFIWAINRKVVESHATANQTGVMDRSSYEGLDRPTTPPPSHVATG

SEQ ID NO: 452059 - protein, 414 aa, unidentified
MDIIYTSCCGLDVHKRTIQACVRRMDKSGKIHHEVRTFSTMTGDILALADWLGTQGVTHVVMESTGVYWKPVYNILEGSFSILLVNARHVKNVPGRKTDVKDCQWLAQLLQCGLLKGSFIPDRPQRELRDLTRHRSQLVAERTAVANRIHKVLEDTNIKLGSVATDILGTSGREMIRALIAGEQDAEKLADLARKRLREKIPELRLALQGHITDHHRFVLGELMDHIEYLERQIDRFSARIEEMSRPFEKAIEAVTRMPGFEKRSAENVIAEIGINMGQFPSAGHLASWAGMCSGNNRSGGKSKSSKTTKGSRWLRCALTQAAWAATHKKGSYFQAKYRRLVGRRGKKRALVAVGHSMLVTIYHVLKSQVEYQDLGSDFFDKLNSNQLVKHHINRLMSLGYYVTLTAPEQQEAA

SEQ ID NO: 452060 - protein, 322 aa, unidentified
MKFIGIDVSKANLDVAVHGEPTCKRFAQTEEGLEALCTFVAEQEPKLVVLEATGGYEMAPLSALLTHKLPAAVVNARRVRDFARALGREAKTDRLDAAVLAEFAARMVDSIRVAPLATEEAVELRELLLRRRQLVTQLASETTREKQLVGPRKVKRVVSSVERSIRFLEQEIKVLDDEMSKRIKSSDVWRHKDELLQSVPGVGPTTSRTMLTVLPELGTLSSKQIAALVGVAPFNDDSGSPRKGKPRHIRGGRAEVRNVLYMATVSAVRCNPVIRAFHERLIANGKKGLVALTACLRKLVVILNSMLRHDAAWVGTKFVPTP

SEQ ID NO: 452061 - protein, 348 aa, unidentified
MAHFVGLDVSVKETSVCVVDDTGKVILEQKVPTEPADIITLLSSLGVSYGRIGIEAGPLSQWLVNALTVAELPVICVETRHMKALLTAQQINKTDRNDARGIAQMMRVGLFKPVHVKTLVAQEQRMLLTSRKLLQRKLLDLESDLRGTLRNFGLKVGVVSGGRYEVRVRELIAGFPRLAAIAEPLLKVRQVMRQQLAVLHKMLLETVRDDPVCRRLMTAPGVGAVVALTYRATVDQPQRFVNSRTVGAHVGLTPKRYQSGEIDYDGGVSKCGDALLRTMLYEAAQVLLTHGSKWSWLKAWGVRVVQRRGMRRAIVAVARRLAVVLHRMWVDGSEFRWSKDSAAVPTAA

SEQ ID NO: 452062 - protein, 338 aa, unidentified
MSRYVGVDLHRRRSQVVILDGDGGKVSSVNVDNRDPAALVDAVAAGGGGCDVVVEATWGWYWVADLLTDAGFVVHLAHPLGVKGFENRRVKNDDKDATLLADLLRMGSLPEAWIAPPPLRELRELVRYRRKLSQLRTGLKSQVHAVLGKEGVIPQLVELWGPAGARWLDDQQLAVAYQDRVTSLRRLIAHYDREVIRLDRQIHRWLRDDVGYREIQRLAGVGPVMAAIFVAEIGDVTRFDSPKQLCSWAGLTPKHRESDTTIIRGSITKQGSTLVRWAAVEAVARYQGGAPIRDAYRRIAERKGNKIARVAAARRLLILVYYGLRDGEIRCLQHGAAA

SEQ ID NO: 452063 - protein, 326 aa, unidentified
MMNYLGIDVSKEKIDCCLFINGISGKGKSKIFSNSESGFIKLTDWLSHLNINTNDLLVTLEATGIYHENLCYFLHDLKINIAISNPMRTRRFAQGMSILTKTDKVDSEVLAKYGALAPIKYWKPDSKNFRELRDLMIRRDALSTDLVRESNRLEKSTFTKTSLHVISMIKESIDSLQSRINHIDVIINELIKNDSELTNEMNLLISIPAIGQRTALQMLTLFHGKDFDNAGAAAAYVGLVPIQKQSGTSVRGATRISKSGSSRIRAALYMAAIVAIRFNPHSKVLYNRLLKNGKSKMSALCAVMRKLVYLCYGVLKNKTPYQPDYA

SEQ ID NO: 452064 - protein, 348 aa, unidentified
MSGTTLPHRWSVGIDLHKETLTACVYCSCCGEIRFQKLACRCRKQIAEFFGSLPRPHVVAIEAVGFYRWLWEVLEPLVDKLVLADAAQARALAGRRIKTDREDAQNVAELLACGRLPVAYAPPSEVQVLRDCSRQRNAFARQRAQVLIRVKSVMNANNRPGPARMGSSGLVRYLETYQQKLPERHSRYLWQCVDQLLLFERQIGQLERELERLLAQPTFGASAAILNSFPGVGLVTCATVLAEIGDFHRFTYRKAIARYSGFDPRTFDSAGKQRTGHISKRGPSDLRWVLGQAAWSAVRLDPQVKRIWLRICRKAGKKAALIAIARRLLLWMWRAVCTGQPYRPPAIA

SEQ ID NO: 452065 - protein, 413 aa, unidentified
MYIVGIDIAKKSHQAAIMKPDGTLVGRSFRFTNTKQGFEFLMDKLAAVDSSLENFEFGMEATGHYWLNLYTWLADNHATVHVINPLQSDALRNLYIRKTKTDSVDAKIIAQVIRIGQYSETKLADDRMLMMRDLCRQRFFLVDMVANLKRKIIVMMDRIFPEYQGFFSDTFGKSSTAILKHCTTPEEITLFGEDNLAQLLQVASNGKFGLKKAQELISLARNSFAARLSSKTLSLLVKQMMDQMELLQNQIGILEKHISSHFKSFGTKITQIPGIGPVLGASILSEIGDISRFANPKKLCAYAGIDPSVKQSGQFLGNENHMSKRGSGYLRRCLWMASFVSVNHCREITIVYKSQVSKGKTHFQSMGFVCHKLLNIIYTVLKNDIDYSQMLCINPAITARTSRRIARAALKAR

SEQ ID NO: 452066 - protein, 358 aa, unidentified
MAGKVTETAVVGGVDTHKDLHVAAVVDQNNKVLGTQFFSTIRQGYRQMLAWMTSFGALKRIGVECTGTYGSGLLRYLQNAGLDVLEVTAPDRMERRKRGKSDTIDAECAAHAAFSGIRTVTPKTRNGMIESLRVLKTCRKTAISARRVALQIIHSNIISAPDELREQLRNMTRMQLIRTLGAWRPDASEYRNVTNVYRISLKSLARRYLELHDEIADLDVMIAAIVDELAPELIKRNAIGYESASQLLITAGDNPQRLRSESGFAALCGVSPVPVSSGKTNRYRLNRGGDRAANSALHIIAIGRLRTDDKTKEYVARRVAEGHTKMEAIRCLKRYISREVYTLLRNQNRQINSIPITA

SEQ ID NO: 452067 - protein, 368 aa, unidentified
MLLPRQRLKLARGAKDKEYAMSWNLSAAVAVIGIDIGKNSFHIVGLDGRGAIVLRQKWSRGQVEARLVNMPPCLIGMEACVGAHHLSRKLKAFGHDARLMPAKYVRPYSKGQKNDFRDAEAIAEAVQRPTMKFVATKTADQLDLQALHRVRERLVSQRTGIINQIRAFLLERGVAVRQGLRFLRAELPRILATPPDVLSPRMVRVIEGLAEDWRRLDERVDHLSGEITALARQDVGCERLMSVPGIGPIISSAMVAAIGTGDAFSKGRDFAAWLGLVPKQISTGDRTILGKISKRGNRYLRVLFVQAAWVVLIKPKSWERHGLKHWIEAAKKRLHRNVLAIALANKLARIAWSVLANGRIFEARLQAA

SEQ ID NO: 452068 - protein, 373 aa, unidentified
MSICLTHKSTVVGVDVHKYCHSAVAMDCFGQEKARLDFSNERLNDYVLWLRELGDKEDIIVALEDVNGYGFHIVERLSKEKVGMRYVPAILTERERKKSIHREKSDYEDAKRVGKVILTKFDETLPAKESIADENERELSANLDFLTAERRILVHEKTILKNQLHTMLHQIFGDRYGEGFPKVFHKEAIKSFRQKLIKAKFDNPIMVALAGSSIRRFDRLALVEKQLKEIDGSINNIGQKSEAVLALSDNIHGCGIITAASIIAEVTTISRFCDKSKFARYSGIAPINKSLGKHQRLYTSPFGNRKINRALHTIALCQIACKGDDRGKIYFQKKLAEGKTKLWALRCLKRQISNKVFQALTEQKKRERTIQNS

SEQ ID NO: 452069 - protein, 331 aa, unidentified
MNYSHFVGLDVGKKTFDASLMSADEKELSHKSFDNTPTGIQSLLDWIAGYHLSLSKLLFCAENMGSYVTELSVSSVSMGFSLALVCPLTIKKSIGLQRGKNDRIDAKRIANYAVLHYRKLELYKLPDKDLVRLRRWIIIRDNLVKQKVSSIKLLETFSRMAKLADVTESISFLEEQLKSIKERILEVEEDMEQLIAASTSLYTNYLLLRSIKGIGIINAIVLLCVTDNFQRFDNPRKFACYCGVAPFEHTSGISIRGKTQTSSLANKEVKVYLTRAAITAISWDPQMKAYYKRKIAEGKHKAAVINAVRAKIIARSFAVIRRQTPFVTLAV

SEQ ID NO: 452070 - protein, 341 aa, unidentified
MRYIGLDVHKDNITACVLTSTGKPKFEKDFVKESDKWILDELLSFGDKDGFCVMMESGTYAYAPFRFFSDKGVEVHVVHAKALKVITDSDKKTDRKDALTIAKMLRLWKKGDIDLQMAYMPTREQCELKDICRYREEISKKIGDETRRIKSHMSRNCEYLPEEFNDFQTEKARKFVKKTYPDDRTLMRRMDCLIDLFGERDMVKEDVESRLPGSRDVELLCGIPGIGRQTAVQIMSMIVDVNRFADAEKLCAYFGMVPRVRDSGGKENHGRMTKNGDKMMRMIMERVTESHVRNCNSSVTKYYKRKREEMGTKKALITASRKMLSVIYAVLKSGKDFRPAA

SEQ ID NO: 452071 - protein, 341 aa, unidentified
MLIIGCDYHPSMQQIAWVDTETGEGGELRLTHMAAAEQFYRQLKEKGISARVGIEATGHARWFERLLAELEHELWVGDPAQIRAKRVRKQKNDRRDAEHLMKLMLENNFPRIWVPTPENRDVRQLVLHRHRLVGMRTRVMNQLQAIAINEGVRRKRGLWSEKGRSQLESFPLPPWTSRRRQELLELLDRFDPSIDQLSQAIGKEAERVPEVQRLQTHPGVGPITALAFVLVIGTPSRFNCGKQVASYLGLIPCEESSADSWRLGHITKQGNALLRCLLGQAAQSVARSDEQWRHQYAHIAMRRNKAIAKVAMARKLAVRLFWMWRHGWDYEQLKKFGSHVG

SEQ ID NO: 452072 - protein, 347 aa, unidentified
MPATNIVTIGIDLGKNTFHVVGLDAMGAIVLRKKRSRNQLEQSLANVPSCLIGMEACAGAHHIGRRLEKLGHQVRLLPAQYVKPYLKGHKNDFRDAEAIAEAVQRPTMRFVPLKSTEQLDLQALHRVRSRLVTQRTAVINQIRGFLLERGLPVRQGTAALRLALPELLSMLSDNLSPRVIQLVQDLVEDWRYLDRRVTSITKEINELAEQDAHCRRLMTAPGVGPIISSAMLAAIGTGDAFRKGRDFAAWLGMVPKQFSTGDRTILGRISRRGNRYLRTLFIQGARAVLLRRQTWPRHGFGAWLEAASKRLRSNVLVVALAAKLARMAWSMLAKGRDYDANFLGQTA

SEQ ID NO: 452073 - protein, 391 aa, unidentified
MSRAHANREQTRLQPKLCDGAQKRPVSLSPISYPVNAPLGYKGQLTVELDSGDRSSSYCVLDEGGEIILEQKLPTTPEAVKQTFKGMPRSRIALETGTHSPWVSRALTELGHEVIVAHAQKVRLIAKSRRKDDRLDARMLARLARIDPELLSPVQHRSAQAQLHLTETRARAGLVSARTALVNAARGLVKSYGERLRKCGTQQVSRETTSGLSSGLREALQPLLREVESLNERIKEYDRRIEKMAKEKYPETALLKQVKGVGDLIATAYVLTIEDPQRFRKSRDAGCFVGLQPGRRNSGESEPQMHISKEGDEYLRTLLVQGAHYILGPFGEDSDLRRWGEKLAARGGKNAKKRAVVAVARKLAVLLHRLWVSGEVYEPLRNSQKAMTVAA

SEQ ID NO: 452074 - protein, 336 aa, unidentified
MSKTYLGIDVHKRHCVFTEIDSGGNILRRGRFDNSFEGVSDFIGSLSPKVELVLEPVLNYLWLLDQIEPYVGSVHVATPHKVRIIAESKSKTDKYDSRMLAELLRTNFLPESWVPPYEIRILRGVVRQRYHLVKTMIMNKNRIRHLLFWHGIDLRVFDVSSPKACGEIDRLCFCETSKKSIEQCLDVISSLKRSISELDRQLLEMSEGIESVELLQTIPGIGSVRSATIYAEIGDINRFKSSKALANYSGLIPSVRASGDSVRVGGITKLGSRPLRHALVEASINVIRKSRALNRLFNRVLYRGNVQKARVAVARKLAVIIYAMLKHREPFRAQIA

SEQ ID NO: 452075 - protein, 367 aa, unidentified
MVKTIKSESSKKTMADGATAVGLDLSDRKGRFHAIEEQGKTIEKGTVPLEAVQLQRWASNIPPTVMAIEAGTHSPWVSRLLTACGHEVIVANPVKVALITKNTNKSDGVDAEYLARLARFDRKLLHPIQHRGEQAQLDLQVIRTREIMVESRTKLIGHLRGAVKSFGARLPKCSTEAFVNKTSKAIPEQLRAALDPVYVQIEHLTTTIAGYDRQIEKTAKERYPEVERVGQVKGVGTLTALSFVLVLEDAGRFRRSRSVGAFLGLTSKRDQSGESDPQRRITKAGDRLMRRLLIQSAHYILGAFGEDCDLRRHGLRISERGGNRAKKRAAVAVARKLSVLMHRLWVSGETYEPLRNSGKVLELSSAA

SEQ ID NO: 452076 - protein, 418 aa, unidentified
MKSIKAEKIKTINEKTLVVALDIGKKVHYGYFRTPKHQDVKPFPFYNTGQSFNKFWEKLCRFKEKHMLDEVIIGFESTGPYAEPIANYLRKKPVKLVQVNPMHTKRIKELTGNSPNKTDKKDPRVIADVISLGHSLTVVVPEGAAAQLRRLTHARERAMERRTAMNNQLQDLVFVIFPELGDIIKPSTKTGMYLIKNYPDPESIVSIGNKTLCNIVRKISRGKFGIDRAEKLYNAAKESVGITEGKESILLETSHLVSSIEAENRYIESLKEQMIVYLEQIPYSHSILSIKGIGNITVAGLIGEVGDFRKFKTISEVMKLAGLDLFEVSSGMHKGKHRISKRGRALMRKLLFFAAINAVKSHGIMHARYQKMLNNGTPKIKALIAVSRKLLRIIFALARDNAQYEENYNRKHDFKLAA

SEQ ID NO: 452077 - protein, 423 aa, unidentified
MSTKQPELAAFIGLDWADERHAVCLRVAETNKIRTFSIEQQPEKLHAWLSSLREKFNNRKIGIAVEKSRGGLIYALMEYDFLILYPINPKSLAKYRESACISGAKDDPSDAELLMDLIYRHRERYRPWSPDTTQTRTIQLLCEYRRKVVGDKIALTNRLEATLKGYFPQALDWAGALDTVQACDFLTKWPSLQAIQKARPASIRKFYMDHSCRRADVIERRLKSIRSAQLLTDDEAVTHASILMVQTTVNALRPVIASIKRFNDDIAEVFQQHPDRELYESFPGAGEVMEPRLLAAMGSDRERFGSADEVQTFSGIAPVTKRSGKIHYVHRRYACPRFIRQTFHEWARLTLKESIWARAYYEHQRSIGKRHNTAIRALAFKWIRIVFRCWKNGILYDELIYLKSLRRSKPAWAVRAGLAVEAA

SEQ ID NO: 452078 - protein, 346 aa, unidentified
MRYTGQHTHYCGIDLHASTMYVCILDAAGEILVHRNLKSSPDALLEIIAPYRDGLVVAAECTFTWYWLADLCANENIPFVLGHALAMKAIHGGKAKNDKIDSHKIAVLLRGGMLPQAYVYPAAMRATRDLLRRRLHFVRKRGQLLAHIQNTIHQYNLDPFGKRIAYPANREGLLEHFPDPAVRKSVEVDLALVERLDALIADLELTIVRHAKRHDADAFHRLRSVPGIGKILALTLLYEIHDVTRFDRVQQFASYARLVKCAHESAGKKLGSGGAKQGNVHLKWAFSEAAVLYLRHATDGKKLLARLERKHGKGKALSILAHKIGRAVYYILARGTVFSPEKFANA

SEQ ID NO: 452079 - protein, 423 aa, unidentified
MEVMHKRVAGLDVHKETVVACVRLMVGRKSTRECRTFATTTEGLLALRDWLTASRVTHVAMEATGVYWTPVWKILSEGEFGLVVANAAHIKQVPGRKTDMNDAMWIADLQACGLIKASFVPEENVQELRSLTRTRKQLVREQTRHVQRIEKTLEEANIKLGAVISDLMGVSGRRMIEAMIAGECNPHRLAALAERTIKASPKALYDALHGRLREHHRFLLKVHLRQWDALDAAIREIDRQVAGQIERMDAEAADGQPPFRELIQRLSAIPGVARLSATAILAEIGRDMGRFPTAGHLVAWAGLCPGQNESAGKRKSARLRRGAPWLKTMLVQCAWAAKRAKDSYYMAQFHRLRGRRGPQKAICAVAASILTAIYHMLKSGAAHRDLGADYFDRRAPEAKAKRLVAQLAKLGFAAQLQPLVDAA

SEQ ID NO: 452080 - protein, 312 aa, unidentified
MSHITIGVDISKDTLDVYRLPEQEHCQFSNDANGFKSFIKWLDGAPVYRIVYEATGAYHRAFEQALGQTDLPLSKVNPLHAKRFGQAIGKLAKTDKMDAALLARFGVAVELRMRQVAPQIMYDLKELHIARKALIKDRTAAKNRQKNLTLPMLKRDARQTLKHIEARLKRIDKAMGDLIKSDTALAKRLAILMSIPGIGECSAYALIIDMPELGELDGQTAAGLSGTAPIVRQSGKWKGKSFVHGGRPHVRQALYMPALVASTYNPDMKILYRRLIKAGKPPKVALTAIMRKLIVLANALVRDQRKWNENMA

SEQ ID NO: 452081 - protein, 425 aa, unidentified
MNSISNKKINQVTDQTLVVGMDIAKKKHYACFVDERGRVLKKPFPVLQSREGLEWLYQCIVEAMKEFGKTEVIVGIEPTGHYWLNLAYFLDEKGIPLVMTNPMHVKRSKELDDNLPTKHDAKDALVIARLVKDGRFSYPRILKGMEAELRVGATFRSKLVEERGAIRNQMIRWLDRYFPEFSQVFPSFGKMALAVLEYTPFPSDLAGKELEEVLALYRQSEGLQSPQKPKAKKLMELAQHSIGVTEGQQMARIEIATLVRRYRQLEKEIEALNEQLTELVQTSVEYEWLKTVPGLGDATIVELLSEIGSFSHYQDPRQLLKLAGLTLRENSSGQHKGQKRISKRGRRRLRALLFRVMMPMIRHNEAFRQLHDYYTTRPDNPLRKKQSIVVLCGKLLKVLHAVCTKHQAFDAKRMMQDIFGLETAA

SEQ ID NO: 452082 - protein, 353 aa, unidentified
MKRPKDKLMAGIDLHSNNVMIGVMNQDGKRVAYRKLDCDLKAVIQFLEPIKFQLQSLAVESTFNWYWLVDGLRAKGYPIDLANPAKIEPYRGIKHADDKDDAFHLAELQRLNILPKGHVYDPELRPVRDLLRRRLNLVHQRTALLLSFKSLHARTTGQQLDLAEAKKMEPKEAPKLYRHPANQLIAQVQAEHIQALAKSIARIEKAVLACAQEIPLYEKLLTLPGIGRILGMTITMEVGDIKRFKTDGDFASYCRVVDARRFSNGKRKADNNQKCGNKYLSFSFVEAANFARRYCEHCRRWYDRKAARTSKVLATKALACKLAKAAWHVMARQCNYDEKRMFPELATQPMNQD

SEQ ID NO: 452083 - protein, 409 aa, unidentified
MDVVHPRCAGIDLHKRSVTACRIVPGPDGRPAKEIRTFPTFTRDLLALADWLDEVGVTVVAMESTGVYWKPLYNLFEDRFELVVANAAHIKAVPGRKTDVRDAEWIADLLRHGLLRASFIPARPERELRELTRYRTSLTRERAAELNRLGKVLEGANLKLGSVVSALDGTSARAMLEALVAGETDPARLAGHADSRLRASRETLETALAGRVGAHQRFLLAAQLRHLAELAALIAEVSAEIEARLRPFAHQLELLTTIPGISRRTAEIVLAEVGPDLTRFGSARQLASWAGLCPGNHESAGRRHGGTTRKGSPWLRSALVVSAASAGRTQTYLGAQFRRLTARRGLMRAKVAVAHSLLVIIRAMLVRDEPFRDLGVNYFDERDRQQVERRLTRRLEALGFAVVPAPTTT

SEQ ID NO: 452084 - protein, 424 aa, unidentified
MKVTYQTCCGVDVHKSFLVATIVKTTGGIEPSYQKKRFSTFNNSILEFKQWLLDNHCHDVCMESTGKYWVPVFNLLEDKINVVIANPKWVKAVKGNKDDTKDSKWIGDLFRLGLVKGSYIPCKKVRILREYTRYRYKLVSCRSSEKNRYQNALTVCNVALDSVVSDIFGKSSTSIIDYLLEQSGTTINHEEIASKLLRRLKSKEDAVIESVEGYQMTDAQKYRMRLVRAHMDYITAEINDVDKMIENMISSNPDFENAIQFLCTIPGVKRDSAITIISEIGTDMSQFSSSKRLCCWAGLTPGSNESAGKKKSVRITRAGVYLKPALVQCAHAAVKSDKSPYYKKKYESLVKRRGKKRSIIAIARMILTAIYQMLSTGEQWNPSDLYKIDMPVALVEKQKAKAIKQAKKLLQREGLLPPDEPLAS

SEQ ID NO: 452085 - protein, 376 aa, unidentified
MQAPGTALRLGQARRAHPYTELANMDTTTILAIDLGKFKSVACVYRRGGGGTPAFHTVASTREALLGLLDRVAPAVVVIEACALAGWVHDLCVARGLPCKVANTASEAWRFQHLKRKTDRDDALRLAQLEDLGQLPTVCLPPAEVRQRRSLILARQRLVGLRVRAQNRLRSLLMMQGLEAPRGAAAWAAAGLAAFEAQARPLAECPPAEAWRGLVHLALAEYRQALAWVEEVEAQLDALGRADEQVRRLRTVPGVGPRTAEVVSAYLHQPKRFRTGKEVGAYAGLVPRQSQSGESDRRGRITRRGPGVLRKLLVECAWAMLRYNRWAAALYARLSRGRARKKQAIVALARRLLVRCWAMLRDGSDWREEAPAAAGA

SEQ ID NO: 452086 - protein, 387 aa, unidentified
MTVRTVTNLPAVTHGETVRCLFAIELSTMSWVVAFNTPLSGKISRHALTGCKWKRLLELIEEVRARVSRETGRAVEVVSCYEAGYDGFWLHRKLEAHGIRNYVIDPASLQVDRRARRVKTDRSDTDRLLRSLMAYLRGEPKVWSVVRVPSVAEEDARRLHRERDRLVSERVQHVNRIKGLCALQGIYDYNPLRPQAMARLEQLRTAQGGAFPPRLKSEIMRGLQRLEMVVEMIATLEAERNAIVENEASTHLNAKKIQTLHKLKAIGPEFAAVLVGEIFHRDFNNRRQVASYVGLAPSPFQSGNVAHDQGISKAGNRKGRTTGIELAWMWLRYQPESDLSVWYRARVGATKGRIRRIAIVALARKLLVALWRYLETGLVPRGAVLKG

SEQ ID NO: 452087 - protein, 369 aa, unidentified
MEKGTTYVALDDSKRKIVAGILRPGDAQPELREIANDPRQIRRLFERLKREGPVTACYEAGVSGYDLYRQLRALGVAGDVIAPALTPRRPGQRIKTDRRDAAKLVRLFRAGELTAIHVPAEAEEAVRDLVRCRDDIRRDVLRWRHRVLKLLARHGRTYLTGKNWSQAHWRWIREQRFDLPPLQRAFEASMFALEQALARQAELDKELEAVAATAPYRESVGWLRCFRGIDTLSAIILLAEVVDFQRFRRPRELMAYLGLVPSEYSSGESQRRGALTKAGNSHARRVLVEAAWHYRHRPTIGRALASRSHGQPDEIVSQAWRAQQRLHRRYRHLVGHGKRTPVAVAAVARELVGFIWAAMTRHESRRAAA

SEQ ID NO: 452088 - protein, 341 aa, unidentified
MKITTVGIDLAKNVFQVHGVDGCGKAALRKQLKRSQFLLFFSNLPPCLIGMEACGGAHHWARKLQGFGHTVKLIAPQYVKPYVKTNKNDAADAEAICEAVGRPNMRFVAVKTIEQQAVLSVHRARQALVQARTAQANQIRGLMGEFRLAIPKGIANLPKQVPLILEDPVYELPGAFRELITRLLAHFHALDRQVDELEGQIQAWHRNNPVSRKLAQIPGIGPLSASALTAAIGDAKTFKNGRQLAAWLGLVPRHHGTGGKQVLLGISKHGEAYLRTLVIHGSRSAILAAQRRAETDSWLARLMQRRHPNVAAVALANKNVRTVWALLAHDREYQADYAAAA

SEQ ID NO: 452089 - protein, 375 aa, unidentified
MSEITRASIARVGVDLAKQVIQVHAVDGGGRRVVARALKREQFLAWCAQLPAGCVVAMEACSGAHHFARKLHSMGLDARLIAASFVSPYRMEGKSGKNDMTDAAAICEAASRPTMRFVPVKTCEQQGVMSLHRVREGLKEERTACINRIRGVLAEFGLVFGKSTKVLRAALGDVIEDAGNELSTMARLVVQRAWEHWRELDEHLHWCDRQVGQHVRSSAAAKRAARITGIGELGASALTASVGDFKQFKSADQFGAWLGLVPRQNSTGGKASLGRITKRGDDYLRTLLIQGAKAAVMSAGKRDDPISRWLAQLTARVGWQKACVAMANKNARILWSVMTRDRGYDPHHVSAKPLAKQPAPPGAATAMHVEQICAA

SEQ ID NO: 452090 - protein, 430 aa, unidentified
MSQRLQVGVDFSLKRADLCLLFPDGRPLEQHIAVANSLPGYAQAKRLLLDALDTYAFDGVDLSGEATGYLWLPFFLQLAADPDLEPYDLRLFLLNPRWVKWFKKCFAPDDKCDQKDPFYIAERTRTRRPDATWSPSPYLPLRFYTRLRFHLVQNLAREKCYFTTFLFLKASSYRRLKPFSDVFGVTSRLVLTQQPTLDELAELPVEELAAHLYELSGHHLPDAQHNAQQLQRVAQESFRLDETLAVPVQRILDLTLAHIQFLEAQVQQVDEWIASAAAAYPVIAQLATIPGVGPVFSSGLGAEIGPLDCFLQAPKWDRKRKRYRARNLRDAEDAVAKIAGLWWPRADSGDFAAQDRRLAKTGNRYLRYYFIQAANLMRRHCPEYTTYYQRKYAESVKHHHKRALVLTARKSVGLVVGLLHRNESYRSQEA

SEQ ID NO: 452091 - protein, 340 aa, unidentified
MNYYAGIDVSLEASSVCVIDASGKIVREAKVASEPAALIAWLGSLGLELTRIGLEAGPLSQWLYAGMREAGLVVELLETRHVRNAFKIMPVKTDRKDAHGIAELMRLGWFRPVHCKSMEAQETRAMLTARKLVQKALHEVEMSLRGVLRGFGLKVGKVAPARFEARIEELVEGHPNLAVIAASLLAVRATLRREFNGFERRLRAMARSDTRARLLMSVPGVGTIVALTHAAAIDDPARFTSSKTVGAHFGLTPTKYQSGETDRSGCISKIGDGSVRAALYESAHIIITKPIKGCTNLKSWAMRVAKRAGMKKAKVALARKLAVIMHRMLADGTTFTTQPA

SEQ ID NO: 452092 - protein, 349 aa, unidentified
MIVIGVDTHKRSHTLVAVDAATGGVLGERTVLANDEGALAAVRLVSALGDERVWAIEDCRHVSGRFERSLVAAGERVIRIPPALTANSRRSAREPGKSDRIDALAIAHAALREGVERFPPAFLDEQAMEIRLLCDYREQLVVERTRLMQTLRWHLVALDPELEASLRPAGLIGPRIRARVARRLAKLGNGAQARVAKAILTRISQIRRQELALEAELKTLVAAHSPQLLAQHGCGTITAAILVGHTAGAANFPTDASFARHTGTAPIPASSGNTTRHRLHRGGDRQLNRALHIIALSRARTDPHTRAYLDRRAAEGKTKREALRCLKRHLARHFWKLLYKPANSEPTLT

SEQ ID NO: 452093 - protein, 379 aa, unidentified
MNHYTKVVGMDVHKKIIVVAVLPIGSDRVTESFTIENTPKAVERLAQRLTTNGSAEFVYEAGPCGYEAQRQIAGMGHKCVVIAPGLTPVRPGDRVKNDRRDAEKLARLYRAGELTEIRIPSREEEAARDLVRVREDVLEDRLRARHRLSKFLLRQGRVFTESKSWGVAYHAWVTKQKFEWPALQQSFEAYARAAEESQARIDHLDQQLQDLAQKEPYKTPVQYLRSLRGVDTLGALTLVVEAQDFRRFEKARGFMGYTGAVPSEYTSVKVQRGSITKVGNAHIRRILIEAAWSYRRKGVMSQYIAKRRNGCPADVIAIARKAEDRLHRKYWRLVGRGKLPQKAVVAVARELAGFVWSIGQKFPATTAAQRKAMADAALG

SEQ ID NO: 452094 - protein, 345 aa, unidentified
MTLYCGIDLHSTNNYVAILNEKLERVAGQRLGNDLDEVLRMLSPYRGEIAGIAVESTFNWYWLVDGLMDAGYRLHLANTCKMKQYDGMKYRDDRHDARWLARLLALGILPVGHIYSQEERPLRDLLRRRSFLVRKRSSMLISMRGAFACRTGMRATTNDIKTWTEEDLEHLLSDPDVRLGLSCLVAPIKAMTEQIEIIEKWVLPRARLRDEFRMLETVWGIGKILGLTIMYEVGDISRFEKVGNFASYCRLVNSEYLSNGKRKGKGNSKNGNPYLSWAYSEAAHFANRYRKPAQKFIQRKRKQTNGIVANRALAHKLARASYYVMRDLVEFDPERVFGASQCELM

SEQ ID NO: 452095 - protein, 444 aa, unidentified
MSRKQRKHIRGKRGEAFLQIVRGVDRTRILCVSLDVSKYFHVVMMHNAYGEIVTCSFEIDIFRSGFEHLCHAIDETAAGMEAEVVLIGMEPTGHYFENIARHLHARYEHVYLVNSLAVKENRRQKLMHYEKTDEEDAAAIGDLLCRGEGTPYRPSQGIYLEMQHIDRVRIAKLKMRSALKNQIIGHLDRIFPGMIISHKAAQQRYSPLFTTPFWSCQMAQHLVRVCPDPRRLSQMTPHALIEAFHEQGYRMGPRWAAKIIAFAQQTLHPDPEVIAVRSPLLQRDLALLEQVEDHINQLEERLCALLSLTPGHIWTRLKGVSSIQVASLVAAMGDPAHYDYAAQVFRRSGLVSRRNDSGTRQSKGKGKRVTKVGDVYLRRALINLVETLSLHQPILGDYRSRLKGVKPHPGVARVATVRKANGILFAIQRDQRINDLRTKKEPPM

SEQ ID NO: 452096 - protein, 340 aa, unidentified
MSTIQVIGIDLGKSNFHVYALGSNPQASFKKHFSRKQLIDFLANQPPTIVAFEACGGAHWLARKCQELGHDAKLIPPQYVKPYVKTNKNDFVDAEAITEAATRHNMRFVSPKTEEQQVIAICHRVRDGYVKERTAVMSRIGATLLEFGLSLQTGHKCMKELFCWLARQEHVTLPPLLLRELEVMHSDYHRLNDQIAEQDRKLKEWAKQEELCELVKSIPGVGDMVATALVMEVGSAVQFRNGREMAAWMGLVPRQYSTGGKHKLLGISKRGNKHLRCLFVHGARAMMSRLGRNKGPYDVWLLKLRESKPFNVVCIALANKLARIAWAVLTTRTPFQGTAC

SEQ ID NO: 452097 - protein, 356 aa, unidentified
MIIIGCDFHTRFQKIAMVDTEIGEITKRRLEHGNGEARAFYAALPGPARVGMEATMNAQWFERLLQEYHHELWVGDAAQIRAAAVRKQKTDDRDALHILDLLVRDKFPRIWIPSPENRDLRQMLRHRDKLVRIRTSVQNQLHALAMSQGLCRKAKLWTKAGRKELEGLPLDPWASRRRWELLQLFDQLDPQIDELDKVVIQEAEKRPAAVHLMTQRGVGPVTALAFVLTIGAVERFPTSKHLVSYLGLNPGEDSSGGRQRLGAISKQGNSIMRHLLSEAAQTAVKFDPELRRDYLRLKFRRGISGVAKVAIARKLAVRLYWKLREVAQPNTAARMQGSPTSWQWKGEFGERIMVEV

SEQ ID NO: 452098 - protein, 313 aa, unidentified
MNNKVAGIDVSKATLDVAQSCAGEVKQFPNDAEGVEALVETLKAAAVDLVVMEATGGYETAVATALVGAGFRVAVVNPRQVRDFAKASGRLAKNDRIDAQVIVAFGEAIEPEIVRLPDEEAREMEALLLRRRQLVAMRVQEVNRLALVRGAMRKNIKAHIDWLENEIDKLNVDLTAGLRSSPAWRAKDELLRSFKGIGPVSSRTLIISLPELGQLDRRAISALVGLAPFNRDSGVMRGRRSIYGGRSHVRTVLYMAATTAIRSNPVIREFYQRLKARGKPHKVALVACMRKMLTILNAMVRQSTPWTPEINPL

SEQ ID NO: 452099 - protein, 351 aa, unidentified
MVYAQINTTYYCGIDLHARSMFVCVMDKAGKIIFHRDVPNDFKVFLEFMKSFLPHLAVGVESTYNWYWLADGCREAKIPFYLGHALYMKAIHGGKKKNDRLDSKTIADLMRANLFPLAYVYPKEMRATRDLLRRRHRFVSLRARALSHIQLIFVQQGMLDIESRDVKNKKTRRTLLDKLPHPDLKMTVETDLNLIEALDPMIASMEQQIRAQAKHHDRKALEVLLSTPGIGDMLALTILYEIHTVSRFESPQQLSSYGRVVKCERTSMGKTTDRGNQKIGNPHLKWAFGEIIIHAPKSAPRIKRHYEQLQAKFGPGRAKSIIAHEFAVAIYFMLKNGQVFDELRFVQARMK

SEQ ID NO: 452100 - protein, 515 aa, unidentified
MPGASAVKTEGSLVLPSPTCSVVLDPVLNTVMTSAVHRLWRISFGRLPSLHGPGRRAEAERREVMPKKRAKAVSLPIVEPDAAGVDVGATQIFVAVPVERDPDPVRCFQTFTADLEKLADWLQQCRIRTVAMESTGVYWIPLFQILEKRKIDVRLVNAAHIKNVPGKKTDVEDCQWIQHLHACGLLRGSFRPGDEICAIRSLWRHRDNLIELATIHLQHMQKALDQMNVQLHHVISDLAGATGLAIVDAILSGERDPHTLAELRDWRIRASKETIMKSLVGDYREEHLFTLRQSLESYRHYQTQIQKVDAHVKQMMQTIPSKVAEGEKPPNEKNPRKTPWRNEPPQLRDDLYCAFGVDLTQVPGINTLTAQMIFTEIGPDFSRFPTAAAFCSWLRLCPNPKISGGQVLSSRTRPTKNRAALALRMGAQGLYHSHSYLGDYFRRMRARMGTPKAMTAAAHKLARIVYYMVSTRQEYDATVFQEQERRTQDRKRAKLQAQARELGFQLVPVATVAVP

SEQ ID NO: 452101 - protein, 393 aa, unidentified
MFFVGIDIAKRSHEACVINQDGAFVVKPFKFTNDFKGFNKFLDALKTVSDDFSAFDFGMEATGHYWLNLYCKLLDHGAVVHVINPVQSDALRGLYIRPHKNDSKDAFIIAELLRFGRYAQTSLSDPDLMALRELTRQRTYLVDCTSDVKRKVIALIDKVFPEYEQLFTDMFGSTSLQLLETYSTPDTLVNIDTDTLAQFLSAASHGRFGRDKAEQVQSFARNTFGSFLFADSAAFAIKQFLEQIRLLERQVQELESYIAEYLAKFQSALTTIKGIGTTLAAVFVAEIGDVSRFPAPDKLAAFAGIEPRTNQSGEFTGTQNHMSKRGSPYLRRAFYQAAVACNMHNPALHAIYEKKRAQGKHHNVALSAVARKLVNIIFAVMKSNRPYEMIMPS

SEQ ID NO: 452102 - protein, 344 aa, unidentified
MDHYAGIDVSLEYSSVCVVDASGRIVREVKVASEPEALIGWFGSLGLGLARIGLEAGTLSQWLYAAIKQAGLAVELLETRQVYEAFKSMPVKSDRNDARKIAQLMRLGWFRPVHCKSITAQEIRAMLTARKLVQSKLLDLENSLRGILRGFGLKVGKTTRTGFAGRIEELVKGHPNLQTIGQALLRARAVLFAEFNGFEKRVRTMSRLHDQARLLMSTPAVGPIVSLTFACAIDDPFRFTSSKRAGPHFGLTPKKYQSGETDYTGRISRHGDASVREALYEAAHIMLTKPIKGCSELKRWAMRIARRAGTNKAKVALARKLAVIMLRMLKDNAPFNPAAKAATA

SEQ ID NO: 452103 - protein, 356 aa, unidentified
MNFNNNTLYVGMDLHKNTSSFCVKDYAGTILRQEKILTDKNQIRDFMRSLGSTASIVLEPVSQWYTYADMLEQLGHDVHLAHPMKVKAIASARIKTDKIDASVLADLLRSNLLPEAYFANKEVRKWKEIVRFRASLLNLRTQVKNKIHAILHKHALKHNFSNLFGKSGRIWLSNLSLGEPFASNLAQYLSLLDFLTKQIDEAEAQVEKQVSNHPHAKLLTSIPGVSFVSALTIMAEIGDINRFPSAKQLMGYAGLVPSTYSSGDIARHGRITKTGSKWLRYIMVEVAHHQVLCKKIPGFGSYYLGMKKRKGTGTAAVATARKLLAVVWRLLKDNRPYQETPPHRGKSGPLAQKYSS

SEQ ID NO: 452104 - protein, 308 aa, unidentified
MSEKHNSVIAVIGIDIGKNSFHVVGLDGRGAIALRQKWSRGQVETRLANMPACLIGMEACVGAHHLSRRLRLLGHDARLMPAKYVRAYSKGQKNDFRDAAAIAEAVQRPTMKFVATKSADQLDLQALHRVRERLVSQRTGVINQIRAFLLERGVAVRQGRRFLLARQDAGCERLMSVPGIGPIISSAMVAAIGAGDTFTKGRDFAAWLGLVPKQFSTGDRTVLGKISKRGNRYLRVLFVQAAWVVLIRSKNWERYGLKPWIEAAKRRLHRNVLAIALANKLARIAWSVLAHGRNFEASKVAEAAIQPA

SEQ ID NO: 452105 - protein, 346 aa, unidentified
MNQIIRIGMDTSKHIFQLHGVDAAEQPVLRKQLRRKELVAFFAKLPPTVIGIEACGASHYWARELKQLGHEVKLIAPQLVKPYVMRNKNDGRDAEALCEAMSRPRMRFVPVKTAEQQAALMLAGIRERLIARRTQLSNAIRGYAAEFGLTAAKGLDKIEPLLAQIAQDESVPALARGLFAMQGREYAQLQVELKAIEARLRAWHRANADSRRLAQIPAVGPIIATALVMKTPDPRAFPSGRHYAAWLGLTPKDHSSGGKTRLGKITRAGDEALRSLLVVGATAVIQQVRRGRGHPSPWLVALLKRKPPKLAAVALANKIARIAWKLMVTGESYDGARMLGASASAA

SEQ ID NO: 452106 - protein, 364 aa, unidentified
MNSVYHTELSSLEETRCQFNGGRCAIKLGIDVHQEFYVVVMQEGGANPKPPQRFQRQAFLHWAGRLKQKSGAEVYAVYEACGFGFSLQRNLSALSIHCYVICPQKLDEQNRRVKTDGLDAKALCLKLDRFVQGNRAALAMVRVPSEAEERSRAIHRQREQLVGARKRLEAQGRSLMVNHGFEPVQNWWKPRTFAPLEVPQWMRELLSNSQPILVALQQKIAALSVQLQCAAAPNQPRGLGLMTSVIIDREIGDWRRFSNRRQIASYTGLCPGEYSSGNSRLQSCVTKHGNPRLRAALVELSWRLVRFQPNYKPVVKWRAILAKGALATGAARKKAIVAVARQLAVDLWRVRTGRCKPQALGLVI

SEQ ID NO: 452107 - protein, 335 aa, unidentified
MTLYCGIDLHSNNQVIVVIDDKDKRLLEQRVPNELGATLSALEPFRKDLLAVAVESTYNWYWLVDGLGDHGYSTRLVNTAAVQQYSGLKYAGDRHDAFWLAHLMRLGILPTGYICPLEIRDVRDLLRKRLGLVRERARNLTSVQNILARELGHRVATAQLRRILDTDEHFRPGVRTAIAANLAVIETLDTVITGIQAQVLEVIKSTSRHRQLKTICGVGDVLAPTIALETGEIARFKSVGNYSSYCRVVDSRRESNDRKKGEGNKKCGNRYLAWAFSEAAHFAVRYNDRARRFFDRKAARRNRMVAIRAVAHKLARAAYFVQRDRVEFDAMKLFG

SEQ ID NO: 452108 - protein, 429 aa, unidentified
MTRISAGVDVSKNRSTVCIIDQDGKVIMRPFLVCHSTEELDFLADTLKRLNGEVRVIMESTSIYQYPIALHLKEKGIFISIVNAYKVKKFANTDFRGGKTDKKDSRTIASYGISYWDKLVEWQIPKDTYFNLDLLNRTYMNAKKHRQIILQELQHYIDCAMPGMDKELHSLNLNTKKDFMLDFVEKFWHRDKIVNMTEAEFTEVFTAWAKEKGYRPGKGKAAKIYAIAKSCIPYYPANPTVKTILQCIVDKLSGVNRTLVTIVTQMIEEAKKLPEYQIVREMPGVGDPLAARFFGSAGDIRRFKNSKALVAYAGIDSPPDESGDFSSTHRHITKKGSKVFRDTGYEIMMALRAQKRTWEKVRKNPEVYDYMLRKEAEEKPRKVAKIAALNKFLRIVYARIKELYDNMALAERAKTKTRYKTRAKTKVTA

SEQ ID NO: 452109 - protein, 528 aa, unidentified
MGKIIRVGVDTSKSVFQLHGVDENEEPVLRRKLRRQQVLTFFARLEPTFVGMESCGGSQYWARELRALGHRVVLVPPQYAKPYVARGKNDAADAEAICEAMSRPKVRKRFVAIKSAEQQAATMLIGVREGLVRRRTQVSNTIRGHAAEFGVVVGKGLAHVGELLEHVANDPTTPELAKEMFVVLAGQYIHLEAQLKEIDARLTALHRGNEQSRRLAEIPSIGPITAVCLCAKVVDPKMFGCGRDFSAWLGLTPKDHSTAGKTRLGVITRAGDEMLRALLINGAMAVIQHIERSKIEPPLWLEQLLARKPKKLAAVALANKTARIAWKLMVSGERYDPRRAASAAARGAGPSVRSGRRNGFWPNKETYQRVWRTADPVRQGRNLHEDVGVIDRSKTRDIPTLPAAQETASLFGARVADTNSVASLAGVKTGHMIASDPLTKSLASRGPSTYGSARLHGRIKSGHPTRYPREAERSARTRCGSAGIEPASPHAELEFRAPSSAESLQTRTAAKPPENATASTNLCDKSVR

SEQ ID NO: 452110 - protein, 352 aa, unidentified
MESITYLGIDFHKRTSTLCFMNEKGGDIEMVNIHTKNLNKFLANRKNLLIGIEAAGGTNDAAEKLKLSGHDVRIVNPNKLGLVGQGGKKTDEKDARAIADCLRLNFVCEVHHKSRRARELKSLVVGREMLVRSKVNQINHIRGTLREYGITMPAGVEKFMALARASIEKIDCGYLKEHLLYLLDRTVDLEERIKHTEDHLEKILEENEQAKNLRTVPGIGLMTVAAILAVVDDVSRFKDAKSFASYLGLVPREHSSGDKRRMGSITRSGSEIVRRYLIHGARCILALSSRPTKYDSDPNISWAQHLKSRIGMNKATVALAHRMARTALAILRENKPYEAKKTKRLKTIDLAS

SEQ ID NO: 452111 - protein, 415 aa, unidentified
MSVTDAADPVEPSPTAGVDWATDDHAVAVVAPDGEQTLRFSITHDAAGLRSMVRRLLAAGVAEVGIERPDGPVVDGLRQAGLTVYVIPPGQLRNLRSRYGSAGNKDDRFDAYVLADVVRTDRRRLRPLLVDTPATTALRQSVRARRDLVAHRVAVANQLRAHLQICFPAAVGLFADIDSDISLRFLERFPTPERADWLSVKRWTAWLSSVGYSGRTLPETLHTRLRDAPRGATGTHADTAAAVTAAFVAVLRTLSTQIQALAARIAEQLDLHPDAPIFTSLPRSGRVRAARLLAEIGDARGRFPTADSLACLAGVAPSTRQSGRVEVVSFRWGADRQLRDAICDFAGDSRHANPWAADLYQRARARGHDHPHAVRVLARAWVDIIWACWTSNSPYDPDKHGALQRILNQDQPSAA

SEQ ID NO: 452112 - protein, 361 aa, unidentified
MTGMVTYAGLDVHARSTHAAAVDVVSGELVRARFGPGVEEPVAWLSGLPGPVRACYEAGPTGFGLYRAAAAAGVDVQVIAPGKTPRGPSDRVKTDRKDAELLARLLAAGSLTAVVVPPVQVEAARELMRSHDACRRDLMTARHRVSKMLLRHGRVYPRPSTWTVEHRRWLSRQQFEEPASELVFADLIAATDGISARKAAIAERLSRLAQDEQWWPTIARLRCFRGVDTLTAFALHLELGGDWQRFEHASALSAWLGLVPSLHQSGESSHQGSITKTGSGFARRLLVESAWHYGRDPRIGATLQNRQQGQPDHVLQIANRAQQRLHRVYHRMRSRGKPHNVTVVACARELACFLWAAATAD

SEQ ID NO: 452113 - protein, 344 aa, unidentified
MNYYAALDVSLRSVHLCVIDDSGELITETKLSSEVTDIIAYLDALGLEVSIVGLEAGTLAQYLTYGLQSAGFEVACMEARQVKAALSAMRNKTDKNDARGIAQLLRTGWYSKVHIKSMESHRVRALLTSRRAVLSKCIDLENEIRGLFKIFGIKLPSKLGHGSFDAAVRDVIETDMTLSHSLLPLLDARLVLYHCFRELDNRTRHMAHADSVCQRFMSAPGVGFITALTYKSGVDDPYRFKHSRTVAAHFGLTPRRFQSGEIDIDGHISRCGDRDVRCALYTAANALLTRSSKWSPLKAWGMKLAKTRGHRRAVIAVARKLAVILHRMWLDDVPFHWSTEVTRS

SEQ ID NO: 452114 - protein, 347 aa, unidentified
MDQQCHYVGLDVSLETTSICVIDDAGAIIWRGKCRSDPDTITAIVRQHAPGAVRVGLETGQLSNWLTLSLRRRGVPVVCMDARHAKAALSLQINKTDANDAFGLAQVVRTGWYREVAVKSMDAHTLRMLLVARSRLVSQRQATANTIRGLLKTFGLVVARGSKGLFPVRVREQIAGNPALIAIIEPLLAVWHAIRDQVAMLDRQMLARARNDQVARRLMTIPGVGVVIALAYTAVIDDPARFRRSVSVGAYLGLTPRRYQSGEVDTTGHISKCGDSLLRGYLYEAAAVLLCRDARASILKSWGLGLAKRIGMRRAKVAVARKLAVIMHRIWSDHSEYRWTAIPPTAA

SEQ ID NO: 452115 - protein, 466 aa, unidentified
MKRNRRRPSPKPRTSPAALERLHPDAAGIDCGSAEHFVAVPPDRDATSVRSFATFTGDLHRLADWLTACRITHVAMEATGVYWIPVFEILDARGFQVILVNARHVKNLPGRKSDVSDCEWLRDLHMLGLLRGSFRPADGIVALRGYLRHRATLIESTGALVQRMQKALIQMNVQLPLVVSDITGVTGLRILRDIVAGQRDPHHLAQHRDYRCRASEAEIVAALTGNYRAEHVFVLQQNLELFDAYQRQLATCDIAVEAHLAQLASTVAAPTTPLPPPRRRRRAREKNEPRFDLRSPLHTLTGADLSQIDGIGPYNALRLLSEIGTDMSRWPTEKHFTSWLTLAPHNKISGGRLLSSRTQPSANRAAAILRLGAMNLGRTQTALGAFYRRLAFRVGKAKAITATARKLAILVYRTLKDGFVYADPGADAYDTQHRTHVVRRLRQRAQNLGFGLINLSTGEVLDGAVS

SEQ ID NO: 452116 - protein, 387 aa, unidentified
MTKNKGRVVGLDVHPDTFAGAVVEGSDPASAKVLSSSTRVELEQLEHWALRHTKREDTLVLEASGNAFAVAGRLRGIGRRVEILDSHRAGKVGKVYCANDRVDAIKIARIYLSALSPIVWQPDEKTLERREVFSAYQAVVKESTRAKQQLRSMLNEHCVRLEKGFRLCHPQAITRLLALRAWTPARAMLLQQLHGSLVAARARRTLLRRHMAQEIVAEEALLRLTRLCGINLITLYGVVAAVGDVRRFTHSKKLVAYLGLNPTVSQSGNFEGSGALKRHGRGALRALLIQSGKKLLEVNNPLQKWGLAVAVRRGRNKAAVAVARKLCVALWHVLMGHAIGALERLDTLATKLSKFATEMGPAALAAFGYNNKADFVKKKLYVLQSYP

SEQ ID NO: 452117 - protein, 358 aa, unidentified
MIKYSVGLDVSSKDVKACISSIDLKQHVKVHSTKTCTNNQAGLASLIKWIDKHHKQKKLPLFVCMEATGVYHELFAFGLFDNGFCISIIVPNKAKKYLQFLGHKSKNDKIDAKGLARMACEQELKLWSPAAKFYYLLRTFTRYHQSLQEQKTILKGKLHAANASAHTQTYVVDQLLAQANLIDQQITNVLIKINKHLQTNPEVLQKVEQITVIKGVATLTVSVIIAETFGFELFENAKQLISYAGYDVVENQSGSRRGKTKISKKGNSRIRRILHMPAFNTVRWKQGNFVALFDRLVPKHNIKMKAYVAVQKKILTTIYALWKSNKAYDPEFHSSKNISELEQEISSSVEYEKIVLIN

SEQ ID NO: 452118 - protein, 340 aa, unidentified
MNTTTFGLDIAKRTFQMYWVEVETGEIVNRRFSKQQLIEFLGQRSAGLVALEACGSAHWWARKIVALGHEVVLLHARFIRPFVQNNKTDATDARAIWTAAQQPGMRSVAPKSAEQQATLALHRMRSLMVKSRTMQVNQLRGLLYEFGVALKAGRIAGLAEVRERLPEIEQVVPGTLFSALREQLHFIDRIEDEIKKLERQIVAWQRQEAACRRIAAIPGIGPLTATALVATIGDPSAFKSGRELAAYLGLVPRQSGTGGKTRLGGISKRGDAYIRMLLIHGARAVLFKSRRKSAWCEQLSLRRPTNVVAVALANKMARTAWSLLAHQSAYREDYVARETA

SEQ ID NO: 452119 - protein, 397 aa, unidentified
MKTIIGVGIDCSKNKHVVCISDNMGNQCESVFTIHNKLKDVEYLAEKVLEVENKLGKADVVINMESTGIYHLPLYSVISKIFKTNIYQPKQVKDMSSKNIRKSKTDKRDARTLSRIHLEISPPQTDYGDREMYDIREIIRQRFSYKDIRTNLKNKFRRNLSIVFPNFDTLFKNPYASVPWNLLKICPTPEDVLRLGVQDISKIMEKASRGQKLRVTPQDLIKLTEESIRCDIMDRGALFGLKALMEDIEYLDRRIKQIDNEIEIYWNKIKRTLYFPTFPGLDMVKAVALHTEYGGFRRFPHPDKAVAFAGLENMVYISGDSKNFNGRMTKAGSPIIRRVCWELLNTPVLNIPKITAHMDKLKSKGKQRNIRVHSASKKMIRTLWAMEHHEQVYVRET

SEQ ID NO: 452120 - protein, 331 aa, unidentified
MKAVGIDVSKNDFQTCLLEYANPSGYRVLGTRKFPNSNQGFENLLKWIKKHQSDGAKFIMEATGVYHENLAYYLFDKGQQVCIILANKMKSFFKSLNVKTKTDQVDARIIAQFGLERRPDCWEPMSPQFRSLRAISREILACKKDLTRAKNQLHAMDSAFGANPKLEKLKKSQIKFLTKMIDELRKELNQLVGKDVDLKERIKKLTSIPGVRDETAIIVVSETNGFSLFQNIRQVVSFAGLDVSHNESGLFKGRSKISKKGNSKLRQVLYMPALTATRFNEPIKKLYERICEKNPTVKRKGIVASMRKLLILMFVLWGKNEAYDKNYQWAN

SEQ ID NO: 452121 - protein, 316 aa, unidentified
MEAPVAGIDVSKDKLVVYFQGKYYEFPNDRQGYEEIIKILPKGCKVGIESTGIYHINLAKYLMGEYDVRIINPFILKKFKDFRGKKSDKNDAKKLAELVVSMGSEFTTSDARELTSQWDFVTRSIARVKNRLRRDLILLGYKDSLSKKNLEEVLRGGDSIVLAEVRFLLEELERLEVRKREIEEKLEDLVPKDSLIFTIPGIGKTLGCIILARVGDIRRFSDKKRFVAYCGLDPVIESSGKSVVSKGISKRGDAVLRRAFYLAALTAIRVNPVIKRFYEEHKGKLKGKKLIIACARKLAVITWAVLYYNKPFDASE

SEQ ID NO: 452122 - protein, 416 aa, unidentified
MDEPLSSYVTQGYIVGHREDPTGQKGGLFMTVYVGIDIAKEFHFASIMNHDGVPSKPFAFENNAQGFHALLSACSSYAKEELVFGFESTAHYQDNLTFFLNNLGLRIMLINPLQVSALRKSTIRNTKTDRVDAHLICLALCYFHDHTTARASVSNNELYQLCMTRHDLVSKRSAAKIQLVAHMDRIFPELARFFKGNLHLNTSYKLIEVYPLPSQIEKTRIDVLTKLLYRASHGKYSREKAQELKSLASVSVGIPSEIFAFKAQLLVHQIEFLSRQIQTIEDKIKSFDSLQESPIYTIPGINTIFAAYILSSIQNITLFDKSCKLVAFAGLDPIVRQSGKFTASSTHMSKRGNSLLRYALIWTSWNVVLNNKTFADYYDKKRSEGKSHYNALGHCATKLIRCIHTMLTHQVSFNLE

SEQ ID NO: 452123 - protein, 340 aa, unidentified
MNATTYGLDVAKRVFQMYWVDAQTGEIVNRRFGREELIGFLAQRPAGRVALEACGSAHWWARKIKALGHEVVLLHAKFIRPFVQTNKTDAADARAIWTAVQQPGMRTVAAKTEDQQAMLSVHRIRALLVKFRTMQVNQLRGLLYEFGVTFRAGRQAGLSEIRVRMAKLEDALPGVMMCSLQEQLKRIDGLEQEIDRLEQRISSWQKQEAACRAIADVPGIGKLTATALVATIGEAKAFKSGRELASFLGLVPRQSGTGGKIRLGSISKRGDPYLRTLLIHGARSVMYHTKQPTPWQKSIQARRPANVAAVALANKMVRTAWAILAHGQAYQKDHVRVKPR

SEQ ID NO: 452124 - protein, 347 aa, unidentified
MTIVEDTRAITGGAGTHADVHVAAALDPVGGLLGVREFPVTAAGYASLLSWLRGFGTLAVAGVEGTGSYGAGLARYLAAAGVRVVEVDRPDRQDRARQGKSDPLDAVSAARAALSGRASGAPRGRDGAVEAIRALTVAKRSARQERTQAINQARALIMTGPEELRARFARRSPAQLAGAVAALRPRPGEVPGYATRVALRELGRRAQFLDAQLERLDGLITPLVAARAPGLLALHGVGPDTAATLLVAAGDHPERLRSESSWAHLCGVAPIPASSGKTAGRYRLNRGGDRQANSALWRIVIVRLSSDPATRAYADRRSKEGLSKKEIIRCLKRYVAREVYRQLRAES

SEQ ID NO: 452125 - protein, 318 aa, unidentified
MNTDTHQNINVGVDTGKSQLDIFIRPLEIFFSVSNDEKGIKEAIKTIKTHHPQRIVIEATGRLEMPFILACAEAKLPFVIANPRHIKRFAGAIGRLAKTDKLDAQLIAHYSEAIKPKLAELKPENMRLMSELVARRRQLLTMQTMEKNRLQSLPKHIAVTIKPVLTVFKNQLEKTEQKIRKLIEDNPEYQSKNRILQSVPGIGHIAAASIISNVPELGYINHKQAAALIGVAPINRESGCYKGKRETQGGRAQVRTVLYMAMMSAMQCNPIFKATYARLLAAGKPKKVAIIACVRKMVVILNSMLRDGVMWDENRTKN

SEQ ID NO: 452126 - protein, 431 aa, unidentified
MEEVADEPLYRERVCGIDIGKAGMAATIRVPSDKDPSRRMAETRSFATTKRGVLELADWLRCWQVPAVAMEATGDYRKGPFCRLEAEGLECVLADAKQIKNLPGRPKRDPSDSAWIAVCFERGAITPCFVATPEFRLIRLHTRYRRDLTGDRTRDKQRAEKLLESAAIKISAVLSDVHGVTGRDIMDRLIAGERNPKALARLARKRARAKIPQLEEALEGTDFVTGAHAGLLRAMLERIDRADAEIARLSQVIEDLLAPYEEQLQQAESMPGWGRRAAQDVIAETGTGMSRFPTPGHLASWAGRTPLDHQSGARRGRARRKHGNRYIGAVTGETAVAAGKTDTREGARHRRLARKRGKAKACAATGNTQMRVFRALLSRPGSRYEDPGAGWYDDARQAARRLSHLVGTLGAMGYEVTLCRKPPGPEDAPAT

SEQ ID NO: 452127 - protein, 316 aa, unidentified
MGGQGVYVGVDVSKERLDVAVRPSGEFFAEANDKRAVSRLVKRLAALNCTRIVVEATGGYEMVVVAALSAVGLPVVVVNPRWVRNFAKGIGWLEKTDHIDAQLLALYGERAELKVQQLPDEATRQLRELCARRMDLLEMIDAERNRLEHASSVVRREIARHVDYLRKRLKRIERDIDGAVRSSELWRHKDELMDSVPGVGPTLRASALAWLPELGQLNRGEAGKLVGIAPLPDDSGKSRGYRRIAGGRGPLRKVLFMATMGAMLHNPHLRAYYDHLRANGKLHKVALVATMRKLLLILNAVIKTDTPWSESCLVNR

SEQ ID NO: 452128 - protein, 351 aa, unidentified
MSHKTAATGAHTIGIDTGKNTLHLIGLDEKGAIVLREKIARGRIAARFANMPRCLIGIEAGMATHYVARELIALGHDVRQVPPAYAKPFRQGHKNDFRDAHAIAEAVQRPSTRCVPVKTDDQLDLQALHRVRSRLVGQRTAVINQIRGFLLEHGIAVRQGLRFLRQQLPDILGKRGDVLSPRMTRIIEDLSGDWRRLDERIKHITEEIEVLAHSSESCRQLMTAPGIGPLIASAMVAAIGNGIAFAKGRDFAAWLGLVPKQMSTGDRTILGRISKRGNRYLRTLIMQGARVILLRPANWAKHSFGLWLTAAAQRLHHNVLATALANKLARIAWTVLAQGRSYEARVEPKVA

SEQ ID NO: 452129 - protein, 445 aa, unidentified
MSLDCCYEHAGLCPGRGPSGPAPSGDGRLTKRRDVMEVMFERVAGLDVGKESVTVCLRTPGPKGRRRAETRTFKTTTGSLDLMRDWLVEAGVTIAAMESTSVYWKAPFYCLEEVMQVWLLNAAHMKAVPGRKSDVRDAEWIAQLLEHGLLAPSFVPPPDIRRLRMLTRYRVQLMGDRRRDIVRLELMLEDASIKLSSVASSLKTVSARAMLTAMINGESDPLRLADLAKGKMRRKIPDLAQALTGHFDTNHARLARSMLRQLDLVEQALAELDAIIIDACQPWQHQIELLQTIPGVGQKVAQVIIAETGGDMSRFPTAAHLAAWAGLAPAMNESAGKQSPAGKRHGNKWLTAMLVEAAGSVGRMHGKNYLAAQHARLMRRRGMGRAQVAVAHSMLVAAYWMLKRDEPYHDLGADWHRRRSDEAHTRRLVTQLEHLGHHVIIDPAA

SEQ ID NO: 452130 - protein, 335 aa, unidentified
MTITTIGLDTSKAWFQVHCVDAVGRTVLRRKLARSKVLSFFANIPSCLVGLEACGGSHFWARELAKLGHDARLMPARYVRAYVKTNKHDAADAEACCEAVQRPGMRFVPVKTEEQQSMLMIHRTRDLLVRQRTAAVNALRGHLAEFGIVAAKGTAKAHELMRLAGDDERLPPTAREALGYIVAQIHDIESRLKIFEQRILSLAKEDEVCRRLMTVQSIGPYIATAIAATVGDPRNFASGRHFAAWLGLTPKQHSTGGKEKLGGISKRGDSYIRRLLIHGARATVARVRSGQMKSAWLSGLLSRRHFNVATAAWANKTARVAWAVMSTEQAYRRAA

SEQ ID NO: 452131 - protein, 345 aa, unidentified
MDHFAGLDVSVKETSICIVDDAGKIVREVKVASEPEALLAVLKNLAYHFKRIGLEAGPLSQWLFSALAEAGLPVICVETRHMQAVLKAQINKTDRNDARGIAQMMRAGLYRPVHVKTIRSQKLRMLLTHRKLLQSKAIAIENDLRGTLRNFGLKVGMVGKVKFEARIRELVENLPDLAVLVEPMLIVRRTLREQIVILHRRLLAIVRDDEVCRRLMTTPGVGPVVALTYRATVDVPARFRKSKAVGAVFGLTCAKYQSGEVDRNGRISRCGDEMMRVMLYEAAQSMLRSKKWSWLKAWAMQIARRRGMKKAIVALARRLAVIMHRIWVDGTEFRWTREQATAATA

SEQ ID NO: 452132 - protein, 323 aa, unidentified
MLPNKVIIMKLFIGVDVSKEVLDIHYNGNTVNVTNNQKGLTRLHTLLKKEVIKGNEIAMIVCEATGGYENKLVEFMMLNQLPIHRAHANKIRAYAKYLGKLAKTDKIDAYIIASYAQNADIEADKPRMEEEKILAGLLKRREQLKADKARELNRLDKDLSGTVIKSAKSHIKWLEKEIANIDKEIKKTLENKELNAKMELLKSIPSIGDVTASILIAFLPELGKSDEKRLAALIGVAPFAKESGKYKGTRRIMGGRDIVRKALYMAALSSVRHYKEMREFYLRLTGKGKKCKVALIAVVRKLIKVLSSVMDRQTPWQEVCPMK

SEQ ID NO: 452133 - protein, 409 aa, unidentified
MQVVHEVCCGLDVHKKSVTACVLWASGRRRQTRAFGTFTRELLELGDWLRACGVTHVAMESTGVYWKPVWNLLEGLFEVLLVNAQHIKAVPGRKTDQKDSEWIADLLQHGLLRASFVPPSPIRELRDLTRYRASLAQEINRIANRIQKVLEDANIKLASVATDTLGASGRAMLEAMVKGEQDSQRLAEMAQGKLRNKIPELQEALQGRVSRHHRFLLRELLDHLYFVESKMQRIEQEVAERLGPFQSEVARLCTIPGVDLVTAWGLLAEIGLSMKQFPDAQHLASWAGLCPGSHESAGKRKSGKIRKGSLWLRRCLCQGAWAVSTKKNNYLSALYRRLAARRGSKRATIAVAHKLLVIAYHILRDGTCYSDLGADYFDRLNPEGLRRRLTKRLEGLGFKVTLEPLPQVA

SEQ ID NO: 452134 - protein, 351 aa, unidentified
MIIIGVDYHPSFQQIAFLDQETGECGERRLNHSEGEAERFYRELKQRGVSVRVGLEATGYSRWFERLLAELGFEVWIGDPAEIRTRRAKKQKTDSKDAQLLLKLMVEDRFPQIWVPSPGNRDLRQLLWHRHRLVQMRTRIMNQLQALAMNENRCRKKKLWSERGRAELEMLSLLPWASRRRQDLLVLLDRLNPTIQELTAAVEQEAKKRPEVLRLMTHPGVGPLTALAYVLIIGTPMRFACAKQIGSYVGLIPSEDSSGGKQRLGHLTKQGNSLLRFLLVEAAQAAVRCHPDWQRRYRHLALRRQRNIAKVAMGRRLGVSLYWMWRRGWEYPQLVKFGSHAGELGTGDGVQ

SEQ ID NO: 452135 - protein, 345 aa, unidentified
MQAEYDGRQIVGIDLHRRRTVIVRMTEAGEQLGCVRIDNDPLALAAEIAKAGEHPEVVLEATYGWYWAVDVLQDAGAQVHLAHPLGVKGFAYRRVKNDQRDAADLADLLRMNRLPEAYVAPPAVRELRELVRHRAKLVAVRSGLKAGVHAVLAKQGLHLPVSDVFGVGGRQLLQAAGLDGPYRARIHAQLRLIDAFDFEIDTVTRQLRARLCHDRGYQTIQRIPGVGPVLAAVFVAEIGEAARFRDAAHLVSWAGLTPKHRESDTTVRRGPITQQGSGLVRWAAVEAAQKIPATAGWLVSSRARIADRRGRNIATVATARKLLTLVYYGLRDGHIRALAPAQTAA

SEQ ID NO: 452136 - protein, 369 aa, unidentified
MKNGSTLRVGLDVHKESIAVAYAGEDGTEPVYVGEIGTRQCDIDAVIRKLQSKGAELVFVYEAGPCGYWLYRYLMRKGLTCFVVAPSLIPRKAGDRVKTDRRDAVMLARLARSGDLTPVYVPAVGDEAIRDLSRAREDALHDLNAARFRLKAFLLRNDIRYSGRANWSAEHVRWLARLVLPTPAQQIVFQEYVRTVSERTELLRRLEGELLEQAKTWRLVPVVEALQALRGVQFTVAITTVAELGDLTRFDSPRQVMNYLGLTPSEYSSGERRRQGGITKMGNGHARRVLVEAAKAYRHRAKVSEAIQARQQQLPKEICDIAWRAQVRLCGRYKKLALRGKHANTIAAAIARELAGFMWAIAKAQAPAA

SEQ ID NO: 452137 - protein, 402 aa, unidentified
MRFFVGIDWASRAHAVCIIDQTGRVRWQDSVPHTAEGLPELVGHLRRFRGRGGLRVALERPSGLLVDTLVDAGLEVVPIHPNALKATRPRYSAAGGKSDPGDAFILADLLRTDGHRFPALRPSSDETRALRALVRGRDDLVTQRVALANQLRALLERFWPGAAAIFVDVDSAIALAFLARYPTPHSAARLGEKRLAQFLGQHAYSGRRPVVELLARLRTAPASQVGEAEAEASGDLVRALVAVLTPLVGQLQQLSAAIEAALAQHPDGRLVQSLPRSGAVNAAQILAELGDDRARFPSDEQFAAEGGLAPVTHASGQHKAVVFRWACNKRLRRALTTFADNSRHASRWAALVYQRARARGCRHQHAIRILARAWVRILWRCWQDRAPYDVSRHRAAQALAAA

SEQ ID NO: 452138 - protein, 338 aa, unidentified
MTQHKIIGIDLAKNIFFLFEINHKGKNIGRKKLQRKKLLDYIANKEPSTIAMEACSGAHYWAREFKQFGHEVLLYPPQHVKGQRRRQKNDYNDAEAIAEVALYKRPHPVPHKSVEQQDIQSLIRMRRLLVTERTRLINQIRGLISEYGIIIPQGKVAFRKSIPEILESNENQLSPVLRELVSHQYERYLYIDEHIQWFDDKLNQTVKQFDNAKRLMSIPGFGPLTSQAVAVWLGSGQQFKTGRDASAAMGLVPKQDTSGDKVILLGITKRGNTYIRSLLVHGARAALRRAKFKSDKLSKWMLELQERRGANRAAVALANKLMRIAWAIIAKNEEYQPA

SEQ ID NO: 452139 - protein, 342 aa, unidentified
MENPTVRHQLYVGIDIAAATFTAAWLSPGGAPTPPVTHSQTPQGFAALQRHLAVTGSAPAATLVVLEATGSYWVALAVTLHAAGYAVSVINPLQAHHFAKAQLRRAKTDPLDARNLAQLAAALQPAVWTPPPAVYHEVRQRLTARDALVTMRQQTRNQRHALVQWPVVVASVHDHLDGVIAMLDTRIADLEAEIAAVLATSDWAESLAVLTSAPGIGMLTAAWLLVSTMNFTLCATPEAATAYAGLAPMPRASGTSVRGQARIGHGGHGRLRTALYMATLAAVRHNPELKTFYARLRAAGKPSKVARCAAARKLLHLAWALVTKRQRYQSNHRIVDPALAAA

SEQ ID NO: 452140 - protein, 340 aa, unidentified
MSLVLQSLLPDPDSCQGPSPHQQGWDTKMADLFHGGIDVASDRLDVMLLPHGQCFWVGNNAVGWGELVERLRGLCIAAIGIEASGGYERGVLRALLAAGISVRQINPFKLRQFAKARGVLAKNDRLDARMIALFVATMPTRPAQRNEAAERMAEIVTARRQLSDEKVAAENASRLFEDAILRRLYRRRLMRLALDIALLDKRLAAMVSANVALAQRYRLLTSMPGVGPVLAFTLIALLPELGQMSRRQVAAIVGVAPYDFDSGKLKGMRCIWGGRAPVRRVLYMAAVTACRYNPSLKAFHERLSAAGKKSKVAIVAVMRKIITTLNAMIRDNAAWNARFA

SEQ ID NO: 452141 - protein, 356 aa, unidentified
MRREIKYIGMDVHKEAVVIAVLNGSGKLVMESIVETKASNLLQFIHGVRGELHVTWEEGTWAAWLYDLLKPQVQQVLVCDPRRNALLKEGNKSDKIDARKLADLLRTGMLRPVYHGEHGLRTLRELARSYQTISKDLNRVMNRLKALYRGWSIPCAGTKVYAARSRQEWLQKIEHAGVRRRAELLYQQLDGLQALRRTLRPELLAESRKHKATKLLRQIPCIGPIRAARLLALMQTPHRFRSKRQLWTYSGLGIETRDSAQYRYVRGQLQRSKKPQQIRGLNQNHNHEMKEIFKGAATRASCGVGPLRDFYAALLEKGMKPEMARLTLARKIAAIALTLWKKEERFDAEQLKTQAA

SEQ ID NO: 452142 - protein, 399 aa, unidentified
MEGPCIAIDVSKDESHIQGYMTLGEPIGGAASIGHDKEGFTRLEELGKELTMRAGRPPAAVFEATGIYHRGLQSYLESIKMTYYIVNPLLAAKCRKQELRTKKTDIRDCKNLAKVYYTTELRETTMADEKYYRMRQLSRYYEDLLNHLRKCKVGFTEALDVVHPSYRDVFDDPYTATSFALLKTYPHPSALERRKPETVARILEKQGDHGVVWCFEKAEQAIRHAQSCVSGCKATDVNVDILLGELEQVEAYQKRTAEVLKQIVEQAKTLPEFRLLTSVPGIGENLAARIMAEVGDIKRFARSKQLAAYAGLDPIVYQSGQMDGLHLRISKKGNKRLRCLVYLAARCGLAQRTTNVIKDFYNKKTRQAHPLCAKAASVACAHKLLRIIHGMCVTGIQFR

SEQ ID NO: 452143 - protein, 353 aa, unidentified
MKPRKDFSTAPLAVIGVDIGKEVFHIVGLGVDGKIAFRKKIRRLGFEDAFEKLPPSIVGMEACLSAHFVSRVLRRLGHEPRIIPAIYVRPFVKGQKNDYNDAEAIAEAALRPNLRAVQEKSQDQLDLQACHRVRSRLVSRRTATINQIRAFLIEQGITVRSGARALRNSLFAILENRRDEISPRMASLILGLYEDWCRLDKRIETVTSAIEELSQIEPKCQRLMSVPGIGPIIATGIVAAISMGEAFERGRDFAAWLGLVPRQYSTGGRSVLGRISKRGSKYLRTLLIQAAKVLLMRPHNWPRYSFGAWLTAASGRLHKNKLAVALANKLARIAWSVLRNETAFDLRPDAVAI

SEQ ID NO: 452144 - protein, 391 aa, unidentified
MIFVGIDVAKDTHYAAVSDDSGAVLVKPFAFQNNAAGFCLLLKKLSEFDRSKLLIGLESTGIYSENLICFLYESGFRLAVINPIQTATLRKTAIRKTKTDKVDTMLIIKSLMVNSYRLYSQRDADSLKLRTLCRFRQNLKKSKARMKIQLAEYVNLVFPEFGKFFKSGIHIAASYALLKKYSSPKEIAALRTSTLCTLLSKASHGRFGKDTAEALKSLALSSVGVKNPYISIQIAQTIAQIELLEQQIKDLNSAIEEAMESINSVLMTVPGIGAVNAACILGEIGDIKRFSKPCKLLAYAGLDPTVRQSGQFTAKSTRMSKRGSALLRYALINSAWQLTLNDTTFKAYYDLKRSQGLNHYGALGHVAHKLTRVIFKLLTSDTPFNPAKLVA

SEQ ID NO: 452145 - protein, 349 aa, unidentified
MSQNLNSAVAVIGIDIGKNSFHVVGLDDRGAIVLRQKWSRGQIEARLANMPPCLIGMEACVGAHHLSRKLKALGHDARLMPAKYVRPYSKGQKNDFRDAEAIAEAVQRPTMKFVATKTADQLDLQALHRVRERLVSQRTGIINQIRAFLLERGVAVRQGLRFLRAELPRILATPPDVLSARMVQVISDLAEDWRRLDHRIDDLSNQIAVLARQDAGCERLMSVPGIGPIISSAMVAAIGTGDSFSKGRDFAAWLGLVPKQISTGDRTILGKISKRGNRYLRVLFVQAAWVVLIKPMSWDRHGLKHWIEAAKKRLHRNVLAIALANKLARIAWGVLSGSRTFEVSKLQAA

SEQ ID NO: 452146 - protein, 334 aa, unidentified
MEQVTTVGIDLAKNVFSLHGVNGAGRVLLRKTVRRDQLVATVARLSPCLIGMEACSGAHEWGRRFRGHGHIVKLMAPKFVAPYRKSDKNDGNDAEAICEAVTRPNMRFVPVKSVEQQALLALHRVRQGFVVERTAVINRLRGLMTEFGVVLALRSVTVRRQAAEAAQGLPELAHAAIDDLLEQLRLLDARIDAYDTQIHAQARLSEPARRLMQIRGIGATTALAIVATVGDAREFKNGRQFAAWIGLVPGQYSTGGKTRLGHISKRGDAYLRNLLVQGARSVLQTAPMHPDRLSRWALELQKRRGYFRALVAIANKNARIAWALLAKDMPLRMS

SEQ ID NO: 452147 - protein, 403 aa, unidentified
MNAVGIDVSKGKSMVTILRPFGEIVSSPFEIKHTSSDILSLIKLIHSIEGESRIVMEHTGHYYEVLAQQFSAAGLFVSAVNPKLVKNFNNDSLRKVKSDKADSIKIARYALDKWQNLKPYSIVDELRTQLKAMNRQFHFYVKQKTAMKNNLINLIDQTYPNANTYFNSPPRSDGSQKWVDFVYTYWHVDCVRKMSLNSFVKHYQNWCKQKKYIFNKSKAEEIYTKATELVPVFPKNEITKRIIRQAIAQLNSTSASVETIRILMNETASKLPEYPIVMQFKGIGPSLGPQLMAEIGDITRFTHKGALTAFAGVDPGVNESGSYAQKSVPTSKRGSSNLRKTLFQVMDVLIKTMPQDDPVYQFMDRKRAQGKPYYVYMTAGANKFLRIYYGRVKEYLCILSESS

SEQ ID NO: 452148 - protein, 420 aa, unidentified
MDVIVERCAGLDVHKRSITVCVRKPAAGGGRVEEVRSFAAFLDGLSELRAWLVAEGVTKAAMEATSSYWLPVWRVLEEDEGPELLLVNARHVKHVPGRKTDVADACWLAQLLECGLLGSSFVPPRPVRTLRVATRYRKRLIQARTSEIQRLEKVLEDAVVKIGSVASSALTKSGRAMIEALIAGERDPQVLAELAKGRMRAKIPELVRALDCRFEADHAVQLRQLLDHIDWIEAAICDLDARVVELSRPWAETIRRLATIPGVGQRTAEVIIAETGGDMSRFPTSAHLASWAGLCPGHNESGGKRRSGRTRHGDVWLADALTEAAWAASHTNDTYLAARFRRLAGPRANGRSKKKAAVALAHKILVIAYHLMANDDETYKELGSDWFAKRDDPDRRCARLVSQLEALGHTVTLTSTQPAA

SEQ ID NO: 452149 - protein, 377 aa, unidentified
MNTSITHVALDTHKKQHQVAWVHPDTGEIQEFTVLNQTREIERMVKRIRQQSPGEIHVCYEAGLCGFVLQRRLEKLGCVAKVIAPSLVWRKPGDRVKTDRRDARKLLTQFVAGQLTEVYAPDPVQEADRELTRCRESAQIDLKRARQRLNSFLIRTGYVYQDGNLWTGKHAQWLKGLAFDQPGLRTVFEEYSAEIEHSLAQVESLDQQVQALAQSERYRAAVGVLRCLRGIDTLTAITLLTEIFEFGRFDSPRALMAYLGVTPSEDSSGETRRPGAITQTGNRRVRRLLTESAWHYRHPYAVRGSKRSMTDRVYRLFGYRRGEGPVRSAPAGIPPAPPAVAEPSVPWGLCPGCSTHLLVGFVRSSHNRLHTGVAFDA

SEQ ID NO: 452150 - protein, 386 aa, unidentified
MQASHVSTPIAGHNGTIFVAIELSQKDWLVTLHSPDKDRMSHYKVEVGDGAGLLALLERVRERAGRKLGALPGVKSCYEAGYDGYWLHRFLQANGIENYVFDPGSIAVEQRSRRTKTDRIDGEQLVRTLRSHRRGEPRVVRIVHVPSAGQEDARRATRERDRLIKERTGHTNRIKSLLRLLGMAVGNPLRRDWLTWLARQRDWQGRPVPPQILAEIEREHARLMLLREQLSKLEKSRTEVAPTPELAETARREEVLCRLRSLGPAFTGTFTYEVFYKDFTNRRQVGSYVGLAPSPWRSGGTNREQGISKAGNPRARHKAIELAWLWVRHQPESALTLWFRERTAKASKRVKRIAIVALARKLMVALWRFVTTGLVPTGARLKPATA

SEQ ID NO: 452151 - protein, 346 aa, unidentified
MRFYDQQHEFYCGIDLHTRKMYLCIFDREGNKQLHRNMRAKPSEFLRAVEPFREDLIVGVECMFTWYWLADLCLDENIKFILGHALYMKAIHGGKKKDDKIDSEKIARLMRGGTFPLSYVYPREMRATRDLLRRRTFLMRRRSELLAHVQLVNQQYNHDPFEKMLQFASNRDVLDRFELDSARQNVQADLQMIGHYDQLLKQLESNLLQQAKLQDPQAYNLLRTIPGVGKILSLVLLYEIHIIDRFASEGDLLSYARLVTPKQTSDGKVTGHSGAKIGNPHLKWAFSEAVLMMMRHCENAQQFVARKEKKYGKSRAMTMLARKIARAVYQMLKRKEAFDAVKFFAN

SEQ ID NO: 452152 - protein, 440 aa, unidentified
MAMRKRDDEVFPNAAGIDVGGSSHWVAVPRSATDEPVREFGAMTDDLNAMADWLLGCGVDTVALESTGVYWIPVYEVLEQRGLKVWLVDARQMKYVPGRKSDVQDCQWLQKLMSLGLLRAAWRPDGEVCVVRAVARQREVLLTEQTRWVQRMQKALVQMNIQLTEVLSDVMGQTGQAIIRAIVAGERDPQVLARHRHGRVKASAQEITRALTGNWRDEHLFVLGQALAMYDDMARHLGECDAKLRALLSERGTGRVELGTPPRAGTRSCAQFEVRQALANWAGVDLTRINGLGVTVVMKLLSEIGPDLSRFATVKHFCSWLALCPATKISGGKVLSSGTRRSANRARQALKMAAMTLSHCDSALGAFYRRLCTRMDKPRANTAVAHKLARMVYFMLTRGEAFVDQGQQRYEEQQRQRSIAALKRRAAALGFQLNPMETAP

SEQ ID NO: 452153 - protein, 481 aa, unidentified
MKTKPPEKIQKATSPSRRGHWNEMNRKQRREMMRQIQSEDLSLEVVHPHAAGIDIGNESHYVAVPPTRDSQPVRHFGCTTVELKGMAEWLKQCGIRTVAMQSTGVYWIAVYDILEATGLDVYLVNARDTKNLPGRKSDVQESQWLMKLHTYGLLRNSFRPSQEIRTMRTYWRQRNDLIRAAVSHIQRIQKALTQMNIQLANVLSDVSGVTGQAILKAILAGERDPHKLAALRDPRVKASEEQIARYLEGNWQEDLLFVLKQEQEAYEFCQQQMAECDHQLEQYLQQREDRSQGASLPQEMRKGRLVRKKGNKPMFALRTELFRITGTDLTQVDGIDVVTAATILSEAGWDMSKWEDEHHFVSWLRLCPDNRISGNKVLGKGRLPTNNRASIALRMAASTLRVSNTYLGAQFRRFRTKLGAPIAIKAMAAKLARLVYRMLRYGMKYVDQGAKIYEAQHRQRQIGQLKWNAAKLGFRVVEAAA

SEQ ID NO: 452154 - protein, 389 aa, unidentified
MLIEQIAPAAEAELARIFVGLELSLSKWLIGVGSSRRATIRRHYVRGGDLPSLLDLLRRIATEEEKRSGLSGKIHICFEAGRDGHWLYRALKTAGYDVYEIDPASIAVNRRARRAKSDGLDVAMLVRNLARFVRGELDVFRVVVVPSEEEEDAKRPGREYERLVKERTSHIARIKSLLFLQGIRDFNPRAADWLERLVALPLRPGLRAELVRECRRLSGIIADIAELEAEMKAAITMTKKVKPAVSAIQLPSHVQFTIKQLAKLKSIGLHFSTLLGCELFYRKFSNRRAVAQYLGLTPSPFQSGDTARDQGISKAGNKRARKAMIELAWVWLQHQPESALSQWFLQRVGDLKGRIRRIAIVALARKLAVALWRYLESGIIPERAVLKQA

SEQ ID NO: 452155 - protein, 427 aa, unidentified
MNDSRYKPTLCVGADVHLDEIVLRAVDKALGHEVLQQFRVTNNLPGAQLAASTIAQTATDLGYARIEIGWESTGMLWIPFHRYLSTEPLLQPFELDLVCFNPKLVAKFKDGLVLRSPKNDDRDAFDIAARLRFGELPVSYVPSDFWQGLRRLTRYRYRLSKALSQEKNRFQSYAFLKCSDWNRVQAFSDFLGATSVALLTEFTVAEVQNMTHDQLVDLISRRGRGRFDDPTATARAVRQALRTSYPIDPQMDEMVTAALAASWDHIHYLNRSMKRLDHLIARYIDLVPNPLITIKGLGAVITAGILAEIIDVLRFPEEKHLAQFMGLTWQKSSSGGFVSQNTRLTKVGNVYLRYYFIMGANLLRQHNLEYKAYYWRKYQEVSKYQHKRALVLTARKLVRLVHALLTKNEPYVRPRMTDPGQEDVGLQ

SEQ ID NO: 452156 - protein, 347 aa, unidentified
MTIVEDARVITGGMDTHADMHVAAALDPVGGLLGVREFPATAAGYASLLSWLSGFGTLAVAGVEGTGSYGAGLARHLAAAGVRVVEVDRPDRQDRARQGKSDPLDAVSAARAALSGRASGAPRGRDGAVEAIRALMVAKRSARQERTQAINQARALIMTGPEELRARFVRRSPGQLTEAIAALRPRPGDVPGYATRVALRELGRRAQFPDAQLDRLDELIGPLVTARAPGLLALHGVGPDTAAMLLAAAGDHPERLRSESSWAHLRGVAPIPASSGKTAGRYRLNRGGDRQANSALWRIVIVRMSSHPATRAYADRRSEEGLSKKEIIRCLKRYVAHEVYRQLRDGA

SEQ ID NO: 452157 - protein, 414 aa, unidentified
MGSGCKFCIGGMNVNCVGIDVSKGKSMIAVMRPLGEMMIPPFEVGHTGIELCELSSRLRELGGETRVVMEATGNYHLPVAGFLYDSGFYVSVVNAMLVHGYGNNSLRRAKTDKKDAIKLANYGLDHWLTLPRYIPEDEVRLMLKTTYRQYQQCAKVQTMLKNNLISLLDTAFPDANRLFSSPIRADGSEKWVDFVAAFWHCECVCGLSEKAFIAKYQKWCKKHGYNFSQDKALDIYASARGHFSVMPKTDTAKLLVDQSVSQLRAASTALATLRNEMQSLAASLPEYPVVMGMFGVGPALGPQLMAEIGDVRRFHSKKALVAFAGIDAPPYQSGQVEVRSRSISKRGSSALRRTLFLVMTVILQRSPADNPIYQFMDKKRAEGKPYRVYMMASANKFLRIYYATVKQYLDSLEA

SEQ ID NO: 452158 - protein, 372 aa, unidentified
MMKVRFVGLDVHADTIAVAVAEPGEEVRALGMIPNRPESIHKLVKKLGPAANLRVCYEAGPTGYVIYWQLTGLGVHCDVVAPTLVPVKAGDRVKTDRRDALKLARSYCAGDLTPVWVPDAAHEALRDLVRAREAAKKDQLRARHRLGKFLLRQGRRPPIPMKPWTQAHLTWVKTVHFEHAAQEATVVDYLHEVEHVADRIARLERAIDEAVTAAPERMRLVIEALQALRGIAVISAATIVTELGEISRFATPRQLMGYSGAVAAEASSGARTRRGGITKTGNAHLRRIVIEAAWAYRYRPSIGPTLRKRQATLPEDVKEIAWKAQHRLHARYRVLMARGKCKQQVVTAVGRELLGFIWAIGVAVEGREALAA

SEQ ID NO: 452159 - protein, 391 aa, unidentified
MFYVGIDVSKDKHDCHIFDSNGVIHLDNFSFKNNKVGFSSFLKILKSLDNSFFEKIKVGLESTGHYSVNLISFLEDNEISLTVLNPLTVSQSRRASSLRRTKTDKNDARYIAHLLVSDEFKTHLKTLNLISSLKSLTRARFRLNKEIQPLKNRYCRLIHIVFPEISEFFCTVYSSSVYAVLKELSSASHIAKCNITKLTNILKANSHGKHARAKAEELKLLAINSIGSSNIGDCIELKLSIDRIVFLGEQKKCYDKEINNIMNEINSPITSIPGIGTVLGATILAELGDVSKFTNSGQILAFAGAEPNTYESGKFVSTNNSMVKHGSRYLRHALFLATTMAYIHSSNMKCYIDKKRSQGKHYYVSISHGMKKLTRIIFAVLSKNILFTEKI

SEQ ID NO: 452160 - protein, 415 aa, unidentified
MTDERRWYAGVDWASESHHELLTDGDGRKIGEKIFKHGGEGLAEMAAWLMAMSGVAEPRQIHIAIEVPHGPVVETLIERSFKVHAINPKQMDRFRDRFTLAGAKDDSRDAEVMASALRTDLRCFRPLAVADPVVIELREWSRIADDLGAERNRLTNRMREQLWRYFPAMLDLESDLGAEWLLDLWEIAPTPHKAIRVREATVAKVLKRNRIRRFDAAHVLDVLRKPPVQVAAGTTEAAAAHITTLTARIRLVNHQLGEAHRQLDALTARLIPSEENGPGQRKQHDVEILASLPGVGRIVLATLLAEAFDALQRRDYAALRSLTGVAPVTKRSGKSCIVVRRQACHDRLANAMYHWARVAVQRDPRSRSKYAALRSRGHSHGRALRSIADRLLNVACAMLKTGTTFNPSLATEKSP

SEQ ID NO: 452161 - protein, 336 aa, unidentified
MNRYIGIDVHQDKCHGTVLDEDGITARQGYFQNSPSGFKDFFDGTGTGKVAIEATDAWQPVYDWLTEKGFDVKLAHPHKTRIIAEVKIKTDCRDSEALADLVRADLIAEVYVPCDDMRELRGIAKQRGKLVQERSKYKNRTKAQLRKRGIEYKDRNIWTKSGKQWLRDLEINAVNDFLEVLKTLNDRISKLEEEIEEIAGDMEEARLLMTIPGVSYYTALTIIAEIATIERFPSPEHLCSYAGLVPSVKQSGSKEVHGPISGGRPLLRWIIYQATHNHKNNAPNSHVTEFYKRLEQRKPKKLAKTAAARKLTTVIYWMLKLKEEFHPKGYDPRTSR

SEQ ID NO: 452162 - protein, 349 aa, unidentified
MSQSLNSAIAVIGIDIGKNSFHVVGLDDRGAIVLRQKWSRGQIEVRLANMPPCLIGMEACVGAHHLSRKLQAFGHDARLMPAKYVRPYSKGQKNDFRDAEAIAEAVQRPTMKFVATKTAVQLDLQAMHRVRERLVSQRTGIINQIRAFLLERGMPVRQGLRFLRAELPRILATPPDVLSARMVQVISDLAEDWRRLDHRIDHLSNEITLLARQDTGCERLMSVPGIGSIISSAMVAAIGTGDAFSKGRDFAAWLGLVPKQISTGDRTILGKISKRGNRYLRVLFVQAAWVVLIKPMSWERHGLKHWIEAAKKRLHRNVLAIALANKLARIAWAVLAGSRTFEANKFQAA

SEQ ID NO: 452163 - protein, 343 aa, unidentified
MQSVTTIGLDIAKSVFQVHGIDAKGKVVIRQQLRRSRVLGFFKKLSPCVVGIEACASSHHWSRQLKALGHNVRLMPPAYVKPYVKRQKNDAADAEAICEAVTRANMRFVETKTPEQQSCLMLHRTRHLFIRQQTSVINAIRAHMAEFGIVAPVGRQGVEALLEVAADGGDNRVPEVARSCLAALGAQLRALKAQILEFDRRITAWHRSNETSRRLDAIPGVGPALATALVASVADPKAFRSGRNFSAWIGLVPKQHSSGGKDRLGSISKQGDRYLRSLFTAGALAVIRYAKIHGTKHRPWLTALLARRPTKVAAIALANKIARMAWAMMARGERYKEPVALAA

SEQ ID NO: 452164 - protein, 334 aa, unidentified
MGSYHLTENNFHKKFSQDPKPEVLVNYLQKKFPGAEYFSAYEASYCGFGIHRKLIELGIKNIVVNPADVPTTDKEKRQKEDARDSRKLAMTLRSGELKSIYVPSRESEELRSLIRYRKTLVKDIARGKNRIKSNLYFHGIEIPVEHQQASKYWSNKFTLWLKGISHTTQYGTLVLQDMIETNLNLRAKLLKVTKDIRKASTDKKYAKLCSLLTTIPGIGIITAMIILSELETIERFKNFDKLSSYVGLVPTTHSSGEKDSTGRITPRANIILRNALIESAWVAARIDPALSLAYNELCKRMKPSKAIVRIAKKLLNRIKYVLKNEKDYVYSVVS

SEQ ID NO: 452165 - protein, 398 aa, unidentified
MTESSDYESVQVFIGVDVGKDTHHAVAINRSGKRLFDKALPNDENKLRSLISDLKQHGQILLVVDQPATIGALPVAVARSEGVLVGYLPGLAMRRIADLHAGEAKTDARDAAIIAEAARTLPHALRTLKLADEQIAELSMLCGFDDDLAAQTTQASNRIRGLLTQIHPALERVLGPRLEHPAVLDLLQRYPSPEKLASLGQKKLAAQLCKLAPRLGKRLAADIAQALAEQTVVVPGTNAAAVVLPRLALQLITLRKQRDEVALEVEQRVLAHPLYPVLTSMPGVGVRTAARLLTEVACRAFASAAHLAAYAGLAPVTRRSGSSIRGEHPSRRGNKALKRALFLSAFAALRDPLSRAYYTRKMSQGKRHNQALIALARRRCDVLFAMMRDGTFYTPQGS

SEQ ID NO: 452166 - protein, 314 aa, unidentified
MKTMTEKQYIGIDISKTKLDVCAPCGRLPKPSKTAPKGLQKLFRAIKSKPISCHLVCEATGGYEGLLLLTAWKHDVTISRVNPRKVRHLAIAMGFLAKTDPIDAFVITESGKMLKPKPTPEPTKTAQQLGVIVRRREFLMRQLTREKNAKEKASDTFILQDINASIASLSKRLAHFDEAIAKLIDADEVLREKRRRMEQVTGIGPGTSRLLLAALPELGSISDKEVSALVGLAPMNCDSGTRRGKRIIQGGRANVRRGLYMPALCAARHNPTLKAFYDRLCSAGKAHHVALTAVMRKLICLLNRILADPDFNPA

SEQ ID NO: 452167 - protein, 457 aa, unidentified
MSQRKRKARKSKINVNSLPPHLRHINFKAAGIDIGSDRHLVAVPEGSDDVSVRQFDAFTSDLHEIADWLKKCGVTTVAMESTGVYWIPLFELLEQRGFEVKLVDARHVKNVSGRKSDVLDCQWLQQLHTYGLLQGAFRPPDEVCILRSYMRQKEMLTQASSMHIQHMQKALQQMNLLLHNVVSDITGVTGMKIIKAILAGERDPNVLSLNRQEGCRNSKETIAKSLVGNFRDEHMFALKQAVELYETYQTKIAECEQALIKHLETQPDVTDDQPPDSGKPVRARGRMRADVDVREKLFKMTGVDLFATPGLAADTLLTLASEVGFDMRPWKSVKHFTSWLGLCPGTKFSGGKALDRRTKRNANRGAQAFRMAAASLARSQTALGAFYRRIRSRTDGRRAITATAHKIARIYYSMLTKGTPYVEAGQQAYEQMFKERRINALKKQAHSLGYQLLASAS

SEQ ID NO: 452168 - protein, 349 aa, unidentified
MKKRYVGVDLHRNCFTACYRDEEGKNEIKRWPIGGLKAFSKGLNAEDKVAVEATGNTRLFTEAIKDSGCGITVVNPYQFEVISRSVKKTDEEDAKVLAEFLAKDMLPEVRMKEGIQARIASLVQTRDKLVKLRTILKNKINNLLAGRGILLRKESLTSEKGLEAILEMDVDELEKVELEILVNEIRHLNESIKKVEAVLKEQGPKLPGWKNITSIKGIGDVSANIMLSAIGDVHDFADEGKLASYFGIVPRIRNSNETEHSGHITKKGNKLARTALVQCSLIAIKYSPYLNRYYRKIEARRGTGKAIIALARKLLAIIYRTLKNDWVFKDFPNYILETGTVPSPNQARV

SEQ ID NO: 452169 - protein, 401 aa, unidentified
MGPHGAVYGDDRFMNYVGIDVSKFKHDCFIATETGEIVRNPFTFSNDRQGFDGFYSILKGLDPKETRIGFESTGHYGNNLRSFIESTGYPFMELNPLLVSRFRKSATLRRTKTDKIDAKVIAKALMSMDFRPASLKPLSMESLRSLTRHRFRLVRLRANILVQLTSALDVIFPEFKPFFKGRFGKTAFYLLEKYQLPDKMAKMNKLSYEGFNNASRGKISYSSFCHLIELAKVTVGQTNDYAETQIGTLVTLYQCFTTEIAKTEAIVKQAIARLNPPLASIKGIGDVTVAVILSEYGDIHRFSSPAKLLSFAGIEPGIIQSGNSDHVGKMVKHGSGYLRFALMNAAEMMIVHHQTMYDYYAKKRSEGKPHRVALTHVAKKLVRIIFKLETERLLFDSSFLK

SEQ ID NO: 452170 - protein, 410 aa, unidentified
MNLNVGIDVAKAKLDYCGMDSAKHIIFQDEVVNAPAGTEKIIKLILDWADSRDDAEKVVIGMEATSVYNIHPTLYFEQSSALQALDTEIVTLNPKMTHRYSQLFDDDKTDTLDAFHIADFLRMGRYQVPVTRDEKHIALQRLTRERYFVVSQITDCKNHFLNNLYFRLNTLEAELPTSVFGNTMMTVLSGEKYTLDEIAQMPLETLTQDLNQLSHGRFGEPEEIAKALKKAIRSSYRLSKTVADSVDQILAMYVREIRMFQKQLKELDKSIAALCAVIDGANSLNSMPGLGPVYSAGLLAEIGQIERFPDEASLASYAGLSWRRSQSGGNERQLTPRTHSGDQYLRYYLVEAANSIRMHDPVFAKYYDKKYGEVPKYQHRRACIMTARKLVRVIYKLLSDHELYVPVKVV

SEQ ID NO: 452171 - protein, 352 aa, unidentified
MKYVGLDWAYRTAQWCALDPGGEIAGEGRFAADRDGLARLVLELGDEVTACLEMMSGALWARDELVACGWQVQVADARKVKTVAPLAAKTDKVDARLLAELSRRQLVPALWLPSLDDRELRERLRRRMHLVRLRTSAKGRIFGLQTQWGIRISLRRLRRADGITLLERAGMPAVWRHSISECLALIDFLDARIVPLDAELRPFAQADPRAVLLDTIPGVAELLALTIAVEIGEISRFAGPEKLVSYGRLAPRVRQSGEGRPHTGPLNKSGSRLLGWAAVEAAQHAWRESNPWHQLYLDVSRRSRNHNSAKAAVARKILIAAWHMLSRNEPFKPAPRTGATSVPASSRLALAA

SEQ ID NO: 452172 - protein, 309 aa, unidentified
MSISSCIVGIDVSKQWLDCFVHPHGRHRRFGNDAAGHEALVGLLAAQAGFCVLEATGPYDRALCRRLHEAGQSFHRANPRKARQFARSAGFLAKTDRVDAMMLARYAAAIDLPAQPPPDPHREELRDLMERRDQLVEMRKGERTRLAQPHASWLEDSLRQLIEALGDQIKAIEERMEALLASSDALQAQAAILCSAPGVGAVTTKVLLAHMPELGQRDRRAISALAGLAPLACDSGAMHGKRCIWGGRKRVRDALYMAALAACRTGPFKAVAKAMRDNGKPAKLVIIAIARRLLVALNAAIRDNKAFQT

SEQ ID NO: 452173 - protein, 407 aa, unidentified
MDVQHPKCAGLDVHQHTVVACARVVTGASVRHERRTFGTTTAELLALSDWLTAHDCTHVAMESTGVYWKPIWQVLEGQFTLVLANARHIRNIPGRKSDVNDATWIADLLAHGLIRGSFVPPAPVQELRDLTRTRKQLVREITQHTLRIQKTLETANLKLTGLLSNILGLSGRAILHALVAGETDPERLADLVHGRLKASRAALVAALHGRLTAHHRFLLQLHLTQVDALEQAVHDVEGRLGHALVPFRAALDRLITMPGVSETVARVLVAEIGFDMTRFPTAGHLVSWAGLCPRLDESAGKRLSTRTRPSNPWLKTTLVQAAWAAARSKNTYLRAQFLRLKSRRGPKKAILAVASSMLIAAYHMLKHDLDYRDLGADHFDRRDKTKLANRLIQRLQELGLTVEVRAA

SEQ ID NO: 452174 - protein, 319 aa, unidentified
MLHLGIDVAKAKLDCSLRLENGKSRAKVVENTAAGFAKLKEWLSKLTSEPIHACMEATGVYWEAAAEFLADEGHCVSVVNPAQIKAFGQSQLVRTKTDKVDAQLIAEFCALHAPQAWQAPSRSERELKAMVLRLEALLGMHGQEANRLEVARDSVRADIEKHLDWLDEQIRALRKKIRDHIDNDPDMRNRRDLLDSIPGIGQATIALLLAYGIGPERFANGRQAAAFAGLDPRQHESGSSVKQRPRLSKIGHMHLRKALYMPAMVALYKTVWGRQFLSRLQSTGKPPKVIIGAMMRKLIHVAFGVLKSGQTFKQELQTA

SEQ ID NO: 452175 - protein, 422 aa, unidentified
MHKREERPFAAFIGIDWADKKHDVCLWVEGSEKRERLVLEHSPSTIQAWAEKLRERFDGAPIAVSLELAQGPIVSALLEHDFFVLFPVQPAMLARYRLAFSPSRAKDDPTDAELALELLLRHPEKLQRLEPESAAMRSLRRLVEARRSLVEDRTRLTNRVTSALKAYFPQVLGWFRDREAAIFSDFLERWPTLAAAQRARRDTLVDFFRAGNVRNAAAIDRRIQAIGGERPLHTDAAVTEPMRLLVEALLPQLRAVCAGIERFDAAIAKLAPTLPDYQLFAALPGAGPALAPRLLVAFGERRERFPDAAALQRYAGVAPVTERSGNKSWVHWRYSCPTFLRQTFVEWVGQTIPRSFWAKAFYQARRARGSRHQAALRALAFKWIRVLHRCWVDRVAYDESRYLMALQKRQAPLLKFAAESST

SEQ ID NO: 452176 - protein, 391 aa, unidentified
MIYVGIDVAKDKHDCFITNSDGEVLFKSFTIPNNREGFESLFQKVQSVSDDLTKVKVGLEATGHYSYNLLGFLLDKGLPTYVINPLHTNLYRKSLSLRKTKTDKVDAHTIASMIMSDVNLKSYSDTSYHNEELKSLTRYRFDKVKERAKLKSSVSRLVCILFPELEKLVPKLHMASVYTLLSEFPSAHAIASAHLTRLTHLLSESSHGRYGKETAICFREAARSSIGSNMPAKSLELKHTIKLIRELTSEIDEIETEIKSIMDEINSPILTIPGISYNMGAMIIAEIGDFSRFDSADKILAYAGMSPSTYQSGQLDNCYSHMEKRGSRYLRYALYNATKYACIWDKSFGAYLVKKRAEGKHYNVALSHAAKKLVRTIYAMEKSGQAYNSAA

SEQ ID NO: 452177 - protein, 314 aa, unidentified
MSRQKDKIEFEQVIERGCGIDVHKKVIVATIRGTDIKTQTRSFNGFTESIEKLRDWLKQNRISHVAMESTGVYWKPVYNILEEDFEIILVNARHVKNVPGKKTDKKDSAWIAKLLLSGLLKGSFVPPHPTRELRNLTRYKRKVIEQITSEKNRVHKLLEEANIKLSSVVSNLSGATATKIIDAMLAGQDDVAELVKLRHGRMQCTVADLAASLTGKITAHHKFMLQIYKDSIESKKSIIARLDEQIQEHLKENEMELDAELLATIPGVGEEGAAYILAEIGDNMEQFPNEHHLTSWTGISPGSNESAGKKKVHA

SEQ ID NO: 452178 - protein, 386 aa, unidentified
MKRIAEVVRMFVGLDVHAETIAVVVAEADGGEVRSLGVIRNRPGSVSKLIRKLGKPEAMKVCYEAGPCGYGLYWQLVGLGVHCDVVAPTLIPVKAGDRVKTDRRDATKLARLYRSGELTAAWVPDKAHEALRDVVRAREAAKKDQLRARHRLSKFLLRKGLRPPENFKAWSDKYMQWVKALSMSLAAEEAVRRDYVNEVDHAAARIERLERVIEEAVDAAPKDIQAVIQALQAFRGLQRLSAATIAAEAGSISRFARAKQLMGYGGIVSSEDSSGERTRRGAITKAGNAHLRRIVVEAAWSYRHKPSLSKGLRERQKDLPPEICEIAWKAQHRLHKRYMTLLLKGKNKQQVVVAVGRELMGFIWDVGRRVEAAYQKATPETTRAAA

SEQ ID NO: 452179 - protein, 411 aa, unidentified
MNPVVSLDVSKGKSEVQAFLDKGKPYGKSFSINHDLDGLGSLLEFLEGIKNKAGIQPPVVLEATGHYHTPVVQFLEQHQYLLIIVNPLISHRAKNASLRKVKTDAIDAYRLCELYYKEDLEPYKKRGIRLLNLRNLTRQHENITGMYVQTKLQFQAVLDQIFPEYNGVFGDLYSVVSLLTLQAYPASEDILAINEVTLTNKIKELCKSRSIRWAKEKAQQLKKAAAKNPFQKTLYHSHLLSLSMYINMLLQYKEHLSELEAEIDTLAKEIEEYKIIQSIPGIGEKIAATIISEIGEIDRFNHPKKLVAFAGVDPEVFESGKFKATLVRITKRGSSRLRHALYMAVRSGIRDCRKQKTTDEIIPRNKRLRAFYDKKREEGKLYKVAVIACVNKLLHWIYAILKNRTAFQDIA

SEQ ID NO: 452180 - protein, 355 aa, unidentified
MSGAYEGRQIVGMDLHRRRSVLVRMTDTGERLETVRISNDLQYLAQVMARAGEAPEVVLEAAYGWYWAADTLAELGAHVHLAHPLGVKMFSYRRVKNDQRDATDLADLLRMGRLPEAWIAPPATRELRGWVRHRAKLVGLRSSLKCQVHGVLAHAGIWVPMSDLFGVAGQQLLAELSAGTRLSVESRSRLDSALRVIAALEFEIELFTKLVNGRLRTDPAYRAIQAIPGVGPVPAAVFVAEIGDIGRFHRPQQLASWAGLTPKHHESDTTVHRGRITKQGSRLVRWAAVEAVQRVSGHTRLGQHRDRVAARRGRNIGVVAAARELLTLVFYGLRDHHIRALDTPAPPPAADRSAA

SEQ ID NO: 452181 - protein, 340 aa, unidentified
MHKWSEEVFLCCGIDVSAAQLVVALEGEGSRGLQRSFPNRASGHQALILWLQNRGTRIRVCLEATGLYSLDLALALHRATGIEVAVLNPKKVNRFAATLCRNKTDPADAQVLAEYARRMPFQSWHPPQAAALELRAITRHIAALTQQHTQQSNRLHALSASSASSRCVQQDLKRSLRDLERRTEKMRRAALALIAQDTELRPRFALLLSMPGIGEVSSLNLLGELALLAPTLSVRQWVAHSGLDPAHHDSGTSVHKRARISRAGNRYLRRALYMPALVAARHDPHLRAFYQTLLARHKAKLQALMAVARKMLHAIFGMFRGLTEYDGARLFPVLELAVPA

SEQ ID NO: 452182 - protein, 345 aa, unidentified
MTSVATIGLDIAKSVFQVHGVDAVGQVVVRQRLARRRVLAFFEKLAPCLVGIEACSSSHYWARELIARGHEVRLMPAQYVKPYVKRGKNDAADAEAICEAVTRPTMRFVPVKTPEQQSVMMLHRVRLMLNRQRTQLSNSIRAHLSEFGIVAPIGRRGVDQLLAVVANDKDTRVPADARLCLQMLAAQLAVVKEQILENDRRVRASARETELGRRLMEVPGVGPLLASALVATVADPAAFKTGRDLAAWIGLVPKQNSSGGKERLGSISKAGNRYLRQMLVIGATAVIRYAERHGTRRPWLVQLMQRRSAKVAAVALANKMARIIWALMTSGERYREPATVSAMAA

SEQ ID NO: 452183 - protein, 414 aa, unidentified
MEVLYPRCAGLDVHKESVVACIRIASGGEVVTKVQTFNTTTASLVSLSEWLASNGCTHVAMEATGVYWKPVWHILSDSEFTLVLANAAHVKNVPGRKTDINDATWLADLLAHGLIRASFVPESETQDLRTLLRTRKQLVREKASHIQRLQKTLEDANIKLDSLVSDLLGKSGRAIIDALIAGESDPAKLAALADARIRCPQHKLRDALSGRIRRHHRFMLRLHLQQIAALDAAIAEIDREVDANLTPFRTGVELLTSIPGISTLSAQVIISEIGTDMSRFPTAGHLISWAGLCPRNDESAGKRRSNRLRNGAPWLKTTLVQCAWSASRKKASYTQAQFHRLRARRGAKKAVCAVAASILTAAYHMLKHGAQYQDLGPDHFDRRSKQQQTKRLLKRLADLGFAAELTPIPVAVSS

SEQ ID NO: 452184 - protein, 362 aa, unidentified
MLKYSLGLDISSKEIHCCLSTIDSSQKVSIKGCRTIANTFKGFKDLEDWLIRHRKQKEIPLVICMEATGVYYENCAMYLSKAGFPVSVLLPNYAKRYLQASGLKSKNDKIDAQGLAQMGAEKSLELWEPISEFYYSLRLLTREIENLQEQKTVVINQMHALQHAMHQNKVVNKTLLNRLKLIEKQLEDLEMAIQEHIDSNKEIAEKVRKICKIKGVGIRTVATLIAETNGFKLFKNARQLVSFAGYDIVENQSGSHHGRTRISKKGNSHIRRILHLPAFGVVRWKVGPFEDLYERTYAKHGIKMKSYVAVQKKLLVITYSLWKNDQEYDGKYKNKYNKQEEKELSIQEMSIVGEFQQRLLSK

SEQ ID NO: 452185 - protein, 418 aa, unidentified
MKVVYPVCCGVDVHKTFLVATLITSQGITPHYSKKRFSTFNNSILQFKQWLIDNNCFDVCMESTGKYWVPVYNLLEDTIRITVANPKWVKAVKGNKDDKKDSKWIGDLFRLGLVPGSYIPSKPIRILREYTRYRYKLVSCKSSEKNRFQNAFTVCNVALDAVVSDMFGKSASSITDYLVSSDSFDPVHCSSLLHKSLKKKADTVIESIEGYQMTKEQKERIVMIRSHLDFVQQSIAKLDEKLDKMVAPYESAISLLCTIPGVDRASAITIISEIGTDMSQFTNSKRLCCWAGLTPGNNESAGKKKSVRITRAGVYLKPALVQVAHAAVKSDKAPYYKIKYERLCKRRGKKRAIIAIARMILTAIYNMFVTGEMWNPSDLYKIDMPQEMLEKQKEKAIKQAVKLLVSNGVIKATDISVA

SEQ ID NO: 452186 - protein, 412 aa, unidentified
MRRVIGIDVHRTFGEVVIWEDGVLRHAGRVDMTRTALEGLGKSLRSTDEVVIEATANSMAVSRVLTPFVARVIIANPLQVKAIAQAHVKTDKIDAGTLASLHAAGYLPQIWTPDAATERKRRLAARRYQVVRHRTRIKNEVHSILHAHLIPKCPHADLFSARGRAWLARQPLPDDERAAVERHVRELDRLAEDLALLDREIAQVAIDDPAVRRLITITGVNLTVAAGIVAAIGNISRFKSPQKLVSYFGLNPRVRQSGLGAAHHGRISKIGRSHARAMLVEAAWAAAKAPGPLHAFFVRIRARRGHQIAAVAVARKLTVLCWHLLTRGEDYLWARPAMVANKTRAMELQAGHPQQKGSRRGPAYAYNVKALRNKEMLVAAQAERSYERFVAQWKPRRPKEPARGRLSSAGLK

SEQ ID NO: 452187 - protein, 346 aa, unidentified
MGMDIAVLGVDLGKNVCSVVGLDASGAVVMRRKVRRETLIRLAEKLPPCVVGMEACCGAHHLGRLFAAHGHDVRLMSPEYVRPYVKAQKNDDRDAEGIAEAATRPTMRFVELKSQDQLDMQTLHRSRDRLVGERTALINQLRAILLERGMIAPQGKRKLEQFLSVLMDEQDGAGLSPRMLILVADARAQWAELDRRITAFDGEFVRWARENEDARRLVTIPGFGAIIASALVASVGRAEAFDRARDLSAWLGIVPQQFTTGGKPKLLGISKRGNKYLRRQLIHGARAALPYVAERDTPLGRWAKALLERAHRNVAVVAFANKLARIAWAVLRRVERFVATGMPRAA

SEQ ID NO: 452188 - protein, 345 aa, unidentified
MENMYYIGLDVHKKTISYCVKDGGGRIYAEAEIPATRLGLDMWMKTLPQPWTAAMEATIFTAWIYDHIKPHAVAVKVAHPLMLRAIAAAKKKNDRIDAHKIADCLRCDFLPECYMASTEIRERRRTLRYRNLLVRQAVQMKNKIAVLLMEAGVSYNKQKLHKVGYFRELLATNPDIDEGLKPLLRLCRETVVRLGKTESALVRSLERDSLLVERVEQLMTIPAVGPITALTWALEVGDVQRFSSIKKAISYCGLCGAERSSANITMRTPLSKQRNKHLQTVLIEAAKMAPRNSPELAMVYEQEKQKGNANRATLAVARKMVAYLVAVDRREKGFLVVENKNRTAA

SEQ ID NO: 452189 - protein, 464 aa, unidentified
MGKRRFKATKIQDVRLNELLKAVAGLRLVVGIDVAKREQFAAVREYRGEPEETVLLVSWKHPEETTQFVEICQALAGAASLVEAVMEPTGTYGDPIRYELIAAGIPVFRAGAKRSHDAAEVFDGVHSMHDRKAAWVLTRLHEAGATQFWGLATKEQRTLRALYDLWRMCEGQHMYYVGRLEGMMARHWPGVADFLKLTGLTLPSLLVEFGGPTGVAAASEAAKTLMRQVGGSQLSEEKIEAVVQSAEAQAARMAEQGMEPLPAEKALMRRLAEGARQLRGEAQTARKDLEKHVPEPCEHLRKVVGPALTVGLLGSGSDPRQMKSPRAFEKALGLNLKVFSSGERKVGGLHISKRGDGQLRHLLFLAAMRLIEENAVVRAWYQRKVEREAGKAKVKAITAVMRKLARAIWHVARNQPFEAEKLFDTRRLQLEKPPGLFAGRRGQRRPSAEGTPNAAPERSEAPMP

SEQ ID NO: 452190 - protein, 453 aa, unidentified
MSRKKTKLQSVSEPPKIRADAAGIDISPEVIYVAVDPRRDPQPIRHYGTVTAELYRIANWLKACGVRTVAMESTGVYWIPLCQVLDERGFEVYLVNARHYKNVPGRKTDVCDSAWLQYLHAVGLLQGSFRPADEICAFRTVMRHRASLVEAASKHVQHMQKALDQMNVQIHRVLSDITGVSGLAMLDAILKGERDPRKLAELRDGRVQASEESIIAALEGNYRIEHLFTLQQSLESYRHYQKLIAECDRQIREQLEALEGRSGGNEPPDARKNMRTRSDEELRKEFFRIVGVDLTAIPGINVGTVQVLLAEVGPDLSRFRSAGAFSNWLGLCPNNSITGAKIKSSKTKKTENRLAAALRMAAESLCRDKSYLGQFYRRMKMHLSGGAEAVTAAAHKLARIIFAMVTRRLEYDETRFAEIEQRNSQRARLRFIKQAEKFGFRLTPIQAEAEFVS

SEQ ID NO: 452191 - protein, 392 aa, unidentified
MDDTASRVVIGMDPHKRSVTIEVMTKDESIVGTGRFATDRDGHAAMRRYVQAWPDRVWAIEGCQGIGRHVAHRLLADGEQVVDIPPKLSARARVFATGQGRKTDATDAHSVALVGTRMSGLRPVVNDEQLAVLRVLVDRRRSLGEEHTRKMSQVHHLLLELIPGGAKKDLSAAQAKKLLATVRPRDAAGKTRRRVAAELIADLERIYQRKRAANKELTALVAATGTTLMDLNGIGPSGAARLLVEVGDITRFPDKNHFGSWTGTAPIDASSGDNVRHRLSRGGNRQINRVLHIMATVQLRNPTEGRGYFDRSKARGKTSNESMRLLQRRLSDIVYRTMVNDAARHMATGPGGQRGDDSDSSVAGSHPHTNSSDKPLPGPATTETTTPLPVAS

SEQ ID NO: 452192 - protein, 309 aa, unidentified
MSEFIGVDVSKASLDVAVHGSGTRLQVENSEQGLARLIGQFKVLEPQLIVLEASGGYERLCVGALAQAGLPVAVVNARQVRAFAVATGVLAKSDAVDAGVLAHFAAAVRPAIRPLPDGQRQVLDELMGRRRQLVGMLVMEKNRLGQARDPHVRRDIQGMIRVLEKRIDRCNGDLQRLIRESPMWRAQEDLLRSFNGIGKVNAFMMLAELPELGTLSRKKIAALVGIAPIARDSGQHRGRRSIAGGRAQVRSTLYMAAVTAARSNPVIRAFYLRLRAAGKPAKVALVACMRKILTILNAMMRTHTRWQCA

SEQ ID NO: 452193 - protein, 435 aa, unidentified
MRLHEYGRNPDKRKAYVNYPDLLLVGVDVSKAKHNACMGTQTTMSCRKLEFTHTCDGFRRFAQALQAHLVKNGRQRILIAMEPSGIYWQALYARLKSCGYEVCLVHCQAVRNNRKTMQDGTSKTDEKDAYSVFDLLRQGKFFLPVERDSELQAAYRLMQRSMALKKRVSQLRHQLRAAIHLAFPELNALIKDLTQPTAWRFLQTNPTPESILRHGRPHFLEQWQPRQRCGQWRPATFHRIYDLATASIGLQDPARLDEFEITMLAADLVDALTKQHLWLDKALALLAQRADYHLLLQLPRIGQPTAAAILTAIGDMHQYTNGKQLVKLAGLDIRLYASGSSIRKLPKMSHVGSAYLRHWLYHYALRLVAHEAHFQSYYARRKHQSPGKGAGQRALMAVCDKVIRMIYRILTDHAPYSPTKDQTIARYYAAHRKAA

SEQ ID NO: 452194 - protein, 488 aa, unidentified
MAKQKKSTFGRLRSGAMNRQQRRDLGKRLAGNDPGLMIIHSNAGGIDVGNESHFVAVPPDRDVNPVQEFGCWTADLKRMAEWLKACRIDTVALQATGVYSIPLYDILTGHGIQVVLVNAQHTKNVPGRKSDVQECQWLMKLHTYGLLRDSFRLEERMESVRTIWRLRDRHVKDAGRAVQHMQKALTKMNIQLANVISDITGVSGQAIIAAILKGERDPWKLADLKHLMVKASRDEVARSLEGNWRDDLLFEFRQAVDSYHFAHQQMRDCDQQLESFLASLPARTLERPTTQAEDAPAATTPKGKKSRKIPKARRNEPIIDLKAELKRICGVDLTSIDGIDVITAQTILSEVGTDMSGFRTENHFASWLGLTPSKDISGGKIIGSGKRKVQNRVAMAFRMAATTLLRSKSYLGGRYRHLRKQLPSHASAIKAMARYLAVLVYRLLTHGEAWVDRGAAKFEQRRTEREMASLNSKALAKGFKLVPIIQAP

SEQ ID NO: 452195 - protein, 415 aa, unidentified
MGPTLYVGTDISEAINRTRFLDSSGTEVGRGFTSANDLPGTEQLAEEALRRARATGAGEIRWGLEATNLFWWHLATYLTTCPDLLAAGLKAWVFNPRQVSSFKDAYGDVGKGDWMDALVIADRLRFGRLPAECYLDERYQPLQRLTRHRQHLVKTLVREKQVALGYVYLKLSAYNLARPLTDAFGATSRVLLGDYLTPDEIVEAPLEELSGLIAVRSHGRVADPAEVAGALKAAARRSYRLPAPMVEPVNLVLSSSLETIRTLGAQLKPIDRAIAVELKGLPRQTLETIPGFGPVFTAGIVSELGDVRRFDDEEAVAKFAGLTWRRHQSGEFEGEDRPLSKTGNAYLRYYLVEAANSVRVHCPEFRSYYDRKFGEVTRHQHRRALVLTARKLVRLVDSLLRSGQIYRTPGARKLS

SEQ ID NO: 452196 - protein, 338 aa, unidentified
MKKYSGIDLHSNNNVVVVIDEADRVVYRRRLPNELGKVLEALEPYREELAGVAVESTYNWYWLVDGLQAAGYKVDLANPAAMKRYDGLKHSGDDTDAVQLAHLLRLGILPTGYIYPVAERGLRDLGRRRLQLVRHRTMHVLAVENVQARQTGARMTGDRVKRLSAQEVQALGLPEDVTLGLQANVAVIGTLNEEIAKLEKHLLERLKPQPEYALLSTAPGIGRILGPIILLETGSIERFAAVGNYASYARCVDSARLSNGKKKGEGNVRNGNKYLAWAFIEAANMARRWCPEARRFHDRKRAKTNTIVATKALAHKLARACYHMLKTQQPFDMKRCFG

SEQ ID NO: 452197 - protein, 355 aa, unidentified
MLNTKYIGMDIHKETISIAVMNAAGKVVMECVIETKANTVLQFIHGLRGDLHVTFEEGTWAAWLYDLLKPHVTEVLVCDPRKNALLKQGSKSDKIDARKLAELLRLNHLKPVYHGEHGVRTLKELARSYLTITQDLTRVRNRLKALYRSWAIPCSGTQVYAPRHRSEWLGKITEAGVRRRAEHFYQQFDALRPLRQEVRRDLLTEGQKHKAWKLLRQIPGIGAIRATLLIALIQTPHRFRTKRQLWNYSGLGLETYDSAQYCVVEGQLQRSKKPVTLRGLNKNHNHDLKAIFKGAALEATSGAGPFHDFYEALLTKGRKPSMARLTLARKIAAIALIVWKKEVSFDAKHLKQQAA

SEQ ID NO: 452198 - protein, 392 aa, unidentified
MDVYCGIDWAEDHHDIAVVDRDGKLVARRRISDDPAGLAGLLDLLAEHGDSADDPVPVAIETPRGLLVACLRATGRPVYPVNPMAVARYRDRHSVTGKKSDHGDSVVLANVLRTDMGMHRPLAADSELAQAIAVLARAQQDAVWDRTTAHNRLRSHLREYFPAFLAAAPTPAAAAALTLAQLRSLLKKAGRSRGIDTEATRLRDAFRIPQMRQLPLIEQAMGQQTLALLRQLDAACASADDLEQAAAASFNQHPDAGIITSFPGLGPLTGARVLAEIGDDRSRFQDAKGLKAYAGAAPITRASGKTKSVTRRKVKNNRLAAVGYTWAFSAISASPGARAHYDRRRDAGDKHAGALRNLFGRLTGCLHHCLITGQHYDEATAFCATTKQPAAA

SEQ ID NO: 452199 - protein, 385 aa, unidentified
MQASSKDTPTVGHYGTIFVAIELSQRSWLVTMHCPDRDKISRHKLEGGDHAGLLALIARLRERAAGAQGVAPAVVSCYEAGYDGFWLHRLLMAAGITNYVFDPASIAVDQRARRVKTDRIDGEKMLRTLMAYLRGEPRVVRIVRVPAPEQEDARRDTRERDRLTKEQTAHTTRIKALLRLLGMAVGNPRRRDWLTWLAAQRDWQGQAVAPRMLSEIEREHARLMLVREQLDALTRTPAADLTPAAAQMAQRSELLRRLKCLGPAFATTLTNEVFYKDFRNRREVASYSGLTPSPWQSGGIDREQGISKAGNPRARCSAIELAWLWLRHQPDSALTQWFRSRTLNASKRNKRIAIVALARKLMVALWRYLTTGLVPEGAALKAVKA

SEQ ID NO: 452200 - protein, 412 aa, unidentified
MDTVVAYIGLDWADERHSVHLQAADGGSEHLTLEQKPAVLHEWVAQLQRRFGGGKIAVALEQRKGAVIHALLMYDCFVLYPINPKALARYREAFRTSGAKDDPLDSELLLDLVVRHRDKLRAWVPDTVESRTLQALCEQRRKLVNQRVALTNRLTSLLKQYFPQALEWVGDLPSVQACDFLTQWPTLAAVQRARPSTIRQFYRAHNCRKADVIETRLAAIAGARPLTTDAAVVEPLSLSVQTYATQLRALIAAIQTFDERIAEVFAAHADHDVFTSFPGAGAVCAPRLAAAFGTDRSRWDSAAELQAHSGIAPVTERSGKSLWVHHRLACPKFVKQTFHEFADQSIRFSRWARAYYDQQRARGNDHHAALRALAYKWIRILFRCWKECRPYDEDTYIDALRRRGSPLANNFP

SEQ ID NO: 452201 - protein, 326 aa, unidentified
MQGKEASEQEANVKSSAGVDVCKDWLDAHVWPCDKRLRVANTPEGIRKLKRWLQRFDLSVVIIEATGKWHRLLWRSLFQSNIPVAVIDPYKARMFAKALGILAKTDQIDASVLSRYGFMVRPAVRAPQPQTIEQLAELVTGRDTAVAEQTRLQNQLSAATVDFFRKQLRQRLAHLDKSIDQLEREIGARIAAEPELARRYEIVISIPGIGPIVAVTLVVRLAELGGLPDKEITMLAGLAPIADSSGKHDGKRVIWGGRAAVRRMLYLAALSAKQWNPTLKPFFDRLIENGKETKVALIAVARKLVILANTLIAEDRTWQKIPPQNA

SEQ ID NO: 452202 - protein, 403 aa, unidentified
MAQTTQRESTTAASGRLFVALELSKETWKLGFTTSRTKKARIRDVKARDLPGFLAEVQAAKKRLGLREETPVKTCYEAGRDGFWIHRFLEAQGIVNLIVDPASIEVDRRSRRAKTDRIDAQKLAQLLARHHDGEDILRVVRVPSLDAEDERLLPRQLGMLKRKRTQATNQIRAALFQHGVDLDPRKGDFSKRDFLKELKKARQWDGARLHPELLNTVRMLWGQYVLLTRQIKKLEQRQRQMLREARKGSSKSTTAQLKAARLSQLCGVGDIGSYTLATEFFGWREFKNRGEVGALAGLTGTPHQSGESGRDQGISKTGNPRVRTLMVELAWLWLRWQPDSRTTRWFHDHVGKAGSRGKRKAIVAVARKLLVEFWHFVEHGVIPDGAVLKSEHAEGPAAAEAAA

SEQ ID NO: 452203 - protein, 415 aa, unidentified
MYNVTHKKPSDYAVIVAIDWADEKHNFRILRDNHEETKVISNDLFEIQDFFWSLQGNSIAVVIESCQSALMNLLLSMSNLDVYTVHPTTSSKFSKTFHVSGAKSDRSDTKALLELYLKHPNKVNKADSSFSKGSLKKLNLRRRNLVDDRTSLTNQLTALLKIYYPQALKVVGNHLYAEIFMEFLDKYPSPQSILNAHQIGITKFFNKRSTSSKKTKERVKALRSSIVVVHDEDELDCYVFEARQFCVRIKSLNEVIKAYEKKILKIYTEHEDYELFHSFPGAGPSIGPRLMAFFGDDRERFQSVEEVLKTSEVAPVTIQSGKMNIVRRRFLCDRFTQLSFVEFANNSIRSSIWAHEFYYHKKALNMPHFCILRALAYKWIRIMYRCWKTRTNYCEKTYLQVLEKRKPACYQKVMN

SEQ ID NO: 452204 - protein, 461 aa, unidentified
MRETLGTGEPEYAAYVALDWADREHAWVLEEAGGGKRESGKLKQTPESIEAWAAGLATRFGGRPIAVGLEQSRGALIYALQAYGHLELYPIHPSTSANYRKAIFPGGRKNDPVDADLLLDLLTRHRDRLRRMRPDQEETRKLQLLTEKRRQLVDEQTSETNRVTDLLKSYFPQALRWLDDLSSPLAVAFLQRWPTLQQVQAEEADCVRKFFYEHGSRSKERIELRLKEIQEARPLIEDRAIIEPAVLMVRALLEVIAALRRGIKTLQDACAAVFASHPDAEIFASFPGAGPVLAPRLLAAFGSQRDRWENVVEFQSYTGIPPITEGSGKSLDIHFRWRCAKFLRQSFHEFAEQSIQQSEWAGAFFHHQRHVNHLDHQAAVRSLAYKWIRIMYCCWKKRTPYQESFHQERLLTRPRSSENPTTTAAVQKKSGAPTNGRPGSNRVHFQFKKVAGFCKLSAATS

SEQ ID NO: 452205 - protein, 374 aa, unidentified
MADYSEVFVGIDTSKLRNAVAIAEAGRSGEVRYLGELENSEAATTKLVKKLAAPHRRLTFCYEAGPTGYGLYRQIKALGHECVVVAPSLIPKKPGDRVKTNRRDALNLAKLLRAGELTAVWVPDARHEAMRDLVRAREAAVDDLKSKRQQVLSLLLRLGRHFTGKRTWTRAHMNWLVSQKLGHREQRIAFEEMLLAMRQAGERVSRLEQAIVAAVPDWSLSEVVTALMAVRGFDLISAAIFLAEIGDLSRFASPRQLMAYLGLVPGEQSTGDRVWRGGITKAGNHRARRILVECSWSYRHPPRVGKKKLAKVEAAPPAVQQIAWKAQARLSARYRALARRGKRPTLVVTAIARELSGFIWAVSQAVGAPRTPAM

SEQ ID NO: 452206 - protein, 407 aa, unidentified
MDVVHPTCAGLDVHQQTVVACARAGSGKAVTYAVRTFGTTTQDLLALGDWLTTHGCTHVAMESTGVYWKPVWQVLDGHFELVLANAMHIRNIPGRKSDVNDATWIADLLAHGLIRSSFVPPAAVQELRDLTRTRKQLVREIAQHTLRIQKTLETANVKLTSVLADIMGVSGRAILAALVAGESQPERLAALASDKVKASRAELTNALHGRVTAHHRFMLKLHLRQIEALEAAVRDVEARLGEALAPFRAAVDHLITMPGVSETVARVIVAEIGFDMTRFPSAAHLVSWAGLCPRLHESAGKRLSNRTRSSNPWLKTTLVQAAWSAARKKDSYFRAQFLRIKSRRGPKKAVLAVAASMLTAAYHMLRDGADYRDLGADHFDRRDKAKLAKRLIARLHDLGLVVDVRAA

SEQ ID NO: 452207 - protein, 343 aa, unidentified
MKHYIGLDVSMKRTFICVINEQGKIIHEGSEKTDPHLIADYLSKFCLEEMSVGFESGALTPYLLTGFKERAIDAICMDARKLSPVLALKVNKTDKNDARGIAEALRSGMYTRVHCKPEESINRAILLTSRRALVEQQTHLKNTVRGLLKSYGIRLGAISAKKFSAAVMKQIKSCQEIVILSIKCLLEAFDKLVEEAGKLDKKMLEIACHDKEVCRFMTVPGIGPVTALTYKAEIFDATRFKESRSVGAYLGMTPTQYASGETQRQGKTSKCGSKELRFLLVEAGIVILTRSKKWSKLKAWGLKIMRKKGLKKAAVAVGRKLAVIMHRMMLEEKDFIYGEPKAA

SEQ ID NO: 452208 - protein, 347 aa, unidentified
MRFYTTKHKHYCGIDLHAKTMYVCIMSQEGKVLLHRNLKTDPEVFLRTIAPFREDLVVGVECMFTWYWLADLCDHEKIHFVLGHALYMKAIHGGKAKNDRIDAYKIATILRGGVFPYSYVYPAEWRSTRDLLRRRLRMVRQRGQLMSHVQNTHHQYNLPTPKKRIAYRANRQGVAEQFTDVSASKSVEIDLELMGHYDEIITNLELYLTRKAKVHSQDSFHLLRSIPGVGKVLSMTILYEIHDIARFDRVQEFASYSRLVKCEKSSAGKKYGTSGAKIGNVHLKWAFSEAAVLFLRGNLRGQKYIKTLEKKHGKRKALSILAHRLGRTVYYMLKKNRTFSMDAFLKA

SEQ ID NO: 452209 - protein, 377 aa, unidentified
MRTIDNTADTTVYVALELSRAIWLVAVRLPGVEKLVFHRLKAGDTGALLAFVAAHRTRTEASLGAPITVASCFEAGPDGFWLHRLLDANGIDNVIVEPTSILISRRSRRAKTDRLDAQGLLRVLMTRHRGDHHICSVLRVPTPEEEDAKRPHRERERLVQERVRIENRIEALLLTQGIRKRPSLRRWDAEMDALRTADGRAMPPLLRAEIDRLKRRLTLTQELIREIEAERSTMLAKAPSDDTSRKVAALSRVRGVGDNFAAVLTREVFYRHFDNRRQLASYVGIAPTPHQSGAMDQDRGIGRAGNARARTTLIQLAWLWLRYQPESGLVAWFRERVGALAGRSRRIAIVAVARKLLVALWRYVETGVLPEGVELKA

SEQ ID NO: 452210 - protein, 325 aa, unidentified
MIKNSKFVGIDVAKKDFYACFEENMESRKFNNTVAGINSFARYLNKNNFSKRQTIIGLESTGSYNLRLCLQCGELGFKVKVINPLIIKKYNQTNLRRVKNDKKDASLIRYCVTQGAGYEFTENEETLVLKSLVRQRNSLANSMLKVKRQQEDVKYKEDCLKVKIGSVYDEIQDLLREKAKELEKQLRGFRKEEQKLLQSIPGVGPITAISFIAEIVDIKRFKEAKKLVAYIGLDSRVHQSGTSVKGKGYISKRGNKILRTRLYNAASVAVLHPNLFREFFQKKRSEGKPYKVALVATMNKMTHVIHSVWTSSKPFEDRRSNQKED

SEQ ID NO: 452211 - protein, 339 aa, unidentified
MQKKYFIGIDVSKHTLDACFIIREQDDLSKPVWKQFANTSTGLKGMQQWLMQHQVILSEQTIIVIENTGIYHRLLWQFFSSLQVDLCIENAAQVKWSLGIARGKNDKVDSRRLALYAVRHTDRLKPTPVLHQQVTVLKDLLSLRNKLLQQTGSLTTGIKELKHASISASFARTSVKLLQPAIDGLKQSIKKVEREIKNTLKKDEALYDTYKRLVTVPGIGHITAIYLICCSNVFTLCTSGKQLACYAGVVPFDYQSGISIKGKHQVHKMANKELKHLLHMCALTSIKNHPEFKDYYNRKKAEGKHALSILNAIKNKLVLRAFAVVKNERDYVDNFKKIA

SEQ ID NO: 452212 - protein, 373 aa, unidentified
MKYSTVYVGMDVHKETFSLCCYTNEKEEAEYPQKVDGHYSKVINYIEAMRFHYGDDALFICGYEAGCLGFTLYHQLTDHNVKCVILAPTTMLQQKGRKKVKTDKRDAALIARCLAHHDYSPVHIPTEQDEQTKEYIRMRDDHKIELKKVKQQILSFCLRHNYRFDGTTSYWTLAHLNWLRSLKPEGLYAEILQEYLLFYDNLTDKLERLDRRIEELASDETYQENVHKLSCFIGVKTVTALAVLTEVGDFKRFASARHFASYIGLTPGEDSSGEGQNRLGITKAGNRHVRSLLVEAAQSYSRGQIGYKSKALKARQAGALPEVIAYADKANERLRRKYYRMVLKDNKKPNVAKTAVARELACFMWGMITGNVA

SEQ ID NO: 452213 - protein, 345 aa, unidentified
MKITTVGLDLAKNVIQAHGIDERGKVALKKQLKRDQVLAVFVKLEPCLIGMEACGSAHYWARKLTALGHTVKLMAPQFVKPYVKTNKNDAADAEAVCEAVRRPNMRFVPVKDSGQQAILSLHRARQGFVKARTAQANQIRGLLLEFGIVIPQGIGHIATRLPEILEDGENDLPGRFRQLLRRLGEHLQEMDRQVKELEHEITLWHRENEASRKLAQMPGIGPITASALSASVGDAKCFKNGRQMAAWLGLVPKHQSTGGKTMLLGISKRGDPYLRSLLVHGARSMIRHAEGKTDQTTVWFARLLARRNKNIAAVAIANKNARIAWALLAHGREFRTDYASAGAAA

SEQ ID NO: 452214 - protein, 393 aa, unidentified
MEGRMENTPSAGVNYDPVHCFVAIELSKSSWIVGFQTPLSKQTSQYQLKPCDAKPLLELIERVRIRISRELGRPVEVMSCYEAGYDGFWLHRVLEAHGIHNHVLDPASLQVNRRARRPKTDRIDADRLVRALIRHLRGEPEACSVVRVPSPEQEDARRLHRERGRLIAERVAHVNRIKGLCASQGIYDYEPVRKDRLQRLEKLRTGDGRPLAPQLKAEIVREIKRLQCLLEMIATVEAERDAILESEKSRHLNADKIKMLAKLKAIGPEFSTTIVGEVLYREFANRRQLGSYVGLASSPFRSGSLGRDQGISKAGNPKARAMMIELAWSWLRYQPDSALSRWFRERVGNLKGRPRRIAIVAMARKLLVALWRYLQTGVIPTGANLKTNRLKQA

SEQ ID NO: 452215 - protein, 425 aa, unidentified
MNFNTNEKINQVSENTLVIGIDIAKHKHFACAIDDRGRVLQKSFPIVQSHLGFEYFYERLMALRTAHKKQEILVGFEPTGHYWMNLASFLTSYGIPFVMVNPMHVNRSKELDDNLQTKNDQKDALVIARLMRDGRFSYPRILEGVEAELRNGATLRSKIQEDLNALQNRVIRWLDRFFPEFTQVFKNFGKMAYAVLEMTPLPSDIKGKSPEDLLFLYRQVEGMKIPQLPKAKQLVEVAQNSIGLTEGLVMAKFEIATLLSQHKLMQAQLDELTSKLVELAKQMTDYEYLASVPGIGDVTIVDLLSEVGSLTQYAHPRQLIKLAGLTLRENSSGQLKGQKRISKRGRRKLRSLLFRVMMPLIQHNSAFKQLHEYYTTRPVNPLRKKQSIVVLCGKLLKVLHALCKKKTMFNEHQMMNDFASLQTAA

SEQ ID NO: 452216 - protein, 338 aa, unidentified
MGLYCGIDLHSTNSYVTVLDESDRVVAERRLANDLGVISGFLEPYRSAMEGVAVESTYNWYWLVDGLMAAGYRMHLANPAAMQQYSGLKHAGDRSDARWLAHMLRLGVLPKGYIYPVADRGLRDLLRKRHRLVQHRTRLYLSMATAVERTSGRRLGGNAIDRLGEADVGALDLPADVALAMAAELRVLVCLRSEIAGLEKAIVARLRPTPVYRGLLEVPGIGKILGMTIALETGDIGRFAGVGNYASYCRCVEAKRVSNGKRKGAGNAKNGNRWLAWAYVEAAHCAVRYDDRVRRYHQRKKAKTHAMVASKAVAHKLARACYHVMKDGTAFDPERCFG

SEQ ID NO: 452217 - protein, 342 aa, unidentified
MESAVTIGLDLGKLVFQVHGVDAAGAVVVQRRLTRGKLLHFFGKQAPCLVGMEACAAAHHWGRELRKLGHRVRLMPPRYVKPYVKRQKNDAADAEAICEAVTRPSMRFVEIKTCEQQGTLVLHRVRLMLMRQRVQLSNAIRGHMAEYGLVAPVGRNGLQRLITILGNADDERVPAVARMSLAPLVSQFGLVNDQVLENDRRVRASARSTELGCRLMEVPGVGPVLASAIVAAVPDPTVFKSGRDLAAWIGLVPRQNSSGGKEKLGGITKQGDRYLRQLLVAGALAVIRYAQRHGTKRPWLVHLLARRTPMIAAVALANKMARMIWAMMMTGERYREPTVAAA

SEQ ID NO: 452218 - protein, 360 aa, unidentified
MNTPTESHPTENCQSIKLGIDAHAQWYYVARQVEGATPQPVQKMTFEDLLHFVAKQRRLAREIFTCYEAGAFGYHLHRRLTEMGVTNYVVQPQDWDEKGKGVKNDRLDALALCQRLDRFTRGNRKAFSIVRVPTPDEERERALTRQRQQIVRERQRLQAMGRSLLASHGIHVTGKWWKGKTWSLIRSEAPGWVIERLAVFIRLIEPIDAEEAKLTAVVEQVGREVKIPRGVGALTFEVLRREVGDWARFTNRRQVSSYTGLCPREHSSGGKRRSGSINKSGNPRVRAMLVEMVWRMTRWQPTYHALKKWVPVLGDPSRSAGARKKAVVAVARQLAVDLWRLFTGQTTAEKLGLVYLPDAV

SEQ ID NO: 452219 - protein, 352 aa, unidentified
MPMLEGRVDHVIGVDTHRDTHAAAVLDPNGGVRAHVEVTADQPGHARLLAIATRRAPGRRVWALEGTGSYGAGLATFLSAQGEWVVEIDRPKRSRGRTGAKSDPLDAIRAGREALARDQLASPRQRGQREALRVLHTTRSQILQVGADARRHLKALIVTAPDPLRQALRGRPWLQQARACAALQAAPTDSIEVRATVQAMRLTAQRLLGAYAEAADLKQQLHTLITTMAPGLLDQPGVGPISAAQVLLAWSHPGRVRSEAAFAMLAGAAPIEASSGQVVRHRLNRGGDRQLNRALHTIVMIRQLQHPATRAYTARRTGQGKSPREIRRCLKRMIARQLFRLLERTATNQIAA

SEQ ID NO: 452220 - protein, 416 aa, unidentified
MKLFVGIDVSSEKLDVCFLTDDNQLSILSEISVANDIEGASFIRETILEFNNSYHFDQIVIGMESTSMYSFHPSMFFHEDEKLKKLNTLVTIENPFRVKQFSRMFDENKTDRNDALRIADFLRIQRFTTSPIKEEKYMALQRLTRTRYQLIKQLIRTKQHFLENLTYKCNTLAREMRDESTSLFSATLISLMTEDFTLDELAELPLEAFCDLLQEKVKGRFKQPEKIAKAIQRAITMSYRLGALAQESINVVLSVLVREIRALEKNIKELDKAIEQVIVVIPEYQCLTSIPGVGKVYAAGLIAEIGQIERFEDQTKLAKYAGLSWKVNQSGNYQSQNTPLTKQGNRYFRYYLVEAANSVKNYLPEYKAFYQSKYKEVPKHQHKRALVLTARKFTRLVDTLLRKHQLYTPPRSVIEK

SEQ ID NO: 452221 - protein, 337 aa, unidentified
MLFCGIDLHSNNCLVVVSDDADKVVYSKRLPNDLAAICGALSPYQQDLFGVVVESTYNWYWLVDGLMAAGHSLHLANTTAIKQYDGLKHRGDESDARHLAHILRLGLLPEGHIMPKADRAVRDLARRRMQLVGQRTTQIVSIETSMAQHIGTTMSGNSVKELKAADIDAMPIGATEALGMKANLAVLQALQAQIDEIEAALAKHCRHDKDYRLLCSVAGIGPILATVILLETGDIQRFADVGNYASYCRCVGSIHVSNGKKKGEGNTKNGNRFLAWAYVEAANFAIRYCEPARKFYQRKKAKRNGIVAIKAVAHKLARACFHMLKTGEKFSVERCFM

SEQ ID NO: 452222 - protein, 328 aa, unidentified
MQIHSVGIDLGKTTFHLVALGEAGKVLVKKKFTQRQLLTYTANMQTSLIGLEACSGAHFLGRALRKQGHDVRLIAAQFVKLFVKSNKNDFVDAEAIAEAVERKNMRFVVRDRLISRRTAVINQLRAFLLERGLVFAKTPSKLREAMPGILENAEADLTPQMRNLIDLLWREWKMVEEQIEVLSSELERISVTDAGCTRIRKIPGIGPVVATAIVAAIGNGAAFRRGRDFAAWLGLVPRQCSTGGKAKLLGISKRGNVFLRKVLIHGARAAVLRIKRNRAPIGAWLDALDSRAPKNVVVVAMANKLARIAWAVLSTGEDYRPVANGLAA

SEQ ID NO: 452223 - protein, 391 aa, unidentified
MAPLLGLKNVGYSEHLPQNKKTNRRNAMKRKVYVGMDVHKETIQIAYLTSNSKEILKEQQIKHNEVQIKKFIKKLKTEWNEIYCCYEAGVTGYPLYRYLKSLGVNCILVAPGKIPRQNTDKIKTDKRDAIKLARLMRSGELESIHVPSEEDEAVRDYLRSRDSLRLDLGRNRQRLMKFLLRKDIKYSTTKYWTVSHYKWLNNLHFNNEILQETFNDYYSRVRVQEENLKAMDKKIQEIAESEPYREKVGILRCFRGVDYLTAMFLLCEVNDFKRFKTAGSFMSFLGLVPGEYSSGSKRKQTGITKTGSPRLRRILTEAAWQHRFPGTGSKIITARRSGQPALVVALSEKASPRLHKKFRNLQLRGKTPQVMITAVSRELSGFLWAAMNLVA

SEQ ID NO: 452224 - protein, 337 aa, unidentified
MNNMEACGVEVSARELVVARKGKTGVQLTRFANTAAGHRQLLRTLTRGGQRVRVVLEATGLYALDLALLLSAHQQVQLMVANPRAVRHFAQAMMQRSKNDQLDAVVLLEFAERMPFTSWVRPPENALALWAIARRLQALTKLCTAEKNRAHAMGLSEAIPATVRRDIARSLQFHQRAMKKLRQQALQCIAADAQLQQRYQLLRSVPGLGEISAVQTLAELLLLPADRDVRQWVAYAGLDPREYSSGTSVRKHTRISKVGNGHLRRALYMPALVASRVEPHMRGFYEHLLARGKSKRQALLAVARKLLHAIYGMFRSQRPYDGTRVYLLPSCLAEKPS

SEQ ID NO: 452225 - protein, 419 aa, unidentified
MKVVYPICCGIDVHKTFLVATLITTQGIVPSYKKKRFSTFNNSILAFKQWLIDNNCFDVCMESTGKYYIPVYNLLEYSIHVTVANPKWVAAVKGNKDDVKDSKWIGDLFRLGLVPGSFIPSKDVRILREYTRYRFKLVSCKSSEKNRFQNAFTVCNVALDAVVSDMFGKSASSITNYLVNADSFDPKYCISLLQRSLKKKADEVIESIEGFQMTGEQKERIRFVRRHLDFVEQLIADLDQTITGLVEPFESAITLLCTIPGVDRNTAITILSEIGTDMSQFSSSKRLCCWAGLAPGNNQSAGKKKSVRITRAGVYLKPALVQAAHAAVKSKTSSYYRIKYERIAKRRGKKRAIIAIARMMLTAVYHMLQTGEVFNPCDLFQVDIPIELRNKQKEKALRQAAKLLITQGVISPQHITLPA

SEQ ID NO: 452226 - protein, 463 aa, unidentified
MAGSQKETRTAGVEAAVQGLPVLRPNVAGIDLASEIHWVCAPNMDGTGREVEKFGATTPELKRMAEWLKQRQVESVAMESTGVYWIAPYEVLERYQFEILLVDTRELARVPGRKKSDHVDCQWIQRLHSCGLLTGSFRPAEQVCRIRTLVRDRGNLVAAAADWLRRMQKSLDQMNVRVHRAVKDIEGATGMAIIRAIVKGERDARKLAELRDPHCQKSVEQIAEQLSGHWREDHLFSLQEALKMYDAVQSGIADYDQEILRQLAEMEREECRGQQAPKLKNVNKAQKIKSRGEETMRQALYRMSGVDATAIDAIGVGTVQVILSEYGPDLSRFATEKQFVQHATLAPHKPTSGGKVVRKKKRGSASTRVAAALRMAATSLQHSPTALGAYYRHTARRKGGSVAVFATARKLATLVYRLLRWGQPYIDEGAAAYEKRYQESRIKRLTATAKELGYQLMPKASQA

SEQ ID NO: 452227 - protein, 458 aa, unidentified
MSQDYYKFFGEAKPACLNINTREEDQNVTEQDQPLPNEKGEPEFAAFVAIDWADKQHYWSMRVAGSDRIERGSLENSPESVEVWVNQLGQRFGQRPIAVALEQRRGALVAMLSKYGQLHLYPVHPLTLAKFREAWYPSRSKDDIKDADLLLEILTKHRDRLRGLAPDTVEMRLLQFQVENRRKMIDERTALSNRLTDLLKIYFPQVLKWFDDVASELVGDLLSKWPTLQALQNAKPSTIEKFLRDHNCRKEEKIQERLEQIRGAIPATHDEAVLGSATHMAPVWTRQIAVLREAISKLEKEIAQLARRQQDWAIFDSFPGAGQALAPRLMAAMGTRRERFESADQLQCSTGIAPVKEASGNTEWVHIRWACPKFQRQTFHEWAACSLLFCRWAKDYYDQQRSHKKDHHVAVRSLAFKWMRILYRCWIDRQPYREEIYLASLAKRNSPLQRLTRSVQMP

SEQ ID NO: 452228 - protein, 348 aa, unidentified
MLYSGIDLHRDNSMITTINDSGTIVNQQKLPNDEVSLLEYFFSMGNEHRAVVEATANWYWLSDLLNDHGIDLVLAHAKYLKAISYAKVKTDKVDSQTLANLLRIDMIPTAHQIDPELRGLRDLMRARLKMVQKRTSCINSIHRLLAKYNVTLPDINSISNIEFLVDHDVNFQLQAHTQQIQLLKTQIKDLEASLHSRLIPNADIQRLLWIPGIGKILAFTIYLEIDGIERFPAISNFLSYACLVPGADNSNKKIKHKSANKDGNKYLKTAFKEAGIRATQYYKEIKIFYQSKERKKHKNIAKTIVAQELAKTCYYALSTKTDFNNTFKGKALSRQKSMQWPRLASPGV

SEQ ID NO: 452229 - protein, 355 aa, unidentified
MSSEKYIGLDVHQATIVVAVMDSTGKVVMESILETEAATILQFFAGLRGTLSVTFEEGTWSVWLYDLLNPHVDKLVVCNPRKNALLKDGNKSDRIDARKLAELLYLNKLKTVYHGETGVRMLRELSRSYLTIVKDLSRVMNRLKAVYRSWAIPCAGRDVYYRRHRAQWLDKIREAGVRRRAERLYEQLDMLQQLRQQARRELLAEGRKHAITAKLRQIPYLGPIRSVLAVALMQTPHRFRSKRQLWAYSGLALETRISAEYRLVEGQVRRSKKLLSIRGLNKDHNHDLKGLFKGAATVASVRPGPFQDFYQAALAKGIKPTMARLTLARKIAAITLTLWKKGENFDAEKLKSQAA

SEQ ID NO: 452230 - protein, 348 aa, unidentified
MDRYIGIDAHAVSCTIVVVGQSGRKLSEQVVETNAKALVDCIRSIPRPRHVCLEEGTQSAWLYEILSPHADELVVAAITESKGPKSDRRDALARAQQLRLGAFDKLVFKAPTRFARLRELARSYDAMTCDVVRTQCRIKALYLSHGIHAPGQTVYGALQRSEWVDKLPVSCRASALLLYGQLDAMQQLKKDAQRQLVAESHQHPISKLLETCPGLAEIRVAQLIPVVVTPHRFRTARQFWSYCGLGITMRSSSDWIRQDEHWVRAEVNKTRGLTRTFNHTLKHVFKGAATTVITKLPNHPLRQHYERMLNAGTKPNLAKLTLARQIAATSLAMWKHEEQYDPARHHKQ

SEQ ID NO: 452231 - protein, 416 aa, unidentified
MDDIRWFAGVDWASEKHRVCLLNASGEVVGERDVDHSGAGLSELCDWLLAKTGATPGQIAVAIETPHGPVVEALLERGFAVYAINPKQLDRFRDRFTMAGAKDDSRDAHVLGDALRTDRRALRRLAVQDPLLIELREWSRMNEELQQERTRLANRVRDQLWRYYPQALEITDDLAADWFLDVWQQVPTPAKAARISEKTIARILKTRRIRCIDAAEVLRILCKTPLVVAPGTAAAASAHIDTVAARIRLLNQQIKQAHRKLDELCAQLETPSENAPGQVCEQRDVAILRSSPGIGRIVLATLLAEASEPLQRRDYHALRTLSGQAPVTRRSGKQCFVIRRRACNKRLENALYHWARVAMQHDPVSRCRYAELRRRGHSHGRALRGVGDRLLYVLCKLLERQVLYDPDHPRPQMAAA

SEQ ID NO: 452232 - protein, 349 aa, unidentified
MSQPVKPVVVRMGIDIGKSAFHVVGLDFAGKPVFRSRFTRERLIEFLARASPTVVGMEACPGSNWLARKAVLSGHEVRIVPAQFVKPFVKSNKTDMIDAEAIAEAISRPTMRFAQPKTEAQLDLQALHRVRQRLVSNKMSVINQARAFLLEYGLTISVGAAYFVRDMPSILSDDQNGLTPSMRRLLEELWQEYRSIEARLLQLRQQIESIASADDAATRLTSVPGIGQLTATAITAFAGTGTQFKSGRHLAAWLGLVPKEFSTGGKQCLLGISKRGNPYLRKLLVHGARSCVLHLDRTKDHLGAWIGRMEARGIHRNKVIVALANKLARIAWAVLTRQGAFYLRQPKQQ

SEQ ID NO: 452233 - protein, 350 aa, unidentified
MKILALDLGKFKSVFCLLTDRQPEYGKVSTDRQSIHDLLVKHQPDRLVMEIGPGAGWVHDLATALDLTVQVANPNDERWHWKRVKEKSDRKDAFKLADLSRMNDLPVMPMPSANVRQWRSLMKYRDSLVGSRTRVKNSIRAIFQMQGELLPKTDKAWSRASLEEIGREADPTPPAHQLWRLQLHSELQCLRSLEQQIEQITDRLDQLGKADPRVIRLRTAPGVGPRLSETVVAALDNPHRFKNARQVGCYAGLTPRRWQSGNMDRQGHISHAGNKLLRKMLVEIAWIGVRRKTWMTEVYENVRRGSAKRKKIAIVAVARRLLIKLWAMLRDGTDWKDPDPSTTAASAAGN

SEQ ID NO: 452234 - protein, 423 aa, unidentified
MMKLKYPICCGLDVHKNVIVATIVITNRDGVSEYRQKSFSTINSDIQKFHNWLIENNCYHVCMESTGKYWIPIFNYLEKDIEVCLTHPKYVKAIKGKKTDKKDSKWIADLYKFDLVRCSFIPPKDFRQLRELARYRFKLVCMKSSEKNRIQNCMTVSNVGIASVLSDPFGKTATEIISYLLEHTADSMDEKAVRKLIKKGAKSKSDEIIEAIKGYTIETDQAKKLELARGHLEYLDDMITQTEVELYVRIKPYYEFVEFVSTMPGMTELSSTIVLAETGVDMDIFDDAKHLCSWCGLSPANNESAGKKKSVRIAKAGDYLKPMMVQCALAAIKSKKQPYFAIKYGRIKKRRGHKKAIIAIARMMMVCIYHMVSEKKPFTPTDYEELMDPQNHVESVVLNENNVFAYLESLGYDSSKLVKRNDN

SEQ ID NO: 452235 - protein, 425 aa, unidentified
MDFKQNHKINQVTEKTLVVGIDIAKRIHYACFVDDRGRVLRKSFSVSQSRDGFELFYQCILTEMKEHEKTEVIVGIEPTGHYWLNLAYFLEERGIPLVMANPMHVKRSKELDDNLPTKHDRKDALVIARLIKDGRFSYPRILKDKEAELRVGATFRSKLTEELGAVKNMMIRWLDRYFPEFTQVFPSFGKMAMAVLECTPFPSDLHQKQPDEVLTLYRQVEGLKSPQRPKAMRLIEVAANSIGVTEGREMARIEIATLVRRYHQLEQDIESITQHLVELVQTSVEYEWLSSVQALGDVTIVDLLAEIGSFSHYVDSRQIMKLAGLTLRENSSGQHKGQKRISKRGRRRLRALLFRVMMPMIRHNEAFRKLHEYYTNRKENPLRKKQSIVVLCGKLLKVLHGICTKHKAFDAQRMMKDIPSLAEAM

SEQ ID NO: 452236 - protein, 366 aa, unidentified
MKKTITVQAFQNEIFKEQKLTIGLDLGDRWSFYCVLDEAGQVILEQKLPTTPEAMKQSFGKIPRSLMALETGTHSPWVSRLLSELGHEVIVAHAQKVQWITKSSRKDDRHDARTLARLARIDPTLLGPVRHRSVQAQLHLTVIRARAELVSARTALVNAARGLVKSYGQRLPKCGTYQVNEKLAEGLSAELREVLVPLFKEIESLNERVKEYDERMEKLAQEVYPEVSLLKQVKGVGTQIALTYVLTIEDPYRFPKSREVGCFLGLRPGRRNSGESEPQKGISKEGDRYLRTMMVQAAHYILGPFGEDSDLRRWGQKLAERGGKNAKKRAVVAVARKLAVLLHRLWVGGEVYEPLRNSQKAMRKVA

SEQ ID NO: 452237 - protein, 481 aa, unidentified
MSQPKKHSPKPGQEKPAAGQGKRGGKRKGMCLEDRPILEPNAAGIDIGAREIFVAVTPDRAEDPVQVFSTFTEDLERMAQWLVSCGVSTVAMESTGVYWIPLYDVLEKHGIRPCLVDAHGMKNVPGRRTDWHECQWLQFLHSVGLLRAAFRPDGEVCAVRSLMRHRNDLVQMTNQHIQHIHKALTQMNVQIHHVIDDITGVTGSAIVDAIVAGQRNPLELAKLRDPRIKASEETIVKSLKGNWRPEHLFTLKQSRQMYRHYQEQITACDAEIEKMLVAFQSRVDPQEKPLPPDRKKKKHRARQKKGALNTGFDLRTESYKLFGVDLTQIPGLMLMVLTLFSEVGRDMSRWKTAGHFVSWLALCPDNDITGGRVAWRGMRKVHNRAGELFRMAAYSLHHDRSPLGDYLRRMKSKLGPPGATTATAHKIAIIFYTMVKKQVEYDATLWAERDAQREKRFEAKIKRQAQQLGYKLVPIEEKPAA

SEQ ID NO: 452238 - protein, 342 aa, unidentified
MEVTTIGLDLAKNVFQVHGVDDEGTVLIRRQLRRSRVLPFFKKLPPCLIGIEACATAHHWARQLIGLGHRVKLMPPHYVKAYVKRNKNDAADAAAICEAVTRPSMRFVAVKTMEQQSVLMVHRTRELLVRQRTMLVNAIRAHMAEFGVVARVGLPQVKELLAVIADPDDERIPPLARTCLEGLARQLLSLEREITITERRIHAWHRSNQASQQLETIPGIGPITASALAATIADPEVFRSGRELAAWIGLVPRQNSTGGKQRMGRISKQGDHYLRWLLVVGAMTVIRHGRRTNFEKNPWLGDLVRHKPPKVAAVALANKIARTAWAVLVTGEPYRQPAPAEA

SEQ ID NO: 452239 - protein, 415 aa, unidentified
MRSVGLDVHRDFCEVAIVDQDGPRSRGRVASTRESLELFAGSLAPTDRVALEVTGNAWEIARILEPHVARVVVVSPTDTVMRQARAKTDRLDALALARLLAAGSLDAVWMPDEPVRMMRRRLARRSQLVNARSRVKNEIHSVLVRCLKGRPPASDLFGLKGRSWLAGLELPEVERESVDAGLRQIAFLDNEITEVERVIACQALTWPQIGRLMTVPGVNLIVAATFLAAVGDIRRFENTNKIVGYLGLDPQVRQSGEAPARHGRISKQGSAQGRHALVEASWSAVRQPGPLHAFYQRIRARRGHQIAIVACARKLACLFWCLLTRSEDYAYAQPSLTAKKLRRLELTAGAPKARGKTQIWSTNDAMRQAERALAEQAELAYKRNITDWQATRPANAKAGASATRGHASKEPSKGQ

SEQ ID NO: 452240 - protein, 309 aa, unidentified
MEFFAGIDLGKRKSQIKILNQDRKVVEELKIDNDPKEFFRIFKKYKGKIDVACEASSNAFWVWDTLSPIVRRFSIGHTSKIRWIAEARIKTDKIDAGILAELLRADLFPAIAIPPKRIRELRELIRGVIRLRRQALRYRNQVHGLLGRHGIPYKRSEVQDTKLGELVRGVELPRPARLAADALLRLEVGFFSAALLVLELWDVTRFSDAKHLASYIGFVPGTHQTGETLWHGSMTRQGNVLVRWILVQDTWIAIHNHWFFARMYDRYKKRKGNTRAVVPVARALLKTIHRVWTEQKSYEELYKEKTLVG

SEQ ID NO: 452241 - protein, 338 aa, unidentified
MGYFVGIDLHGDNNYIGILDEEDRRVFKRKNRNDIKEITRVLEPYQGEIEGIVVESTFNWYWIVDGLQEAGYRVHLANTAAMQQYEGLKYVDDTRDSFWLAHMLRLEILPEGYIYPKEIRPVRDLLRKRMMLVQQRTAHILSMQTMVNRNKGISISSDTIKKMSDEEVEGLFGDEHLVMSAQCDHEVIEVLSEQIDKIEKAVHKEVKLKKPYKKLLTVPGIGEILAVTIMLETGEISRFKEVGNYSSYCRCVSAKKVSNGKNKGQGNRKNGNKYLAWAYVEAAHFHVRYCEEARKWHQRKASKSNAILATKALSNKLARACYYIIKEQVPYDKKRMFG

SEQ ID NO: 452242 - protein, 458 aa, unidentified
MYRELKPFREALSQQLKASLFPAVAGVDPNKLLETYLDRLTMYTGVDVADQTFTVLAMDAGKEILGSLEGCANDPGGFQRFVTWARDLRDQHGLRIIAVAGETTGIYYWALWDCLGEQPDIARVLYNPRTTKHMGEVLSKKVRNELVDALLLAEQLRLGSTPEVLLQEDIDLLAARYYSRATRDLAQQINRKKNQLRALLRAYCPPLSQVFPGSKLHHPAVYALLQEYLFPDEFVQADAEALAAILVAHCRDAFGLAQAQHLVEACQQALPRPVGRDAIRHLVHGYIEDITTFQQRKSFYLKTGYALIENRQETKLLRTVKGAGPSNTLALVSELGDVSRFPSGEHLASFLGLTTSKHISGATIFRSKRITKQGSPNGRYAAVNVAQHLSQRVPRYQAMYQRIKGRKPPRKGHFIALVAIARDFVTNVLYDMWCNKRPFFLKDEDYRKYRQKQSRSEV

SEQ ID NO: 452243 - protein, 421 aa, unidentified
MQQSSIPPTVSRVVGLDVHPDSFTASILQGATPLSAVELKVFNKVPIAKLTDWAQKNTLPTDTLVLEASGNSFDVARKLLAIERKAVVLESYFVGKLKESHANNDRISATRIARAYLCGNAKTVWVPDPLTQERRDLFHAHRRAVKGVTAANNSLSSYLSDNGVRLDQSLLDLCRDERRNAVMKARTWNPTQTQILEIRLLELDHHIELEGRLASLAAQQVLQDPKLLELTRLCGIRDVIAFAIGAIVGDINRFKSHKSLVKYAGLNPAFDDSGKGTWSGGIKGHGHKDLRALLIEAGHALLRSPNHPNSDWGRKLLGRKGEVALVVAALARKLVVQVWYSLKGLTKPMEQVSKPMVQKIGKMISRVGQQGLDALGISRKDAREQALEILRTRKPGREYALRQDPPAAIPVAQMPASALAT

SEQ ID NO: 452244 - protein, 359 aa, unidentified
MHSECTKVQFNGQDVYVGIDVAKKSWKVCLYLGKAYHKRFAQPPEPEVLVDYLRRNFPGATYHSVYEAGYFGFWIHRALIRLGVDSMVINPADVPTTDKERHTKTDRVDAAKLARALANGQLSPLYVPDRAAEEDRTLIRMRMTFVRKQTRTKNQIKALLQLYGYRVPLDVADRYWSRAYIQWLERLTFDQDTGRAAFQALLRELLALRATIADLTKQIRQMAQQERYRARVELLQSVSGIGLLAAMTFLCEITTLERFKNLDCLLSYVGLVPGEHSTGETEQDTGLNPRRNSALRYMLIECAWIAQREDPALLNAFTTYCKRMPKTMAIVPVARKLVSRMRFVLKNNQPYVTGVLSGG

SEQ ID NO: 452245 - protein, 343 aa, unidentified
MNNTVISLDLAKHVIQVAKFSQDAVMQFNKPMSPDKVIQLLANTAPCIVAMEGCGSFHYWGRVAERFGHTVRAMPPIKVKPFVGSQKTDANDAVGIYVASRQPNMTFCPIKSVEQQSIQSIQTSRRILERTVKSLGNHIRALLYEYGFVFGKGKKALNEAVGLYLAPDNEALSPAIKAVLATLWEQYQSTDEHFDILTKQLNAHVKASEPCQRLMKLEGVAEISAAGLYASLGDGSGFKSGRHASVYVGVTPKQHSSGGKVVMLGIDKNGGDKSLRATLYTGALSVVTRLPDEPKTEKQRWLIALVKRVGIKRACIALVNKTVRTAWALLRYSQPYQPTPLTA

SEQ ID NO: 452246 - protein, 375 aa, unidentified
MREKLRFLGMDVHAETIAAAIAEPDGEVRSLGTIPNRMESVRKLLKKLGPVEKLRVCYEAGPTGYVLYWQLAELGVQCEVIAPSLVPVKAGDRVKTDRRDAEKLARSYRSGDLTAVWVPDAGSEALRDLVRAREAAKQDELRARHRLGKFLLRSGHRPPPGVRAWTHLHLIWVSQIRFTQMAQESTRLDYLHEVEHMRERVLRLEQAIVEAVKLASPALQEVIQDLQALRGIAHISAVTIAAELGQISRFEGARQLMGYCGVVPSEDSSGKRTRRGSITKTGNAHLRRIVVEAAWSYHRPPAIWAGLRKRQQSVSEEAKEIAWKAQHRLHKRYARLAAKGKDKRKIVTAVGRELLGFIWAIGTRAEATARQRIAA

SEQ ID NO: 452247 - protein, 379 aa, unidentified
MDHAITDTPAETILHGALELSKNSWLLALQFPDRAQPSLYPISGGDTVGLMAKLTAARDRWAKMSGKAPSIVLCYEAGYDAFWLARFLKARGIECLVVDAASMQVNRRARRAKTDRIDVGMLLRALIAWGQGDRHVWSVVRVPNVDEEDLRRSHRERDRLVRERTAHINRIKGLLFGQGIRGINVKSKYKTLQIDKLVTGDGRPLPPRLASEITREIARLALIQEQIATLERERDQAPTPCKTTEKKRLQLVSLNGIGPAIAAVMTREVYYRQFDNRRQVAGFLGLATSPHDSGDVERSQGISRAGRGQVRGTMIQAAWLWLKHQPKSAITRWFVQRTAGQSGRIRRIMIIAVARKLAIALWRFLEQGLVPQGAMLANR

SEQ ID NO: 452248 - protein, 371 aa, unidentified
MKSILSVGMDVHKNSFSLCAYDGYTGEIVSESTFASDVKLVIKFIETLKSRHENDVEIKCGYEAGCLGYSLYKSLTARGVDCVILAPTTMQVSAKNKMVKNDRMDALNIAKNLASGSYKTVYIPDEEDVEIKEYIRMIHDFKKELQRVKQEICAFVLRHGYQYDGKSKWTIRYMNWIRELEMSEIQRETLNEYIAEMENLNDKIDRFMNRINEIYQSERYHEKVSKLRCFKGIETFAAMTIQVETADFERFPNAKAYASYTGLTTGEHSSGDKNNRIGITKQGNTVIRKTLVECAQALAKGNVYAKKSQRLKSRQKGMDVNIIVYADKATERLKKKYQKLIERNVPRNKAIVAIARELACFIWGMETGNIH

SEQ ID NO: 452249 - protein, 343 aa, unidentified
MQTITTIGLDIAKSVFQVHGVDAGGQVIVRRQLKRRYVLTFFQKLSPCLVGIEACASSHHWSRELQALGHTVRLIPPAYVKPYVKRQKNDATDAEAICEAVTRANMRFVPTKTPEQQSGLVLHRARHLFIRQQTAVINAIRAHLAEFGIVAPVGRHGVKELLTVVADPNDKRIPEIARACLQAFGAQLRRIKEQILEFDRLIRAWHQSNEMSMRLEAAPGVGPVLATALVAAVADPKSFRSGRNFSAWIGMVPKQHSSGGKQRLGNISKQGDRYLRGLFVAGALSVIRYAKIHGTNHRPWLAALLARRPTKVAAIALANKIARMVWAMMSRGERYNEPVALAR

SEQ ID NO: 452250 - protein, 480 aa, unidentified
MAKRAVQHADLKAVPMLLNESLYIGIDIGKAKHVAGFLSKTLLERHERFEACPALVFENAREGFRLLIERIRSLAPLEHIFVLMERTGHYHRTLEQYLQELDITVYVMHVQSRPTGMLKTDKRDALTLANQLYNQLELGVQVPNKLQLIRRVVPPTQAAAELRGLIRHRYELIHESTRRKNKLTAICDQLFPELGRVVKDPNGQVALALRERFPTPAALATASLTTLQQIRGGARSFSDAKLVELQWQAAQSIGIKEVARLRGLVLEQTQLIKELQLLQAHIQQLDTEIGGIVEHAREGQILLSFPGIGPIMAATSIAAIGSIHNFPSAAALKSYFGWAPVVAQSGSTLDHTRLTHGGTRTMKHMLFLAVFQAIRLKDNEWARLYERLVKTKCPYDERTQSYLGKTRVIGRVAGQMTEAIYALLKRDAELLSKIPPGQDPPPPLLYDPEVHRQHRLGHYRPLKSTPPPNTITLLHPLPAQ

SEQ ID NO: 452251 - protein, 338 aa, unidentified
MEVYAGLDLHSTNTYVAMIDGENKVLYKQRHRNEVPAILSALDPFKKDIRGVVVESTYNWYWLVDGLMEAGYRVHLANVSAIKQYEGLKQIDDRRSSLWLANLLRLNILPTGYIYPKEERPTRDLLRKRLQLVRHRTSHVLSVKNILARNLGVRMKTYDIKKLTAPEVRTLFADKEMRLAVMSSIGLIEHLEEEIDGIEKLITKKLKIRKEFTKLLTVPGIGEILGITIMLEVGNIDRFPTVGDYSSYCRCIRSIRTSNGKVTGYGNSKNGNKYLSWAYVEAANYARRYHETVRSYYERKRVKTNKIVAIKAVSHKLARASYYVMRDGVDYDQARLFA

SEQ ID NO: 452252 - protein, 406 aa, unidentified
MSVRAAPVTSSTVVVAVDVGKRSVALSVTDALRHRLLGPVEFAMVRSALTATIGRVRGVLACPDVAVKVGVEACGHYHQPLLNASAWPVGWEVLELNPGHVAEQRRVQGRRRVKTDAFDLDAITEMLLAGHGTPVTVRSEVLGQLTAWTAHRTRRVLTRTATKNQLLGQLDRAFPGLTLALPDVLGTKVGRLVAEQFADPARLAALGSARFVRFAAARGLQVRRPVADRLVASARDALPTDAALVARRVLAADLRLLHELEQEITATELELAILLPASSFRTLTTVPGWGVVRAANYAGALGDPDRWPGPAQIYRAAGLSPAQYESAGRRRDGSISREGSVELRRALIDLGVGLWLCDPAAKRYAAGLKSRGKRGGIIACALAHRATRIAHALVRDQRPYDPARWI

SEQ ID NO: 452253 - protein, 396 aa, unidentified
MAAIWAGIDAGKTHHHCVAIDESGHRLLSRRVANDEPELLELLADVLALGETVTWGIDLADGGAALAISILLNHDQQVHYISGRAIHRASESYRGEGKTDAKDAAVIADQIRIRRDLHPIHTGDEAVIDLKILTGRRMDLVADRTRTVNRLRAQLTGIFPGLERVLDLTNKGPLTLLTGYQAPAAIRRLGAKRLETWLRNRKVLRADQLAATAVEAAERQHTSLPGEKLTAQMVHTLAKEVMALNERVAELDKLIETRFRDHHHFEVITSMPGLGIILGAEFLAATGGDMAVFGTPDRLAGFGGVAPVPRDSGKISGNLRRPQRYNRRLQRVLYTSALFSIRRSDESRRFYDRKRAEGKRHTQAVLALARRRVNVLWALLRDGRTYELTPPTALAA

SEQ ID NO: 452254 - protein, 405 aa, unidentified
MTSLRRIVIGVDTHLDTIHVAAITDTGQPLADAEFRTTPTGYYVAITWARSFGEVFIAGVEGTSSYGAGFTQALQDNSIHVVEVNRPNRASRRREGKSDPLDAYSAARAVLAGHGLAIPKDPNTGALKALLIARRGAVKARSAAIQQIKDLLVTAPADLRERYRRYPTTVRLVQALSRCRPTTHTDPITVAVLTACKALAQRIEFLDRQIGELTTELDTVTRTLNPALRAAYGVGPDTAAQLLITAGTNTDRLRSEAAFARLAGVAPIPASSGKITRHRLSRGGDRAANNALHRIALVRWSHDQRTRAYAARQLAAGRSKKDVLRLLKRAIAREMFKHLTAPCPIDDYSDLRPTRQAQNITLTSAAQHLGVWPTVISRLERGLQRHDSLAANYRHWLNTQHIDAA

SEQ ID NO: 452255 - protein, 355 aa, unidentified
MEGVFLGVDFHARTQTVSWCGTANGVVERRTLDHRTDDVRAFYQQFHVPAVVGLEATGYARWFHRLVEETGHRLVIGDALRIRQFAARRQKNDRRDSELLLDLLLRGDFPAIHIPSIASQEVLRLLRYRHRLVGMRTMLKNGLQAVMLSNRVLRTSRMRTLLWRHQLEHLPLTGADAIRREHSLPLMDELSARIEALENELHRRSQDDQAVGLLQTHPGGGLFTALAVAHTLQPLSRFRRARCVAAYCGLDPVERSSGDTVRFGHISKQGNRLLRFLLIEAGRSAVRPEGDPDLRRFYYQLALKRNGSIAAVAVARKLLLRMFCMLRDQIDYEEFRRRGRDARRARGKASSPKDG

SEQ ID NO: 452256 - protein, 338 aa, unidentified
MESYAGIDLHASNNYTAVIDDHDKRLYGKRQPNRLDVVLSALDPFKTELKGVVVESTFNWYWLVDGLMENGYKVHLANPSAIKQYEGLKHTDDKWDAFWLAHMLRLNILPEGYIYPKEERPVRDLLRRRLLFVKHRTSHILSLQSMITRNLGVRMACRGIKKLMEEDAESMFDSPYLVLAAKNNIATIQFLKKRIKVIEREIRPLIKIREEFKNLLTIPGIGDILGFTIMLEVGQLSRFPKVGDYSSYCRCVKSEKLSDGKKKGKNNKKNGNKYLSWAYIEAANFIRMHCPKAESFYQRKMAKAGGIVATKALSNKVARASYYVMRDQVPFDEDKLFA

SEQ ID NO: 452257 - protein, 403 aa, unidentified
MNSVGIDISKGRSTVAVMRPFGEVVISPFEVRHTDSELSELARQLKSLNGETRVVMEATGNYHAPVAKLLHDAGLYVSVVNAKLVHGYGNNELRRVKTDKKDAVKLANYGLDRWLTLPRYVPEEGARLLLKNCYRQYRQYSKVQTVLKNNLISLLDTVFPNANRLFSSPIRGDGSEKWVDFVAEFWHCRCVSEKSEKAFANKYQRWCKKHGYNFSVAKAHTIHAEASGHIGVMPKSETTKLLVEQAVAQLRATSVALTALKREMLTLAAQLPEYPVVMGMFGVGPTLGPQLIAEIGDVRRFYSKKALVAYAGLDAPPNDSGDVTGKHKSMSKIGASSLRRTLFLVMSVYLRSAPLDEPVYQFMDRKRAEGKPYHVYMMASANKFLRIYYATVKAYLESLEHTT

SEQ ID NO: 452258 - protein, 402 aa, unidentified
MAYDFVIGVDVGKYFHHACVLDSQGRQVLSKRINQHEGSLRKLFGKFLTDDASVLVIVDQPNNIGRLTVAVAQDMGVDVRYLPGLAMRQLSRIHVGNSKTDVRDAYVIAHAGLKLPDALRSVDRVEEVFIQLKVLNGIDEDLARAYTRLINQMRSALVGTYPAFEHVLRGQVIHRKWILHLLAKYGGPTKIRRVGRARLAAFARSHRARNPEPVIDAMLAAIHGQTVSIAGAEYAELGVAMSAKDALAKLEHRKEIEAQVLKLIQDIPHTEILLSMPGIGPRSAAQILMTVGDMSDFPDAAHLASYAGLSPRTNQSGTSIMSNSPNRAGNKKLKNALWQSSFASIRFHERSRQFYERKRKEGKRHNAAVVALARRRLNVLFAMMRSGELYRDISTVQETTAA

SEQ ID NO: 452259 - protein, 325 aa, unidentified
MCKVGHTGVCLRDVPCFVGIDVAKAQWAIALRPSGERWAVPNDASGVMTLVDRVQALHPTLMVLEATGGLERAVTSALATAGRPVVVVHPRQVRDCARATGQLAQTDALDARALAHCADVIRPTPRPLPDTQTQERRALLGRRPPRIGMRTAEQHRLAGTNARLTQDIAAHMTWRNAAIATLDDDLETTLRASPLGREHDDRLQSAKGMGPVWARTLLLELPELGTLTRQQIAALVGVAPLHGDRGTLRGQRMIWGGRAHVRTVFYMGTLVATRFNPQIKVFYAQLLAAGKGKKVALTACMHTLLTILSAMLKHRTPWQPQEVQS

SEQ ID NO: 452260 - protein, 419 aa, unidentified
MDSSKTQKIKRINPRTMIVAVDIGKGFHAGYFRAPNGEERKPFLFFNSAKSFNEFWHSAQEFSRNHDLEEIVVGFESSGPYAEPLFHYLRKKPVTLVQVNPFHTKRVKELTGNSPNKTDRKDPRVIADVISLGHALTLVVPKGPSAHLRRLTQARERVIKRRTAALNQMQDLIFVIFPEFLKIMKGISTKTALYLIKNHPTAESIVALGLESLKTLIRTTSRGKLGPQRGEDLFHAAQSCVGVQEGKGSILLEIEHLLSQIGSDNRFVASLEKQMEEYLEEIAYSQSILSIKGIGTVTTAGLIGEVGDFREFGTISEITKLAGLDLFEISSGKHRGQRHISKRGRPLMRKLLFYAAINMVKSNGILHKPYQEMLSRGMLKMKGLIAIARKLLRIVFALARDNTVYMEDYCRYQHLKLAA

SEQ ID NO: 452261 - protein, 417 aa, unidentified
MENVQWFVGIDWGPRAHDVCIVDATGRVCEQRQVEHTATALAAFVDAVIARAEGQPERVAVALEVPRGALVELMIERGLAVWAINPKQLDRFRDRFTAAGAKDDRRDAWVLADSVRTDRQAFRRVRLDQPLIIALREWSRMDEDLRGEYGQLTNRLRDLVHRIAPELLTLCPAADEAWFWALWRTADTPAAQARLSERRLTQLLAAHRIRRLTAAEVREVLQRPQVYTAPGVVEAVAGHCQLVLRRLELVWTQRRECERQMARLLDTLEAQAPAAGDQREHRDAAIVRSMPGVGTRVAAAVLAEASQPLADRAYHTARAWFGVAPVTRQSGRRRTVVMRYACNQRLRDAAYHWARGAMCWDPRSRAYYRALRARGLTHGRAFRTVVDRMLRVLFTLLEDGQLFNPHYGHDTSLPVGG

SEQ ID NO: 452262 - protein, 411 aa, unidentified
MDKIYDKCCGIDVHKKLIVACFRKGSKQELRNFGATTRELLELANWLQNGGCEMVAMESTASYWKPLYNILESSELKAMVVNASHMKAVPGRKTDTKDAEWIAELLQHGLLKASYIPDKQQRELRELVRYRKSLVSERTRELNRLQKMLEGANIKLSGTVSDINCMSARNILEYLLTGEFFDEAKYDEMYKQKIIAHNLKASKEQLIDDLNGVMTPLQRRMMKELLSHLDELNVHINNLEDEIDNFMKPEEKKATQAIQDVTGIGKNSSQAIISVIGTDMSRFPTAGHLAAWAGLCPGNNESAQKRKTGKMRKGNALLRSTLVVCAHSATRNKNSYFYAQFMRISSHRGKKRAYVAVAHSMLIAIYHILKDGVVFKDLGADYYNQFNKERKINAYLKKLKALGWEVPVVAA

SEQ ID NO: 452263 - protein, 343 aa, unidentified
MLYLGLDVHGKWTTVVGFDPKTGEVVEHKRVSNEAEEIGVLLGSLAGPLYGAMEVGTNSWAMYRVLRPHFAELVVVDPARVWDRRRERGAKTDRRDALRLAELLYRGELEGVWIPDERTQDLRVLVRGKVRASRWVTKACNEIGSLLRSWGYRVEASLLSGQGRKLLQEAQLPGHSRRVLELWRELLETAQEIEAELEAAVKEEAKADPVCQLLGTIPQVGPLTALVVRAEVGDVRRFRTAKALASYAGLCPRVSQSGEQCHYGKLGRWGDRWLKYALVLAANRIARGAKESRLHRLYWRMCLRHNRNDAKVAVARKLVQLMWRMLRDGRCWQELESLERVQA

SEQ ID NO: 452264 - protein, 356 aa, unidentified
MAEGTWVGLDVHARKTVAGVVDAVSGEVRSLRAPTLPVETVEWLGQFAAPVRVAYEAGPTGFGLARACAAAGISCLVAAPSKIPRAPADKVKTDRRDAERLARLLRLGELVAVRVPEPHEEAGRDLVRAREDARGELMRARHRLSKLLLRHGLVYDASAWTLAHDAWLRRQRFTSRPLAIVFDESYAAVLQAKARRDLLDQAIIELAAEPSFAETVGRLCCLRGVSTLTALALTVELGDWTRFRPQALGPFLGLTPSEYSSGEQRRQGAITKTGNSHARRLLVEAAWQQRRPLRESATLARRRRGQPAAVRARADQSARRLHARWHALERRGKRRTVVAVAVARELAGHCWALATM

SEQ ID NO: 452265 - protein, 322 aa, unidentified
MSGWVLGIDIAKQKFDLALLIDGKTKHKVCKNSAEGFEILRLWLEKQKTQKVHACMEATGNYGEDLAIYLHDAGHIVSIVNPARIKGFAQSELIRTKTDKLDAALIARFCLAMKPGPWSPPSPEIRSLRALVRRVDSLIDMRSQEKNRIGTAHKSVVLLIKKHIAYLDKEIERIRKQIADLIDQNPDLKRKRDLLDSIPAIGKATIPHILAEIDDLGKFDHVRQLVAFIGLAPKETLSGSSIKGKPRLCKIGHARLRKALYMPALVSIQCNPVMIMFYNRLKDKGKNGKVIVCAIMRKLVHVIFGVLKSGKMYDPNYKPISA

SEQ ID NO: 452266 - protein, 488 aa, unidentified
MLCFRHVELAGDVPPGPVEKYHGVCALGDAARDFVEVELHHVGVGIGKRQGRSDAPRRADRAEQIGVVVALVGGLSWSRSAPGPLADEAVLLADPGFVLEPDFDRRRLRQPLEMSLQRVREVYGMARPSFRRRKVAGGSGGGMGMDISVLGVDLGKNVCSVVGLDASGAVVLRRRAKRETLIALAAKLPPCVVAMEACCGAHHLGRVFAGHGHDVRLMSPEYVRPYVKAQKNDDRDAEGIAEAATRPTMRFVGLKSQEQLDMQTLHRSRDRLVGERTALINQLRAILLERGIVAPQGKRKLEQFLTVLMDEQRGAGLSPRMITLVADARAQWAELDQRIAAFDTEFIRWTKENEDARRLASIPGVGPTIASALIAAIGKGETFGHGRDLAAWLGLVPRQFTTGGRPKLLGISKRGNRYLRKLLIHGARAALPHVAERDTPLGRWAKALLERAHPNVAIVAFANKLARIAWAVLRRGEGFVVRGLPLAA

SEQ ID NO: 452267 - protein, 371 aa, unidentified
MPSARQLGERGKAWQGRSVVRGAEPFSSKTSNGCLGTSPHSQARGVRRGKGTRPERPSEGQTVFVGIDVSKARLDVAFRPEGASFQVSNDEAGIGDCVRRLQALRPELIVVEATGGFETALVAGAAVVGLPIVVVNPKQVRHFAKAIGRLAKTDSIDAGVIARFAEAVRPEVRPIQNEAGELLTALLSRRRQVLEMMVAEKNRLVTMRERHVRQRITHHLHFLKQELRELDKDLDKEVRSTPAWREKEDLLKSVPGVGPVLARTLLAELPELGQLDRKRIASLVGVAPMNNDSGSLRGQRRIQGGRAQVRTVLYMAALVASRFNPRLKRFYDSLRASGKTGKVALVACMRKLLVILNALVRTGERWNAEAT

SEQ ID NO: 452268 - protein, 423 aa, unidentified
MDVVGIDWAWDFHICYSIEKNKIYRIKDNEAGYRELLNEVSKEAVFVIEESFNRISDFLLSEGREVYLLPPKRSKEARGYHSNGIKTDSLDARSIALTYSEHPEYCIRARNNEEGRSFREQLRVYRYYKDEASRLKNKLHNELHDHFPEFVEVMGNWKKNKGKILLLSITDELKSLSIEEIHNYFKENQIAFTNSLKKKAKELKKREWHITKYTLMMVANAARNLLEVERGKQEMKNEMERNLKESKYRVILSLPGVGVVTGVALVAAFLNHEFGNYRNFQKYCGTVPIIIQSGNFRKCVMRKHCDRNLKGILHMMALSAVNKGSWMKGYYARKIKEGKSFGHALRALANTLVKIAFAMLKSLKTYDEELFLSSRGNKSPQSNYTTKTSTPETEKKTNEKSSLPASVAQTNCHLGTDSGRLSP

SEQ ID NO: 452269 - protein, 348 aa, unidentified
MLIIGCDYHPGFQQIAFVDTETGEVGERRLTHREEAEQFYGTLKERSVRVGMEASGHARWFERLLTDLQFELWIGDAAEIRTKRVRKQKTDRQDAQLLLRLMMEDRFPRIWVADAANRDLRQLLWHRHRLVQMRTRIMNQLHVVALNEGVRRKKALWRPAGRRELESLLLAPWAKRRRQDLLDLLDQFTPKIQQLTRALEEEVEKRPVTRRLMTHPGVGPLTALAFELVIGTPDRFHCGKQIASYVGLVPSEESSGDRRRLGHISKQGNVLLRFLLVEAAQVTVRSQAQWRSKFFHLALRRGRKIAKVAMARKLAVHLYWMWRQGWDYGHFEKLGSHAGEPGNRHGVQ

SEQ ID NO: 452270 - protein, 432 aa, unidentified
MNKYINRPVVGIDVAAEFSMVAILAPDGEVYRKSFRINHTLDGFEYLASEIKKVEEKYDMKVASFMESTGVYHISLFHFLNDNKFDVFTINPLITNSNKNFDIRKVKNDKQDALAIAKICKFQNIKVSSNFDKELYTLKSLCREYYKLTDTKSTFKKKLSNELRVIFPGYLNIFSDTTSKSSLQILKKYPRPIDILSADKTEIIDLLLKLSRKGMKYAENKYDLLLAAAKESLITGVPSDSLFVKLKANISIIENFEVQMDLLLSEIKNLLSSGKIPSDILKNIELLQSIPGIGEVTAITIISEIGDFKNFAKSKKLVAFFGLDPSVNESGKFKGSNNHISKRGTRTGRRALYAVALASVRSKRNGLATNSVLLNYYKENMNGKSKKVGIVAVMKKLLGYIFSILKNQKSYEIRHPELHCKMYVENQYLKVA

SEQ ID NO: 452271 - protein, 319 aa, unidentified
MARNDVVVVGIDVAKDKVDVCIRSLRARQSFPSTTQGHRKLVAWLRKHQVGKAVMEASGGYERVWAKVLREAGIEVRIVDPKRVRSFALSAGRLAKNDAIDAEMIAWFAETFSDAPSQTYDAAREELQALVKARLDLIDSRIRLVGQSEHAAPGLAQKTHARILKSLVSEIAKLEAAICAKIRSTPDFAERAEIIESVPGFAETSAANLVAGMPELGQVSNEIAAALIGVAPYDDDSGKRRGERHIKGGRRWVRNAIYMPCVGAATLNNPVLKAYYRRLLAKGKEPKVAVIACMRKLIVILNTMIARRQKWDPSRYALN

SEQ ID NO: 452272 - protein, 370 aa, unidentified
MKPNFEPGKWFMQCVGIDIAKKTFTACLCMYEFDMGCSTNPVVFNNNKTGFNQFVKWSRKEALKGYPLRYLMEPTGVYYEPLAFHLDKLGLDVCVVLPNKAREFAKYEGILTKTDDMDAYTLGMLGCLDKRLKPWMPPSPIYRELRQMTRFVADINKIRTELQNHLEALAHSEITEKSIVRHYNRLIDEIDKQLAANQKAIREKIKQEPGLSERIDHIVTIKGVGFMTVVTILAETNGFALITNRKQLTRYAGLDVPAHQSGPVDPKRHISKQGNVHIRTALYFPAIVSTQYNPQMKDFYGHLCARKPQSKMIGVTAVMRKLLLLIYSLWKSGERYDPERGKPAYRKKKKEAETHEGQPHGIDVGTLTKE

SEQ ID NO: 452273 - protein, 337 aa, unidentified
MKVTLIGIDLAKSIFQVCGVNQEGKSVFNRQVRRSHLMKLLNQYPNAVIAMEACSGSNYWGRELENQRYNVMLIPPQHVKPFVKGNKNDRNDAFAITEAARRPNLQCVEPRSLAQTDAMLVHKILQRQVNERTALINQLRGLLNEYGIVVASGKERLRHELPYILEEFDNGLTEISRQYLQRQLDEWQALDKAIKELEQAIKQQVKKSEQAQRLIKIKGVGSKIASAAEAFMGNGSGYQNGRHFAANLGLVPKEHSSGGKQKLGRITKRGNRYLRHLLIQGAWSVVRYADRGNDRLSQWAKQLIERRGKHKAAIAVANKLARIIWAMSYHQTEYKAG

SEQ ID NO: 452274 - protein, 432 aa, unidentified
MRSTKMAKQNEETIAAYIGLDWADSEHEVTMLIVETGEVESRKLKQESEALADWVQSLRERFSGRKVAIAIEQRKGALIYALMCYDFLILYPVNPKTLARFREAFYTSGAKSDPGDSGLLLDLIRLHRDKLRPWVPEDADTRLLQMLVEERRGLVDEVTRLTNRLKSTLKQYFPQALEWAGELDSRQALDFLTRWPMLESIRKAGAVAVEKFYCQHSMRNQDKIEQRVKAIKEARALTTDRAVLAASKMKALAIVRQLRALGKSIVEMEARIQELFEQHRDHEVFSSFPCAKKVLGPRLLAAFGGDRTRYESALELQSFSGIAPVTRSSGKSKTIHKRMACPKFLRQTFHEYAAQSIKKPGWARTYYRRHRDKGVKHHAAVRALAFKWIRIMFRCWQEQEPYDEANYIASLKRRSSPLVSGLPPAPGPLVEV

SEQ ID NO: 452275 - protein, 341 aa, unidentified
MKVSTLGIDLAKNVFQLHGVDHEGHTILRKKLTRAKFVQFVIQLEPCLIGMEACSSSHYFARLFTRYGHEVKLIPPQYVKPYVKTNKTDAADAEAICEAVTRPNMRFVQIKTEEQQAVLALHTERGILIRERIACANSLRATLAEFGITIAAGQSHLTRELPAILEDGENGLSPFVRTSIYRQSKHIRELEEQVKQVEEALASWYRTQEACQRMAKIPGVGMLTATYVVAAVGNARQFSTAKQFASWLGLTPKEHSSGGKQQLGGISKRGDGYFRYLLVHGARALTARVNRNGAVEENSWLQGLLERKHYNVAVVAMAAKTARIMWSMLSHNTEYQPRQLA

SEQ ID NO: 452276 - protein, 347 aa, unidentified
MEYVGIDLHKKESQICLLTEAGDVMERRIRTEPQRFAEVLGGRPRARILVEASTESEWVARCLEALGHEVVVADPNFAPMYATRTRKVKTDRRDARALQEACLLGAYRPAHRLSDAQRHVRGRLAVRDALVRTRTGYIALTRALLRRHGWRVATGSADTFSRRVMALPLPGRLLSEVAPLLAVMRTVNQQLAYSDGVIEAVTRPDARVQRLRTVPCGGPVTAAAFVATIDDAGRFHRAHEVEAYLGLVPRELSSGESQRRGRITKAGNRRMRWLLVQAAVSMLRLRDPRTAALRRWATGIATRRGKKIAVVALARRLAGLLYAMLRDGKTYEPRAVPRHAAEAAASV

SEQ ID NO: 452277 - protein, 406 aa, unidentified
MNYLGIDISKSTSRCVFLDNNGEKLSKAFTLQNNTINFNKLLSRIDSLSIKSDDLLIGIEATGIWWENLYCLLTNNNFKVIVLNPHQTNKFREALRIKAKTDDLDAYVIAGLLRSNQYACSYVPEQNIQDLREITKLRYQLIKDRTNYERQIFSLLGLIFPEYKSTAIKNPFAVASIAIFKAYPTAKHLAAAKTKHIEKIVRSIKGNNFNIKEIQHLIDTAKNSIFSGRCKEQRSMTLNILLSCFEQLNNSIAQLDSKLNNIFSPSKDDDELSFPGANLLSIPGVGPKTLAAILSAVGANGTTFASGTNFIGYIGFYPKIYQSGETLKANKISKRGPSYLRWALYIAAVACLKHNPQFKALYNKKCSQGKTSKQALVYVAKKLAQLCLSMLKSGDTYRPQRVFMPA

SEQ ID NO: 452278 - protein, 301 aa, unidentified
MQSSTLPNAEVSLTLGVDTHKDAHVAVALDGIGRHRGTLSVPATITGYRRLLGWARGFGLLEKAGVEGTGSFGAGLARFLRAEGVEVFEVIRPKRRDQYRAGKSDPIDAEVAARAVLAGTATGVSKGADGEVEMMRALRTTRRSALKARTQAANQMRALLITAPEQLRAEMREPSMDKLVKRAARFRLGESPDDVATATKFALRSVARRYRQLSEEISELGEQLDRLVAETAPELLAVKGLGTDSAASLMIAAGDNPERLKSEAAFAHLCGVAPIPASSGKRVRHRLNRRGNRDARAGPCT

SEQ ID NO: 452279 - protein, 415 aa, unidentified
MDTLIERVAALDVHKDSVAACVRLPGKGRRRRQEKRTFRTTTEGLLVLRDWLRSYGVTVVGMESTGCYWKPVYYLLEDDFDCRLLNAQHLRNVPGRKTDMADAEWICQLVEHGLVRASFVPPRPIRELRDLTRYRKAQIEERTREVQRLDKVLQDAGIKLSSVASDVLGVSGRAMLEALVRGTHEPELLAELARGRLRQKLPALREALTGRFRAHHALLVSQILAHVDFLDETIAVLSTEIDQVIAPFADKLALLDTIPGVDKRTAEALLAEIGPDMSVFPTHRHLASWAGVCPGNNESAGKRKSAKTRKGSKWLHAALIQSAKAATRTKGTYLSAHYARIKGRRGHAKATVAVAHSILVSAYYVLQRGVAYDELGELYFQRRDEKNAERYRRRLVRQLERLGHTVILEPKPEVA

SEQ ID NO: 452280 - protein, 337 aa, unidentified
MEQYVGLDVSQETTSIAVRQDGRRVWRGKCPTDPKALSEVIRKHAPHAVRVVFETGALATWLYHALQAENLPVVCIDARHAKAALDMAPNKTDANDADGLAQIAEIGFYREVRVKGYGPMLTRTLVGARSQLLRISVQLSNQIRGIMKTFGLIVPKGAGRIFERNARALLETNEAVARVVLPLLETWQVVRARAAELDRQLIAAARTGSSYRLLMTIPGVGAITAVSFVAAIGVPENFKRSRAVGAWLGLTTRRYQSGETDYDGHISRRGDRYLRALVYEAAVAVLTRTRTDCALRSWGLKLKAKVGFKRAAIAVARKLSVIMHTMLKTGAAFAAAA

SEQ ID NO: 452281 - protein, 323 aa, unidentified
MNKDIKYFGIDISYLVFDVTDSDGNYYQFKNKVSGFKAFRKLLNSESHCVMEATGYYHYQLAYYLFEEGLNVSVENPLSVKRFIQMRLSKIKTDKSDSKLICSYAEQVELKLWKGSSKEVQECLQITRTLSVYTKQRTMIKNKLHGESVLGEPSKAIVRSLKRSLKHLDKEMSSLEELLLVLVKEAHKDLFTRIKTIPGIGKKTSIMLIVLTGGFERFSSAAELCSYAGLTPVIRQSGSSIKGRPRISKMGNQKLRNLLFMCSFTACKYNKACRDIYERLVAKGKSKKLALIAVCNKLLKQAFAIAKSGLIFDKEYKSTLVKN

SEQ ID NO: 452282 - protein, 427 aa, unidentified
MKKIKIDYLSTLFVGIDIGSRTNVISALNFDQDFLIRMVPVANAQGGAEQMEEMVAQVLSQHHEFNAVIIGLESTGFYGVHIANYLSTSEKLAPFSTRVYCLNTNEVKQYKKSFNSLDKNDGIDSFVIADFARVGRIHTEPWRGAQYLALQRLTRHRLHITECIAREKTCMLNSIFLKFSEFAMLGKDEHPFSDKYGATAEAVLTEYLSTEDIVDASVDDLVAFISSKSRGRISDPGQTAYLLQKAAQDSCRLDKCLYEPLTVSIGCSFNCISAFEKELKAINGAIQRAVKGLNPTEYQILTSVPGIGPVYASGILAELGTIKCFKSNDALAKYCGIVWKENQSGEFRAEDTPMNKAGNRYLRYYMIEAAGSVVQHCPEYKAFYDKKFAEARTHQHKRALALTSRKLIRMLFGLLANGKLYSVEKSR

SEQ ID NO: 452283 - protein, 325 aa, unidentified
MSKYIGIDVSKKVFDVAFFKNNETWFYKTLVNEEEGFRELISLISKDDVLVMEASGPYHLRLALFLTKSGYKVSVVNPLIIKRYSQMLMLRAKTDKKDAKTISEYGSFTKPSLWEPKGELLMEIQEMYTSLNLFRKQLTMLTNQFKAFESSGIFNHFLKKELKQHKSVLENRIKRIELEIEALIQSEYGELVKRLRTIPGIGVKTSTFLIVVTNAFENFSNYKELISYLGLSPRIYESGSSVRGKGHIAKLGNSQVRKMLYMCSWTAKKSNLKCVEMYDRLHEKGKPERVIKIAIVNKLLKQVFAIAKSRKIYNENHISTLKRVA

SEQ ID NO: 452284 - protein, 404 aa, unidentified
MYNAVGIDVSKGKSTVTVLQPGGTAIRKPFDVSHTSQNLNELSSYLESLDGDTRIVMECTGRYHEPILKALSEAGLFVSVVNPHLIKNFGNNTLRKVKSDPADARKIARYTLDNWAELRQYSSMDNTRTQLKTLNSQFSFFMKQKVAAKANLIALLDNTYPGVNKLFDSPAREDGSEKWVDYAYSFWHVDCVRGIGLKAFTERYQAFCKRHHYNFQADKPEKLFNASKELVAVFPKEKTYKLLVQQSIQQLNLASAHVERLRREMNELASTLPEYNTVMGIYGVGKTYGPQLIAEIGNVSRFTHREALTAFAGVDPGVDESGQHKSKSNRASKVGSARLRKTLFQIMTTLLQNAPEDDPVYRFLDKKRSQGKPYYVYMTAGANKFLRIYYGKVKECLRNLEQKS

SEQ ID NO: 452285 - protein, 418 aa, unidentified
MTATDTTASTLLVAIDISKHRHEVLIGVPGKKRRRRMTIMNTLDDFQRLSAALVGYDLPVRVGFEATGNYHRPLAHHLGQAGFELKLVSSVGLARTREALHNSWDKNDPKDAQVILHMLEIGAIQFFHDPLVTGVADIQELSKTHEIVSRSKTELWHRILTHYLPLYFPEAERFHRSSRTDWFLAFLEKYPTPTMITTMSREAFVADAWQVVGRKVSKERLLSDIYATAVGSVGLPVHPDSDAVRMFRLVLAEGRSLVRQRNEIEVRAVELLSDLPDYQLLTTIPGIGPINALTILAEAGDLRRFRHHRQFLKFCGMDLATVQSGMFRGQSRISKYGNARLRRTFWMAGQVAVLKRTNSFRDKFERYIARDRHNAHLRRKAYTAIAAKMARTVHAVVKHGEPYRPFFEGASPGGRTFV

SEQ ID NO: 452286 - protein, 349 aa, unidentified
MTPLEGASVAEASTIGLDIAKHVFQAHGADSSGRVVFRKRIPRAKLMQFFASQPRCLVALEACGGAHYWGREIGKLGHTVRLIPPAYVKPFVKRQKNDAADAEAICEAAQRPSMRFVPVKDEAQQANSVVFRARDLLVRQRTQCINALRGHLTEYGHVVPQGTAHVDTLVALVEDATSSVPESARTILTVLIGTFRALQTQITQLDAEIARRAKADPVARRLMTIPGIGPIAATAITALVPAPEGFRTGRDFAAWLGLTPLQKSTGGKQKLGAISKMGERTIRRLLILGASAVVRWATQRGAAEGSWLARMLGRKPRMLVTVALANKMARIVWALLVKGGTYRVPAAAA

SEQ ID NO: 452287 - protein, 356 aa, unidentified
MSREVKYIGLDVHKEAIEIAVLNTKGHQVMESIVETKASSILQFIHGLQGELHVTWEEGTWAAWLYDLLKPHVHQVLVCNPRRNALLKEGNKSDKIDARKLADLLRTGMLRPVYHGEHGLGTLRELGRSYQTLSQDLNRVMNRIKALYRGWSIPCAGTQVYAPRYREEWLHKIEQAGVRRRAELLYQQLDGLQTLRRTLRPELLAETRKHKAAKLLRQIPCIGPIRAARLIALMQTPHRFRSKRQLWTYSGLGIETRDSAQYCYVHGQLQRTKKPQQIRGLNQNHNHEMKEIFKGAATRASCGVGPLRDFYVALLAKGMKPEMARLTLARKIAAIALTLWKKEERFDAEQLKPQAA

SEQ ID NO: 452288 - protein, 370 aa, unidentified
MKKKVLYVGLDVHKKTTDVAIAPGRSNGKVRSYGKIDSTLDALNKLIKKLEDGDKELRFVYEAGPCGYQIYRHLDAKGIECSVVAPSLIPRRSGDRIKTDRRDAVNLARLFRAGELTSIYVPTVEDEAMRDLVRCRDDMKRFERKARQRLLSFLLRHGYQYSGKRNWTKGFYNWLATVKFTHSAQQVTLQEYIEAANECSERIKRITEQIQVHVEEWSRARFVKAYQALRGVSLIVSTTVAAEIGDMRRFPTPKQLMAYLGLIPSEHSSGKTVRRGPITKTGNSHVRRALIEAAWTYKMQARVSTILVKRQQGLPKSVCDISWKAQTRLCARYRRLFARGKSKQTVVTAIARELGAFIWAIDKEMQVAHE

SEQ ID NO: 452289 - protein, 362 aa, unidentified
MEQFIGCDAHKKYSVFVAVNERGEASQAVRVGHERQLYRNFLKQLPTGSQIALEAGGHYYWMVDEMQSAGHRPRLVHPLEAKKRMGKTGKKTDKVDATGLGILLRNGTLPEVWIPPAELRDQRELLRLRMFLVQQRTRFKNRIQGALARYNIQLPVRDVFTVEGRRQLGMHLRELPPHTRQSVELELTTLDFVDMQIEQAEKQLQTILQVSTEADLLKTLPYVGRILSMVMALEIGRVERFPSAAHLASYAGLVPRVHSSGGHTRLGKICAEINQYLKWAFIEAANLIVIHQKHLPGRHVVRLYQRVKCKSNHQKAVVALARHLAESAYWILAKQEVYREPSPKAKSSLNVDVLSTLSSTHG

SEQ ID NO: 452290 - protein, 358 aa, unidentified
MRIIGCDLHTRQQTIAMFDTETKEVMETTLTHEGEAVREFYSALPRPAQVGIEATGAMHWFLQLLEQLGIPCLVGHPAAIRKAETRKQKHDRRDAALLLRLQLEKRFPTIHMPTAEQRDMRHLLLHRHQMVSMRSRVQHALQSLALSHGLRLGSRLWNRSGEQALSGLPLAPHTTRRRNTLQRLQQHLDQQVLQLDQLVGQQASQRPASQLLMTHPGVGPVTALATEVFLGDPRRFASGKALASYVGMIPSEHSSGGTRQRLGALSKQGNPFLRFLWVEATLHAVRKDAALRRFYRRKLLQKGLGKARVAAARKLGIRLWIMLREQIDYTEFCRRGQQRQSGGAYAEMPVKEFGPAAT

SEQ ID NO: 452291 - protein, 348 aa, unidentified
MNALHYIGFDVHKKTISFCVKTAAGEIVEEGSVPAQRTGLRQWAAARPQPWRGAMEATLFSGWIYDTLQPYGEQLEMAHPAKMKAISAGKKKSDTLDARTIADLVRCNLLPACYVAPPRIRELRRLLRYRSLVVSEAVRMKNKMAGLLMETGALYVKEKLHRKKYFANLLEELEELPESVIDLLRLSRGALEMFESTQKRLVRELLADSELAQRVERLTTIPAVGEITALTWALEIGDPQRFRSSSDAMSYCGLTAALKSSAGKQQRAPISKQRNRWLQTTLIEAAKLAPRWNPQLAALHARELERGHRNRATLAVARKLVAYLLAVDKSRQPFQQRAPSEVPTQKAA

SEQ ID NO: 452292 - protein, 351 aa, unidentified
MRYIGVDVGKNRCQACIMDEEGVILDEFPFTNNGEGIQRLLGQVGDVDCKAVLESTGNLWLRIYEDMEDHGVEVKLANPYKTKAIASARIKTDKLSARVLAHLLRADLVAECYVSSREVRRVNALLRQRASLVRMRTMVKNRVHSLLDRYGYSSPWSDAFGVAGMRWLKGLEVDPVDRCILDTHLRHLECLDGEMGVLDSWIASRAMVSEDALLLMTLTGIDYYSALLIACEIGVIGRFPSPRRLVSWMGLCPSLYQSGNSLVMGRMKKDSNGRVRWVLVQAARTASRTDPRMRELYERVASRQGSNRAVVRVANKMAVIVWHMLTERRPYEQVKEGLYRSKLKKMKRVAS

SEQ ID NO: 452293 - protein, 358 aa, unidentified
MQTQSKELSFEGQNIFVGLDVHLKSWNASIFTNDLHHKTFNAPPQAQSLSEYLKRNFPYANYFSAYEAGFSGFWAHYQLEALGIKNIVVNPADIPSTQKDKLQKTDRRDSRKIGKSLRAKELEGIYIPSTTMLEDRCLIRVRSSIVRDLTRIRQRIKSMLYFFGIDFPAEFDKGNAHWTKRFILWLKTIKLQQTTGTDSLQLWVRTAEQLRTVLLEVNMKIRMLSKTERMAENYELITSVPGIGITTAMLMLTEIGDIDRFENSDHFASFIGIVPTCRSSGEKESKGAITPRRNNLMRKCLVESSWTAARTDPALSLAFSEYCKRMDSNKAIVKIARKLANRIYFVLKNKKKYELCVT

SEQ ID NO: 452294 - protein, 312 aa, unidentified
MANVICGVDVSSQTLDARVGSDGPFERFANTADGIEALNAFCAAHKVELVVMEATGGYERQAFGLLWSFGRPAAIVNPRAVRQFAQAMGRLEKTDRIDAGVIAWFAQVKDIVASEPASRTQESLTALVTRLRQLTELRTAQSNQARLVTDPIVAETFKEMLGLISRQIKSLEAEIAGLIDDDPTWRKLNEAFRTIKGVADRTVARIMADLPEIGTLSNKAIAKLTGLAPIADDSGKHSGSRAVRGGRETVRAILFVVADCVRRHDPDFAAFHKRLLDAGKPKKVIRVALAHKLVVRLNAKARETRLSLANAT

SEQ ID NO: 452295 - protein, 260 aa, unidentified
MSNCIGIDVGKQELVVFDGRGHEVFANGEDLSVLEEYLHSRGSGLKVIFEPTSTYSRQLEDLCTRNRIAFRLVNPTIVPHLRCVERVRSKTDRSDAQLLHQYGNREDIVEDPPRDRCAREIASILSIYRLLQRNRIALQGGLDAYRREPLLPKALCTLLEEEIQRYKVFEKDIVKLAEKTAAEGGRKEKLEILKSIPGVGPVVALHLLVFFSTFQDADRKQITALAGLDPVRRESGISVHVKPRISKQGNAQFRKMTLDV

SEQ ID NO: 452296 - protein, 343 aa, unidentified
MKMIRVGVDLAKSVFQVHRVDRSEKVVWRKKLSRAEWLPALLEKIEPGCEIGMEACGGAHHWARQLQQRGFTVKLIAPQFVKPYVKSNKSDANDAEAICEAMSRPSMRFVAVKSVEQQDLQAIHRIRAELVSQRSAKGNQIRGLCSEYGLVAPREMIQLRAAIPLWLEDLENGLTQRFRRLLRGLWLDLLNLELRVKELDQEIEIAASTDPVATRLQQLRGVGPIIATAIVANVGDAKQFSSGRQMAASLGLTPRQNSSGGKERLLGITKRGDAQLRTLLIHGARSVLRTAASKNDRMSRWVTHIAETRHHNIAAVALANKTARIAWAMITKGIDYQPGLVAA

SEQ ID NO: 452297 - protein, 426 aa, unidentified
MSAANQSRQEPIAAFVGIDWADEKHDIALRAAEPEAKVERTKIANQPEALSDWVLALRERFKQGKILICLEQSRGALIHFLMGYDCFELYPINPKQLDNYRKAFRPSGAKDDPTDGELLCKYVSLHHQELRPWRPNDEQTRKLALLCQKRRQAVDARSALSNQLKSELKEYYPLALAALDNDLTTVLAADFLLKWPNFASLKKASAHKLRSFFYGHQCRSEQKIEARIQRIQSAQPLTRDSAIIEAGTLTTQMLARQLQALAPFIRQYDQQIAELFSQHPDRALFDNLPGAGDALGPRLLCAFGSERDRFDNVLEPLSFFGIAPVTQRSGKTTFVHFRWACSKFLRQTFHEFAGCSVHFCDWAAVFYDQQRARGKDHHAAVRALAYKWIRILFRCWKTRQPYDPQRYLAALAQHASPLASTVKNSP

SEQ ID NO: 452298 - protein, 362 aa, unidentified
MKKDSTGKQVKGSKRVVTVAVGIDIGDKDCQACGRDAAGRITFERKVRTTRAGLASALGKLKACRVVLEAGSQTRWIAEAIIKMGHGVKVVDPRRMRRIYESDSKSDVRDARELSEAALDRWERLPEVKLRSRESQRKLSVLRTRDALVRSRTALVNVVRSLLKQYGIKVSKCTTEAFPKKAAALVPEELSVAASPLLRQISELGLQIKGLDKWIESQAAGDANIRVLRQIQGVGPVTAAAFVWTLDDPERFKRSRSVGAYLGLRPKRDQSGEVDKQLPITKAGDRYVRALLVSCAHYILSKKGPDTALKRFGLRLAERGGKVAKKKAAVATARKLAVLLHHLWVAGEIYEAFPDTCKRRAA

SEQ ID NO: 452299 - protein, 371 aa, unidentified
MNSILYVGMDVHKENYTLCCYSFDRDKVEYRQTVPSDYRLILKYLEQVRRKYPEEVEFICGYEAGCLGYSLYHQLTDHGVKCIILAPTTMGITNTNRVKTDRKDAANIARCLAFHTYSAVYVPDGEDNAVKEYLRMRDDQKLALKKIKQQITAFVLRLGKQYTGGKSLWTENHLKWLRGLDLTLLEEETLQEYLITYDYLTDKLERLDARIEELARNERYGERVRRLGCFIGIKPHTALSLLVEVGDFRRFEKAPNFAGFLGLVPGEDSSGGGRNRLSITKAGNSHLRRLLVESSQSYSRGTIGFKSKELKKRQEGNPPEVVAYADRANERLRRRYYRMTLKNGAKRNVAIVAVARELACFIWGMMTDEIA

SEQ ID NO: 452300 - protein, 475 aa, unidentified
MSNKLFVGIDVSLKENQLQCLDADGNFISKSKRFANNLPGTMDMINYLKSIMDKGNFESLTIGMEATSSYWFPLFHTLASSNELKNYSVEILSLNPKLISNFRKAYTDMDKNDLKDSFVIADRLRFGRLPESQTTDAKYLALQRLTRYRFFLCQTKAQLKNYTCSLLFLTFSEWNRVKPFSDMFGTTAKNLLKKFHSAKKLAEVPIDELKNMLASSSKNHFRDIEQKSILVNQTAKHSFSIPDILAEQIHFIIKLNLQLLNLIEQHIDRLNKKISKLMKKFKNPLLSIPGIGPVLAAGIIAEIGDISRFPGQAQLAKYAGLTWRKIQSGNFTGDLTPLTRTGNAYLRYYFIQAAQSMIKHNSEYREYYKRKFKETSRHPHKRALTLTARKLVRLVYALLSKNQLYLSPEERKEHKLRQKEVIENQTPEIVEEKSKKIPVAAQKNSTKKVKTLGVAAKYTRTQPKLEHALVYAVNT

SEQ ID NO: 452301 - protein, 336 aa, unidentified
MSIEVLGIDIAKNVFQLHGVNRGGGVVFKRRVMRDQLLEVVAQIERCTIVIEACTGAFYWARKVEEVGHQVKIISPQYVKPFVRRQKNDGNDAEAICTAARQPHIPLVPKKSIEQQDIQALHRARQRMVNHRTAVVSQIRGLLLDRGFAIGKSITRARRIIPEILSDVENEITVLAREALNELYDLFRDLDRRIIIFDRKIDAVFRDSEVCQRIAKIKGVGPKTAIVAAVGDGSEFKNGRHLAAWVGLVPRQFSSGDRTVLMGISKRGNQHLRSLLVHGARAVVRTAPNKTDHNNQWVNQLRERRGFNRATVAVANKNARIIWAVLRTGEPCRATF

SEQ ID NO: 452302 - protein, 341 aa, unidentified
MSEVTMIGIDLAKRVFQLHGACANGTVVFRKKLTRIQLLAFMSQQSACVVAMEACATAHSWGREFEKLGHSVRLIAPNYVKPFVKRQKNDVADAEAIVEAASRPTMRFVELKSEAQQARAMLFRTRQMFVGQRTQTINALRGHLAEHGLVAPQGAIQVKRLADAVADETIGLPEDVRELAKVYLVQIENLSAQIAVLDRKMKSAAKEAEAARRAQTMPGVGPITALAIETFAPDLNCFRRGRDFAAWLGLVPKQTSTGGKPRLDKTSKMGQRDIRRLLISGAMAVLQAVERFGKPHNGWLISMLERKPRMLVAVALANKMARGLWAMVTKQEDYRNPAMMA

SEQ ID NO: 452303 - protein, 391 aa, unidentified
MVCVGIDVAKDKHDCCILDSDGMVRADCFTIPNNMDGFKQLLQTIRNCTKKSDKIKVGLEATGHYSYNILGFLLDNDLAVHVMNPLHTNLYRKSLSLRKTKTDRVDARTIATMLLSDVDLKSYTDIAYHNEELKSLTRYRFDKVQERAKLKQSVSRLATILFPELEGLVSSIHGTSIYALLSEYPGAKQISEVHLTKLTNLLTTASKGRYGKEKAIQIREEARASIGSVMPAKSLELKHTVKLIQELASEINEIEDSIQKIIDELNPPILSIPGMGVNSAAVILAEIGDFSNFSSPDKILAYAGCSPSTYQSGKLTNCYAHMEKRGSRYLRHALYNATKYVCYWNPVFAEYLAKKRAEGKHYNVALSHAMKKLVRLIYALQKSGKAYLAAA

SEQ ID NO: 452304 - protein, 352 aa, unidentified
MIVLGADTHKRSHTIAAVEMATGQVLGDKTVGVGARGFAALLIWARALDTQRVWALEDCRHVSGALERFLIGRGERVVRVSTRLMAGTRRSSRERGKSDRIDAVAVARAALAAGIDTLPTAALAGPELDLRLLVDHRERLVRTRVALNSTLQWNLHDLWPELTLPGGALFSNKWSAKIARRLARAEQTMRVRIARDELRRLRELTAAIKALKDEITELVTELAPQLVTEPGCGPLTAAKLVGEIAGADRFATDAQLARAAGIAPIPASSGRTDRHRLDRGGNRQINAAIHRIAVTRARCDADTRDYIARKNAEGKTNRDAIRCLKRHIARRVWNLLRTPAPLKGEPLTPSIS

SEQ ID NO: 452305 - protein, 345 aa, unidentified
MKIIGCDFHPSFQQIAICDLETGEFQERKLSHGDGQAERFYRELGEPALIGIEATGNSQWFLDLVQRLGHEIRVGDAAKIRASYVRKQSTDKRDAGHILKLLLEKRFPQLWTPSAAMRDQRQLLGHRDKLVEIRTKVKNSLQHLAMNRGMQKKSRLWTRQGMEQFQQLAMPGWAGTRREDLLQLLKELNGQIEPLDQAVKQAAEQHPQAQLLMTQPGVGPVTALAFVLTIGDVARFAGSKQLTSYLGLVPSEHSSGCKRHLGAITKQGNRFLRKLLVEAAQTTVRKDEGFRKQYQHRCHRRPKAVAKVAAARKLAVRLYWMLRSNVSYPEIARIESNPRVPLGDV

SEQ ID NO: 452306 - protein, 415 aa, unidentified
MDVVFRRCAGLDVHKKLVVAAAIVEQGVGEARREQRTFGTMTADLLELSDWLAGLGVTHVTMEATGEYWKPVFNILEHNFEVTLVNARHVAAVPGRKTDINDAQWLADLLRHGLVKPSFIPPVEQRELRDLTRSRTTFVRERATLANRVQKILEGTNIKLASVATDVMGVSGRAMLSALIEGHATPAQMAELSKGRMRNKRDELTKALVGKVKEHHRFMLTELLCQIDGLDETIARFNREIEAYCAPFHQAIPLLDTIPGVGRATAEVIVSEIGIDMSRFEDADHLSSWAGVAPGNHESAGKRYSGKTRKGNKPLRAALNQAAHAAARTKNTYLAAQYHHLVPHTGKKKAIMAVAHSILVIAYHVIRKQEPYRDLGRDYFERLRPEVTSRRLVKRLERLGYKVSLEKQPDTARAA

SEQ ID NO: 452307 - protein, 316 aa, unidentified
MTEAGGFVGIDVAKAELEVVVRPSGARWTVTNNAAGLAQLQERLQASAPSLIVLEATGGYEVAVVAVLATAALPVVVLNARQVRDFARATGRLAKTDAIDAGVLAHFAEVVRPPVRPLPDAMTQSLQAWLMRRRQLVEMLLAEEQRRSRAPRPIQRQIDQHVRWLRAQLGAVEKDLAQTLRESPVWREKDDLLRSVPGVGPVLTTTLLGDVPELGQLNRKQIAALIGVAPLNRDSGTYRGRRAVWGGRARVRATLYMATLTAARYNPVIRAFYERLVAAGKPKKVALTACMRKLLTILNALIARRTAWKPPAAVSA

SEQ ID NO: 452308 - protein, 383 aa, unidentified
MSSNTIDHEHAIIIAIELSRSTWLVAARLPGVEKPRFHKIGAGDTAALVSYLSSLQTRVLARTGAAPALYCCFEAGRDGFWLHRFLTTHGIANHVIEPTSILINRRARRAKTDRLDAEGMLRVLAAHLQGDRRACSMVRVPTPDEEDAKRIHREREHLVQERLRIENRIQALLFTQGIYKRPSLRSWDRDLAAVRTGDGRELAHHLRAELDRLRRRLVMTLELIREVEAERDEAANANPKDQACGKIARLCLIRGVGANFAAVLTREVFYRSFDNRRQLASYVGITPMPYQSGGMDRDRRISRAGNPRARTTMIQLAWLWLRYQPGSDLAKWFRDRVGTLTGRTRRIAIVAMARKLLIALWRYAEDGVVPAGADIRAEAATAA

SEQ ID NO: 452309 - protein, 440 aa, unidentified
MRVMYERCRGLDIHKSSIAACALITEKGKPQEETRRFGTMTGDLRELAGWLQQKGIRHVAMESTGVYWKPVWNILEPAGFELLLANAQEVKVVPGRKTDQKDSQWIADLHKHGLLRKSFVPPRAIRDLRDLTRTRAILTQEHSSVCNRIQKVLEDANIKLGSVASDVFGVSGRAILRALMKEEKDPEVLAKLSKGMLRNKIPQLRRALEGQVTAHHRSLLTGHWNRMEFLERQIADFETQIAQHMKPTPEEMAFRIQNAAEDAPLPLSPREEAIQLWMEIPGVGWTAACSMVAELGVNMDQFPSAAHVASWAGLCPGNNESAGKRLSGKTRKGNVWLRRTMCEVAWAASHTKDSYFAAQFRRIASRRGSKRALVALAHSILVTAYHMLKHKRHYMELGGDFFDVINRDKVRNRLVQRLTKLGFQVKLRPKDAVENTSATN

SEQ ID NO: 452310 - protein, 458 aa, unidentified
MGKFYLGCDVSKGYADFVIIDQAKRVVESNFQLDDTIAGHQLLEQILKAFFEKKPDAMLFAAVESTGGYENNWLHAFQRIGTRFAIQATRLNPVGVHHDKQAAMKRNSTDKISALAIAEYQINHAEAIRYNEADSYQSMRKLYSSYRMLLKVRTQLLNQLESWVYSGNTELVQYRKDNTPKWLLHLLSQYPTAPLLAQAQAEQVAKIPYLGADRAQKLVAEAQTSVASVTDLPAQIMIKTLADQILQLDEAIKATQQQAQSFVQLREIALISSIDSIGPISAIGLFIEMGGCVGVFKNAKKLSPYWGLHPVLKESGDGSYKPRMSKAGRKWPRAILFMAVLNGIRAKNFIYAIYLRELQKGKAKRSAIGICMNKLARIIYGVLKNDTVFDAEIDNHHRLRSAPKKLRSNVLDSRRFQKQDDQAPISRKQSQKRKGREQSQSEPVAISEIKSSPLHGYA

SEQ ID NO: 452311 - protein, 358 aa, unidentified
MKDHILKVALGVDVSKDNLAVCLCRLTVNLAKEFEDSFEVSNDISGFKKLIRWLDAQVAEREDLWVVMESTGVYHEGFVYYLYEAGFNVSVMQSGRVKRYGQSLDQRSKTDALDSRMLAMLGCERALPLWTPPDPTLRELKGLSRERSFLLKEKQIERNRLHSNQHSAYSNKRELRRFKQRLKLIAKQLEEVEKEMKVLINDTPDLKCRIKHLESIPGISFVSAATVVGETLGFTGFTNAKQLTSYAGFDVVLKESGAYKGKTRISKKGNKNIRRALYMPAMTAVRCNPTLKKFYERVKPTKAKPMIALVAVERKLLVLMYSLWKNEIDYDSEYGQKKTARTEVLAAQDRSNLALTSS

SEQ ID NO: 452312 - protein, 364 aa, unidentified
MIAYERSTLVNYEKYIGLDVHQATISVAVMDSTGKLIMESILETKASTILEFLGGLRGTLSVTFEEGTWAAWLYDLLKPHVAHVLACNPRKNAALNQGNRNDKIDARELANRLRLNDLKSVYHGENGIRMLRELARSYLTIVKDLTRVMNRLKALYRSWAIPCAGRDVYYTRHRSQWLAKIREAGPRRRAEQLYQQLDMLQHLRQQARRELLRESRKHSIIAKLRQIPALGPIRSALAVALIQTPHRFRSKRQLWKYCGLALETRISGEYVYVQDERRRSKKQLSIRGLNKDHNHDLKGLFKGAATRASVMPGPFQEFYQRSLAKGIKPTMVRLTLARKIAAITLTLWKKGESFDVQKLKSQAA

SEQ ID NO: 452313 - protein, 406 aa, unidentified
MNMNAVGIDVSKRKSTVAILRPGGKVVTKPFDVPYLSADFQSLIKLIRELDGETRIVMECTGHYYEPVARELSQAGFFVSAVNPQIIRSFHGQDNPLRKVKTDKADSVKIARYTLDSWANLKQYSLMDELRSQLKTMNRQFDFYMKHKTAMKNNLIGLTDQTYPGANAYFDSPAREDGSQKWVDFIDTYWHVDCVRKLSLTAFINHYQKWCSRKKYNFSKSKAEEIYGKAKELIPVLPKDSFTKHIIKQAVGQLNVSSQTVEQLRSLMNETASKLPEYPAVMAMKGVGPSLGPQLMAEIGDVTRFTHKGAITAFAGVDPGVNDSGDYSQKSVHASKHGSPALRKTLFQIMDVLIKTKPDDAVYLFMDKKRAQGKPYYVYMTAGANKFLRIYYGRVKEYLAALPTSN

SEQ ID NO: 452314 - protein, 318 aa, unidentified
MEEVVEFERIVQCGCGLDVHKETVVATIDGAGLKKETRVYGTTTSSLTKLKEWLMQAGITHVAMESTGVYWKPVFNVLEPSGITVWVVNARHIKYVPGYKTDKRDSKWICKLLLAGLLKPSYIPPREQRDLRDLTRYRRKMIEHIASQKNRVIRILEDCNIKLSSVLSDTQGVVGSKLIDRLCETGRVTAEDIEGFYHCRLKASKEEIYEACFGVITEHHVYLLKMIKADIERFEVDIKNVTDRIKTILSPYENVVELLDKIPGLNRKSIEDLIAEIGLDMSKFPTGKHLASWAGISPGNNESAGKKKVDALHTEISI

SEQ ID NO: 452315 - protein, 391 aa, unidentified
MECPMPQSNDLSRSLVALQQDNTVIAVVELSLSSWLVAGIVPGIERHPLKKLRADEQALLRLLHRWRDEATKVGRRINRIAVAFEAGRDGFWLARWLQAHGVEAYVIHASSIAVSREHRRAKTDRLDTDHLKRAFIGWLRGEPDHCHMAAIPTLEQEDAKRPTREREKLVGEQTRIKNRIKSCLVRFGISGFKSKLRNAAERLGELRTPEGVALPPNTLAELRRDLARLRFIRDQIKAIEVARLDRLKKAPKARPHAMVRLLTRVIGIGIETADMLVHEILSRNLRDRRAVARYAGLTGSPDESGKRRREKGLARAGNARVRRGMIQLAWRFLKFQKDSALAQWFSMRTVDARRGTRKSMIVAVARKLLIALWRLVTSGEIPTGVTLRAAA

SEQ ID NO: 452316 - protein, 370 aa, unidentified
MGKSALYVGLDVHKMSVDVAIAETGPAGEVRFYGRIGGDLEALDKVTRKLQAKGAELRFAYEAGPCGYQVYRHLTAQGHSCLVAAPALIPRRPGDRLKNDRRDALALARLLRAGELTPVKVPDADDEAMRDLTRAREDAICVERRARQRTVAFLLRHGRVYPGKTTWGRGHWAWLLQQVMDHPAQQIVLQEYLDAVREASARVLRLTGQIRDLVPQWHQAPFVAAYQALRGVSFIVAATVVAEVGDLDRFNNPKELMAYLGLVPSEHSSGASVRRGRITKTGNSHARRVLVEAAWAYRLRARVSRTLLKRQEGLPERVRQLAWKAQLRLCTRYRRLLARGKARQTIVIALARELAAFLWAIGRAVAPATA

SEQ ID NO: 452317 - protein, 345 aa, unidentified
MIIGCDFHPSWQQIAWLDTETGETGEQKLVHADGDAERFYRQLAAPALIGMEATGNSHWLVDLLSELGHELWVGDAGQIRASYVRQQKTDKRDAAHILKLLAEGRFPRIWMPSSEVRDLRQLLLHRHKLVVIRARVKNELQHLCLNKGVQRKRKLWTKAGQKMLCELQLKRWAGRRRDDLLGLMTMLDRQIEPLDEAVKAEAQRDKMALLLQTQPGVGPITALAYVLTMGDITRFPRGKQVASYLGLIPREHSSGGRQHLGAISKQGNRMLRMLLVEAAQTAVRLDPEFRKEYQHRCHLKPKAVAKVAAARKLAVRLYWMLRTHQAYPEVVRIESSPRVPLVGAS

SEQ ID NO: 452318 - protein, 344 aa, unidentified
MSNLDTCGIEVSDKELVVRLRRQEDLEPLQNFSNTPEGHRIILRYLRRAGRVVRVCMESTGLYGLDLALALSGQEGIEVMVANPRAVRHFAQALMRRSKNDQIDAGVLEQFALHMPFKPWPRPSVAMLSLHVLARRLRELVEMQTAEKNRQHAAGLSQAIPAVVRRDLARSLRAQERAIERLTRQARKLIAQDPQLAERFALLDSVPGIGETSAVQLLGELSVLAPDLEARQWVAFAGIDPREYASGTSVHKKPRISKAGNKYLRHALFMPALVAVQHDPHLRAFYQHLLAKGKFKMQALVAVMRKLLHALHAMFKTHQPYDGSKLFRLKSAPAQEVTRVLVAS

SEQ ID NO: 452319 - protein, 400 aa, unidentified
MIHVGVDIGKSRHAAAAVNEAGACVMPPRFFTQDAGGFASLFGVLEELGGAAAVAVGMEATGHYWKVLRHALAERQYRVDVINPLITSREASADVRGRKSDKLDALAIANVMRRGGHNAAPAEAESTDALKALARHRRALVGRGSDAKRRLVCALDVAFPEAARTLGDLYGAASLDVVRAFPSARLACAADIRTLTSLFAKASAGQLGREAAEAYREAARHSLARTMQPEGEEFVIVQLVDEIRAAAAQIDEVERRILAEPQPPIAGLLGSIKGAGKIQPMAVAAELGDLSRFAGAAMAKKILAYAGCEPRVRESGKWIGRAKMSKRGSPALRHALYLMAGTIRLHTPCFNAIYKRQVAMGKHHNVALSHVVRKIVDVMCGMYKTNTLFAPPQAEPTPCQ

SEQ ID NO: 452320 - protein, 316 aa, unidentified
MPYVGIDVAKNKHDVTALNVSGKTVLKPLTFSNNKAGFELLDLSLRQLNQDYLIALEDTGHYAFNLLNFLHEQGYKVYTYNPLLIKKFAKSLLLRKTKTDKKDAHGIALKLLSDPNREQFQHDNRQVELKILARHIHRLKKKQSDWKVQYTRCLDIIFPELDKIVGKHSEYTYQLLTCYPNPQKRLEAGFDKLIEIKRLTASKIQDILSVAPRSIGTTSPAREFEIIENIKHYKRLIDKAETCVNDLMAEFNSVITTVTGIGNRLGAVILAEIQNIHAFDNPAQLQAFAGLDSSIYQSGQIDLAGRMVKRGSPHLR

SEQ ID NO: 452321 - protein, 337 aa, unidentified
MTPEQLPGAPTPYDKPGDFIMTQFMRFVGIDVSKDHLDIHCLPDGLALRVANSGEGIGLLLQRIGALEGVAFGCEATGGYEDLLLIRLGQAAVPGYCLHPSDVRAHSRLTGKRAKTDRLDARAIAGALQVAVATRKPAIRAASLSAIKELTTLRRRLIAGVNELKSLRARMGDAGVLGTIDAMIDQHVKAVKALQAQIRSALAGHPEQAQRARRIASMPGAGPVLTAELIGSMPELGTLSARQAASLTGVAPHPRQSGNTGGRGRCQGGRAAIRRVLYMAALSVIRSQKQPLAAFYAKLRAAGKPFKLAIVAIMRKLIVTLNAMIKNDQDWQPKTQS

SEQ ID NO: 452322 - protein, 345 aa, unidentified
MQITTIGLDLAKRVFQVHAVDASGDVVVRKALRRSQVLPFFTKLPPCLIGMEACGTSHHWARELTRLGHEVRMMPPAYVKPYVKRGKNDAVDAEAICEAVTRPTMRFVAMKSAEQQAALSLHRSRNLLVKQRTQLINMIRGLLAEFGIDIPEGLLRALGVARQIAAKESTLDMPPMAMQILGMLSGQVLDTHARLQVIDRSIHALQRYDEVARRLSTIPGIGPVGATALAASVADPNQFRSGREFAAWLGLTPSQNSSGGKDRLGRITKMGDRYLRKLLVIGATSLIRRARHKPDTADPRLLALLGRKPARVASVAMANKMARVVWAIMARGEVYKARHAPIPAT

SEQ ID NO: 452323 - protein, 323 aa, unidentified
MNHKVGKDNTVARFIGIDVSKQWLDVACLPERETRRYGNDCAGLEQLCTWIVPLAPELIVMEATGGFETNAATALAAGGLALAVVNPKHVRDFARAFGILAKTDRIDALVLAAFAQKVHPPVRPLPDEERRELIDLVDRRRQLVTMRAEEKTRLTQATPAARQDIKEHIEWLNERLRRLDIDLTAKLRSSSLWKTKEQILTSAPGVGRVTVATLVARLPELGTLNRRAIAALTGVAPFARDSGQHRGRRMIWGGRADVRNVLYMATVTAARINPVIRSFYLRLKQAGKPPKVALTACMRKLLTILNTMVRNNQPWQIPPTQTI

SEQ ID NO: 452324 - protein, 356 aa, unidentified
MNEGSWVGLDVHARSVVAGVIDVGSGEVRSLRLPPGCDATVAWLTTLPAPVRVVYEAGPTGYRLARACAGAGISCVVAAPSRIRPAADRVKTDRRDAERLARLLRLGEITPVRVPGPEEEAARDLVRAREDARGDLMRARHRLSKLLLRHGLVYDATAWTRTHDAWLRRQRFQGGPLAIVFDECYGRMVDAKTRRDALDEAIAELAASEPYVDVVERLVCLRGVSTLTAFALTVELGDWNRFRPESLGPFLGLTPSENSSGERRRQGGITKTGNAHARRLLIEAAWHHRRPPRLSVTLERRRTGKPLAVRAQADRSARRLHGRWQALEARGKPRTIVVVAVARELAGHCWALATME

SEQ ID NO: 452325 - protein, 367 aa, unidentified
MDEYNAYVGLDIHKNTISVAIAEAGRNGECRSYGTIGHTSEQLRKLADKLRHRHGAVHFVYEAGPTGYVPCRTLVEAGHDCAVAGPAQIPKKPGDRVKTDRRDALQLARLDRAGELAAIWVPDEHHEAIRDLVRAREQAVHDLRRARQRVGSFLLRHGRFYNGTNWTKTHRRWLARLQFDQPAHKVVLDTLLQAVDQARERRDLLSREIANAVPAWTMVPVVEALKALRGVSLVAAAGIVAEIGDIARFTHPGQLMAYLGLVSSEHSSGEKRRPGALTKTGSPLARKLLTEAAWSYRHAPRVSEQQLAQQDDLPQGVRDHAWKAQTRLHARYRALLRAGKKPQVAIAAIARELVGFIWAIALQARPA

SEQ ID NO: 452326 - protein, 460 aa, unidentified
MRKRKIPRKQKVASIDNLPVINPNAAGLDIASDEIMACIPSGRDPHNIQAFGTFTVDLDALADWLTLCKIDTVAMESTGLYWIPIFELLESRGFKVILVNPLHVKQVAGRKSDVSDAQWIQTLHTFGLLEASFRPTADFAILRTYLRHRQSLIESRADQIRLIQAALLQMNLQLSLVLKDITGTTGLAILRDILSGERDPNTLALHRNNNCKYSQEDIAKALTGSWRDEHLFTLRQSVEAFDTFSKLIANADVQIERYLASLMPTAPAIPPTPDSHKSKHNTHSKNAPPKSSEPHLRRVAGVDLLEVDGYSTSTVQVILAEVGSDVSQFPSANHFSSWLGLAPHNEKSGGKILRNRVGKHPNRVAHALRLAAVSLLRSDTALGAYHRRMKARIGPAQAVVATAHKLAVITYYMLRDKTPYRPRDAAAYDQHFRERQVKSLERNAKRLGFSLVPQPQPATI

SEQ ID NO: 452327 - protein, 418 aa, unidentified
MEIVGIDWAWEEHTCYLLSEKRTLKIEDSVKGYEKLIKLAGNAVFVIEDPNTRIGNYLLGKGKAVYFLSPARSKKAVGYHSNSRKSDKQDARSLALTFKEHSEYCHKLKHDEYGLELKELFNLYGAIGDIIQQSVSRLTDQLHRCWPEYLAIMGGCTSKLNVQFIIALSDKLNSLSEVSVSQVRELMKEIGARPDRKFLKKVARLLDTDYLPISEYRAEHIAKLASDIVELGVRHKKLEKTMKEKLRQSPYKDILSIPGIGTINGMALVVAFTTYSFTSYRELQQYAGTVPVTSQSGSSRYVKLRRNCNHYLRSLLHMAAMSLKRKSFWAKVVYKKKRKQGCSHNLALRELANTLVKISFAVMKNLEPYNEEKFLSSHPKINPHQRLQTQTMQREILPDISQPEVIHSTYCQVLESPG

SEQ ID NO: 452328 - protein, 423 aa, unidentified
MDKNDDSRLREFRQLKHEIRGSTQHLVVGIDIAKERHHAFFGTPTGKTLLHRLVFDNSKEGFEKLCFHAEVLKTQKGLTELVFGVEPTADYHKPLGEYLIEQGHSVVLVAGTAVKKNRELLDGRWDKHDAKDAANVADLLSQGKCLFYELPSPDLRELRSLLSLKRKLKKSEQSYKIRIRNHLIAQYFPEVDSYFSYGEGPAIVRWCLDPKELSRLPFEEFVRMVSSRNGGEKQHRRLQEIHEKAGASIGCSAHPSVAFEAQALLDALQGLHTIIQETDKKIAEVCRRFPEYPFLLTIPGFGPDISAKVLGAIGNPHRFENHRQVLKTAGLDLSADRSGKRNDVTPVISKRGKADLRYGLYQAALVAPSKNPTFMRYFARKLEGRQREKGIVTKMRVKLAAKMLVIAWTLMKKKEVFNPGCIG

SEQ ID NO: 452329 - protein, 361 aa, unidentified
MPTQMNNLNFEGQNIYAGFDVHLKDWKVTILSEEMMLKSFTMPPKPEVFSDYLLRNYPGASYHSAYEAGFCGLWAHYQLCELGIQNIVVNPADIPGTQKDKLQKEDKRDSRKIAYALRSGNLTPIYTPSESTLNDRSLVRSRKTLVGDMIRFKNRIKGLLHFYGIEMPEEFSNSRKHWNRRFMVWLESIPMKELSGEMALKHQINEALYMKELLKCILLDIKHLSQTDKYCENVRLLRSIPGIALLTAMVILTEVEDINRFSNSERFASFIGLIPMTKSSGEKQKVGEITFRAHDFLRSIIIESSWVAIRYDPALLMAYQKLIKRMEHNNALIRIAKKLSNRIYTVLKYNKIYEFGKTDNL

SEQ ID NO: 452330 - protein, 344 aa, unidentified
MESEASAYQFYVGIDIAADTFTAAWRIPAGKPTLPFTAEQTSAGFAALQRRLTASGAAPAEALVVMEATGNDWVALAGTLHEAGYRVAVVNPRQAHHCATAQLRRAKTDALDARALAQLAAALLPTLWTPPPAVYHAVRQRLVARDGLLAMRTQARNQRHALVPWPVVVAAVRQHLDALSADLDRRIAALEAAIAAVRKNGAWAEPRACLTSAPGIGLVTAAWLLVGTLNFALCASPGALTAYAGLAPVPRESGRTIRGRAAIGHDGNGRLRTALSMATRSAARDNPAIKACDDRLRAAGKPLKVARCAAARKLLHQAWALGSKLQRFDPDHQQQHEALPELAA

SEQ ID NO: 452331 - protein, 432 aa, unidentified
MDSTAANPSRPPGVAGELFASFTHFGGFDWAMEEHQFAVVDRSGTMLLNLRFKNDAQGWSELRAKIGAYPHLAVAIETSCGPAVERLLEMGLIIYPINPKAAERFRDRKSPGGSKSDPLDAWCFADALRTDGHGWRQLRPLDPLTAELRILCRDEIALIEQRTAMILQLRQALHEYYPTALDAFDDWTHAHTWDFVLAFATPDALVKAGKRKWEKFLHTHKLYRPETSQKRLELFAKANEFVSPSVAVTKAKSLLAITLAKQLRTLQAQLDEYRDRINELFNSHPDRDYFGSLPGAGEKIAPRLLSELGNDRARFGSHEQLQMYAGTAPVTRQSGKRSFAKLRQACNKTLRTTIHLWADLSRPRCAWAQAYYQQKKDQGMAHAAALRCLGQRWLKILWKMWQTRKPYDEALHTRNQVSHGSWVIGLMAPATT

SEQ ID NO: 452332 - protein, 344 aa, unidentified
MNSTTIAVDVAKAVFEVAVSERPGQVRERHRFSRERFRRYLGEQPPAAILMEACGSAHYWGRQAEAYGHRVVLLPPHVVRPYVLRNKTDRTDAKGLLEAARNDEARPVPVKSETQQAVTALHRLRSTWLATRTARLNTIRGLLREFGILIPVGARHVGPALGAILENADAGLPHLVRSTLAEAGREIREIEARLRSVEQHLEAVAEQLPVVDRLRTIPGIGLLTATGLVATIGDVQRFPSARHFASYLGLTPRERSTGHRRRLGAISKRGDVYLRMLLIHGARAVLCHAKTKTAPAPDRLRRWALALERSRGHNKAAVALANKLARIAWAVWKTGHGYSSAPTE

SEQ ID NO: 452333 - protein, 427 aa, unidentified
MSTLFVGIDVSSKFNVVYAMDFEEKQYISSSFGNNQPGADQLAGLIAECMQNHKNLDTVIVCLESTSVYSVHIANFLSTCETLMPYKPYVFVVNPKTTANYRKSYIGMEKTDPADAFLIADFARVGRTKKLEPWRGSQFIALKRLTRHRMHLSECITREKTYMVSNLYLKFSELQLLDGDNRPFGNLYGATSSAVLTEFLSPQEIIDLSEEELLAFLAEKSRSRISDISRTSELLRKAARDSYRLDKCMYEPLNVSLASSFNCIQAYQKEIKLIEQAIEKCINGMNPNAFLILKSIPGIGAVWASGMLSEIGDISAFHSSDALAKYAGLYWLKNDSGDFTSEDNQISKAGNPYLRYYLGEAANSVRRYVPEYADYYARKYAEVSKHQHKRALALTSRKLVRLVFGLLVKNQLYTGEKLDNELNINQN

SEQ ID NO: 452334 - protein, 343 aa, unidentified
MLSNNIIAIDLAKNVLQVCHISVHGEMLSNKPLSRQKTKEFLAKAKSSIVAMEGCCGCHYWGQLAEQFGHEVRIINPKKVKGYLEGHKTDHNDALAIANAAIQIGIKYSRPKSLEQQSMHSLETSRRFLSRSVVSLALHIRGTILGYGIANSRGEKGLKASVQTVLDGETSIPTNVVSVLSMLWEQYKELKAKLIAFEKEKNALTRQIEPCQRLMEIEGVGETTAAMLYTTLGDGKQFKNGRQASAFVGLTPKQHSSGGKVFMIGIDKCGGVKELRSILYLGAMSYVGRLPEKPKTQKDAWLRSIIDRIGFKKACIALANKVVRTAWAMLRYETEYKPVLLTD

SEQ ID NO: 452335 - protein, 311 aa, unidentified
MKKHVGIDVSKRFFDLHILEDRQDRHFAFTPAQVQECVQWLTRQEIALIVLEATGGYEGELARTLQQASLPVAVVNPRRIRDFAKAAGRIAKTDRLDARIIAQYGASLQPPESRRLDENSCLLKALARRRQQLVEMRTAESNHREHAGDPMIQRSIAAILRTLEKEIAKVEKQIRDQIAQQPELRQKAQILSSAPGIGETTAAMLVVEVPELGQANKKEIAALVGVAPLNRDSGMFRGKRMTGGGRREVRSRLFMPTLVAIRHNAVIRRFYEHLLKEGKAKMTAVVAAMRKLLVILNTMMKNNQTWSPKID

SEQ ID NO: 452336 - protein, 326 aa, unidentified
MMETKKLCCGIDVSFTTLDVCYQNNKGELFHLHVGNNNEGFKKILEHTGTHYHFVMEATGVYYIRLAFFLHAHDCTLSVVNALSIKRFIQMHGERNKSDKKDAAWICRFAIEQKPPFWQMPDSAYFQGKQLYNTIREYQEQIKRFNNQLHSLGLLPIQSKDTIRSIEKIKATLQKEVKNLEQKLQELLEQWQPEQLKNISSVKGIGKRAAAMLIIFTQGFKHTHSHRQLISFAGLSPTEYSSGTSIQGKPKICKRGGKPLRDVLYMCAMNAMKTNPACKALYERLRAKGKTGKQGLIAVCNKLLKQVFAVMKAETLYQPNYASVRP

SEQ ID NO: 452337 - protein, 390 aa, unidentified
MSQSFDASKSLTAFEQDSTLVAVIEMSQSKWLVAAVVPGIARQPLKKLDADAGALLKLLQRWREEARKAGREVKRIVCAYEAGRDGFWLVRWLQARTIEAYVIHAASIAVSREHRRAKTDRIDTELLMRSFLGWLRGEKRHCSMVAIPTMVEEDARRPSRERESLVAEQTRTVNRVKAALALFGIGGFNPRLRKAAQKLETLRTVEGTPLPENVHAELRRDLERLRLVHDQIRTIESERLRRLAQAPAAATGPHAMVRLIAKVLGVGIETADMLVNEVLARNLRDRRAVARYAGLTGAPDESGKRRREKGLARAGNGRVRRGMIQLAWRSLIFQKESRLVRWFRARTADGRSTTRKTMIVALARKLLIALWRLVTTGEMTEGLKLRPAGT

SEQ ID NO: 452338 - protein, 344 aa, unidentified
MDISVLGVDLGKNVCGVVGLDASGAVVMRRRMRRETLITLAEKLPACIVGMEACCGAHHLGRLFVAHGHDVRLMSPEYVRPYVKAQKNDDRDAEGIAEAATRPTMRFVELKSQDQLDMQTLHRSRDRLVGERTALINQLRAILLERGWVAPQGKRKLEQFLSVLMDEQGGAGLSPRMVLLVEDTRAQWAELDRRIAAFDAELVRWAKENEDARRLTTIPGFGAIVASALVAAVGRAESFERGRDLSAWLGIVPQQFTTGGKPKLLGISKRGNKYLRKQLIHGARAALPYVAERDTPLGRWAKALLQRVHRNVAVVAFANKLARIAWAVLRRGERFAAARVSVVG

SEQ ID NO: 452339 - protein, 391 aa, unidentified
MIFVGIDVAKDKHDCFICNSDGEVLFNAFTIQNTIEGFNFLYQRIESVSKDFNKVKVGLEATGHYSYNLLGFLLDNGLATYVLNPLRTNLYRKSLSLRKTKTDRVDARTIASMLLSDAGLKPYTDTAYHNEELKSLTRYRFDKVKERSKLKSSIARLICILFPELEKLVPSLHMASVYALLEEFPGAKQIAAAHLTRLKTLLETASKGRYKRNMALEIRDAARNSIGAWMPAKSLELQHTIRLIRELDAEIAEIEEQIQSLMEELDSPITTIPGMGFRMAAMILAEVGDFSRFDSPDKLLAYAGMSPSTYQSGQLKNCYPHMEKRGSRYLRYALYNATKYVCHWDSAFADYLAKKRAEGKHYNIAISHAAKKLIRLIFAMEKSRQPYCSAA

SEQ ID NO: 452340 - protein, 413 aa, unidentified
MLRRIRDRVAGLDVHRDSVTVCALIREEGEAEVIADKARFGTTASGVAALAAWLAAREVTTVAMEATGVYWKPVLYRIEGLFEEVWLVNAQHVKNVPGRKTDMADAEWLADVVAHGMVRPSFVPPLEIRELRELTRYRKTLVDERSREIQRLDKVLQDTGIKLTSVASRLMTKSGRKMIEALIAGETDPVVLANLAEGRMRPKIPELVEAMDGMFRSHHGVVCTQILAHIDYLDTSIAALSEEVVARMGPFEPAIALLETIPGVSRITAEVIVAETGADMSRFPTAGHLCAWAGVAPASNESAGKHRPAGTRKGQRWLRRHLIEAARAASRTKDTYLSAHYQQIRRRRGDNKAIVAVANTILAVAWHLLTTGETYHDLGADYFQTSDRDGQTRRLTRRLEQLGYTVTLEETAA

SEQ ID NO: 452341 - protein, 487 aa, unidentified
MVPMSVDESLAVRDLIEAYDVRDIGLGFLTPKLITMAKLAKKKQTAKGLRFEVVNPNAAGIDISPKEMQVCVPADRDGDCNRTFDVYTEDLHYIAEWLKACRIDTVAMESTGIYWLPIFRILKDAGFDVILVNASDVKNYSGRKTDASDAEWLMMLHSYGLLKPCFQPENIARTMRNLIRHRDNLIRSASREVLHLQKAMEQMNLKLDNVFSDILGKSGQAIIKAIISGERDPKKLSALADPRCKTSKEEIEKSLQATWDEEHLFEMKQSDSLYQTYQQLIAECDDKISEIATKYAAMVDAPKAKLLRSEKYNTKKNQVGFDVEKAAFELWGVNVMRMPGMSRASLLRLLGELGQDFTAKFADVSHFVSWANLVPNNKISGGALLSSKVPKKKNPVGIIFRQAANTLKAAKCPLGDYFRHIKAKGGHLQAMVATGKKLASIFYLMVQRKVEYDENIYSNHRKTELQNKVLYLQKCLTRIQLELANCG

SEQ ID NO: 452342 - protein, 369 aa, unidentified
MAKSITYVGLDVHKDTIAVALAEAGLRGEVREYGKIPNTPAALQALTVKLVPGRRELRFCYEAGPCGYGIHRQLTEAGHECVVVAPSLIPRKPGERIKTDRRDAINLAKLHRAGELTAVWVPDQAHEAIRDVVRARQAAVRTLRQARQQLSGFLLRHGHHYHRPAWTQLHRRWLASLKFEQAVHYIVLEDCIAAIEAATARRDRLEGHIEAALPAWSLAPVVHALQALRGVGLVAAATLVAELGDITRFTNPRQLMAYLGLVPSEHSSGRTRRQGGITKAGNGAARRMLIEAAWSYRFPARISREQLLRQERLTRPIRDIAWKAQERLCRRYRTLARAGKLPTVITAAIARELAGFIWAIARQAQPATS

SEQ ID NO: 452343 - protein, 342 aa, unidentified
MTFVGCDLHTRMQQVAVLDTGSGEVSERQLAHDGSAIEEFYAALPRPVTIGLESTGYAVWFHTLMQRLGHTLLVGDAAKIRAMVVRKTKTDRRDALHLLDLLRHDRFPTIWVPDPATRDLRALLAHRMRLVRIRTMVKNGLHAIALNYRLARGSKLLRQAGLAQLHALALPPHTAQRRDQSLELLAGLTTQIRELDDAITTAALAHPDGPRLITHPGVGALTALATIVVLGPVARFHDSKHVVSYVGLAPALNASADKYHLGPITKQGSPLLRFTLGQAAAHAARMDADLKRTYFTLVHRRGRPKAKVAVARKLLVRLFIMLRDQIDYDEFRRRGRPQEVAA

SEQ ID NO: 452344 - protein, 340 aa, unidentified
MEKRYFGIDLHRNRFSCCVRLDNGRSYFSEWALEQLPRFVKKLRPTDEVAVEVTGNTRLFYDAVAPHVARVVVVDTNQFRVISRSVKKTDERDAALLALYLSKGLLPEVRMKDKQHGQLASLTQTRDTLVKLRTALKNKVNNILSARGINLAKEALSSEKKLAEVLTLPFDEIVCIELRVIVDQIRSLNQSIAELEKTIAEEGSKLEGHKGLTSIKGIGKITGAILLSVIGDVNDFPDESRLASYFGIVPRVSNSNQTEHSGRIHKRGTKLGRTALVQSALIAANYSPYLKNFYERVKARRGAGKAIIALARKFLGIIYRTLKNKWVFEDFPNFVLAEGA

SEQ ID NO: 452345 - protein, 341 aa, unidentified
MQAITTIGLDIAKSVFQVHGVDADGGVVIRRQLKRRYVLAFFHKLAPCLIGIEACASSHHWSRQLRALGHTVRLMPPSYVKPYVKRQKNDATDAEAICEAVGRANMRFVPTKTPEQQSGLVLHRTRHLFIRQQTSVINAIRAHCAEFGIVAPVGRRGVEELLNVIANENRVPEIARACLSALGDQLRRIKEQILEFDRMIRVWHRSCETCRRLDEIPGVGPALATALVASIAEPRTFRSGRDFSAWIGLVPKQSSSGGKPRLGSISKQGDRYLRGLFTAGALAVIRYAKIRGIGHRPWLTALLARRPTKVAAIALANKIARIAWAMMARGECYREPVTLAA

SEQ ID NO: 452346 - protein, 343 aa, unidentified
MHAVDRTDRVALNKAMAPQAFYTWCAQLPAGCLVAMEACGGAHHVARRLRSLGLDARLIAGHLVTPYRMAGKRGKNDANDAAAICEAASRRQMRFVPIKTVEQQGQLTVHRLREGFKEERTAMINRIRGILTEFGLVFPQSPEALRKALPEVIEDAGNELPGVARLAVQRAHLHWIDLDLQIAWCDERIGHHVRSDARANKAATLLGIGPVTASAIVASVGDFAQFSNGRQFGAWLGLVPSQNSTGGKVSLGRITKRGDDYLRTLLIQGAKSAVMSAGKRDDRISHWLRQLRERVGWQKAVVALANKNARILWAVLTRDTVFNPDHVPAIPAARSAAMTPAPA

SEQ ID NO: 452347 - protein, 359 aa, unidentified
MLKVTKPTGESSMRFYNNSHPYYCGIDLHARLLYVCIIDSKGEVVVHKKIGASKDDLLLILEPYIGNVIVGVECMHCWYWVSDWCAELGIDFVLGHALYMKAIHGGKTKNDKVDSFKIASLLRGGNFPIAYDYPSEMRAARDLLRRRMKIVRHGAMLKGHVVNTNSQYNLPATELNLKNISARQKLREQYQDPIVQRNIDLDMALLDCYAKELAQVEWFIEKQAKNHNPVYLELLKTVPGIGKILSLTILYEIGDISRFESVQKFASYSRLVKCKAESAGKTYGTNGNKIGNAHLKWAFSEAAVLYLRGNDKARNYLNRLQKRMSKAKALSALAHKLGRCVYFMLKNKTVFDELRFLKG

SEQ ID NO: 452348 - protein, 403 aa, unidentified
MSPEHSIDIFLGLDVGKSEHHACALDRDGNKVFDKPLPQLESELAGVFHQLQKLGTVLVIVDQPNTIGALPIAVARDCGCEVGYLPGLAMRKAADLYPGRAKTDKRDAFIIADTARTMPHTLRAVDRNDEVLSALKMLSGFDDDIARDCTRTVNRLRSVLTQIYPSLERVFAGSTLTRTPILELLIHYKGPQGLKRAGYQRVLNWMIKHTRKDPTPLVDDIFTALKAQTVTVPGSDAAELVIPQLAANIQALKEQRNTIAEQVEEMLADFPLCEVLMSMPGVGIKTAAQILLAIGDGSDFASAGHLAAYAGIAPVTRRSGSSIRGEFPARSGNKRLKNALFYSAFAVIRSHEPSRRYYERKRAEGKRHNAAVICLARRRCNVIYAMLKNKEFFREIPPRPVAA

SEQ ID NO: 452349 - protein, 383 aa, unidentified
MVGNSSRADAVENGCSLAEGTTVVTILADPTDRRGRATPSAWVIGVDTHTDTHDAVLVDPLGVVVAQTRIDTTPAGHARLQGWAEALLPAGQRLFWAVEGSRSHGHGLTRHLQAAGHRVVEAAKPAAAARRRGGKSDPLDATHAARTALASDRHAHPRADGPREALRILLVTHRHDTDTRTATVNMFKSLLLGAGDLRETLRGLSTARQIRAVHDLPDDPTADLETRTRVQALRRAATAIRGLDRAITTTEQQLRTLAGQACPGLLDLPGVGPITAATLLTVWSHHGRVHSEAAFAAISGTSPLPASSGRITRHRLNRGGDRALNRALHVVVTTRRRISHPPTSAYITRRTTEGLTNNEILRCLKRYAARQLYRFLEANALTT

SEQ ID NO: 452350 - protein, 343 aa, unidentified
MDYFAGLDVSVKETSVCIVDDAGKIVREARVASEPEALLQVLANNTYRFKRVGLEAGPLSQWLYSVLTEVGLPVICVETRHMRAVLKAQINKTDRNDARGIAQMMRVGLYRPVHVKTLRSQKLRVLLTHRKLLQSKAIAIENDLRATLRNFGLKVGMIGTVKFEARIKELVENVPDLAVLVQPLLIVRQVIREQLGILHRRLLAIVRGDDVCRRLMTIPGVGPVVALTFCVTVDIPARFRNSKAVGAVFGLTPAKYQSGENNRTGAISRCGDEMMRMMLYEAAQSMLVRSAKWSWLKAWAMKIARHRGIKKAIVALARRLAVIMHRMWVDGTEFRWTREVAVA

SEQ ID NO: 452351 - protein, 413 aa, unidentified
MQVVNPTCSGIDVHKKNVKVCLVTRDGNGQRHEEVRTFATMTRQLLALRDWLQDHDCKVIAMESTGVYWKPLFNLFEGDFEVLLVNPAHIKQVPGRKTDVKDCQWIAELLEHGLLKGSFIPPIEIRDLRDLTRYRRRLVQTRAAEVNRVQKILEQANIKLASVATDIMGVSSRAMLAALLQGEEQDVERIAELAKGRLREKKPQLALALEGRFRPHHTKLLRRILSHIDFLAESITECEKEIDELCRPFAAVVERLDGITGVNLRSAQDLLAEIGLNMAQFPSHKHLCSWGGVSPGNNESAGRRKRARTKKGNKWLSAILVQCAQAAGHSKNTYLGAQFHRFAGRKGKNKAAVIVAHSILEAAYFVIRNQVSYHELGPSHFDQLKKDHIINAYIKRLENLGLKVQVTQLPVAA

SEQ ID NO: 452352 - protein, 406 aa, unidentified
MNMNAVGIDVSKRKSTVAILRPGGEIVKKPFDVPHLSSDFRSLTRLIQDLDGETRIVMECTGHYYEPIARRLSQAGFFVSAVNPHIIRNFQGHDNPLRKVKTDKADSVKIARYTLDSWGNLKQYTLMDELRSQLKTMNRQFSFYTKHKTAMKNNLIGLIDQTYPGANTYFNSPVREDGCQKWVDFVDTYWHVDCVRKMSLTAFINHYQKWCHRRRYIFSKSKAEEIYGKAKELVPVLPKDNFTKRIIKQAIAQLNTTSKTVEELRNLMNETASKLPEYPVVMAMEGVGPSLGPQLMAEIGDVMRFTHKGAITAFAGVDPGVNASGEYSQKSVHASKHGSPVLRKTLFQIMEVLIKNKPDDAVYIFMDKKRAQGKPYYVYMTAGANKFLRIYYGRVKEYLLNLSELN

SEQ ID NO: 452353 - protein, 408 aa, unidentified
MQVTFGIDVSKSNSTVCELIGESKNELTITNDRPGFIQLLHELAAFSKHPQIIFEATGVYSRRLQAFLEDYGYEYVVINPLKAKKEMNMGLRYNKTDKTDAYHLALIQRLYHHPVNQSESQTYKQLNALSRFYDQLTSDLVIAKNRLHQALQSTFPEIENLFSSAKGKNYWQIVVRYPHCDLVRREDKKQLINWLMSLKGIAFKHALRTADKLIELAYQAYPVVSCSSIEVEQVQYYAHRLLNLSDQRENLIARMVKLAKSLPNHDLENLESIPGFAQTTAVRVLAELGDLRRFSNPNKINAFIGIDPGRYQSGEMDSNLSITKHGNAVARKLLYRAIGQIDNAAKTNPCHIADYYESKKLSSQTKGFKKIAIASIHKLIRTIYALIINDQPYDYNVATHNQKDFSRN

SEQ ID NO: 452354 - protein, 344 aa, unidentified
MSKFNLISIDLAKNVFQVGKFFHQKLQSNKAVSRKELLTILTTSPRCKVVMESCGGAHYWACKARSAGHEVVILDPRFVKAFRVGQKTDANDVIAIAAASFSPNVRPCKSLTQVQQSLQSIERMRALAEKQKRQLANQIRGLLLEFGIVIKQSECAFRQAIPEILEDSDNGLTAGLRQCLAQCYELFKAQSTLKETLNELLTGLVKQDEQCERLLALEGVGPITAVGLLISLSDTTHFTSGRNAAANVGVTPRQHSSGGKVRIGHIAKYRGEITLRSHLFLGARAVISQLKHREPKTKKEQWLKALVERRGVKCAAIALANKTVRTAYAMLKKGTSYEPSLLAN

SEQ ID NO: 452355 - protein, 471 aa, unidentified
MSKEAPVKRQPRRRAPKPRQSPAALERLHPHAAGIDCGSAEHFVAVPPDRDPTPVQSFPTFTGDLHRLADWLQACRVTHVAMEATGVYWIPIFEILDARGFEVILVNARHVKNLPGRKSDVSDCEWLRDLHVLGLLRGSFRPADGIVALRGYLRHRTTLIESAGALVQRMQKALVQMNVQLPLVVSDITGVTGLRILRDIVAGQRDPQHLAQHRDVRCHASEAEIVAALRGNYRPEHVFVLQQNLELFDTYQQQLAACDGALEAHLAQLAVTPAPPGSPLPAPRRRRKPKEHEPGFDLRTPLHQLTGVDLSQIDGIGPYNALRLLSEIGTDMARWPTAKHFTSWLTLAPQNRVSGGRLLSSRTQPSANRAAAIFRMAAMTLGRTQTALGAFYRRVAFRIGKPKAITATARKLAVLVYRMLKDHLVYIDPGAEAYEAQDRTRVVRRLRQRAEHLGFGLVNLSTGEVIEGAVS

SEQ ID NO: 452356 - protein, 320 aa, unidentified
MRNAVGLDISKLTFDASAMVGNAEYSAKFDNDSKGLDQFSDRLKSLGCQNLHICMEATGSYYEEVADYFAQYYSVYVVNPLKISKYAESRFKRTKTDKQDAKLIAQYCRSAKESELVKRQKPTDEQYRLLRMTAAYAQIKSECAAMKNRHHAAKDEEAAKAYAQIIKAMNEQLEVLKEKIKEQTEKPNCKEGVKRLETIPAIGRMTAAVLFHHLTSSKFETSNKFAAFAGLSPQQKESGTSVRGKGKLTKFGNRKLRAVLFMPAMVAYRIRAFPDFIKRLEEKKKPKKVIIAALMRKLAVIAYHVHKKGGDYDPSRYKSA

SEQ ID NO: 452357 - protein, 371 aa, unidentified
MKSIIYIGMDVHKKTYSLCALLKETGEIIGETKIPADVSLIIKFIENAKKSVDSDDVQIKTGYEAGCLGYSLYWQLAEKGIECDILAPSTMHRSAKNKVVKNDRRDAKNIAANLANGTYKSVYVPTDEDVEIKEYIRMMHDFKIELKKVKQHINAFLLRFGHHYPGKSKWVPAHIKWLKELELSDMHREILDEYLSQLEILSEKIERFKHRLEELSQKETYNEKIGQLRCIKGIDTIAAMTMHAETSDFDRFPTANAFASYCGLTPGEDSSGESYHRLSITKQGNSMIRTTLIEAAQVLVRGTIGKKGKKVKSKQKDQDVKVIDYADKAVIRLQKKYHRMIFRGVKRNIAITAVARELACFVWGIETGHIS

SEQ ID NO: 452358 - protein, 450 aa, unidentified
MVKSSNQPTQNPLAILNAHAAGLDVGSMLMMVSYTDPSGQQKLLESTGFSEDLIKLAKTLKSEGITDVAMEGTGVYWMAVYEVLEQAGLKVTLTNPRHFKNVAAQKTDVKDCQWIHQLHAHGLLRSSHIAPELYRELKTYVHERNVLQEMKSDTLNRIHKVLTQMNIKVQHVISDIEGVSGMKLLRGIASGITDPEKLLSLVNTFKLKATVDELLQSLNGLHKKQYTVVLQNQLEVFDFLKSKMKSYELLIEDVLKKMMPSDENGSLPEIKKKKSYVRKNEYSINLKAYLERILGVDVTAVDGLKEISVLEIISVTGVDMNKWRTQEHFTSWLNLSPRQKKSGGKLLGHEKRFTNNNATQAFRLAAQTMWQNKGPLGQLYKRLAVRKGSKKAIKAVARKLAVIFYKMVKEKCSYDKTKLEKNPEQQRARKIAMLMREASKYGYDLQPVML

SEQ ID NO: 452359 - protein, 387 aa, unidentified
MARVIIGVDPHKRSATIEVINEREQTIGQGRFGTDTDGYKAMLATGRRHKDREWAVEGCNGIGRHVAQRLVADGETVVDVPAKLSARARVFAIGQGRKTDPVDARSVAVVALRTPDLRRVQTDDTTVALRLLVDRRDQLGRARTDVVNRLHTLLLELIPGGAKKALSAQQARALLASVRPRDVVGKTRRWLASELIHELAVLDKKIKIAKQELTELVASTGSRLLELPGIGPSGAARLLGDAGDIRRFASRAHFASWNGTAPLDASSGDNNRHRLSRAGNRRINRALHIMAIVQLRHDTEGRRYYRRRLAEGKPPMEALRALKRRLSDVVYRQMLADAKQLETGPGGHTGATLTSSAADPIPMIGTSDKSLPGPAEPQPKTPHMIST

SEQ ID NO: 452360 - protein, 401 aa, unidentified
MWCLQAAGSEKRESGELEHTPEAVEAWVGQLCQRFGNRPIAVAVEQSRGALVFMLAKYEPLHLFPVPSTMAANMREALYPSGAKDDPRDADLLLDLLLQHRDKLRGLSPDTEATRRVQNLVEERRKLVDEKTAQINRLTSHLKIYFPQILDWFEHLDTELVCALLEHWPTLEELQKVPPPKLRTFFRKQQCRDQELIERRILAIRQAIPAIRDRAVIEAKSTVVKVIVQLIRSLVKGIADLDEKIEEAAAAHPDFFIFESLPGAGAVIAPRLLAAFGSQRERYGNAGEVQSYSGIAPVTERSGKKKWVHFRWACPKFLRQSFHEWAGHSIAYSVWARSYYQQQRSKGQDHHAAVRALAFKWIRIVFRCWKDGVAYDESKYLASLARRGSPLAALAATAKTL

SEQ ID NO: 452361 - protein, 395 aa, unidentified
MFIVGIDVAKRSHEVCMITSDGRTVQRPFSIRNNCTGYNLMLEKIRKHTNIKSQIVFAMESTAHYWLALFTRLRKDGYHVILLNPIQTSAMRDMFISKIKTDAKDSFIIAELIRFGRYAESNVAQDRLLALKELCRNRFYLVDMAGDLKRKLIALIDRVFPEYEAQFDTIFCKSSVAVLKKYPTPQKLSNAHLDKLTELLWNSSNGHFGEWKARELKELARNSFGVEDCDGAYSTLILLMLDQIQSLSGKADALEKEISRLFQSFDTTVTTIPGVGPIIGAVILSEVGDISRFSSADKLAAYIGVDPSVNQSGEFQAAHAHMSKRGSPYLRRCIWMASQVAVQRDPMFRAYYEKKAAEGLKYMTIIGHVTRKMTAVVFAILRDHKVYEPVLPTAA

SEQ ID NO: 452362 - protein, 348 aa, unidentified
MKVTRIGLDLAKQVFQVHGVDEKGRKVLSRQLKRGQVEGFFRGLEGCLVGMEACAGAHHWARVLGGLGHEVRLMAPQHVKPYVKGSKNDANDAEGICEAVGRPNMRFVAMKTVEQQRLQSLHRVRRTLVRNRTAAVNEIRGLLGEYGIVVRVGVAKLRGRLPELLEEADNGLPMSFRPVLAGLKEDLEYLDRRIGEMDAAMVRAAQEDERARALMKLRGVGPVTATALVAGLGDGKQFRRGRQASAWVGIVPGQHSSGGKERLLGISKRGDEYLRTLLIHGARSVVNSCKGKTDRLSRWVQEVCARRNKNVAAVALANKTMRMAWALLSRGEQYDPDYELNRRAAQAA

SEQ ID NO: 452363 - protein, 337 aa, unidentified
MKFSGIDLHSNNSVVVVSDEEDRIVYQKRLPNNLEQIVAALAPYREELVGVVVESTYNWYFLVDGLMDAGYRVHLANTTAVKKYEGLKYSGDFADAAYLAQLLRLGLLPEGYIYPREERAGRDLGRKRMQLVRCQTAQILAIENILARQTGGRMSGNQVKRLTAKGIAELGFVPDVALAVEANRAVSETLQRQIEALEKRLKQRVKLRPEYRLLKTVPGIGETLATTIMLETGTIERFASVGNFSSYCRCVDSRRESNGKKKGEGNAKNGNKYLAWAFVEAANFALRYCPEAKRFYERKKRRSNRIVALKATAHKLARACYHMLREQKPFDVQRCFV

SEQ ID NO: 452364 - protein, 347 aa, unidentified
MDVHQATISVAVRDSAGKLVMESIIETKAATILEFVQGLRGSLWVTFEEGTSAAWLYDLLLPHVTKVVVCDPRKNVLLKSGNKNDRVDARKLAELLRCGLLSPVYHGESGVRTLKELARSYLAIAKDLTRVMNRLKGLYRSWAIPCAGQKVYSPHHRAAWLEKLTQAGVRRRAERLYQQLDHLQPLRQEARRELLAESRKHPASGLLRQIPWLGPVRVALLIALLQTPHRFRTKRQLWAYSGLALETRISGEYRFSGGQLERSKRQPTLRGLNANHNHDLKNLFKSTATVASASAGPFQDFYIALLAKGMKPTMARLTLARKIAAITLMIWKKGERFDPEQLKRQAA

SEQ ID NO: 452365 - protein, 418 aa, unidentified
MRDAMRDAIQHTEHEEARVGTRAWIGIDAAKRHHWALALDQDGRVLASRRVANDQAAITQLLGEMAALADELTWAVDLSNSFASLLLALLWTRGQQVLYVPGRAVNRAADGYRGEGKTDAKDALIIADQARLRRDFTPLRPAPQLLAQLRLLTSHRQDLTQDLAADRVRMLTRLRDHLSAIFPALERALRVTSTGPLVLLARWQTPDGLRQAGLEAVTAYLRAHKVPKAAALARTALAAAEQQTVQLPAERLTAQVIAELAGALLALRGRLKDLDATLTKRLAAHPQAGVLTSLPGIGALLAAEFLVAVGDLATFAGPDQLAAYAGLAPVPRDSGQRTGNWHRPLRYNRTLQRVFYVSAWVSATRPGLSRDYYQRKRREGRRHVQAVLALARRRVNVLWALLRDNRTFTPDPPATTTA

SEQ ID NO: 452366 - protein, 393 aa, unidentified
MEVIHMYLVGIDISKYKHNCFIATDSGVPLKEFVFENNSEGFKLFHKVLSELDQDQEIRIGLESTGHYGTNLKQFIVASGYTYLEFNPYLTHQFSKAMSLRRTKTDKVDAKTISNMLGSVDYKTLHTQFYHINELKQLVRDRDDILTNRSKTLVKLTNLLDIIFPEFKPFFNNKLGATAFFILKKYKSPVRISKLTMKDFDELKSKSKGKLTYPKFSRLKSLAKDTVGVQSDIYNKRIQALIKDYEYFDQSLDEIDQEIIHLFKETKTMLTTIPGLGIIQAATIYAEIGDIHLFSNPQKLIAYVGFDVSINQSGISEHRGKIVKRGSPLLRKAIWTYALPSLRFIPALNDYYHKKKAEGKHHKVALTHVCRKLIRMIYHIEYNHIVFDDREIK

SEQ ID NO: 452367 - protein, 346 aa, unidentified
MNPLYVGIDVSSKTNVVYLMKPDGSKISNFSVANSLDGSKKLVKIILSALENHSLDKVIIGLEATSIYGDNLVYFLREDSSLSKHLTKIHILNPKQVKKFKDAYNDLPKNDFVDSFVIADCLRFGRINKEVYLSDYRYAALKTLTRARFYAVQNLVKEKQRLINIIFKKYSSLTQDKVFSDIFGTTALAVYAEFDSVDTLVNMDLHELTKFIQKKGKNRFSDPDSVAKAIQKATRSSYRLPKTVNDSVNQVLSISINSIKSIEAQIKALEKAIAEQMDLIPNTLTSVNSIGPVYSVGIIAEIGDINRFDNQAALAKYAGLVWKQHQSGGFESENTHLIHSGNRILK

SEQ ID NO: 452368 - protein, 337 aa, unidentified
MDYFAGLDVSLEKTHVCVLDRDGTVVHEATALSSPAAITAALTAAPACTRVVFETGRMAPMLYHGLVELGVPVVCIESRQAYQALRTLATHKTDRNDARGLAQLARTGFFKPVHVKSLPAHAVRALIMARKKLVGQRVTLENQIRGLAIVFGVRLPRGLSPAFVEQVLGMSEGVAGLSGAMRGLVAARDAVLGAIAAIDADMKKLVRASDACRRLMTIPGVGQLTALAFTAAIDDPCRFRRSRDVGAYLGLVPRRYQSGEIDYVGGISKVGDRRVRTLLYEAANVMLTRYKGELKLKDWALAIARRSTMRKARIALARRLAIIMHAMLRHGTEFQPA

SEQ ID NO: 452369 - protein, 357 aa, unidentified
MHATPGSTPIATVSIDLAKDVFELAFADAQGQLVERRRLTRAAFAKTFDNAPPLRLVMEACGTAHYWARRFQRRGHAVTLLPAHTVRPYVRGNKTDRTDAAGLLEADRCAAIRPVPVKTPEQQGIQGLHRVREWHKAQRTAAINLVRGLLREFGIVIARGSTKVRPAVLAALEDAGNDLPMPLRQTLHALLETIAATEREMVQIEERLQAFAQSDLRSQRLQRAGGIGLLTATALSASVGEMDRFASGRHFASYLGLTPREHSSGKVRRLGRVTKRGDVYLRTLLIHCARAVLRSALLARNKQQSLDRTRQWALALAERVGHNKAAVALANKTARRLWAAEHHRTSFDPDHVSAWPH

SEQ ID NO: 452370 - protein, 354 aa, unidentified
MSAKYIGLDVHQATTVAAVRDGQGKLIMECIVETKAATLLEFLHGLRGELHVTLEEGSWAAWLHDVLEPHVQRLVICDPRKNALLRQGNQNDKIDARKLAELLRVGMLSPVYHGDNGLRTLRESARSYLTLTEDVTRVMNRIKAVYRSRGIACTGQKVYRAPHRGAWLVQLREPGLRRRAERLYQQLDQLQPLRLAARREMLQESRRQPANRWLKEIPYVGSIRAALLIAFMQTPHRFRSKRQLWAYAGLAVVVQSSADHRFVNGELQRTRKNSTVRGLNDNRNPQLKNLFKSIALGASVRSGPWHDFYETLLHRGMKPALARVTLARKIAAITLTVWKKGEHFDPKKLNLQAA

SEQ ID NO: 452371 - protein, 397 aa, unidentified
MFQKSKSTIAILQPGGTIIRKPFNVPHTSQNLIELADYLGSLEGSTKIVMECTGRYHEPMLKALYEAGLFVSVVNPHLIKNFGNNSLRRVKSDPADARRIARYTLDNWAELRQYSGMDNTRTQLKTLNSQFSFFMKQKVAAKANLIALLDNTYPGVNKLFDSPPREDGSEKWVDYAYSFWHVDCVRRIGLKTFTERYRAFCRKHHYIFQPDKPEKLFHASKELVAVFPKEKTYKLLIQQSIQQLNLASGHVERLRQEMNALASPLPEYSTVMGIYGVGKTYGPQLIAEIGDVSRFTHREALTAFAGVDPGVDESGQHKSKSNRASKVGSARLRKTLFQVMTTLLQNAPEDDPVYRFLDKKRAQGKPYYVYMTAGANKFLRIYYGKVKECLRNLEQAE

SEQ ID NO: 452372 - protein, 412 aa, unidentified
MEQLIECCAGLDVHRDTVVVTIRTPGPGRSRRVATRTFPTTAGGLDELGDWLVAEGVELAGMESTGVYWKPVFFALEDRIDQVWLLNAEHLRNVPGRKTDVADSMWIAELVEHGLVRPSFVPPADIRALRDLTRYRRTLVEERTRAIQRLEKVMQDAGIKLTSVASTLLGKSGRAIIDALLAGVSDPQVLAELAMGRLRSKIPALRQALAGEFRVEHHGLLVAQMLAHIDFLDESLTAIDSKIESAVTVHAEVIERLITIPGVARKSAIALIAEIGVDMSVFPTAAHLASWAGICPGNNASGGKRRAGRTRHGSVSLKTVLTEAAQAAARTKGTYLAAHHATVRGRRGRFKAIGATRHDLLIAYWHVVHDEVTYRELGADWAVRRNSPEHQLNRLIRQIERLGKTVTITDAA

SEQ ID NO: 452373 - protein, 349 aa, unidentified
MTIVGCDYHPGFQQIVFVDTKTGEWKEQRLEHREPAEKFRRELASGREKMRVGMEASGHARWFERLLAELDIELWIGDAAAIRAKRGRRKPKTDRQDAQHILQLMRKDDFPQIWVPSWENRDLRQLLWHRHRMVQARTRMVNQLQAVALNEGLRCKKRLWREKGRKQLEAIRLAPWASRRREDLLQLLDGLNPKISELTQAIQQEVEKSVEARRLMTHPGVGPITALAFVLIIGRAERFQCGKQIAAYLGLVPLEDSSGERRRLGHITKQGSSMLRFLLVESAQMAARSIPQWRNQYFHLAMRRGRKIAKVALARKLAIRLFWMMRRAPASKYSCPHFRMHSEKSAISL

SEQ ID NO: 452374 - protein, 319 aa, unidentified
MTAEVSRARIVPADRAGVRAFLEPFRGEGMEVALEATTGWRFVVEELERAGAEVHLAEPAEASALKGKKKRAKTDWADARHLRELLLIGRLPESWIPPAHILDLRARVRTRHLLSHQRTEWQQRMHSVLYHHGFPRRSNLLSAANREWIAALQLPAVAREQLDISLQVIDTLDSRLVPFDRELRAIARKQPGARALIDAIYGVGELTAITIIAELGDTRRFQNSRDVVRYAGLDITVYQSDQHRAPGHLSRQGPAALRWALYEAAQRARFPASPDRGYYEQLAARIGGNRACLALARKLLKRSCHILKALGDHALAPVA

SEQ ID NO: 452375 - protein, 348 aa, unidentified
MHKRIAVDLAKSVYQVAESVRVGQVSQRRRLSREAFRRYIQEQGEPVEWVMEACGTAHYWGRVAQALGHRVMLLHPRYVRPYRRRNKTDRNDCDAILEAARCQGIHPVPVKSHEQQQVQQLHGLRETWKKSRTQRINLLRSIFREAGIQAPERTEAFIRAAHELAECPEVAALSHQLHIVLAEINLYQQCMNECEQQLKRWHADDEVVRILDEVSGIGLLTASALKTAVGQPERFANGRQLSAWLGMTPREYSSGNSRKLGHISRQGNTYVRTLLIHGARAALLAAQRCQANTPERMTALQRWATQTAARIGHNKAAVALANKLVRICWAVWCHQRRFSGNWQSTAPA

SEQ ID NO: 452376 - protein, 417 aa, unidentified
MIDADWFVGIDWASTMHEVCIVDGAGDVSERRQVAHTAAGLQTFVEALQARASGDLSRVAIAIETPRGALVEMLVERGCAVFAINPKQLDRFRDRFTAAGAKDDRRDALVLGSSLRTDPQAFRQVRLDHPVVIQVREWSRMDEALGSELTRLANQVRELVYRIAPALLTVCPGADEPWLWALVRLAPTPAQQHRLSVRRLDRLLREHQVRRLTAADLRTVLQYAPIATAPGVVDAVAAHLQLLLPRVELVAQQRRQCGRELKRLLGALAAEAPAPGDQREHPDVTILRSMPGVGVRVAARMLAEASQPLLDRAYHPLRAVMGIAPVTKQSGRSRTVSMRYACNGRLRDAAYHWARVGTQRDAKSRAYYATLRARGHSHARALRSVADRLLRVLMSLLARGQCFDPTYGAPLAATPEA

SEQ ID NO: 452377 - protein, 449 aa, unidentified
MRQSSAGISLEYIEHNAAGIDVGATEVYVAVPPGRDAEPVRRFKTFTGDLRAMAAWLVQCGITTVAMESTGVYWIPPHQILEEAGIRVCLVNSKHVKHVPGRKSDVQDCQWLQYLHAVGLLKASFRPDSQICALRSLSRHRASLVDSAAVHVQHMHKALTQMNLQIHHVLSDITGLSGMAIIEAIVAGERDPHQLAAKCHQNVRSSRETVIKSLVGNYRSEHLFTLKQSLTAYRHYQELMAECDREIDRLMRSLNSRIDPTQQGPMPSPDPKPQKRRKNQFHFQMGPELNRIFGVDLTAIPGISALTAHTLLAEIGPDLSRFPNVAAFASWLALCPANKKSGGKVLSSKTRQTSSRASRALRIAAQTLARSRSRLGSFYRSMRARLGSPQAITATAHKLARIVYHLLTTGQSYDESVFLMEDQKQAQRHEKRLRKQAKTLGFQLVPIAA

SEQ ID NO: 452378 - protein, 346 aa, unidentified
MKVLLKQTVGIDVAQNELVVSLGRMDQQISIEVYAYKVFPNTQKGFSSLVSWVNKQTLTNVEVRYVMEATGVYHESLAYYLCTNQKQVSIVLPNKISNYVRTLDIKTITDKSASQAIARFGLERQLEVWQPPLKIFNDLRQLCREREQLVQERTMLKNQLHAERTSATSSEKSIKRTKKRIAMIDKQEKEIMEEIAALIKGDEAIAKKMKVITSIPGIGNLTAVTIIAETNGFELIKNKRQLVSYAGLDVREKTSGTSVKSKPRISKRGNRNLRKVMHFPALAAIRTDENFKCIFLRLASRHGIKMKAIVAIQRKLLELTYILWKSNTSYCPNYHNQSTTTETITM

SEQ ID NO: 452379 - protein, 339 aa, unidentified
MNATPVGIDIAKNVFQVHYVDAQTGEIVNRSIKRAQFLEHFANRAPCLIGMEACGSAHHWARQLTKMGHEVRLMPAQFVKAFNIRNKSDAADAKAIWLAVQQPCKAVAVKTEMQQAVLMMHRQREQLVKFRTMQINGLRGMLAEFGEAMGKGRSALSKAIPDALTRVEQSLPKVLIDTLREQWTRIEKMDEEIATIERRLREWKKEDKAVKAIIEIPGVGLLTATAGVAMIGDPKAFRSGREFAAWVGIVPRQTGSGGKVNLHGISERGDTYLPTLLIHGARAVLTRAKEPGPWVEQMKKRRPPNVVATALANKMARTIWAVLAHDRSYEKGYVSMKPV

SEQ ID NO: 452380 - protein, 348 aa, unidentified
MVVVGADVHKRSHTFVAVDEVGRMLGEKTVTATSAGHTAAIIWAREQFGVELLWGIEDCRNMSARLERDLLSAGQQVVRVPTKLMAQVRKSARTRGKSDPIDAEAVARAVLREPGLPVASHDEVSRELKLLTDRRDVLVAQRTSAINRLRWHVHELEPARAPGRLDAAKHQHVLQVWLATMSGLVAELARAELADIIRLTGDITTLATRIGERVRHVAPTLLGLPGCAELTAAKIVGEAAEVSRFKTEAAFACHAGVAPIPVWSGNSAGRVRLSRSGNRQLNAAFHRIALTQIRISGPGQHYYRKLTAAGKTKAEARRCLKRRLSRAVFHALHADHQTRNQAPKTAAA

SEQ ID NO: 452381 - protein, 322 aa, unidentified
MKMANTTTITAGIDTSKDKLDIAIHGQSGGFIVENTAGGWQTLAARLRGAGVGRIGIEATGGYERGAMRYLQKARFDVVLLQPLQVKAFARMRLRRAKSDKLDAALIADCTHTMDAYNKMPPDPRFDALADLLTYIEQIEEDIVRFKTRLEQTRDGRLRKNIKDQIKHFKKQRVAELRRLRDQIFAHGDLAGRYKLLLSIPTIGARTALSLVVRMPELGLVSREQAAALAGLAPFVHQSGKHKGETHIGGGRARLRRSLYMAAFTGAFHWNPALMALYKRLTARGKSHKCAVVACARKLLIFANTVLARGTPWEEARPIPAA

SEQ ID NO: 452382 - protein, 344 aa, unidentified
MTYFTALDVSLRFVSICIVDDMGQVRYEAKVPAEVHRIVGCLRKFSDQIKTVGFEAGALTQYLTYGLQAAGFDVVCLEARQVNAALAAMRNKTDKNDARGIAQILRTGWYSRVHVKSLESHQIRALLASRKAILKKCIDLENELRGLLRVFGIRLASKVPHGAYDAVVRQQVETEPLLARALLPLLEARQVLYRTYLKLDNEVKAIVRHDRICQLLMSVPGVGAITALTFKAAVDDPHRFKRSRTVAAHFGLTPRRYQSGEIDNPGRISKAGDPEVRCALYVAAHSLLSRSAAWSTLKAWGVRLAKTRGHRRAVIAVARKLAVILHKMWIDGTEFRWSAEPVQA

SEQ ID NO: 452383 - protein, 341 aa, unidentified
MDTVSLIGIDLGKHCFHLHAQDGSGRMVLRKKLTRNQMFTLLSNFPSCTVVMEACAGAHWIARRLQTLGHEAKLISPQFVKPFRQGNKNDFADAQAICEAASRPSMRFVSPRNEAQQVVSALHRVREALVRNRTGTINQIHAFLLEFGISLPRGMAVIRRLPAVLEAEALPPRLVAVLERLQAHFKYLDEQIGQVEHELLTQLHEDERSERLLEIPGIGPITASVLMSELGDARQYGSARQFAASIGLVPRQYSTGGKPTLLGISKRGDKGLRQLLVQCARVIMLRIERRTDSLGVWVRSLLARRHSNVVACALANKLARIAWAILAKGTHYRSAPTALPA

SEQ ID NO: 452384 - protein, 404 aa, unidentified
MTDTEQHDSVQVFVGVDVGKGAHHAVALDRKGKRLLDSALPNDETKLRALIGKLKEHGQVLLVVDQPATVGALPVAVARDEGVLVAYLPGLAMRRIADLHAGEAKTDARDAYIIAEAARSPHTLRSLKLADSQVAELTMLCGFDEDLAGQITQVSNRIRGLLTQIHPALERVVGPHLDHPAMLDLLERYPSPAQLSALSQKQLANRLVKLAPRMGKTWAAQILQALSEQTVVVLGTQAASIVLPRLAQQLAALRIQRDEVAKEVERLVLAHPLHPVLTSMPGVGVRTAARLLIDVASRAFASAGHLAAYAGLAPVTRRSGSSIRGELPSRRGNKQLKRAMFLSAFAALRDPVSRAYYARKISQGKRHNQALIALARRRCDVLFAMLRDGTFYSPPRPQISLTTT

SEQ ID NO: 452385 - protein, 340 aa, unidentified
MKGTTIGIDIAKNVFEVYVEDEAGQVVARRRLSRKKMVPWFANHPCAVVGMEACGGAHYWGRELAKLGHTVRLIAPQYVKPWVQTNKSDQADARAICRAVQEPGMRFVAIAGEAQQAVQAFHRVRSRLKENRTALVNQIRGIMLEYGVALPKGVAAVRKALPLLLAEERWAPLIRQFLLEQHAELLEWDTRIVAVTQAITQENARQPVCQRLEQVRGIGPLSASALWLKAGGQTYQNGRHLAAALGLVPKHTGTGGKIRLGGMSKRGDRYLRSLLIHGARSVITHSREKQDPVSRWVHRLVERRGMNKAVVALANKNARVAFALIHEDQPYDVTKMCRAA

SEQ ID NO: 452386 - protein, 359 aa, unidentified
MKIVGCDFHPAWQQVAVFDPESGEIAELKLLNGDGEAERFYRELESPALVGIEACGNSQWFIELAEQLGHVVWVGDAAQIRASYVRRQKTDRRDAGHILKLLLESRFPRLWMPTAEQRDLRQLLIHRHKLVEIRARIKNGLQHLALNRGVQKGSRLWSVRGRAGLEKLPLSGWTARRREDLLKLLAELDRQVDELDQAVKQAADEHPQARLLMTQPGVGPITSLAFALTIGDVSRFRHSNQVASYLGLIPREHSSGGRQRLGAITKQGNRFMRQLLVESVQTVNRLDEGFRRQYVARCHHKAKGVAKVAAARKLAVRLYWMLRHNVGYPEIALIESSPAVPLAGKSHADELSGRSRIQH

SEQ ID NO: 452387 - protein, 400 aa, unidentified
MRTVFGIDVSKASSEVAILVNGEKIHGYTMLNDAIGFNRLLNDLKTVHNPEIIFEATGVYSRRLRAFLEEYSYAYTQLNPLEAKKQLDSLRVRKTDKIDAEKLAHSQFILNRKPTYAQEEVYQHLRDLSRFYQNLTEDIVRAKNRLHKVLQVTFPELENLLSTPTGEQYWNLVMAFPCKEFVLNLSQNELCKIIRQSTSKRISEKRIAYLTDKLIKLAKQSFCAVKKISPMLEEVRYYAQELLRLSEHRQIVLDDMVALAQPLPEYDILRSIPGIAETTATSIIGELGDIRRFQSTNQINAFIGIDLRHYESGNFLAKEHITKRGNPYARKILFKCIHNIASASHTNPCHIADFYEKRKRQSTIASTKPHAIASIHRLIRTMYYLITHNKLYDYSLTQNR

SEQ ID NO: 452388 - protein, 528 aa, unidentified
MRTEISAQVSRRAKKELARRLRSSDPGLEVVHPDAAGIDVGNASHYVAVRPDRDPEPVRRFAWFTADLYRLAEWLRSCGVKTVAMQSTGVYWIPLYDILEERGFEVFLVNARHTKNLPGRKSDVQESQWLLKLHTHGLLNNSFQPASDIRVLRTYWRLRAEHATGMATCIQRMQKALTQMNIQLANVISDLSGTTGQAIVRAILNGERDPQKLAELRDRRIHATKEEIAKSLQGNWRPELLFIVRQQLEMYEAYQRQIAECDLQLREHLASFASAPSTSVDRCNPPQSKKSKRYRYMPQFPLSNELMRISGVDLSQIDGVDAMTAQTLISEVGLDMNRWKTESHFASWLGLCPDNRISGDKVLSRGTRRVINRAATALRIAASTLIRSKTYLGAQYRRLRAKLGAPKAITAMAHRLARLVYRMLKYGQKYVDKGADYYEQRSRKQQIDFVKKKAAQLGLRSRLLSLDLHPEWSFWGVGAMKGCATSHAAHAEYIDFSPFSGDIGKGFIPIDLALDSPTVALRNERFPM

SEQ ID NO: 452389 - protein, 454 aa, unidentified
MSKSKQAKQQNVVDLDTLKQINLHAAGLDIGDAEIWACVPPGRDDQSVRCFKTFTVDLHTLADWLTECGIKTVAMESTGIYWIPIFEILDDRGFEVKLVNAPHLKNVPGRKSDVQDCQWIQQLHTFGLLRGSFHPDEQMRTLRAYTRHRANLIQCRTQHIQLMQKALQLMNLKLTNVISDITGQTGLKIIRAIVAGEHNPTRLAKFRNSHCRKPETEIAKSLEGNYRPEHLFALQQALEAYDFYTRQIQTCDEQLELNYQAAKPQLDLAQHPLPPARRARRDKNSPTFDLRLHLFQLTGVDLTQIDGINALTAQTVLAEIGLDMSKWPTVKHFTSWLTLCPYQDISGGKVLNSRTKPSNNRAASALRMAAQALTHSHSPWGDYYRRMRSRHGPAKAITAAAHKLARIIYHILKYRQPFDPDRLQRNQHQLQQRRLKRLKRQAAQLGMNLVPSST

SEQ ID NO: 452390 - protein, 342 aa, unidentified
MDHFAGLDVSVKDTSVCIVDDTGKIVREVKVASEPKALLAALKNPVYHFKRIGLEAGPLSQWLFSALAEAELPVVCVETRHMQAVLKAQINKTDRNDARGIAQMMRVGLYRPVRVKTLRSQKLRMLLTHRTLLQSKAIAIENDLRGTLRNFGLKVGMVGKVKFEARIKELVENFPDLAAFVEPLLVVRRVLREQIVILHRRLLAIVRDDDVCRRLMTTPGVGPVVALTYRATVDVPARFRKSKAVGAVFGLTCSKYQSGEIDRSGRISRCGDEMMRVMLYEAAQSLLRSKRWSWLKAWAMQIARRRGMKKAIVALARRLAVIMHRIWVDGTEFRWTREAAAA

SEQ ID NO: 452391 - protein, 370 aa, unidentified
MDERIKFFVGLDAHKDSIAVAACDSGREPARFVGTMGPDVNGLLKLLAKAGDPAQVSVVYEAGPTGYGLHRELCRRGYRSQIAAPSLIPRRPGERIKNDRRDCLRLAELSRAGELKAIWVPDEAHEAMRNLWRAREDAVGMRLKTRQQLQAFLLRHGRRYPGKTNWTKSHERWIAEQCFEHAGDRIALAEYQLAAQAAEQRVHRLTTALTEAAKGWRFEPVVAALRALRGIDTVCAIGLVTEIGDISRFGTARQLMAYLGLVPSEHSSGNSVRRGSITKTGNAHARRLLTEAAWSYRFPARMSQQLRQRSNDLPEPVRNHAWKAQQRLCGRFARLSSRGVQVNKVCVAVARELAGFVWAIAHQASRAQAH

SEQ ID NO: 452392 - protein, 445 aa, unidentified
MSNGSGLSRGDRNRNARLARLRELVPLGNAILGIDLADDKQAAVVTDHDSRVIARRRVSARAWELGELLDWAVARAAGAGFASVTVACEPTGHRWRVLDQLAVERGLALVCVQPLLVYRAREGEDLTWDKSDPKDAVIIARLAAGLRCYEPERADAVWARLRHLGARRSALIADATAEVNQVRDLLECAWPAVLAAAGVPFRSATWRAALAVTLDRCAGDLARVRRLGPARFESAVRRELPRWGAQRPCLRIIRAVFAALADPAGVRVHRPGALERARLVLGDWRETRARLADVEARMVAVLDDLGLTGLVTTIAGLTPAGAAAILAETGDPARFTSPRALVKHAGLCPRDNASGGYQGKTSISGRGRPALRVAAWRAVWAALPNNPVMAARFAYLTTRDHNRLARQQARTACAAALLRWIHVVITRRIAWDPAIAGRTPPCRAA

SEQ ID NO: 452393 - protein, 426 aa, unidentified
MQYALIEVLPDVPPGGVCAGIDWASTDHVACVVDMAGRVIDRFSAAHDKAGIAAMIARLRRAGAGEVAIERGDGPLVAALLAAGLTVVVITSRHVKNLRSRYSSSGGKDDRFDSYVLADTLRTDRARLRPLIPDAPATAALRAAVRARKDLVAHRIGAANQLRAHLAVAFPAAIGLFHELDGPLSLAFLARFGSQDAAAGLDEDAIVGWLSTLPARGNPAPPGVLCARLRAAPPGAAGSHGAAQAGVTAALAAAVAGLAAQIKTLETQIASQLAAHPDAHIFTSLPRAGTLRAARLLAETGDCRSRFPDPWSLAALAGVAPVTRRSGSHIGHAFRWAVSHQLRDAVCDFAADSRHASPWAASIYDGARDRGKDHPHAVRILGRAWVYVIWRCWQDGTAYDPAKHNALQQVLDRQHAAQAAAAQADL

SEQ ID NO: 452394 - protein, 349 aa, unidentified
MNVLKQVVGVDVAQKELVVTVGRLLENLSIELYAYKVFGNTEKGFLSLLAWSQKLTNPEIELRFVMEATGVYHQKFAYFLDEHGYELSIVLPNKISNYIRTLEVKTVTDKSCSEAIARFGLERKLANWKRPKETYKRLQQLTRERDQIVSERVAVKNQLHAESQEAQPHERSIERLKERIQLLNRQENEIKADIAQVINQDSELKKEVDTISSIPGVGVLTAVIILAETNGFELIRNKKQLASYAGFDVKEKQSGTSVKGKPRISKKGNRSLRKAMYLPAITAVKWDENFKNMYVRIVSKQGIKMKALMAVQRKLLELTYTLFKTKASYNKSYESQRVQQRNSMSAQMA

SEQ ID NO: 452395 - protein, 343 aa, unidentified
MNHVAIDLGGKESQICIRHPDGAIVEERKVPTRKLTELVSTWPTSRVVMETSAEAFRIADAAIAAGHEVRVVPATLVRLLGVGDRGVKNDQRDAQHLSKASWQTDVPSVHIPSKPARELKSICGARDVLVGTRTKLINNVRGWMRTQLWRIRGGTPATFADRVRGHAAAVGEPLPEHIERQLRMLSAVLEETKGADKQLKTLAGEHAVCRQLMTAPGIGPVTALRFVAAIDEPGRFSSAHRVQSYLGLTPGEHSSSERERRTGITKAGPMELRRTLIQAAWAAMCRVRTSHPMIDWARRLAERRGRPVAAVALARKLAGILFAMWRDGTSYQSKRSAEVVKPS

SEQ ID NO: 452396 - protein, 346 aa, unidentified
MMIIGCDFHPSWQQVNWVDSETGETGEQKLVHASGDAKRFYQQLAAPVLIGMESTGNSQWFIELVENLGHAIWIGDAAQIRASYVRKQKTDKRDAAHILKLLVEGRFPRLWMPDREQRDLRQLVLHRHKLVLIRSRVKNELQHLSLNKGMQKKRRLWSQAGLQTLRELALKPWASCRREDLLGLLAMLDQQVGKLDTAVKQAAEEHPQAKLLMTQPGVGPNTALAYVLTIGDVSRFRRGKQIASYLGLIPREESSGGRQKLGAITKQGNRMLRSLLVEAAQVAVQHDPGLRKQYRHRCHQKPKAVAKVAVARKLAVRLYWMLRTQKPYPEIVRIESSSGLPLVGAS

SEQ ID NO: 452397 - protein, 427 aa, unidentified
MKSNTQNKKIEAITEKTLVIGIDVGSETHYARAFDYRGIEFSKKPFKFSNSEAGFEMFKAWILDIKEKHEKDKVVPGMEPTGHYWFNLGKFLQDNEMKPVLVNPHHVKKSKELDDNNPTKNDRKEPKVIAGLVKEGRYMIPYLPDGIYADLRTASNMRFQIQSELTRVQNRISRWFNIYFPEYKTVYGKPDAISGMMILKKAPLPEDILTLGVEGVNQIWRDAKIRAVGKKRAQTLVEAARHSVGTKEGATAARIEIRMLLEDYESRNNRLQEVMFLIEELVKQIPMAEKLMEIKGVGIKTVSGFLAEVGDITRFSSPKELQKLAGLALVENSSGKHKGQTTISRRGRKRLRYLLFEVAMSLVGKNPEFGTLHHYYTTRKVNPLKKMQSLMAVATKLIRVFYAMLTKGVEYDSAKMLGDIKRPAVYM

SEQ ID NO: 452398 - protein, 321 aa, unidentified
MSEPSCERFVGVDVSKGWLDLCAEPPAPQVADHVAYDDASLRQLCDVLARLQPTLIVMEACGGLEQRLACELAARSLVVAVVNPRQVRSFARASGQLAKTDAIDARTLCAFARAIRPQARAPRDAQTRELADLLARRRQLVDMRIQELQRQHTAASKAMRKSLAEHVTWLERRIAKLDEDMGQRLRDSDVWRIKDDLLQSIPGVGPVLSRTMLALCPELGQLNRREIAKLIGVAPLARDSGKYHGRRRIWGGRSDVRRVLYMATHAAMQHNAPIAAFAQRLKASGKLPKVVITACMRKLLMVMNVVLKTGQAWRDSSVARA

SEQ ID NO: 452399 - protein, 411 aa, unidentified
MPKIVYPVCCGIDIHKSFVIACIATTDKNLVTTYSKPKRFSTFTGDLRRLADWLAQNNCKDVCMESTGKYWIPVWNILEKTCEPVLAHPKYLKAIKGKKTDKRDAKWIADVFKFDMLHGSFIPPAKIRQLRDLVRYHVKLTSYTTGEKNRAQNCLTVSNIKLDDVFSDVFGKSASAIITRLLENDEPFDVAPFVDRRCKTPVDMIQDAVDGVMCAEQAEKLRIIRSHMDSLELCKLNLESEILTIAQPFLPQINLVSTAPGIAAFSAVAIIGEIGVDMSVFETSRHLCSWAGLAPQNDNSAGKKKTTRISRAGVYIKPILVQCALAAVKSNKHPEVRNRYNAIKKRRGHKKAIIAVARMLLTAIYNILKKNEPYNAELYRQSDKPPIGREVTFEQAIFIIQRQGYIVTAPT

SEQ ID NO: 452400 - protein, 448 aa, unidentified
MAGRVQVVPDEPHERVFGRVAAVDVAKKSGVVCTRLPDSAGRQVARWWAVTATVSEVSGLAAELAGAGIEKVTLESTSDYWRIWFYLFEAAGLDVQLVNASQARQLSGRPKTDLKDAMWLARLTEMGLLRPSFVPPAGIRALRFYTRTRTRLVQDRTRCWQRIEKLLEDALIKVSSVASKMTTLSVRDMLEALIAGERDPQVLAGLARSRMKAKHDALVQALEGRFEDHHAEIVRMLLDQIDFLDRQVTRTEILIAEQLASLPEAWGADPDGVTGPDAGTGQDAPALPAAARLDEIPGITPGLARSIIAETGLDMTRFPAPDHLVSWAGLCPRTIQSGTRTRTGKKPGNTYLRGYLGQAAAGAAGTATFLGERHARIARRRGPARAQVAVARSIAVIIWHLLNDRDARYHDLGPDWHQRHTDKNKKTRNYIRQLEALGYTVTLTQTAA

SEQ ID NO: 452401 - protein, 391 aa, unidentified
MFLLGIDIAKLNHVASCIDSSTNEVVFSNFKFKNDFKGFSALLNKIKSFDAKNLIIGLESTSHYGENLINFLFIHDFKVALINPLQTSHLRKANIRDAKNDNLDSLNIAKSLVFTKLNFVSKKNIECFSLKKLTRFRSNLIKQRSKAKIQLTSLLDLLFPELQYLFKSKIHSKAIYSLLKKYPSAEEIAALKDDEISNLLYASSKGHFKKEKSIELKSLAKTTVGIKDTSISLHLIQLIELIELYTKQIKDIEIKITDIVNNLDTTLLSVPGISVIACAIILGETNNFENFSSSKKLLAFAGLDPKIRQSGNFNASSCRMSKKGSPYLRYALIFTAWNIVRHSEKFNKYYSLKRSQGKSHYNALGHVAHKLVRILFTLIKKNISYQEEKLE

SEQ ID NO: 452402 - protein, 413 aa, unidentified
MYIVGIDIAKKSHQAAIMKPDGTLVGRSFRFTNTKQGFEFLMDKLAAVDSSLENFEFGMEATGHYWLNLYTWLADNHATVHVINPLQSDALRNLYIRKTKTDSVDAKIIAQVIRIGQYSETKLADDRMLMMRDLCRQRFFLVDMVANLKRKIIVMMDRIFPEYQGFFSDTFGKSSTAILKHCTTPEEITLFGEDNLAQLLQVASNGKFGLKKAQELISLARNSFAARLSSKTLSLLVKQMMDQMELLQNQIGILEKHISSHFKSFGTKITQIPGIGPVLGASILSEIGDISRFANPKKLCAYAGIDPSVKQSGQFLGNENHMSKRGSGYLRRCLWMASFVSVNHCREITIVYKSQVSKGKTHFQSMGFVCHKLLNIIYTVLKNDIDYSPMLCINPSITARTSRRIARAALKAR

SEQ ID NO: 452403 - protein, 445 aa, unidentified
MEIINPYAAGIDVGSRSHFVATGQGKDDVREFGVYNEDLQAIVEWLKAREVKTVAMESTGTYWQSLFAAVQNAGFQVILCNGKFTKNIKGRKTDVQDCQWIQKLHTIGLLSGSFLPDEATEQLRTYCRHRANFLDQAADTTRKMQKYLRLLNLRLDIVVKDITGLTGLKIIESICKGETNPAKLASLRNGNCKRSEEEIAKALQTNGRKDYLFALKHEYKMYQQIQSAIKDCDIEIEKMLNEQINGNDDKRQHLIEKKVHKRINKNTPKNIDINLLSYQYFEGVDLLAIEGVSHSTVLGIMSEVGLEGLKKFETAKQFASWLRLVPNNKISGGKVLSHKVPKGSNRLKIALRNAANAIGNLKDTPLSNFFKRINFRKGRVSAISATARKLAVIIWNMIIKKQPYNNDHGYEFLDQKRKRKVQEMKKLIHKFDIKTDELGLQISGL

SEQ ID NO: 452404 - protein, 348 aa, unidentified
MKDLMAGIDLHSNNIMVGIVDVKGKRLAQQKLPCELKPILEFLAPFKKRFLRLAVESTYNWYWLVDGLQAAGYPVVLANPAKITQYSGLKHADDKSDAFFLAELLRLNILPTGYVYDAERRPVRDLLRRRMSLVHQRTALMLSFKSLFTRTTGEQMSLSRLKAMEVKEAQQLYEHPANQLIAGLQLQHIEQLDASIGRLEKAVLSVARELPCYPKLKTLPGVGIILGLTITMEIGDIKRFAGPGQFASYCRTVAAHCTSNGKLKGENNRKCGNKYLAWAFVEAANFAKRHDESCRKWYERKAARTSKVIATKALACKLAKAAWYLAAEETDYEPGRVFPQLAEGAMKK

SEQ ID NO: 452405 - protein, 394 aa, unidentified
MIYVGIDVAKDKHDCIILNSNGKVVFDVFTIQNNIDGFEDLLFKIKTTEKCPDKVKVGLEATGHYSCNILGFLKNKGLSTIVINPLYTSLSRKSISLRKTKTDKVDARTIACMIMSDVNLKPYSDTLYLNEDLKSLTRYRFNKVAQRAKLKISVSRLVNILFPELEKLVSTLHGKAVYELLSEFPSAQHIASANLKHLTNLLHTASKGRFQRASAEEIRQAARKSIGSYLPAKSLELKHTIKLIRELNSEITEIEAEIKKIMDVIDSPIISIPGIGQNLGAVILAEIGDFSRFESPDKILAFAGCSPSTYQSGQLYSSHAKMEKRGSRYLRWALLNAAAYVCKWEPTFATYLAKKLAEGKHYYVALSHAAKKLVRVLYHLETTGKTYQPTSILS

SEQ ID NO: 452406 - protein, 361 aa, unidentified
MLTMEQSTKFSFKGEKIFVGIDTHKKNWKVGVYHSDIALKSFTQEANPDILVNYLNRNYPGAEFHCAYEAGFCGFWIQKHLAQRGINCLVVNPADVPTSHKDKEFKTDPRDCLKIARALRSNLLEPVYIPTDEGIESRHLVRLLHDISKNYTRQKNKVKAKLNFYGIEYPQEYSSDNNHWSKGFYDWLRTIKLKSEQGNWTLQFYIEECLKVKELKKQATKKVRELAKKEPYKMFVDLLRTIPGIGLVTAMKILTEIESIKRFSTLDKFCGYIGLIPTSNSSGEKERIGNITTRGNKFLKGAIVESAWMAIRHDPALLRSYLQLKTRMDENKAIIRIARKLVARIMYVLVNEKPYQVRKCA

SEQ ID NO: 452407 - protein, 457 aa, unidentified
MAYSTNAPPSAKQGRLITTPTSQVVINALYPSAIGVDVHHDLLVCAYQHLDIEKAEISTELHEFRCTSPRSFVDFAQWCYERTPNVILMESTGVLWRAPYESLEDVGFESEQLALVNARDIKAMVGRKTDKQDAIRLAEYARLGKFRKSFVPPRDIRDQRLIARDFRKCKSDESRHRNRVQKTFNALGLRLSAIFSNFTGKAATTILDAWCDGVDNLKEIVETKGSRLKAGTDAILDMLCKAIPEKVMSHLRKQREHLTYLQKRTDDVMATLREAQQPYQESIDLLTTIPGIKETAARLIFAEIGDDLSSFPDAEHFASWIGVCPGNNESAGHAHRSGTPKGNKYLRTVLIECAQAIGLMRKGVLFQRFQAFAIKKGRLRGVMAMAHLLARIIFSILKSRTPYREVSSTTLRDVNVKKVTAAMKTAIRTAGLTLRDGLLVVEKTGEILVDVEDCARA

SEQ ID NO: 452408 - protein, 302 aa, unidentified
MNATPVGLDIAKSVFQVHYIDPEAGEIVSRQIKRAQLLEYFANRAPCRIGMEACGSAHHWARQLMQMGHEVKLMPARFVKAFNVGNKNDAMDAQAIWLAVQQPRKAVAIKSEMQQAVLMMDRQREQLVRFRTMQINGLRGMLAEFGEVMGKGRAAMVKVISDALARVETRLPKVLIDTLREQWARVEKLDEEIATIERRLQAWKKDDKAVQAVIEIPGVGLLTATAVVAMMGDPKAFKSGREFAAWTGLVPKQTGTGGKVNLHGISKRGEDTSIAHSNATTGDGVAYLLIRSTYGCSVKVVL

SEQ ID NO: 452409 - protein, 339 aa, unidentified
MQLYAGLDLHSRNTYIGIMDKEFKRVFGKRVLNKLPVILKTLTPFQDQLKGIVVESTFNWYWLIDGLMDAGYQCVHLANPSAIKQYEGIKHTDDQHDAFFLAQMLILGILPQGYIYPKEDRPVRDLARKRLFLVRHKTSHILSLQSLIARCCAQRVSANEIRKFTVEDLQQLLKKEYIVLSAQANLDTIVFLKQQIQRLEKAIQKKVKLNKAFRQLMTVPGIGLILAMTIMLEVGDIGRFPQVGNFASYCRCVSSQRLSDGKSKGHGNRKNGNRYLSWAFTEAAHLSRRYNENFRSYYNRKVAQANTSLATKALSNKLARICYYIMRDQVPFRQELLSH

SEQ ID NO: 452410 - protein, 279 aa, unidentified
MKVTTVGIDLAKNVFQVHGVDERGKAVLRKQLRRAQVAMFFGNLPPCVIGMEACASAHYWGRTLQRYGHTVRLMASQFVKPYVKTNKNDAADAEAICEAVSRSIMRFVPIKSVEQQAILSVHRVRQGFVKARTAQANQIRGLLGEFGLVIPKGIYNVAKRVPELLEDASNELPVPFRHSAWLGLVPRQHSSGGKPTLLGMSKRGDAYLRTLLIHGARSAILAAKLKVDNTNGWLTNLLTRRHPNIAAVALANKNVRTVWALLAHGREFKADYARHRMAT

SEQ ID NO: 452411 - protein, 395 aa, unidentified
MFIVGIDIAKRSHEAVIIAEDGQVVRKAFSFRNNCTGYNLLLEQVRRLTLVKSQIVFAMESTAHYWLALYARLLKDGYAVMVLNPIQSHSLRELYIRKAKTDARDSLIIADLVRFGRCKASNVPQDKILALRELCRSRAYLVDMAADLKRKLIALLDRIFPEYESLFDSVFSKASIAVLSKYSTPQKVKNANLRKLTDILMESSNGHFGEWKAHQLKEAACSSFGIDDSGGVYSTLLGMFLEQILSLTAQADSLEKQISVFFQEFNNPLTSIPGVGTVLAATILSEIGDITRFSSADKLLAYAGLDPSVKQSGEFKSNQNRMSKRGSPYLRRAIWLASTVAVHRDPMFQTYYEKKISEGLHYMNVIGHVSRKMTAVIFAVLRDGQPYQPILQSAG

SEQ ID NO: 452412 - protein, 347 aa, unidentified
MVYFGMDVHRKRTQIAVLDEEGSQLVNRNVDNGSAQMREMLFGLDAGTEVCFEAGIGTTWLLDLLEEAGLHTHLAHPSACKAIASAKLKNDRVDARTLAHLLRTNLLAEAWIAPRPVRDQRARLRHRAALVRARTAAKVRVQAVLADHGIKDRATWTGPGRRSLEALQLPETQRRVIEDCCALIDTLDPMIRRIERYARNDHDDDPRLDALMKLPGVGWITALTLVAEIGDITRFDSARKLCSWAGLTPTVRGSDRVVHHGHITKQGATIVRWVLGEAAQRARTAPEFADAFKRISARRGRNIATVAVARKLLSRAFHILKEVEKNRTGSLETVSSNNPLAPNVGGR

SEQ ID NO: 452413 - protein, 346 aa, unidentified
MLHLGLDLSRRRLDFHLLDEQGATVEVGAAPPDVHGLASLARRVGGHDQPVRAAIESMNGARFVHDQLELYGLDVEIADAAKVKGLAPLACKTDKIDARVLAELCRRDLVPAIWLPDPSVRGDRERARFRLHLVRQRTRLKSRIHQTLVAFAVPCPVSDLFGKRGRLLLERLALPEPWAGTLTATLRLIDELDREISSCERELRRLGLEHPYIPLLMTVPGIGWVLAYTIAAEIGDIARFPSPRKLAGYTGLCPRVYQSGDSDRRGPLSKQGPKYLRWALLEASTHACKHPLYRERYQRTKRRLGRQRGPRVAQVDLARRLSEAIWHMLTTTTPFAPASASAPLAA

SEQ ID NO: 452414 - protein, 414 aa, unidentified
MPETAYALYVGIDWGTVTHQVAVLDAQRVLLGERAIAHEAVALHALTEWLTQLAGGAPARVAVALEVPRGAVVDTLLERGFHVFALNPKQLDRFRDRYTVAGAKDDRRDAFVLATALATDRPAFRALEPEDPLIIELREWSRVEDELREEWGRLASRLREQLHRFYPQALALCPAADEGWFWALVGLAPTPAAALRLRRAAVMTLLRTHRIRRLTADQVLAALQNPPLRVAPGTVQAASAHVALLIPRLELVDRQRRDCARRLERLLDALATTGEHQGHRDVTILRSLPGVGRVVAATMLAEASRLLAARDYHGLRTQAGVAPVTRQSGKRLLVGMRYACNPRLRNALYYWGFISVRYDAHSRQHYQLLRGRGHSHGRALRGVVDRLLTVLMAMLAAQTTYDPARRSAMLALVP

SEQ ID NO: 452415 - protein, 347 aa, unidentified
MSVYVGIDVHRKRSQIAIAGEDGKVAVNRNVVNGSDAMRRLIGSLPAGTPVAFEAAYGWGWLAAMLEEQGLELHMVHPLRCKAIASARLKNDKVDAAILAQLLRADLLPEAWIAPPEIRDLRALIRHRVSLVRLRTRMQNRIHAVAADHGHDRPASYWTGPGRAWLQGLDLPPVARSLIGSCLAVIDDPGPQIAAADAQLRGYARSDPRVPVLTALPGVGPFTALVIIAETGDITRFPSARKLASWTGLTPTVRGSDLKVRHGHISKQGSPVLRWALNQAAQTTRRHPDFAPAWNTIAARRGPKIATTAIARKLACRSWHLLTEHAASQPPPAGTATANPPPARIAA

SEQ ID NO: 452416 - protein, 419 aa, unidentified
MAFKILRKNCCGLDVHKTWIFACIGITDFNGRTGYKQARFSSFSKGLQDLADWLGKYSCSDVCMESTGKYWIPVFNVLEKTCLVTLAHPKYTKPQKGNKTDRKDAKWICDLYMCGMVKPSFIPPPDIRQLRDLMRYRMKLTNMLTGEKNRAQNCLTVSNLKLDDVFSDVFGKSSRSIIQHILDNSGQQFDVAPFIDRRCKHPVEEIQAAVAGAVSREQAAKLKECLLHIDQLNEHREHIETEILRLAEPYPHQLELIRTVPGFSAAPLTAVALISEIGVDMSVFPSAKHLVSWAGCCPRNDQSNKKVKSTRISRAGCYLKPLLVQIANSIIKSNKYPECKERYRRIKARRGHKKAIIAVGRMLLTAIWNVLSKLEPYSPKGYLQDKLAEHSVVISKAEGLALLRKRGYIFKDELAAGSG

SEQ ID NO: 452417 - protein, 424 aa, unidentified
MQNNTARKLAQIPQGALIVGVDPHKKMHAVVMMTQQARILTKLKIGTTQTDFDRLVQTAQREATQIGAPSILMAIEAGGHYWRTLAYYLQEHTIAFRLINPFTLKRRREGDDLTRRKTDYRDATAAAELLRTGQFTETRLPETQYAELRALHQARRRLTKEYTRGRNLLRGLLDGLFPEFCAVFKDPTGQTALAVLIACPVPAHIAAQPVGEFLRSVRQAASGKRLGVKKVRTLHTVAATSVGVKAGAHGVHLELQLLIQRLCLLADQLSQLERQLVTLAQTFAEYGYIRSVPGMGALTVAGLIAEIGPIAHYGNAKDLVKLAGVNPSHSESAEKGPTYTPMSKKGRAGLRACLWQAALGVLRSNPELRTWAKQLATRGPQANPLHKREVLGAAMNKLLRLYFALVSKKQMYHPRVVSGELVAA

SEQ ID NO: 452418 - protein, 466 aa, unidentified
MRSEASAEASRIAKKELARRLRSADPGLEVVHPNAAGIDVGNESHYVAVRPDRDSEPVRRFACFTADLYRMAEWLRSCGVKTIAMQSTGVYWIPLYDILEEFGFEIFLVNARHTKNLPGRKSDVQESQWLLKLHTHGLLNNSFQPPSDIRVLRTYWRLRAEHATGMATCIQRMQKALTQMNIQLANVISDLSGKTGQAIVRAILNGERDPQKLAELSDRRIHATKEEIAKSLQGNWRSELLFIVRQQLEMYEAYQRRIAECDEQLWEHLAKFASAQSTTVDTDNPPQSKKSKRYRYMPQFPLSNELMRISGVDLTQIDGVDAMTAQTLISEVGLDMSRWKTESHFASWLGLCPDNRISGDKVLSRGTRRVINRAATALRIAATTLLRSKTYLGAQYRRLRTKLGAPKAITAMAHRLARLVYRMLKYGQNYVDKGAAYYEQRNRQQQIDFVRKKAAQLGLQVTLAQS

SEQ ID NO: 452419 - protein, 381 aa, unidentified
MKKDSIAKLQVRKSQIRRMAAKQRLTVGLDLGDRSSRYCILNEAGGKASEDQLLTTKAGLDSLFAKMAACRIALEVGTHSPWVSRHLAAMGHEVIVANPRKVRLITQSVKKNDRMDAEQLARLARVDPQLLGPIRHRGAEAQGDLAVIRARGELVDCRTALINTARGLAKPMGERLKSCDADYVKESLAEGLSEATQNAIRPLLKSVEEISRQIGAYDKKIQEMEKRYPETKVLKQVHGVGTLIALTFMLTLEDAERFAHSRDVGPYLGLTRKLRDSGESQPELGISKAGDVLLRRLLVQAAHCILRDGAPDSDLKLWGMTKVQAGAGKKGSKRRKKRATVAVARKLAVLLHRLWVTGEVYDPQYNRKAVEAAKGRGKAAA

SEQ ID NO: 452420 - protein, 316 aa, unidentified
MSQPLVYVGLDVSKATLDIAMRPTEEQWQLPHTEEGIRDLVTRLAGVHPSLIVLEATGGLEVSLVAALATAKLPVAVVNPRQVRDFARATGKLAKTDRLDAQVLAHFAQAVHPTPRPLPDAGLQALEGLLTRRRQVVGMLTAEKNRLASARPPVRQDIQDHIAWLEQRRAKLDEDLRHTLHASPLWREKDDLLQSVPGVGPVLSLTLLAELPELGTLDRKQIAALVGVAPLNRDSGTLRGRRTVWGGRARVRATLYMAALVASRCNPVIMAFYQRLCSAGKPKKVALTACMRKLLTILNAMLEHHVPWQPHHAPTP

SEQ ID NO: 452421 - protein, 403 aa, unidentified
MNSVGIDISKGRSTVAVMRPFGEVVISPFEVHHTDSELSALARRLKSLNGETRVVMEATGNYHAPVAKLLHDAGLYVSVVNAKLVHGYGNNELRRVKTDKKDAVKLANYGLDRWLTLPRYVPEEGARLLLKNCYRQYRQYSKVQTVLKNNLISLLDTVFPNVNRLFSSPIRGDGSEKWVDFVAEFWHCRCVSEKSEKAFANKYQRWCKKHGYNFSVAKAHTIHAEASGHIGVMPKSETTKLLVEQAVAQLRATSVALTALKREMLTLAAQLPEYPVVMGMFGVGPTLGPQLIAEIGDVRRFYSKKALVAYAGLDAPPNDSGDVTGKHKSMSKIGASSLRRTLFLVMSVYLRSAPLDEPVYQFMDRKRAEGKPYHVYMMASANKFLRIYYATVKSYLESLEHTT

SEQ ID NO: 452422 - protein, 414 aa, unidentified
MSQKKPVPSAMLRAGPTRFIGLDVHKHYLIAIGVDAELNQVLGPQRVQLKHLDGWMRKTLTPQDAVVLEMTTNAFQLHDDLLPHVHSVTLVHPPHVKLITRAQVMTDKIAASILARLHAVGLLPPVWVPPLEVRDHRALVAHRAKMVRLSTQAKNRLHAVLHRHHLLPPEGGLFTPDAREWWLTLDVTPIQHARIQSDLDTLTFARSQVSRLEETLTAVAAQDEHVPLLVQLPGIGLITAMTLLAAIGDISRFPDAKHLVGYSGMGSRVHDSGLTRRTGGMTKAGRRDIRAAMVETAHTASRTHPHWKAELARLEPRLGHNKAIVAIARKLLVAVWHVLTKGCADRFAEPDGVARKLLRHTYRLGRANRPDGQTAAEYVRQQLDRLGLGADLTAIQQGSKTFALPPSRLTSAGN

SEQ ID NO: 452423 - protein, 456 aa, unidentified
MKIPQSTIRLLTGRLVKILLYREVSIMKSNTQNAKIEAITEKTLVLGIDVGSETHYARAFDYRGIEYSKKPFKFSNTEAGFATFKEWILDLKERHEKDKVVPGMEPTGHYWFNLGKFLQDNEMKPVLVNPHHVKKSKELDDNNPTKNDRKDPKVIAGLVREGRYMIPYLPDGVYADLRTASNIRFQLQAELTRIQNRISRWFNIYFPEYKTVYGKPDAKSGMLILKAAPLPEDILTLGIDGVNQIWRDAKLRAVGKARAKTLIEAAEHSVGSKEGAVSARMEIRMLLEDYESRNTRLQEVMVLIEELVRKIPMAEKLLEIKGVGIRTVSGFLAEVGDISRFNNPKELQKLAGLALVENSSGKHKGETTISRRGRKRLRYLLFEVAMSLVSKNQEFRELHNYYTTRRLNPLKKMQSLMAIAAKLIRVFYAMLTKGVDYDPKKMVSDIKRPAVYLQAA

SEQ ID NO: 452424 - protein, 339 aa, unidentified
MAQVTTLGVDIAKNGVCIHGVDAHGHVIVKKRLARQKVLPFVAQLPPCLIGMEASGGAHYWAREFTKRGHTVKLLSPQFVKPYVQSQKNDPNDAAGICEAVARPRMRGVPVKSVAQQDIQALHRIRERQIKARTALINQIRGLLMEYGIVIPQRASQVRHKLPFVLEDAENGLTITAREWLQALAEELQVLDQRLAATDHRIEQVFEADEACQRLAQLGGIGPLTATALVAAVGDATGFKNGRQFAAWLGLVPRQHSTGGKTTLLGITKGGNRYLRMLLIHGARAVLRVVDRKTDAWSRWLQGVQGRRGTNCASVAQANKTARVAWALLAKGDRYRRAA

SEQ ID NO: 452425 - protein, 342 aa, unidentified
MERVTTIGLDIAKSIFQVHGVDATGGVVVRRRLTRARVVPFFEKLAPCLVGIEACATSHHWARELRRLGHDVRLMPPNYVKAYVKRQKNDTADAEAICEAVTRPTMRFVEVKTPEQQSILVLHSTRMMLMRQRIQLSNVIRAHMAEFGVVAPVGREGLLTLIDSLHEETDDRVPAEARHCLRMLAAQLRLVNAQILENDRRIRASARATDVGRRLMGIPGVGPVLASAFVATVPDPHAFRSGRSLAAWIGLVPRQNSSGGKERLGGITKQGNRYLRQLLFVGAMAVIRYAERHGSRRPWLVQLLARRTTKIAAAALANKMARMVWAIMTSGLPYREPELRAA

SEQ ID NO: 452426 - protein, 411 aa, unidentified
MELIHDRVAGLDVHRDSVTACARRTGPRGGTVTDKERFKTTTSGLGRLAGWLADQQVALVAMEATGVYWKPVYYALEERFQVWLCNAHHVKNVPGRKTDMADAEWLADVAAHGMVRPSFVPPLPIRELRELTRYRKTQIDARAAEIQRLEKVLQDAGIKLTSVASKVLTQSGRAMVEALIAGERDPTRLAALAKGKLRPKIAELAEALAGHFGSHHAVAARRILDHLDFLDASITALTEQITVRTAPYARAIELLLPVPGLDRLTIEVVIAETGADMGRFPSPAQLASWTGLCPGNHESAGRRRRVGTPPGNQWLRRALIEAARAAARTKGSYFAAQYRQIARRRGPNKAAVAVAHSLLDVIWHLLSTGECFEDLGADFFDRRRDPERETRRLVHQLQQLGYSVTLTTAAS

SEQ ID NO: 452427 - protein, 386 aa, unidentified
MPQLNDLSRSLVTLEQDATLIAVIEMGQSSWLVAGIVPGVERQPLKKLAVDESALLKLLHRWREEAEQAGHKIKRIAVAFEAGRDGFWLARWLRARDIEVHVIHASSVAVSREHRRAKTDRLDTELLKRVFFGWLRGERHHCKMVAIPTIKDEDGKRPNRERESLVGEQSRIINRIKATLVRLGIRGFNPKLKKAAERLEGLRTPEGEPIPPNTLSELHRDMERRRLVRDQIRQIESARLDHLEHEPGEGAHAMVRLLARVMGIGIETADMLVQEVLSRNLRDRRAVARYAGLTGSPDESGKKRREKGLARSGNPRVRRGMIQLAWRFLMFQKDSALAQWFRARTENARGTRKTMIVALARKLLIALWRLVRDGVVPDGVILRPAQ

SEQ ID NO: 452428 - protein, 405 aa, unidentified
MQVIYERCCGIDVHKNMVMACIFVNGRKEIRKFGTFTDELESMIEWIREKACEVVAMESTGVYWKPVYNLLEEAEIKAIVVNAQHIKGVPGRKTDVKDAEWIADLVRHGLVKESYIPNREQRELRELTRYRQDMIEERAREINRIQKVLEGANIKLASVISDVTGKTGIAILKAIVNGTTDNEALSNLAQGSIKKKIPLLARALRGSIGEHQRQMLNHQIRHIEFLSDEIDRIDHEVVKKTESAADEIELLDTIPGIGRRSAERIIAEIGVDMGQFQSAAHLASWAGLVPECRESAGKRKSTKIRKGNKTLKTTLVECACSAIRDKTSFFYARYKKISSRRGGKRALVAIAHSMLLSIYAMIEKKEPFRDLGSDYFYIVDKDKILKRNLQSLKNLGFSVTLAESV

SEQ ID NO: 452429 - protein, 354 aa, unidentified
MKKYSAIGIDVSDKDMKVVGLNAEGETVWKHVVACRKSAVITVFGKIEPCVIALETGGHTGWLARALMEVGHEVVIANARKVRAISANERKSDWIDAEILARLVRTDRKLLHPVTLRSAQTQADMMVIKARDVVVRTRATMVNAARSLVKGRGERVGPCDTVSFAKRCRKEVAPETVALLEPLLATIESHTETVKGYDKMIHTIAGSERYAKAVEQISQVAGVGELTALNFVLTIEEPKRFSKARDAGSFLGMTPRRDQSGDVDKQLGITHAGNTMMRRLLVGSAHYIMGPFGPDCNLRRFGERLVTRGGKNAKKRAVVAVARKLSILLLKLWQSGQPYEPLHVRVAPTKKRAA

SEQ ID NO: 452430 - protein, 359 aa, unidentified
MIYAGCDAHKHYSVFALANDKGPIGRPVRVEHNRAIFRRFLEDLPERTTIAVETIGSWYWLIDAMKEAGHNPVLTDARKAKARMGQTNKTDKLDATGLTVLLRNGTLPGVWIPPQELRDQRELPRMRMSLVRMRTTLKNRILATLAKYAITIDEASDVFGKKGREELLKRIPELPPHTRFSVGTELKLLDQIEEEVDAVEGEIRTVVAETPAIRLLMSLPGVGMILGVVIALEVGDVERFASAERLASYAGTVPRVAASGGKIRYGKTRSDVNQYLKWAFHEAANVVASHQGRWSDRHVARLYGRLRERKGHGKAVVAVARHLAEATYWMLKKSVPYRDPQISSTSSTREETRGSHGEN

SEQ ID NO: 452431 - protein, 383 aa, unidentified
MHWVGFDVGKAFRWVCVLDEEGEVVLSRRVAAKEERIEEALSEVSGFGEPDERVVGIDILGGPATLLEAILLERGERVRYVSGTAVNKLGEAYAGGENKSDPRDAFVIADRLRFRWRSLPKVAARREHLAELRVLVGYRRDLVQEQVRRTTRLRAMLAEVFPGMESSLDWRKEGPLLAVTKVATPAAARRLGEARLARWLKARGALKAASLAERIVSAAKSQKREMPAAEVKAALVAEIASEVLRTRDRLRELDARLEALVETDPGGEVVRSLPGMGLVLTAEFLADRLAAAAGIVPVSRSSGSVSYQRRERRGNRILKRIFYRSAFSAISCHEPSQAYYRRKRSEGKTAQQAVIALARRRVNVLWAMLRDGVVYEDRATAAA

SEQ ID NO: 452432 - protein, 340 aa, unidentified
MQIIRFGIDLAKNVFQVHGVDATGRLVVQRQLRRAQVVKFFAAQPPALIGMEACGSAHHWARTLSALGHEVKLMPPPYVKPYVKRNKNDARDAQGCCEAVSRPDMRFVPIKTVEQQYARALHRARDLLVRQRTQLANAIRGHLYEMGLASAKGAAGIENLLRLIETRDESIPAALLICLAPLAGQWRALDGEIGKLDKQILAQVRRQQAALRLTTIPSVGPIIAHATIAAIGDGRQFASARDFAAWVGLTRKNHDTGGKHRLTGHISRAGDGSLRRLLILGASSWLRQVRAKPDRGSPWIRGLLARRPVKVAVVAQAAKTARIIWAMLNSGQEYRAPAAA

SEQ ID NO: 452433 - protein, 344 aa, unidentified
MDHFAGLDVSVKETSICIVDDAGKIVREVKVASEPEALLAVLKNLAYHFKRIGLEAGPLSQWLFSALAEAGLPVICVETRHMQAVLKAQINKTDRNDARGIAQMMRAGLYRPVHVKTIRSQKLRMLLTHRKLLQSKAIAIENDLRGTLRNFGLKVGVVGKVKFEARIRELVENLPDLAVLVEPMLIVRRTLREQIVILHRRLLAIVRDDEVCRRLMTTPGVGPVVALTYRATVDVPARFRKSKAVGAVFGLTCAKYQSGEVDRNGRISRCGDEMMRVMLYEAAQSMLRSKKWSWLKAWAMQIARRRGMKKAIVALARRLAVIMHRIWVDGTEFRWTREQATAAA

SEQ ID NO: 452434 - protein, 350 aa, unidentified
MDTNTSALASIGIDIGKEVFHIVGFGTNGKIAFRRKIKRLALVDTFKGLPSCVVGMEACLSAHFVSRALRQLGHQPRIIPSIYVKPFVKGQKNDYNDAEAIAEAALRPNLRTVREKTQDQLDLQALHRVRSRLVSRRTATINQIRAFLIEQGIAVRTGARALRNSLMAILENRQDEISPRMRGLIADLYEDWVGLDERIETIAGEIETIGEKEANCQRLMSVSGIGPLISTAVVAAIGTGEAFERGRDFGAWLGLVPRQYSTGGRSILGRISKRGSKYLRTLFIQAAKVILMRPHNWERFSFGAWLLNATPRLHRNKLATALANKLARIAWSILRNEKVFDVPRREAMAI

SEQ ID NO: 452435 - protein, 334 aa, unidentified
MEQITTVGIDLAKRVFALHGVDAAGRVVLRSTLRREQLLEVMAKLPPCVVGMEAGSGAHDWARQLQRLGHTPKLMAAKFVSPYRRKGKNDGNDAEAICEAVSRPGMRFVPVKSLEQQALLSLHRVRQGFIVERTATINRVRGLLAEFGVVLPVRAVVVRREACKAAESLPALGRRAIEDLLAHLRTLDERIAAYDRELEQQARQCEPARRLMKIRGIGALSALAIVATVGNARDFRSGRQFAAWLGLTPRQHSSGGKTRLGHITKRGDAYLRCLLVQGARSVLHTASRHADRMSRWAQTLESRRGYHRTLVAIASKNARIAWALLSRNEVLRPA

SEQ ID NO: 452436 - protein, 371 aa, unidentified
MKEFSKYVGMDVHKQTIAVSVADAQGGEVRYLGEIANTREAIAKLVKQLRKGDAQLSFCYEAGPCGYGIHRQLRDLGCACQVVAPSLIPKKAGDRVKTDRRDSMLLARLHRAGELTAVWVPDEAQEALRDLTRAREDMKHLQRQSKQRLSAFLLRHGQSHSGKSNWTQAHYRWLEGIKFNQPIQQIVFQEYVDTVKLLSRRVAALDKQIESAAAESVFWPVIEALMALRGVNLLTATTIVAEIGDLQRFTGAPQLMAYLGLVPSEHSSGGRTSRGGITKTGNGHVRRVLVEAAWTYRHPARKTACLQRRAERTPEAVQEIAWKAQKRLCARYRSMEGRGKLKVQACTAVARELAGFIWAIGQAVPAPAAQA

SEQ ID NO: 452437 - protein, 311 aa, unidentified
MNDTIGIDVSKDWLDAYSMARAEHRQFANDGRGLRALHRWIEISSAGLVVFEASGVYHRRLENSLSEGAVPYSKVNPRQARRFAEATGTLAKTDRVDAAILAKMGTILQLEPQAPKAEYLNILREMMTARRGLIKDRVTVRTRMQTTTQKLLKRQLKERLTQVEKHLDQIDKAILELVAQDAQLMAQFDILTSIPGISTVTAFSMLIEMPELGTMSGKQAACLAGLAPISRQSGKWQGKERIQGGRAFFRRAMYMPALCVIRHDLSAKRKYDQLVKAGKPPKVALTAIMRKLVVVANALLRDGRKWSEDYA

SEQ ID NO: 452438 - protein, 375 aa, unidentified
MKEHTIFVGFDVHKDSIEVVWADDGRDGEIRRYGAINNNLESLRKVVRKLVSTGVTPRFVYEAGPCGYEIYRYLTGNGFDCMVAAPSKIPRKSGDRIKNDRRDAESLARLHRSGELTAVYVPKPEDEAMRDLTRGREDAVKAVRVAKQVLLAFLLRHGKRYEGRTNWSKTHWRWLATVKMEHRAQQIVLQEYIHTVRETSDRVQRLTGQIQELVRSWHLAPLVTALQSLRGVSLIVAVTTVAELGDLTRFNSARELMAYLGLIPSEHSSGPTVRRGAITKTGNGRVRRVLTEAAHAYRLPAREGIRLKQQLREVPQEVRDISWKAQLRLCGRFRRLIQRGKNQKTVVTATARELAGFIWAIAWALADVPQQEKTW

SEQ ID NO: 452439 - protein, 356 aa, unidentified
MQTQVTKKIDFSGKDLFIGLDVHKKSWSVTIVIDGMEHRTFTQPPDPGALNNYLQRMFPGGSYNSAYEAGFCGYGIHRELKSLGINNIVINAADTPTSQKDKLHKRDPTDSRKIARELEKGSLQGINIFDRELEELRSLNRTRFYLMRDLRRSKNRIKSFLMYYGVPIPPEFDNNQWSLKFISWLKQVRMTTEAGQQAFSHLIESYEHYRQQLLILSRIVRLRISHYDKELYSLLTSISGIGPLTASALITEVGDINRFTHINHLASYVGLIPRVRESGETTYTGGITFRCNTFLRTLLIESSWQAIRMDPALMQYYHRHVINSKGHKVIIKVARKLLNRIKYVMKTRQPYVTGVA

SEQ ID NO: 452440 - protein, 527 aa, unidentified
MPYQVRRSRRTRRKPTTSSRNGRSLQKPNGVISPRVQKVGGEKFAIVCVDPAKHRSEWMMADYFGNLLIEHQTLEHQAACFKLAVAQIREAQQRHDIQDMIVVVERTGNYHLPAKRAFAKAGFETRVVHPFATKQYRMPANPGLKTDENDLNAQHRAAVAGFGLRELELESPYRELQLKARHRRNLVEKASTLVCQIREHLHLAMPGFAALFDNLLSQKPAIAIARRCDSPAKVLQFGQARLSGHLRKNKIRHQVRTVDKILAWAARAADENVQDGPLHHAIWTDLEELYQHFQRQIAALERDLAGDLVQTPYVRLMAIPGINVVSAAELAGEMGPITGYANANAITGRCGLYPSRSQSDQTDHDRGPIIRQANRRLRCVLMRIADNLACHCAYYRGQVDADEARGIDKRAARVKIAKRFSRLTLACVAGDEPMKHPCFRAPDSILEKLREFHHRHQTAVDRVLSDLETTVAQLPYNTCSHEAKIVAHVLKQQTERRRGVSAIGELLPAVLARLEIVTKDNKNGDRS

SEQ ID NO: 452441 - protein, 398 aa, unidentified
MSKVFVGIDVAKEHSTAQGIDSDEKKLFYLRFSMDSAGFAELRTAIKGCGVNLDDIVVAMESTGCYHINLFSFLCAEGLRCAVINPLLISKFVQGSLRKTKTDKKDTMTIAQFLLTNEKKLCLVTSSQDAQDLRDLARERESQSWMIVSLKNDLKRLLQSTFPEFETLCKNIYTETMLNFVRQYPSARLIRQAKRKDIDKALICPGEKRKRVQISADDLIDAAKRSVASAGTAKELIVSEKATTILYLQEKCEKITEALIEACQATRIEDLKIIKTLDGVKNILGSSFLAEMGELSNFKSYKSLIAYMGFDPSTNQSGKHVGPSKISKRGNRHMRRITHIMTLGSIKSDNIFREYYLRRIAEGLPKMKALMATSHKLIRVIFSMLTHRMPFKKEVAAV

SEQ ID NO: 452442 - protein, 356 aa, unidentified
MVQSNKKDFSGQNISIGIDVHLRTWSVTVLTPSGFMRTHTQKASAKELFEHLNKHYPNGSYHAAYETGFSGFSTYYALMELGIKCTVVHAADVPTTQKEKVSKSDPVDSKKLAKALMRGELGSVYIHSKDSLDDRALVRHRATIVKLSGGIKSRIKHLLYNNGVEYPEEYFRSNRHWTRSFITWLQNDVRLLSDTRVSLELLIAEVLHYRERLLDVNRRLRSLARSDRYAEKYGILMSVPGIGSTIAMSLLTEIDDIGRFSNQRQFASFLGLVPMMSSSGDKEYVGEKTFRGNKFLGPKIVEASWIAIRHDAELSAKFGALCTRGMKSQEAIIRIARKLSNIIFSVLKSNRRYECR

SEQ ID NO: 452443 - protein, 394 aa, unidentified
MSFFIGIDVSKEKFDACGIDELGGKIFSLVCSMDREGFEKLVLKLPMDKSSFLLGMESTASYHLPLFSYLTAQGYQVVIINPLLINHFAKRSLRKTKTDKKDAFTIAQFLYREKETFAPQTTDHRATELKDLARRREKLVDHVTSLKGNMKRILSVIFPELEHITGVFTKATLRLLTEYPSAHAIREAGHDAIAEIFINQSRGNRPRASVKTLIVAAASSVGVVSSAKELALKQEASLLMHIQEQIKETEGLLMNLLHQRMKHDIELLCSIKGIGENTALNFLIEMGGNVEMYENDKKLIAASGLDPSTYESGKYAGKSRISKRGNRHLRRVIWLMATRVIISNNLFRSYFYKRRSGGLPYKKAVLATAHKLIRIMFVMLTRKTYFVEGGIKYS

SEQ ID NO: 452444 - protein, 430 aa, unidentified
MSVDRSGGHEPLFAAFVGIDWADQKHVWSLQTADSQKRESGELEHAPEAVEVWVAQLCQRFAQGPIAVALEQSRGALVFMLSKYERLHLFPVPSTMAGNMREALYPSGAKDDPRDADLLLDLLLKHRDKLRRLSPDTEATRRVQNLVEERRKLVDEKTEQINRLTSHLKIYFPQMLDWFDRLDREAACALLERWPTLEELQKVPPVKVRAFLCKHHCRDQGVIERRIVGIRQAVPAIRDRAVIEAKSAVVQVIAQLIRILVQGIGKLDRKIEEETAAHPDFFIFDSLPGAGPALAPRLLSAFGSQRARYGSAQEVQAYSGIAPVIERSGKKKWVHFRWAAPKFLRQSFHEWAGRSIAQSQWARAYYEQQRQRGKGHHAAVRALAFKWIRVAFRCWKNRVAYDESMYLATLARRASLQSGSTTALSAAKTL

SEQ ID NO: 452445 - protein, 347 aa, unidentified
MNPTTIGLDIAKNVFQAHGVDQNGKVVVRKRLSRAKVLEFFANLPPCLIGMEACPGAHYWARELMKLGHAVKLMAAQYVKAYLKGNKNDGNDAEAICEAVGRPGMRFVAINTEAQQDTQMLHRIRTRLVSERTALINQVRGLLGEYGIVFAQGPSQVRRGLAVLLAEEDPRLSGLARELLADLNGQLRALDERIANYDARVKAACATDERSAKLAELPGIGPLTATALTAAVHDGKAFDNGRQMAASLGLTPREHSSGGKQRLMGITKRGNTYVRTLLIHGARTVLRHAEGKTDRLSRWALAVQARRGANVAAVALANKLARIAWAVLARERTYEPDWGQPAAATAN

SEQ ID NO: 452446 - protein, 338 aa, unidentified
MIGVDLAKHVFQLHGASMTGHVKFRKKLSRAQFHRFMAEQAPSVVVMEACGGAHFWARQMIKLGHDVKLISPRYVKPFLKRQKNDAADAEAIVDAAQRPEMRFVEIKTEAQQTRAVLFRNREQLVHQRTELTNALRAHLYEYGYIAPQGSPGIKQIHDILDQERDDLPKLVRDLCRDMLQQIAEKTARIQAMLVQLKELATETETAKRLQTMPGVGPITALAIEAFAPPMETFRSGRDFAAWLGLVPRQHSSGGKQRLGRASKAGQVDIRKLLIIGAMSRLSWLGRKSIGERTWLGRILVRKPRLLVAVALANKMARAIWAMLTKKENYRDPALAASA

SEQ ID NO: 452447 - protein, 346 aa, unidentified
MNSPILAIDLGKFNSVFCWYDPDNRAEAFRTVATTPDDLRRELLHQPVARVVFEACSQAGWVHDLCEELALPALVASTTGAAWQWKHVKRKTDRDDARKLARLAAVGEVQAVPVPPRAVRQWKSLIGLRKRLVAERVRGQNRIRGLLVSQGLPAPMGARAWTAVGLAGIGQLDRPLADCGPDELWRGELRLLLERLGALGEQAAAVEARLDAVAAGDARVALLLTAPGVGVRTAEVIAAYLPDAKRFRSADEVGAYAGLVPRQYQSGQTDRRGRITRRGPKLLRAALVECAWCSLRYNPWARETWLRLQANGLSKKKAVVALARKLLVRCWAILRTGQPWRASAAA

SEQ ID NO: 452448 - protein, 412 aa, unidentified
MRYYVGIDIAKGFHVACVVNQDDKVIKKSLKFNNDESGFDKLLLLLNSIDEVSTFTIGMEATGIFFENLYLYLSEKGFNVILLNPYQTNRFREMESMKKVKNDNIDALMIAALIKSGRYSKAYVSQDTYQSIKSLYRHKNSLLEEMKKHKRQISTLLAVVFPEMEQVIRDPFNVTGLALLEKYPTAKHYHHASVERILKTFRGIKGNNFNEQKAQKLLELAKSSIYQGNGVDERAYVIKSHIRVIKLLQEELKELENEMLKLFHQAPQLDSDEEQEVMDIIDNLRSIPGVSDKTIFALIGECGDLGRFKNNSHFIGYLGLYPTLEQSGNKLVYGPIAKRGAKLAKKALYQAAIAAIRHNEELHKLFKDKVSQGRAKKEAVVIVARKLAHIILAIYKNNVAYNPKRVFMASAS

SEQ ID NO: 452449 - protein, 355 aa, unidentified
MKQYIGCDSHARYSIFVSVDEKGGVGAPVRVEHGDRSLRDYLGTLDRGTPVAVEASGGWYWFMDELEQAGLDARLVNPLEAKRRMGGKHKTDKLDAKGLAILLRNGTLPEVWIPPAGLRDLRGLMRTRLATRSQTTVLKNRIHAALRRYGTLQGEPSDDLFGKKKRLLLSVAIGRLPEQTQRATRHEWEMLDLIEEHIKELEVPIRERIGRLGWVRLLKSMPGVGEILGATVYLEIGDINRFPAPEHLAGYAGLVPTVHASGGKSWSGPTSPQANHYLRWALVEAANAVLMHRHRYAGQHVIELYDRLKKHKCHGKAIVALARHLAEASWWILKKRQPYRPPHAQAAAMSASRNG

SEQ ID NO: 452450 - protein, 393 aa, unidentified
MRSWLSMLFVGIDIAKNKHDMAVIDSEGNVVLKHLTFKNDRPGFDKMHAKIMELIHDYETDIAFALEDTGHYGLNLQTFLRKYYLNIYTYNPLLIKKFSEAQTLRKTKTDKRDTLLIARKLLIDFAELNEPIAINPIMAELKFATRNRSRLTQVRSDAKTQYTRILDIMFPELTSITSKHNQSTLTLLKNFPSVELIANAQVSSLAKIKYLSADTALKIKEAALTSIGTSSVSLELELRLIIENIAHMDQQIQIVDHHIEALMVEINSPIVSVTGIGDRLGAVILAEIRDINNFSNPAQLQSFAGLDPSVYQSGESVLTGRMVKRGSPHLRWAILQAAKLATNYSPKLNEYLQKKLAEGKHYNCAITHVAKKLMRIIFYLLKNNQPFDEQLVG

SEQ ID NO: 452451 - protein, 438 aa, unidentified
MRKKHIYRSAAVEAFDQEALWRSLDPGQQVVVAIDVAKTKFIAAFGDRSCTWLRLVKWEHPRQVSDFLALLEVVKSRGHEVVVVLEPTGTYGDALRYQLGQRGIEVHRASTKHVHDAAELYDGVPSKHDAKDAAILLWLYSHGRTTKWLPIDEDRRKLRALVDERELFEVPLRRATGKLEALLARHFPELERVVDVSRRPSVWSLLQAWPSPKHIAAHAAEARALLARESRGKFADGVVEGIVQAATSSCGQPLEPGDERLLRRLLAEMRRCEDEISAIDGELAELTAAPEVAALRKVLGPVTLAVVLAYVGSPKQYPSATAFEKACGLNLREHSSGTHQGKLRITKRGPGIVRRYLHLATLRLIQREPLVRTWYERRGGYRAESKMKAVTAVTRKLTRALKHLAQGAAFDATKLFDARRLALAPSSTASAGGRAALP

SEQ ID NO: 452452 - protein, 323 aa, unidentified
MKKEIEFIGIDIAKHKYDVCMGKDNIKKQYPNTQEGFRELIKTLPLAEKCLVVMEPTGGYEKALIEALQARKYRIVLANAFKVRKYAQAMGYLAKNDPIDSEVIKHFGEDAYPKGKLDVMAMKTESFKQLEAWLNRSRQIKKSIKTEKQRLEKETNREVARQIEREIRHLEKTLAKTEEKIKQLSRENGLSEKAEKFKKIQGIGDITAQILVTQLPELGKVNNKKIAALVGVAPYCNDSGTYQGKYKIRGGRSEIRSVLYMGVLSAIKHNSVIKAFYDHLRKQGKLHNVAMVACMRKLLCILNAMVRNNTEWQENYAAPVSQN

SEQ ID NO: 452453 - protein, 488 aa, unidentified
MALVCAVVLSLLILEDVMPRRKPASPQPDPATAALLQTLNPHAAGIDIGATALWVCVPPSAVASPAAPSAPTLLPLHVRRFGAFTADLHAIAAWLRQCQVTTVAMESTGVYWIPLYDLLEHAGFQVLLVDPRQVQRAPNRPKTDVHDCQWIQRLHSLGLLTAAFRPEEPIRVWRAYQRHRATLIEEAGRHLQRSEKALEQMNVKLPEVVSDITGLTGMSIIRAIVRGERDPKALAQLRDHRCKESAETIARALQGTWQPEHLFALQQSLALYDYYHEQIRDCDRVIEAHLTGMALPEVPPLEPRRRVRRRKDNEVAFDARQRLHHVTGVDLTAIEGIEESTALVVLSEIGTDMNQWPSEKHCGSWLGLAPNPRKSGGKVKSSATRPGVHRAAQALRLAAKNLQRSKSALGAFFRRIAARRGLAKAITATAYKLARIIYALLKHGTAYVAQGLAAYETAYRERVVRQVKRKAAELGLVVVERDAVGQPS

SEQ ID NO: 452454 - protein, 345 aa, unidentified
MHYIGMDCHISNLDFAVVNDAGRLVKSASVDTSVANFMQFVREVTPPRIVYMEEGTLAAWALEVCVHFGEKLVITNPKENHWIGSSGQKNDPLDALKLAQLARGGYIKEIRHPVGDRRRFRELMDCYHDTVKSTTRIKNKIKSKFRQNGIHCTGMTVYSETYREEWRQKLPQDQTLLLIVEGLWNQLKESEQTEKNLLKAARNFAKHYPEIKLFEDIPGIGFISAATISAILETPHRFANKRKVWMYAGLGITIRSSGGKTYSEKLSKDYNRLLKYTLKQVAETAVQAKDNPFCQKYLAMTILRGIAPHRAKLTISRDLLATMWAMWKNGEKYNPEIRRSLVLNK

SEQ ID NO: 452455 - protein, 408 aa, unidentified
MNPLYVGIDVSSKSNVVYFMLADGSKHSNFSVANSHDGSTQLVKRILSTIESKSLDTVLIGLEATSVYGDNLVYFLREDASLASFNRKIYVLNPKQVKKFKDAYNDLPKNDYVDSYVIADCLRFGRINKEIYIGDYRYKALQNLTRARYFAVCNLTKEKQRFMNVLFKKYSTMTQEKVFSNTFSTTALAVYDEFESAEALAYMDLQELTAFIIEKGKNRFPDPDAVAKAIQKAARSSYRLPKTVNDSVNQVLSISITSIKALEAQIKEFDKAISSQMELLPNVLISIPGIGPVYSAGIMAEVGDINRFDNQAQLAKYAGLAWTQYQSGDFEAQNTRLIKSGNRFLKYYLCEAAFSLVRCDKEYKAFYHQKYKEVNRCQHKRALALTARKFVRLVFRLLKDNRLYRPAE

SEQ ID NO: 452456 - protein, 392 aa, unidentified
MSLECPVTVRLTSERSDCPARSSHGVARKRNGINHVSGMPAVANPSTTVIGAHMFMIGIDPHKGSHTAAAVDCNETVIDTLRVDADGHQRARLLAWAARFEPRTWAVEGATGMGALVAQQLVAAGEHVVDVPAKLSSRVRLLERGRIDKTDPNDARSAAIVGWRTPTLNIVCGLDEHRVVLRLLADRHHHLTASRTRTICRLHALLCLLIEGGSERLLTVDKGEQLLVNVHIDGVVTRERVAVGHQLLDEIRVLDATRKELRRRTSETVTASATTITEIYGIGSLTAAIIIGRVGDITRFPTSGHFARHNGTAPIEASSGPKKRHRLNPRGDRQLNHAIHMAAVTQVGHDTLGRTYYLRKQAEGKTRKEAMRALKRHISDAIYQRLVTDTRR

SEQ ID NO: 452457 - protein, 402 aa, unidentified
MNSVGIDISKGRSTVAVMRPFGEVVISPFEVCHTASELSELAKRLKSLDGETRVVMEATGNYHAPVAKLLHDAGLYVSVVNAKLVHGYGNNELRRVKTDRKDAVKLANYGLDRWLTLPRYIPEEDTRLLLKNCYRQYRQYSKVQTVLKNNLISLLDMVFPNANRLFSSPIRGDGSEKWVDFVAEFWHCRCVSEKSEKVFTSKYQRWCRKHGYNFSETKAHTIYTEASGHIDVMPKSETTKLLVEQAVSQLRATSAALAALKQEMQSLASQLPEYPIVMGMYGVGPTLGPQLMAEIGDVCRFYSKKALVAYAGLDAPPNDSGDVVGRHKSMSKIGASSLRRTLFLVMSVYLQTAPLDEPIYQFMDRKRAEGKPYRVYMMASANKFLRIYYATVKAYLEASGQL

SEQ ID NO: 452458 - protein, 357 aa, unidentified
MSVKETIMHQLVRIGMDTSKKVFQLHGVDAEERVALSRKLSRHQMIRFFEKLPPTVIGIEACGASHHWARTLGALGHEVRLMAPQLVKPYVRRSKNDAADAEALCEAMSRPTMRFVPVKTTEQQAALMLVGMRERLIGRRTQLANSIRGYAAEFGLTAPAGLSRVEPFLQQIASEETLPPLARDLFAQMAEEYEALMEHIRELDERLATWHRSQEVSCRLSGIPGIGPLGAALLLMKAPDPHLFRSGRDFAAWIGLTPRDHSSGGKVRHGGITRAGDSRLRSTLVVGATTVLRHVRQNKQSRLATPWLVSLLGRKKPKLAAVALANRMARIAWKLMTSGETYRKPVEAVAMAAAAAS

SEQ ID NO: 452459 - protein, 334 aa, unidentified
MDRQYIGIDLHKSFFQACVLTQTGERLWEGRFSRTPEGLTRFIARGVGPQQAIAVEASGPTWAFVDALAPTGAAVCVVDPRKTKLKAGFAAKTDRLDARRLADALRRESVVSIYIPPPAIRELREVCRGRQQVVRLRTRLAQMIRALLLRCDAGEPPGTRLYAAAALAWLAQVQLLPDAACSLRRLERLYRAVHADAQTADAEVKHRAAADPIACALASMTGIGPVLALTMRAEVGDIARFARGPALASYAGLVPRVERSADHVYHGRITREGSPWLRWALVEAALHAMKRTDATGRWARRLAVRKGIAKARVALARVLCDEVVAVWPRPDRSV

SEQ ID NO: 452460 - protein, 351 aa, unidentified
MIIIGVDYHPSDQYIALVDTETGEYGERQLNHREGEAEKFYRELAARGVSVRVGMEATGYSRWFERLLAELGMELWIGDAAEIKTKRVRKQKTDRNDAQLLLKLLLEDTFPKIWVPSPENRDLRQLLWHRHRMVQMRTRIMNQLQALAMNEGQRRKKKLWSEAGRAQMEKLPLAPWASRRRKDLLELLDRMTPTIEELTAVVDREARKRPEVLRLMTHPGVGPLTALAFVLVIGTPQRFQCGKQIGSYVGLIPEEDSSAGHQRLGHITKQGSSLLRFLLGEAAQAAARCDADWRRRYMHLAVRRQRSIAKVAMARRLAVRLYWMWRNGWEYAQWVKFSSHAGQLGTGQGAK

SEQ ID NO: 452461 - protein, 385 aa, unidentified
MTNQMLQTNDTNTASSLTICLLVAMEMSLKTWRLVMSPEGGTRKRVKTVEAGNFLELEKAVAEARERFKLPANTPLVFCYEAGRDGFYPYRRLSEAGHEVWVIDSASIEVSRRQRQAKSDGIDGEKLAELMQRKARGEPKALRIVRVPSLEVEDERLLPREREIILQDLGRLRNQIESILFTQGCRDIPKTASGLKRWVAERHDLTPQLRERLGREAARLALLEAQLHAVEKAMALKVKQEQSAGIAAVAQALMQLCGIGLIGAWVLSSEIFGWRHFRNRREVGAVLGLTPTPYSSGQDEREQGISKAGNRRARSMLVELSWLWLRYQPGSALTQWFKARFGGGGKRMRRIGIVALARRLAVALWRYADQGVVPEGATLKPAAKA

SEQ ID NO: 452462 - protein, 351 aa, unidentified
MERYLGADVHAASVTFSVLDASGKQVRRDVVETNGKALVGYLQQLAGNLYLCLEEGEWSQWLYEILSPHVTELVVYRGEWKPGLKSDAIDAHGLAEKLRTGRIERPVFKDARLFTALRDRARTYTMLTRDVARVKSRLKSFFRARGLPCTGEALFKPAERVKRAEALPVATREAVELVGRELKQLAALKAEAEASMLRESHRHRIARVLETAPGLGPVRVAQLLPIVVTPHRFRTKRQFWTYCGFAVVTRSSSDWVQEQGRWVKTRVAQTRGLNFNHNRMLKAIFKGAATTVIAHCGPNPLRQGYDRQLANGTRPNLAKLTVSRQIAAIVLAMWKRQEVYDPERGCELARR

SEQ ID NO: 452463 - protein, 345 aa, unidentified
MNYYAGLDVSLEETAICIVDETGAIVRELRAPSDPESLISAFNEVALPMVRIGLEACSQSAWLHQGMARSGLPVLCIETRQAKAAMGAMPNKTDRNDARGLAQIIRTGWYRQVHVKSAPSRMSRSLLVARRTVLCKVRDMENAVRAVLRESGLKVGAPGRKLFATRVRELAETDPSLADITEPLLAIIAAMHCQLERLTRRVLETVRVEPICRQLMSVPGVGPLTALAFRATVDRPERFRRSRDVGAHLGLTPRRYQSGETDVQGRVSRCGDELARTLLYEAAHTLLTRCKKWSALKAWGMGIAKRRGMAKARVAVARKLAVILHRMWSDQTEFSWGKVPAGQIA

SEQ ID NO: 452464 - protein, 352 aa, unidentified
MDVHSRSTVWCLLDASGEVVAEGKVETRPKDLTALVRELTAEEELVVGQEVGTMAYLVHDALVATGTKILSFNAAQLRMIASSRKKTDRRDAYWIGRALASGMYPQPVYIPTGEIRELRALLKRRRMVQSDRNRWQYRARACLRASGFTPRLGAHYLRKSMPSYLAEDSALEASRRPMLELCQRQEVALAAELRAVETELREKAREVDAIARLKTIPGVGDLVATTIYAWVGEIERFPDAKSLGAYAGLVPSVWQSAASYATGQITKQGSKALRSALVQSAHVLMNRCRGPEAAPLRAIGARIQTSRKRRKIAAVALARHLLRIAFYILRDGTTYAPERLRGTRPPQDQAAA

SEQ ID NO: 452465 - protein, 360 aa, unidentified
MFNTMTTAQKQNCLFVGIDVHKDTHTAVGISPYGEKLFEITVGNYKQDFDNLKEKVDECKGILSPYIGLEDVRGYGERLAGYLYEQYPVYHVPSILVDRLRQNATHPEKSDSLDALGVAKVMITSIDTLLPYTISEDSKKAKQLKEISIDREDLVLERTRLKNQVHTLLYRIYNTEYANKFKDPFSLKALKHWRNAKPKCDLFLLKTMKRKVRRLLDIHTEVSELERDMEQLLKDNYTIQTASGCGVVLASTIVGEIGDIQKFKSPASLAKYAGCAPRERSSGKKTRHVKSRSGNRRLNCAFHRMALSQISRMGNDRAKAYFKRKISEGKSKSQALVCLRRQMVNIIWMMMKHKTIYRNA

SEQ ID NO: 452466 - protein, 400 aa, unidentified
MISIDGVDVFLGLDVGKAAHHGHGLTPAGKTVFDKPLPNTEPKLRAVFDKLKAKFGTVLVVVDQPASIGALPLTVARDAGCQVAYLPGLAMRRIADLYPGEAKTDAKDAAVIADAARTMPHTLRTLDLTDEVTAELTMLVGFDQDLAGEANRTSNRIRGLLTQFHPSLERVLGPRLDHQAVTWLLERYGSPQALRKAGRRRLVEVVRPRAPRMAGRLVDDIFAALDEQTVVVPGTGTLDVIVPSLAKSLAAVHEQRRALEARIEALLEAHPLSEVLTSMPGIGVRTAAVLLTTVGDGSSFPSAAHLASYAGLAPATRQSGTSIHGEHAPRGGNRQLKRAMFLSAFAALHDPASRTYYDRCRARGKTHTQALLRLARHRISVLFAMLRDGTFYEPRSPRLA

SEQ ID NO: 452467 - protein, 404 aa, unidentified
MGDVLVGIDWAQAEHAVCVLDEWGRVRARWKVPHTAEGLTELCQRLKRLGPPATVRVAIERPSGLLVDTLVEAGVVVVPIHPNVLKAARPRYRAAGGKSDPGDAYMLADLLRTDGHRFHALRPLSDATRALRALVRTRDDLIATRVALANQLRAVLESFWAGAATIFADIDSPIALAFLARFPTPHSAARLGPKRLAAFLAKHAYSGRRAPVTLLARLTAAPAGCAGEQEADAKGEAVLALVRVLTPLVTQLAELTAAVEHAVATHTDGPCVMSFPRAGRVNAAQILAELGDDRRRFATEAQLAAEAGVAPVTHESGKQRGVTFRWACNKRLRQAVVCFADNSRHCSPWAADVYRRARARGCDHPHAVRILARAWLRVLWRCWQTRTLYDATRHTSAARLQPAA

SEQ ID NO: 452468 - protein, 419 aa, unidentified
MSKSNTSKQLAQVRPGTLHAGVDLALEKNVVVVINDQAQQLDQFSFSQDRSGYDYFLQRLEGLRQKHQASEVTVAMEPTNYFWKLLARELEQKKIPYHLVNSYTVKRHREGDQLDRSKDDRRDAKQIAELSRTGHYTQTRLQQGAYEDLRQYGRLYDQLNQSVRREKQVLWGLVGQVFPELSQVFKNLEGDTSQALLAACTPAALIHQMTIETFITKVRSVYTGKRLLISKLARLHRLSSGSIGVTEGLPAIQLAIQVHLKSLQTLQKELEQVTSAMTDSLVSLPEAPYLLSIKSLGLVSAATFLADVGDPKRYQAAAQWVKLAGIQPVPRTSGKKQRSPTPMSHQGRPRLRTMLYFTCLRMVQQDQHFAQLYAHLQKRKKNPLTKMQALGVLMNKLLHILWALIHNQSFYNPAFSQSA

SEQ ID NO: 452469 - protein, 427 aa, unidentified
MNQNTTATNFAATLGLDWADKKHDLWIQAGDGGKPEHRVIDQTPEALHEWVAQMRARFPLQPVAIAIETTRGAVISALGAYDFIVLFPINPAMLCSYRAAFCPSGAKDDRTDAMLLEEYLRLHMAKLRPLQPDTALTRKLAALVENRRGLVDDRTRLVNQWHSLLKTYYPLMEVLFENMTLPLAAHFLLKWPDLASVKKAGPAALRKFFYGHNSRSDKALAERLQAIAQAQPLTQDPALIEPAALKAQALAGMLQVLHQSIEQIEALIEQTTDAHPDAAIFRSFPSAGPAMTPRILVAFGTNRERFASAQEMQQFYGIAPVKKQSGQSKVIHMRQRCPKFARQTFHENAGHAVRTPGWAKTCYEQQRARKKGHHAAVRSVAFKLMRIYFRCWKDSKCYDANLYEKALQKHGSPLASLMKKEAPAKGK

SEQ ID NO: 452470 - protein, 399 aa, unidentified
MKTVCGLDIHKCIILMCILKNDGQKIIEEYSTLTKDIETMRTTMEQHGVVEVGMESTGVYWIPIWRILQGNFELKLINPYFIKQLPGRKTDVKDSEWIATVVQKELVRGSYVPGKRIQELRQYERRYVRLCEQSTRIEQEMDRQLHRCNIQITNYVSRIGSSSVIKVVKAIISGVTDAKELEKCVHGRVKNKHKENILASLKGVISKTDRFIFEQNIREYDLILAQQEECLNVMDEYCDQYFKNEMLLLCTIPGINALSAMIIIAELGVDLKTFVTAAALTGWAGLKPRNDESAKKIKSTKITKGNKYLRRILVQCAWGASRLKGCRFKSKFEQLCVRKSSKKALIAIARKLLVTIWHVLTKNEAYKEYVPKIDQKQKERKVAYYQKQLNELQSQLQNI

SEQ ID NO: 452471 - protein, 327 aa, unidentified
MVPAYLGIDIAKAKFNVCLLQANGKLKHKVFLNSSVGFQQLSTWLQQHQQPQVHACLEATGTYGEALALYLYEQGQCVSLINPAAIKAFAASCLSRTKTDRVDAELIARFCQAQQPPAWRPPAAEVRELQALVRRLEALIEMRVAEENRLAAGPAMPAVQTSLTQMLNHLKEQIARTEKLIRQHLDQHPDLRQQRDLLTSIPGIGETTAALLLAEVPHLKQYRSARQLAAFAGLVPRERQSGSSLKGRVRLSKIGNARLRKGLYFPAVTALRCSSFFQQWASGLRERGKCKMSVIGAVMRKLLHVAFGVLKSGCPFAPELDQRVSLS

SEQ ID NO: 452472 - protein, 362 aa, unidentified
MWIIGCDLHARQQTLAILDTATGEVVNETLAHEGDGVREFYSRLPSPVRVGIEATGSMKWFLNLMEELGIDCQVGHPATIRAAEPRRQKHDQRDAELLLKLLVENRFPSIWQPSKELLDLRALLLHRHQWVRLRTRIQNALQAIALANGLRRGSSLWSQRGQQAIRSLPLATHTAHRRSELQAMYERFEAEIEELNERVLEQANQRTTAGLLMTHPGVGPITALATDVFLGDPKRFRDGKALASYIGIIPRENSSGGRQRLGGLTKQGNPLLRFLWCEAAVHAVRRDPELRQFYRRKLVQKGLGKARVAAARKLGIRLWIMLRDQIDYQEFCRRGQKQQRSGDACAGMPGMRYGAKSHRLID

SEQ ID NO: 452473 - protein, 358 aa, unidentified
MSERTFVGLDVHARSTVACSIDAQTGEMTRARLTPELEDVWRWLQELPGPVAVAYEAGPTGFGLARFLSERQTRCVVAAPSKILRASGDRVKTDARDAQLLARLLLHGDLVPVTVPSRQAEAARDLVRAREDARSDLMRARHRLGKLLLRQGIVWSGGDAWTGKHDAWLRRQRFDDPARQVAFESDYEAVANIVARRDRLDAAIEAVAADSEFTAVVRRLGCLRGISTLTAFGLAVEIGDWHRFTGSSIGAFVGLTPSESSSGASRSLGSITKTGNTHARRLLVEAAWHHRRQNRAGKVMLDRWQHAPMPARLRGQEGNARLHARWRRFDERGKRPTIANVAIARELAGWCWSLAVMD

SEQ ID NO: 452474 - protein, 433 aa, unidentified
MPRKNDSSSTVSVVHPICCGLDVHKDTISACLIWSDTKGREQFKVAGFQTFTDDLIKLKNWLLEHQCPVVAMESTGHYWTPIHNILEHFFTILLVNPRHMKNVPGRKTDISDSRWIAGLLRHGLLKGGFIPPECQRQWRDLTRTRKSYVKSAGDFKRRIHKLLQSANLKIDSVISDLFGATGRNLLKLLVTSTSTPTRVEVEACLDKSVKDKASEFYRSMEGFFSNHHRILLRLLLETVERLEHQIDLLDERIREVMAEHESVIEKLDAMPGINAISAHAILSEIGTSLEAFPNPAALAAWAGLCPGNNQSAGKRHSGRSRVRKNHLKEIMIEVAWPAIKKRHSYYRAKYYALKSRLGWKKAIVAVAHRILTAVYHVVKYGVSFKDLGEAYLLNLNRKSKLRYLRKQASLLGFELTPLTCTNNSASAPILIQS

SEQ ID NO: 452475 - protein, 495 aa, unidentified
MNNCAAGENLAGGRPAPARSQSQSPHPKRVIGRLLAEPEALAPTSHRKRPQEGHYISSMDGRAKRRKSQKQQQKTMNDSKQWQQHRAFGALDWASEKHSVIVVDQTGKVIEDFEIEHSALGWKKFREKLQPYGSIPFAIETSQGVAVEQLLEAGMLVYPLNPKSAQAYRERKAPSGVKDDWLDAWSFADALRVDGQDWKALRPEEPLIKELRLLCRDEVSLIEQRTAFVNQLRHALAEYYPAALEAFEDWTSISAWMFLQRFPTPELLAHGGKRQWQKFLHSRRLWGSDQGPRRMEIFAHATEFAGTAPTVKAKSLLALSLVQMLFAIEKQLALYRQRIEELFARHPDHDLFGSLPGAGPKIGPRLLSEIGDDRQRFGGDPQNLQCLAGSAPVTKRSGKQRKYWHVHHRWACDKHLRHAIHLFAEQSLSRCVWAEIYYQHHRQKNQSHANALRRLAHRWLKIIYKMWIDRTPYNAELHHRNQLQHGSWIFQLQQS

SEQ ID NO: 452476 - protein, 413 aa, unidentified
MSVINVGIDWAEADHQVCILDTEGGVLEEFKIRDGAAGTGQLHERIANHVDEADQVVIGIETDRGLLVGALVAAGYQVYAVNPMSVDRYRDRHTTSGGKSDRGDAKVLADLVRTDRHNHRTVAADTELLAAIKVTARTHQNLIWTRTRHTNQLRSTLREFYPAALEAFDELAHRDALAILAIAPTPEQGRRLSTAKIRAALKRAGRQRNLDTRAEQIRDALRTEQLQAPPQLAAAFGDTVAALVPLLQTLQEQIARVETALTERFEQHPDAELILSLPGLGVVLGARVLAEFGDAPNRYTDAKARRNYAGTSPITKASGRKHVVVARFARNRRLADACDRWAGCALANEPGARAYHAAHNPDPETTRKHARRKLANKLVGLLHGVLEHRTPYNPDIAWRHWLTTTPADQQLAA

SEQ ID NO: 452477 - protein, 445 aa, unidentified
MPRGRRRPTRPVTMPILHPDAAGIDIGAPEISGCVPLDRDPEPIRRFGTFTADLLALAMWLRQCGVTTVAMEATGVYWIPLYQLLESRKFEVCLVNARHVKHVPGRKTDVQDCQWLQYLHSVGLLRASFRPPETVCAVRSLWRHRDTLVRLAASHTQHIQKALNQMNLQLHHVLSDITGITGLAILDALLAGERDPHVLAQHRDPRLKASRETLAKALVGDYRPEHLFTLRQSLASYRHYQRLIAECDAEVQALLGAFAAAAPPPLPPPPPALRFDLRAELTRVLGTDLTQVPGLHTATVHTLFAELGADLTKFPSGKHFASWLGLCPDNRISGGKVLSVKTRHVKHRVAHALRLAAQSLGRSRSALGGFFRRMRAKLGAPKAITATAHKLARILYHLLTTRQPYAKTRLAAAEAQHRQRTEARLRAQARALGFQLVPAIEQSVS

SEQ ID NO: 452478 - protein, 341 aa, unidentified
MQIHSIGIDLGKTTLHLVGLGAAGQVLLKKKFTQKQLLAYTANLQTSLIGLEACSGAHFLGRALRKQGHEVRLIAAQFVKPFVKSNKNDFIDAEAIAEAVERKNMRFVPIKTDDQLDLQAIHRVRDRLVSRRTAVINQIRAFLLERGLVFAKRPAQLKAAMGGVLENAEADLTPMMRNLINVLWEEWKIVDQQIEELGDELERISAADAGCTRIRKIPGIGPVVATAIVAAIGNGAAFRKGREFAAWLGVVPRQYSTGGKARLLGISKRGNVYLRKILIHGARAAVLRIKRDRAPIGAWLDRLDARAHKNIVIVAMANKIARIAWAVLSSGNEYRPAAVPA

SEQ ID NO: 452479 - protein, 328 aa, unidentified
MVAKVSDAIVGIDVSKETLDAYCAKGQRKQGRIFANSPDGWKLVRTWLKAMGSKQAHVCMEATGRHSLGVALALHDAGHVVSVVNPAQIRNFARTKLGRNKTDKVDAALIREYTELFKPEPWTPPSPAMRRLCELQTMRAGIVRSRAEWKNRIGSGLGDTTATKLAAATIDHFTTQLEAIDRAISETIDQDAELHARRDLLVSVIGVGDTLAALLMAKMPEPGVLRRSGEIVAYAGLNPSHHRSGTSIDRPTRISKIGNAELRSALYMPALSAMRFNPAVAALVARLKSAGRLKPRQIVVAAMRKLLVLCFGVLKTGKRFDPAIAMPA

SEQ ID NO: 452480 - protein, 370 aa, unidentified
MQRQADPAHDRPDAPEVRVTLGVDTHADVHVGVALDHLGRRLGTHTIPTTPAGYAELVAWAGAFGTLERIGLEGTGSYGAGLARWLRWLRERGFPVLEVERPNRQTRRRRGTSDPIDAEAAARAVLAGTATGQPKAGDGPVEMVRALQVARRSAVRARTQAANQLHALVVTAPARLREQLRPLSFRRLVATVAVFRPGASLATPTAATKLALRCLARRSQQLSAEIEALDTHLARLLASVAPALLAVKGVGTDTAAVLLATAGDNPDRLRSEAAFAHLCGVAPIPASSGKTTRHRLNRGGNRDANRALHLLAVRRLAWDPRTRAYAARRAAQGKTKPEILRCLKRSLARELYPLLTSPPAAALEAPPLAA

SEQ ID NO: 452481 - protein, 373 aa, unidentified
MFYVGIDQHSKQLTVDVGNEEGDLVLHRQVTTEPASLRRFLGELQQRSEAEGGYVSVVEVCGFNDYLIKLLREYGCREVVLVQPEGRSKRKTDRRDARQLRETLWLGRQQLREGKRLKGLRRVRIASARQAADRQLTALRKRLAQRRTQTVNKVHGLLKKHNLQHELPTKGLQTKTAFRWLGCVELPPVDRQEMNCLLAQWSLWEQQLAAVETRIAERQVQDEDALLLQTIPGFSQYSSLAVSSRLGPIADFPRPASLANYWGLTPGCRNSGETERLGSITKQGSSVVRFMLGQVLLHVLRKDAWMRGWYRRIKRRRGAKIARVAVMRRLATIIWSMLRYRTPYITGGPEQIRKLRELTRSLQQNQASRRSTG

SEQ ID NO: 452482 - protein, 316 aa, unidentified
MQTIRDLGADVDSRTFVVACAARSVAPQRVANERRAILAWLRTVPPGSRLGLEATGTHHELLADLAHRAGLQVFVLNARDVRRYAQGLGRRGKTDRVDAEVIARYVAHEHSELHAYLPPSKEQRALSRLIKRRAKLVAIKGALTQSLRGVPGLRQELRQVSARLERLIAQVEALMQCALQQLPAAHQAAQRIATVPGYGPLGSTCLGYTFTRVPYPNSDAVIAHTGFDPRPADSGQKRGRRRLSKRGPGELRRVLFNCAMAAAKTTLWRPYYQAQRRKGLSSTAALVILARKMTRVAFAVYQRDQPFDATRLRFNA

SEQ ID NO: 452483 - protein, 365 aa, unidentified
MDKVSKTKQCGSSDLDEQHKGVTIGVDLGDRKSHVCVLDPNGEIVNEQIISTSPTSFGEHFRKVPPAVVALEVGMHSRWASRVISDCGHEVIVANAGKVKFIFSNDGKNDRVDARSLARLARVDRKLLFPIRHRSEEAQAALSVLRARDALVRARTRLINCVRGLVKPTGVRLRASYAEAFPARVMDQIPEGLRTAVALVLEQIQSLSDTITVYDQYAEHLIATRYQRARLLQQVQGVGPLTALAFILTLDDPWRFAKSRHVGCYLGLRPRQDQSGDSNPQLGISKGGDEFLRRLLVNSAHYILGPYGSDSDLRKWGLRIAERGGRRGKKRAVAAVARKLAVLLHRLWITGEVYDPLYNSRTEAA

SEQ ID NO: 452484 - protein, 342 aa, unidentified
MRIIGCDLHAAQQTIAMLNCDTGERIERTLKHEGSVVRDFYASLAPPVVVGIEATGSMGWFRRLMEELGITCHVGHPAKIRAIETRRQKHDRRDAALLLELLTDDRFPTIWMPSAELADVRALLLHRDQWVRMRTRVKNALQGLALAHGLRRRASLWSRHGQAALAALPLARYAADRRAELQALHDHLTAHINELDQQVGAQAAERPQARRLMTHPGVGPVTALATEVFLGDPDRFVDAKALASYVGLIPSEYSSGGRQRLGHLTKQGNPLLRFLWCEAAVHAIRRDAALGRFYKRKLQQKGLGKARVAVARKLGIRLWILLRDQIDYDEFCRRALSPATVR

SEQ ID NO: 452485 - protein, 464 aa, unidentified
MRMKKEKLPGTAEKPRRKKVDWKALEIVHPHAAGIDIGGREHWVAISPERDEDPVRRFDCFTADLEQMAKWLVEKGVRSVAMQSTGVYWMPVYEVLEQSGLEVYLVNARHTKNLPGRKSDIQECQWLLKLHTFGLLNNSFQPRDEIRVARTLWRHRSNLVAQASSAIQRMQKALTEMNVQIHNVLSDLSGVSGMAILKAILRGERDPWSLAAIANPAVKASPADIAKSLHGNWREELLLVLRQEMELYQTYQDKIAECDHQLRRHLQSLAPKVDLQAQPLGPRPKGKKIPRGNAPKFDLRSELYRITGVDWAQVNGMDVQVAQTVITEVGVDLSCFPSEHHFTSWLGLCPMNEQSGSRILNRRTPKVVNRATVAFRLAAQGLLRSQSYLGAQYRRLRTRLGAPKAITAMARKLACLFYRLLRHGQPYVDKGAQYYETRYREQQIRSLVKRARKLGLELVQPEAA

SEQ ID NO: 452486 - protein, 433 aa, unidentified
MQDAPEEPLFADRVAGADIAKATVEVTIRMPSESHPGRRQQETRGFPTTRAGLDSLADWLGCWQVSKVGMEATGNYWKPVFFLLESRGFACELYNAGQVKALPGRPKTDRADSIWLAKIAERGMIRSSFVPPEPIRRLRTHTRYRRALTQARTAEKQRVEKLLEDGHLKLSSVISDIHGVSGRDMLDAVAAGCRDPKALAELARGTMRAKISRLREALDCSFFTADHAAVLGLMLATIDHLTGQIEQLTARIETLIAPYLRQVEQLDAMPGIAQIGAQDVIAELGVDMSVFPTAGHLVSWAHWSPRIRESAGKRKGANATGRGNPFLGAALGEAAMSAGRTQSFYGARYRRLARRMPKKKALVAVGNSMLTTIHALLADPTASYQDLGPDYYERRMHVARQARNHVLSLQRLGFQVSITPADPDTGELLATPA

SEQ ID NO: 452487 - protein, 470 aa, unidentified
MRIIGIDLALTSAHKAVVMDDRGKFLTPVFAVATLPEAMAGLLQQAREGVEASCPLVVVMEPTGLAWLPVTVYMLLHGVTVYLVNSQQVADLRRFYKKHAKSDRIDARVLAKLYVVAPEKLHALRLPAASGYALQRACKQLDWVVTEITKLTNQIIALDRMAWLSDWEDLGLGDLLSPAARWCREHYYNPAAVVHAGVERIRQDWRASNLAELEESETWILALVERAGKVVEVYGDPCPYVDFDALQAEVVMKQKWLGQLEADRNHLRKDVVFPLYHQLHPSGNLETLYGVGEESAAVFLSFFGDPSRFPTGRQMRGWSGMVPNSKQSADSESKGLHISQAGPDLIKKFAYLDAEVARRYDPQLSAIYYDQMVKKGKHHTQAVCAVATHLLDRVWVVLVEDRPYDLRDVDGTPLTPERARKIIAERYTVPDEVRKRNNRRTRRARTENRAERRFTRQERNRESSPELVRG

SEQ ID NO: 452488 - protein, 444 aa, unidentified
MAKRKVKDGKAEAESAVVFEDDEVFYERCAGIDVHSGLFTVCLRIGRKSDVREFGTTTGEIRRITAWLKDTGCQMTAMESTGSYWKPLYNIFEQEGIPAIVCNAYHIKNVPGRKTDVADARWIARCLREGLLNPSFIPDREQRELRDMTRFLKAQTEERARNVNRLQKFLEGANIKLSEHVSDIEGMSATELLELVIGKPDFTLDDVRTRMRKNMKSTPEQLFAALEGYITSTQRKFFQHVMHIIREQTKQIEETRALIDSILSENYKSAIGVLDEITGIGAASALTIVAETGTDMGHFRNQHAFSKWAGVAPGNNESAGKAKKAKTTPGNKTLKSALVQSAKAAVKNKSSFFSAQYHRLVSHRGKNRATMAVAHSIAIAIYFVLSGQEFKDLGSDYYNQFNREKKINSHIRQLSKLGVDLPAEFIRQVVEKPPDILTTCTGVA

SEQ ID NO: 452489 - protein, 346 aa, unidentified
MTIVDPARAVTGGVDTHLELNVAAAIDHIGGLLGVAEFPTTSSGHKELLAWLKTFGPLAKVGIEGTSSYGAGLARSLRRAGIEVAEVDRPNRQSRRRSGKSDPADAVEAARAALSGRAQGAGKAKDGNVEAIRALVVAKRSARDTKIKTMNQIRHLGFTAPDELRERLAGVSRKDLAATAAALRPRDGGDQVAFATKTALCLLGRRVLALDAEKEHLEDLLSKLVEKTAPELLSLYGVGVDTAAALLVTAGDNPERLRSEAAWAHLCGAAPIEASSGKVTRWRLDRGGDRQANAALYVIVITRMSADKRTRAYVERRLAEGKTKPDIIRILKRYVAREVYHHLPRA

SEQ ID NO: 452490 - protein, 343 aa, unidentified
MKLHVLGIDLGKTVFHLVGLDSTGRAVIRKRCSRRQLLAFTANLEVQLIGMEACSGAHFLGRTLREQGHEVRMMPAQYVKPYVQTNKSDYLDAEAIAEAVQRPRMRFVPIKTEEQLDLQALHRVRERWVMRRTAVVNQIRSLLLERGLTLPKGRGHLDEQLPRILEDAELNLSGSFRVLLAQLQLELKQLAARIEEMDRVIQKIAKENEACQRLTEIPGVGPVTATALISAVGNGSTFQKGRNLAAWMGIVPGEYSTGGKQKLLGISKRGNKYLRRLFVQGARSVLQQRHKQAPRLSSWLAQLLGRTHQNVVVVALANKLVRMAWAVLCKNERYRTPVLAMSV

SEQ ID NO: 452491 - protein, 482 aa, unidentified
MAERKKSTFQRLQDGRLNRKQRKELAQRLAKDDPGLEIVHRDAAGIDIGNASHFVAVPADRDAEPVREFGSWTGALLRMAEWLKKCEIRTVVMQSTGVYWIAAHDVLEQAGFEVWLVNARGTKNLPGRKSDVQECQWLRKLHTYGRLRNSFRPPEQIRAVRTVWRLRDRIVSDAGRTVQQMQKALTKMNVHLANAINDVSGVTGLRIIRAIVSGQRDPRQLAKLRDLRVRASEEEIVCSLEGHWQSDVLFELEQALETFDFHQKQLAACDAQLQRYMAALPDREGVPAAEPVAEPKEPAGKRRKAKSKRKAKNYPSFDLAVELQRKTGVDLTTIDGINVLTAQTIFAELGADLSAFPSEAHFCSWLTLSPKRDVSGGKVIKHVSSPMQNRVALALRMAAQSLFNSNSYLGAKSRQLRARLGGLKAIKAMARYLACLVYRLLTKGQAWVDRGAAHFEEQRKCRDMAALKRRAAAMGLRLVPNA

SEQ ID NO: 452492 - protein, 412 aa, unidentified
MDTLYPHCAGLDVHKKNVVAAVRHLSEGGRVRQEIRTFATTTAELLALADWLRAEGVTHAALESTGVYWKPVFHILEATCTLVLVNAQHLKQVPGRKTDVKDCQWIAQLLQHGLLQASFVPPAPIRELRDLTRHRSQLMGEKTRAANRLQKVLEDANLKLASVASNVLGQSGRAILRALIGGVTDPAKLADLAKGLLRRKLPQLEEALHGRLTAHHRFLLKMLLGQVEYLEDLVQQLEQRVEEVIAPFREQVQLLQTIPGIGWTVAVVLLAELGADLKAFPSARHLASWAGMCPGNNRSAGRQRSGRTGKGSRWLRAALIQAAWAAARKKDTYLAVQFRRLAARRGRKRAAVAVANSLLHILYAVLKRGKAYEDLGADWFDRQNEKRLTRHLVQRLESLGHKVSLEPVLRAS

SEQ ID NO: 452493 - protein, 341 aa, unidentified
MDEYDGRQYVGIDLHRRRSVIVRMTPDGERIGPVVRIASDPVEFAAQVGSWGEAPEVVLEATYGWYWAADVLADAGATVHLAHPLGVKGFAYRRVKNDERDAADLADLLRMGRLPEAWIAPPQVRALRESVRHRAKLVALRSGLKAQVHAVLARQGVTLAPSDMFGAAGRRQLDELRLDPPFQARVLSLLRLIDAYTFEIDQVGKRISAELKHHAGFWAVQALPGVGPVLGAVFVAEIGDVTRFTRPQQLCSWAGMTPRHRESDTKVHRGRITKQGNNLVRWAAVEAVQRVHHGPLAATKARLAARRGNNIAKVAAARELLTLVFYGLRDGHIRCLATRLA

SEQ ID NO: 452494 - protein, 340 aa, unidentified
MGKFTEKKYFVGVDISKDQLDLALLIRGQNDQFFNLAVGNNFKGFDSIPDWLKKNKVKPEDCLFCMEHTGTYGLLLFAWLSQVGIDYCVEPGLRIKRSSGVTRGKNDSVDARRIADYACTRKAKLEPFCLPTGLILQIKQLLTYRDQLVRMCTSLKNSLQSHQEYQRVSGLKSISEDIKVQISDIENREYRIEKQIVELIRSDKSLFKNYKLATSVKGVAFVIATYMLVTTNNFTSFENSRKYACYSGIAPFEHTSGTSIKVKSRVSNLANKKIKALLSNGANSACRCDPELRNYYNRKIAEGKDHKLVMNSISYKLVNRVFAVIKRQTPYVSTYQQNFS

SEQ ID NO: 452495 - protein, 368 aa, unidentified
MSKLRFVGLDVHKDTIVIAVAEEGQSEAVVLGTFPHDVAKVVKQLIKRETDVSRLRVCYEAGPTGFGLSRRLKQAGIDCVVVAPSLVPQQAGARVKTDRRDAVRLAHFLRSGDLTAVWVPDEQTEALRDLERSRDDAKNAERVARHQLDKFLLRNERVFREGRSWTLRHAAWLQQQTFADPCKQCVLDDYVQAVEDATERVKRLSKEIERFVEQTALAPLVQALKSFRGISTLSAVGIAAEIGDLRRFKTARQFMAFVGLVVSEHSSGKSIQRGALTRTGNTHVRRILVEAAQHYRHRPTLSAALRKRQAGVSKEVTDMAWKAQQRLCKRLTYLLEKNKPRNKAIAAVARELAGFVWAVGQVKQLLDH

SEQ ID NO: 452496 - protein, 411 aa, unidentified
MLWGKRRDSCKIVASINLQLTELLMQKPHDNSKASPAAFMQDNTLIAVIELGLSNWLVAGLIPGVSREPLKKLEPNPEDLLKLLHGWRDEAIKAGRPITRIAVAYETGRDSFWLARWLRERGIDAHVIHATSVAVSREHRRAKTDRLDTAMLKRGFLGWLRGERGHCTVAIVPTMEEEDAKRPHREREGLVHEQTRVVNRMKSALIQFGVRNFNPKLRKARVKLETVRTPEGKSLPPNTIAALRRDMERLKIIKEQIKAIEQTRLQQFEQKPEALANRMVYLLVRIYGLGWETADLLVHELLSRTLRDRKAVARYAGLTGSPDESGSKRREKGLSRSGNARVRKIMIQLAWRMVKFQPDSALVQWFKQRTENAKGSRKPMIVALARKLILALWRYANDGVIPEGFRLHSAA

SEQ ID NO: 452497 - protein, 391 aa, unidentified
MIYVGIDVAKDKHDCFITNSDGEVLFKSFTIANNREGFETLFQRIQSVSDDLTKVKVGLEATGHYSYNLLGFLLDKGLTTFVINPLHTNLYRKSLSLRKTKTDKVDSHTIASMIMSDVNLKSYSDTSYHNEELKSLTRYRFDKVKERAKLKSSVSRLVCILFPELEKLVPQLHIASVYALLSEFPSAHAVASAHLTRLTHLLSESSKGRYGKDMAIIFREAARNSIGSNMPAKSLELKHTIKLIRELTSEIDEIEIEIKSIMDEINSPILTIPGISYRMGAMIIAEIGDFNRFNSADKILAYAGMSPSTYQSGQLDNCYSHMEKRGSRYLRYALYNATKYVCHWDPTFAEYLAKKRAEGKHYNVAISHAVKKLVRVIYAMEKSGQVYNKAS

SEQ ID NO: 452498 - protein, 409 aa, unidentified
MKLFVGIDVSSEKLDVCFLDSSDTTLKEVTLPNNLNGASSIKESVLTFHHSFNYEKIVIGMESTSIYSFHPATFLSEDTDLNSLGCVEVVVQNPKSIHRYKGLFEEDKTDRIDAFRIADFLRIERFNKTVLKEERYIALQRLTRSRYQLVHQLTECKQHFLENLYYKCNTLSKELDTSVFGATMLDLLSDSLSLDEIAQMELEDLALLLQEKGRGRFSDPQKIAKMIKKAIRDSYRLAQVVQESVDMVLATYARLIQTLKKQIKDLEKSIVALFEVVSEVQCLKSIPGIGIVYAAGIVAEIGQIERFENEAQLAKYCGLYWKKNQSGNFESERTPMTRTGNQYLRYYMVEAANSIRRHEESYRLYYQKKYDEVPKFKHKRALVLTARKFVRLVDTLLRNRQLYTPERSV

SEQ ID NO: 452499 - protein, 428 aa, unidentified
MADLQKSTPAYNLVAIDIARYSNAVLVETGAGKRHRFRMANTAADFERLLNFLRGLPGVCRVALEPTGDYHRPIAHRLLTEGFEVVGISSVAQARYREAMFNSWDKNDPKDAAVILEMLRRGAVQRYVDPMIAGHHDLQELAKTYYQVSRARTKVQHSLINHCLPLYFPEMHRYWATTRNEWFVRFLLQFPTPAHVRSLTRERFVEAAWEAVGRKVDKRAKLEEMWEMAGNTAALPHAPDSLAVETFRITLRRYQELNALRAELEDRADQALAADADFAHLKTLPGIGSVLAMTILAEGGNLRRFGHHRQFLKYCGFDLAKSQSGTQRGKERLSKRGNSRLRLAFWLAAVAAVHMKENSFRAKYERYIRAAPDDADLRRKALTAVAAKMARVAYSMIKNNQPYRQFFEQSLPSGSIPLSAAVGALATP

SEQ ID NO: 452500 - protein, 354 aa, unidentified
MSGKFEGKIAVIGIDIGKNVFHAVGMDERGAIVLRQKLSRGQVISRLANVPPCLIGMEACVGAHHLSRKLRGLGHDARLMPAKYVRPYSKGQKNDFRDAEAIAEAVQRPTMKFVATKSADQLDLQALHRVRERLVSQRTGIINQIRAFLLERGIAVRQGQRYLRSELPLILAAPCEVLSPRMVHAIEDLASDWRRLDERIESLSEEIETLARADRNCERLMSVPGIGPIISSAVVSAIGAGDAFGKGRDFAAWLGLVPKQISTGDRTILGSISKCGNRYLRSLFVQAAWVVLVRPKSWERHGLKPWIEAARRRLHQNVLAVALANKLARIAWSVLAHGKNFEARRNNEIAAQSA

SEQ ID NO: 452501 - protein, 383 aa, unidentified
MQPIDTVNPTILLAIELSAATWLVAARVPGAEKPHLHRIDGGDTAALLALISSLRARVARRLDAPQIGVVCCFEAGRDGFWLHRLLTAHGVASHVLEPTSILVNRRARRAKTDRLDAEGMLRVLAAYLRGDHQACSMVRVPTPDEEDAKRTHREREKLVQERLRIENRIEALLFTQGIRKRPSLRSWERDLAVLRTGDGREIPRHLRAELDRLRRRLVMTLELIREVEAERDQAAKTKPQDQACRKIAALCRIRGIGENFAAVLTREVFYRSFDNRRQIASYVGITPMPYQSGGMDRDRRISRAGNPRARTTMIQLAWLWLRYQPGSELAEWFRERVGTLAGRTRRIAIVAMARKLLIALWRYAETGVVPAGAEIRAETTVAA

SEQ ID NO: 452502 - protein, 422 aa, unidentified
MLSVGVDWAEDFHLVALGTPNEGVVDVLRVEHQPEAVARLLTRIASLEPDPAEVRVVIETRHGLLVEAFLDAGFTVLPVNPDLVARRRGPARKKDDAEDARIACLLGLDRYAKLKQLIPHGELASELRSIARDDERATQDQRRLLNRLRMDLLSTFPAALRIARDDLGAPTVLRLLERWPTQEHLAAATRDELVEFARAGRHGWPERFADQVATALAGSHFLARPALVRAKTDSIRLAARQLLLIADQRKSWERRMGELLLGGPRRGRQRQPRSDELGGKVPGGEVYLSFPGLGDRLAARVAGEIGDHLEQFETPNSLQCYAGRAPVTRRSGKSELVVAHRLACNRHLANAVQQWAFCSISQSSWAREFYDAQRARGKGHHAALRALGNRWLEVLWHCLRRGVRYDEAVHVANRNRALGKAA

SEQ ID NO: 452503 - protein, 342 aa, unidentified
MKQYVGLDVSQKETSVCVVDDAGRTVYEGRVKSDPGALTELLRKRAPHAERIGFETGAMASWLWHELRRVELPVVCIDARHAHAALSVRVNKSDRNDAKGLAELVRVGWYREVKVKSEESQRVRAILVARSRLVSIRRDIENQVRSIIKEYGFLFRRAIGLQFRNQVIELLGEDHHLRAVIDPLLSIHEQVCRQQDKFDDEVRHLAKSDETTRRLMTVPGVGVVTALTFRHTIDEPSRFRSASAVGAYLGLTPRRNQSGEADTNGRISRWGDRLLRTYLFEAATVLLYRTKKWSTLKAWGMKLARRIGMKKAKVAIARKIAVILHCIWVDGTSFEWGQSKAA

SEQ ID NO: 452504 - protein, 482 aa, unidentified
MKKNNIYHNQSQQLLSLFEQAANNAKVMCVPIDYAKKDHVVMFCNGYGDILRKPFSVKNSPEGVDYLTDQVMRSCRQRAISQKHVFFGGEQVGSFADNFVSTLRSLGWLVAGVNAHEAKTQRENVQASTDRLDLMGIAKSLLNRRANCSPAQSGIYLNMRTVVRHRRKLVRITTEVKNRIHAVVDRLFPGFLNESKSGITPFSNSSLWLMKERFSAPQIRRRRRSTLIESLRRLGTKKSECTADTLQQYAAQVLKPPQDYVHMLQLSLAQHVKHFCCLQESIGQLEKEIALNLAQTQGAFLTSVRGVGIVLAAGVSAEIGNPFEQKTINHLVSYCGIIPRVKQTGGPQGETRTGKVAKRCNRILKDYAVQSASHLGLHGPADLMSDYKRRDAAGQHADFGMARRYLRMAMCLMRTSQIYLPSRLRKAQAQVKQRADYYLMTWPYLRDKWKNLGTLETAFKADHPLGQWRTIVQQFYGIKLTL

SEQ ID NO: 452505 - protein, 386 aa, unidentified
MSKPNDLSRSLTAFEQDSTLIVVIEMSQASWLVAGIVPGVDREPLKKVEPNGDALLRLLQRWRDEATKAGRMLKRIAVAYEAGRDGFWLARWLRERGVEAYVIHPTSVAVSREHRRAKTDRLDTALLKRVFLGWLRGEPKHCSMVAIPTLAEEDAKRPNREHESLVGERTRLVNRIKSGLVRLGIRTFKPMLRRAPEHLDALRTPEGAPVPVNTLAELRRDLARLHLIRAQIKVIEAARLERLQQGPEQGPHAMVRLLARVIGIGVETADMLVQEVLSRNLRDRRAVARYAGLTGAPDESGAKRREKGLAKAGNARVRRGMIQLAWRFLMFQSESALAQWFRSRTAQAPKTRKTMIVALARKLLIALWRLVRTGAVPEGLALRPAI

SEQ ID NO: 452506 - protein, 303 aa, unidentified
MLAMGDSALRNEADAMTFVGCDLHTRMQQVAVLHTDTGEVSEHQLGHEGSAVEDFYAALPRPVTIGIESTGYAVWFHILMQRLGHTLLVGDAAKIRAMVVRKTKTDRRDALPMLDLLSHDRFPAIRVPDPITRDLRALLMHRMRLGRIRTMVKNGLHAIALNYRLGRGSTLLRQAGLTELQALALPRYSAQRRDQSLELLTGLNAQIRELDTAIATAALAPPDAPRPITHPGVGALTALAAVVVLGPVDRFPDSKHVVSYVGLAPAVNASADKHHLGHITKQGSTLLRFAPWAGRGACRPPGC

SEQ ID NO: 452507 - protein, 315 aa, unidentified
MTIQSKSKTRVNVGVDVGKSQLDIYLYEKGLYFQVANDPAGVRKLLARLSRYKVERLVMEATGRYQLLLAEQAFEKSLPVCIVKPLAVRRYASAIGQLAKTDRIDAEVIAEFGARTQPRISIRKTRNLIAIKDLLSRRRQVMEMRTKELNRLQIMGKNLEASCRRIIRVLDQEVARLEKKLGDYVEKEGNWAEKKALLKTAPGVGDTMVYTLLADLPELGSLTNKQAAALVGVAPVNRDSGKMRGKRRIKGGRYGVRTTLYMATLSATLCNPVIRDFYQRLVTQGKHKKVALVACMRKFIVMLNAMVRDNCEWQY

SEQ ID NO: 452508 - protein, 406 aa, unidentified
MTLDQEPGQVCERVYGGVDTHEDTVHVAVISGDGRDLADREFPTSPAGYRRALAFIASYGEPIAVGIEGTSSYGAGITRAAIQDGIAVCEVVRPERAERRRLGKSDPIDAYQAARAAISNHRIAPAKDASIDGIRALHNARRSAMKARTAAMRQIHQQLVTAPAPIREKYRQLGGDKRVQVLAGLQVRSAPAPLQRAVLLALKSLARRCVDLQREHHRLGIELDQLVTAANPGLRAVYGVGPDTAAQLLLTAGGNPARLRTDAAFAALCGASPIQASSGKVTRHRLSRGGDRAANNALYRIAVVRMAGDQRTKDYVARQRQTGFSSKEIQRKLKRAIAREIFRNLTTPVTVPAIDDLRPLRQHKNITLTTAANQLGVWPATISEIERGVRRDDTLTETYRNWLTAA

SEQ ID NO: 452509 - protein, 429 aa, unidentified
MQNESTPGARGPVFCGVDTHADSHWLCVLDWRGRRVLSRRFPADAAGYEALAGAIAAAGEPACVAMEGTSSYGAGLTRHLASLGMPVREALSPARMQRRRPGQGKCDESDAERAARAAMSGSKLGTPKSQDGWVDGVRCMLAARSGAVKARTSAINTARSLLTTAPEGLRSRFRGMGGPRLMEELPSVRAEGALGAALGALADLWAAARDAALDMERAIEASLEENCPALLAMYGCGPVSAAKLAVAAGDNPGRLRSEASFAAICGACPIPASSGKTVRHRLNRGGDRQANSALHEIARQRVMRDPETAEYAEKARGRGKSDREVMRCLKRYVAREAYRALMRPHEIRRPEDASELVAARRAAKVSQVRAASILGTSEKYISMLERGQRELKPIRRAYEAWVEAGLPLDWDRRAFEAERKMDSKKHLAK

SEQ ID NO: 452510 - protein, 409 aa, unidentified
MRYYLGVDWADQEHAVWTLDEGGRKISARTVAHTATGLSEWGRELDEWRAQGIELWAAIERPEGRVVDFLLDHGVGVYPLNPKALDRARDRFRQSGAKSDPFDARVAAEFLRTDHGHLTALQPSSAAAQELKYLTEDCQRLIRQQTRLLNQLTATLKAYYPRALEVAELSTALARAFLTAYPTPDALSRLTERQWQRWARAQHLSASRTAELWSTLLAPQLPVPAHVVRAKARLMQTLLAALDPVLAGVAGYRQTIDDFFAGMPAAPTARTLPVGERGLLVPTLWARLGDAPDRWRSFRHLQAQAGTVPVTERSGKQRSIHFRYACDKTLRYVVDHLAFRSLQRSDWARAYYDQQRTRGHGHRQALRALGAKWLKIIFVMWRDGVAYREEHHLANIARQQLRCSARKTA

SEQ ID NO: 452511 - protein, 337 aa, unidentified
MKISRVALDLAKNVIQVHAVDRSGAAVVRKALKRAQLLPFMRDLAPCEVGMEACASAHDWGRKLQAMGHTVHLLPAQYVKPFVIGQKNDANDAAAICAAMTHSGIPRVTVKTVAQQDMQALHRIRSMKMKQRTAIINQTRGLLAEYGIVIAKSPATLRKAIPELLEDADNGLSFDFRQLLSELYDDLVAIDKRVAELTQRIERTVRTSDEGKRLLEIPGIGPLTASALVATVGDARQFKNGRQMAAFLGLVPRQHSSGGKAKLLGIHKRGDSYLRGLLVHGARSVLRTATHKPDERSRWLMNLAARRHRNIATVAQANKNVRIAWAILTREQRYRSN

SEQ ID NO: 452512 - protein, 357 aa, unidentified
MKKGYQKDKTLARGRDVYIGIDVHKENWHVAARVNGEEVFHGSMASEYHSLRKLLDRFKECRIKVAYEAGPFGFWLHDRLSGDAIETIVVPPSLIPMESGNRVKTDKRDSRKLARLLEGNMLKKVYVLDEGDRADRELTRTRRQLLEHRGDVMRQIKSKLLFYGIKSPFSQKRENWSKRYVKWLRDLTFDHAVLKAPFESLIDLYEYLTSQVKKISKQVVALSRSDKYRHKITLLRSVPGIGILIGMELLVELADMERFKTTEEIASHMGLTPSEYSSGQHVRQGRITRCGNKRARTCLVESSWHLIVKDPLMRFKYMKLKTRKGAKKAIIAIARNLIIRIRRILLQDEPYVVGMAA

SEQ ID NO: 452513 - protein, 412 aa, unidentified
MRRIRNRVAGLDVHRDTVVACCQVAHPNQSVEVTKQTFSTTAKGLGELAAWLRDAGVETVAMEATGVYWKPVYYALEGLFDDLWLCNPQHVKNVPGRKTDLADAEWLADVAAHGMVRPSFVPPPEIRELRELTRYRKTQVQARAKEIQRLEKVLQDAGIKLTSVASAVWSMSSREMIEAMINGERDPKVLAAMARSRMRAKIPELEEAFSGHFGAHHATVARQVIEHIDFLDRSIATLSVGITERVCPFEAAFTILCSIPGVSGRTAEVMIAEMGVDMTRFPTPGQLCAWAGVAPASHESAGKRRPAGTRQGSTSLQIALVEAAKAASRSKGTYYSAQYSRLAKRRGPNKATVAVAHSILDTTWHLLTNGTLYTDPGAGFFESRHDPRIEAKRLQRKIEALGFEVNITPTAA

SEQ ID NO: 452514 - protein, 367 aa, unidentified
MKEQENKRNKITIGLDLGDRRHRFCVLGESGQVVEEGSVANNRVALSELSSRYPGALVVMEAGCHSPWVSRHLEQAGCEVVVSNPRKTRAIYQHERKSDRRDALMLARIARMEPALLYPVRHGSEEAQQELLRIKLRDSLVRARVALINSLRFTLKSLGYSIANPSTERFHKVIQSALPQSVAQVIAPSVQALEELTLRIKLLEREISDQARSKYPDTAWLEQIPGVGPITALYFVLKIEDPARFKRARDVGAFLGLCPRRDQSGENDPQLRISKRGDAYLRRLLVSSAQYILGPFAPPSALRQYGLALASGATARAKKRAVVAVARKLAVLLLTLWKNKSSYEAFPQRSSREKMRTNDLERLRCIA

SEQ ID NO: 452515 - protein, 386 aa, unidentified
MGTSATSRIEQDTLPQPTLSLAFELGQNTWQLGFTIGMAQPPRERTIPAGDVARLQQEITRAKQRFGLPEDARVVSCYEAGRDGFWLHRSLVAHDIQNHVIDSASIEVNRRQRRAKTDRLDVRKLLTMLLRHMAGERKVWSVVRVPSVEEEDRRQLHRELTTAKQDRTRVINRIKGLLAGHGVQLALQGDVDAQLDHVQQWDGSPLPSALRTRLKRAWQQVGFLTAHIQTLEAERRALLRRREDPVFAQVRQLFTLRGIGVNSAWLYVMAFFAWRDFQTPKQVGALAGLTPTPYQSGQSRRELGIAKAGNRHIRTMAIEIAWAWRRFQPDSALSQWYERRFGAGSARRRKLGIVALARKLLIALWRFVKTGVLPEGAVLKTEVLGR

SEQ ID NO: 452516 - protein, 331 aa, unidentified
MKNKEIIGIDVSKNVLDIYIMSLDFHFIVKNNPTGFARLLETCCIKLSCKKDKLYFYFENTGRYSMLLSVFFQDNTIEFTVINPLDLKRSMGLNRGKSDKKDAKTIALYGCRKRNELEPTKLNSTEVSQLRQLISLRDKYIKHRTAYKNSLCDLQDCFIEGETQFIRLSQEKLIQLMNQEIEAIENQIDQIIESLPEWKHNYNLIKTVQGIGDILAKYIIIYTENFTRFNNAKKFACFSGIAPFEYSSGSSVKGRTRVHPFANKHLKSLLNLAAMGSIRYQNEYKTYYDRRTAEGKNKMSTLNIIRNKLVARVFAVVKRGTPFVNLSKFAA

SEQ ID NO: 452517 - protein, 338 aa, unidentified
MMKSVGIDLHKKSISVCVVDQQRKVLARARFRCDAPEQIEAFFRKLGPIQAVVEATSSYEWLFALLEPLAARLVLAHPKKLRIIAESSRKSDRVDAQVLAEFLALDMIPEAHRPTPRQREHRGLVRQRRFVQKQIGAVRSKIRWIVCRYNADRPDLFTPAGQTYLAKLRLSKADRFVVKQLLAEWQLYLVQLEELDAELRRFAKKAPAAEKAARAILESIPYVGPVTIDAVISEVGDVQRLRSLKRAASFAGLAPGQRESAGKRKEQGISKAGSGVLRWALGQAAWRMVARVPRWKRVFEPLAKRRGKKKAIVAIARRLWCLMVSMLKSGRRYNAALG

SEQ ID NO: 452518 - protein, 362 aa, unidentified
MNKHIFVGIDLGDKNSVARIGVDLEKSERFGFVNTNAGRARLILEVKRRSEQAGGAVVVMAYEASSCGFVLRDQAQAAGIDCKVLAPTKMEKSVEQKRNKNDDRDADDVLEKLRGHVLAGNRLPIVWVPELETRDDREVLRTRLALSERQTQVKTQIQMLLKRHGLEKPSDLGSTRSKQYRHWLESLSQWESLGWGTRQSLASLLRQLSGIEAEMENLEKLIRQLGSQPRHKPIVEALMKEKGVGLLAALVYRTEIGQARRFHRGRHVGKFVGLTPTSHESGQQNDRKGHISRQGPPRLRKVLCQASWVHVRHDPQSREAYQRLVAKNPKKKKIALVAVMRRLAVRLWHRMREAESLQQTTS

SEQ ID NO: 452519 - protein, 406 aa, unidentified
MDAILERVAGLDVHQETVVACVLFGPLDRRAKKETKTFGTTVNELLELQDWLAKHKITDVAMESTGVFWKPVWNILEGEFTLILANAQRIKNVPGRKTDISDAAWIAKLLRAGLIESSFVPPVEFRDLRDLTRYRRKLIGHATSEKNRIHKILQDANIKLSTYVSDLFGVSGRLLLNALLNGEVLEIGEVKALVKTSLKKKAPQIVEALNGRMRTHHQKIIQMHYDHLEYIEERVKELETEISQLVTTHNEEMDLLITIPGIQKDAAASVLAEIGIDMCKFPTEKHLASWGGFSPGNNESAGKKKGSKSSKGNKGLKTVLCQVAWAAVKKKDSRLSSFYYRLVKRRGPYKANMALAHLLLRIIYQVLKERTPYKELGWDYLPTKERKKEYFIKKLKNMGYDEEYGL

SEQ ID NO: 452520 - protein, 460 aa, unidentified
MKQKRSKPKIYHKMPMVYPNAAAIDVGATMHMAAVRADRTSEPVRSFGTFTTDLHQLVDWFAECGVETVVMESTSVYWIPIFELLDARGFIVLLVNARDAKHVPGRKTDVSDAQWLQRLHSYGLLRASFRPKDQIAELRAYVRQRERLLEYAASHIQHMQKALIEMNLQLHHVVADIAGATGLRIIRAILAGEHDPKVLACLRDYRCHASAETIEKALTGSYRAEHLFALEQALALYDAYHEKVSACDARIEAVLKALIVHRGHGHGSAPRASRRRNRSDQANALAFDVREALFALLGKDITQIDGLGSYLSLKLIAECGDDLSAWGSAKHFTSWLGLAPNNKISGGKVLSSRTRRCGSRAAALLRLSAVTVGRTDTALGAFYRRLSARIGKAKAVTATARKIAVLFYNAVRHGMEYVDPGASFYETRYRSRVIDNLHRRAKSFGFVLRPIEPTPEDAVS

SEQ ID NO: 452521 - protein, 402 aa, unidentified
MNAVGIDISKGKSMVAIMRPFGEIVSAPFEIKHTASDINSLVELINSVEGESRIVMEHTGRYYEVLAHQLSEANLFVSAINPKLIKDFDNDSLRKVKSDKADAVKIARYALDKWQNLKQYSVMDELRNQLKTMNRQFGFYMKHKTAMKNNLIGILDQTYPGVNTYFDSPARSDGSQKWVDFASTYWHVDCVRKMSLNAFIDHYQNWCKRKKYNFSQSKAEEIYGKAKELVPVLSKDAITKLIIKQAVDQLNSASTTVESLRTLMNETASKLPEYPVVMAMKGVGTSLGPQLMAEIGDVSRFTHKSAITAFAGVDPGVNESGTYEQKSVPTSKRGSADLRKTLFQVMDVLIKTHPQDDPVYQFLDKKRAQGKPYYVYMTAGANKFLRIYYGRVKEYLASLPES

SEQ ID NO: 452522 - protein, 457 aa, unidentified
MNRKRTKSKVDRTMPMVHPNAAAIDVGATIHMAAVSADRTPEPVRSFGTFTTDLHRLVNWFKECGVETVVMESTSVYWIPIFELLDARGFTVFLVNARDAKHVPGRKTDVSDAQWLQRLHSYGLLRASFRPKGQIAELRAYVRQRERLLEYAASHIQHMQKALTEMNLQLHHVVADITGTTGLRIIRAILAGERDPKALAHLRDYRCHASAETIEKALTGSYRAEHLFALEQALALFDAYHEKVSACDVRIEAVLKELSICRGRGSGSLPSSRRRTDQTNAMAFDVRAALFALLGKDVTQINGLGPYLSLKLIAECGDDLSAWPSAKHFTSWLCLAPSNKISGGKVLSSRTRRSGSRASALLRLAAVTVGRTDTALGAFYRRLSARIGKAKAVTATARKIAVLFYNAVRHGMEYVDPGASFYETRYRKRMVDNLHRRAKAFGFVLHPAEPTPSVAVS

SEQ ID NO: 452523 - protein, 319 aa, unidentified
MKTNIIGIDVSQNTIDCCLLIQNEPYYHQYKNNPDGFFELLALYNNFKVSHIGFEATGNYHKKLEKYLYDNGVSPYILDPLKVFNYAKSLNIYGKTDKTDSYAISMFIQKNDLKDYLTYPLRDFFKPILTSITQLDKQIRQSKNLIHSIDLYPETSDLLTDVRDVSKYLTITKDRLEKNAIKLLYSKCPEAKKIKNEISGVGDKLMLYLVPYIYDNFDKFTLKQINAFFGLNPIDYQSGTSVHKKSKISKRGEPHIKKLLYMSAVSAVRNNEILKEKYTRLKDSGKPSKVALVSVMSHILRAIIIKLSIETKRGLKNAK

SEQ ID NO: 452524 - protein, 417 aa, unidentified
MSEFAALVAIDWADKKHAVCIFDPASGQREQTIIKHTPAALQEWALSLRSRFPAGPIAVCLEQSRGPLIYALLKYDFLVLFPINPKTLAKYREAFSPAQGKDDPSDADYLLDLLQHHRDRLSPWRPDDEKTRTLRLLVEQRRRLVNDATRITNRLTILLKSYFPQVLDWFSDLRRLIVCDFLDRWPNLEALQRAHQATVNKFLRAHHSVYRQTNERRLAEIKTAVPLTNDAAVLNASQLILKGLTAQLRTTILALAELDRHIEALCLTHQDYELFAALPGSGKVYAARLTAALGSDRSRWQTADDLLRFSGVAPVIERSGKQHWIRWRYFCPKFFRQSFVEYAEQSIQHSFWARAYYSMQRDKGKKHNAAVRALAFKWIRIIWKCWQTRTPYNEVIYLESLRKTGSPLLMFAAEHHT

SEQ ID NO: 452525 - protein, 340 aa, unidentified
MIIGCDFHPRFQQIAYVDKETGECGERRLSHPEEAEQFYRSLAGREVRIGAEATGNFRWFQQLMHELGHEFLLGDASAIRAACPRKQKTDKRDARHILNMLVEDRFPAVWQPPVENEEMRQLLLHRCRMVRFRARIKNQLDSIAKNEGLLSKRVWCPMRRQQIEALPLSGWNVERRKDLLALLDELDKRIEPLDEAVLQAAEESPEARLLMTHPGVGPVVSLVYVLTIGDWRRFPRGKQVGSYLGLIPIEESSSDKRRLGHISKQGNTLLRWLLVEAAIKAQRYDASWHRQYLRLSMNKHHGVAKVAIAHKLAVRLYWMLRSGQNYEQVMERGSHAGQSV

SEQ ID NO: 452526 - protein, 346 aa, unidentified
MVVLGVDLHKRSHTVVVIDETGHKLAEKTVAATDDGHLELRRWAAARWPGRTWGLEDCRHLSRRLEADLVRAGERVIRVPPKLTAGARRSAREPGKSDPIDALAVGRAVLREPDLPVASLDGPEREVRLLIDHREDLVGERTRHEQRLRWFLVEMALAEPAPRSLGRIHVQAVLGTALAGRTEPAARFARDLLARIVELTTAIRGLDREIDALIGALAPTLLALPGCGPLSAAKIVGETAGISRFRSKEAFARHNGSAPIPVWSGNLVRHRLNRGGNRQLNAALHRIAITQMRIDDRGRGYLDHRRAAGDTKTEAIRALRRRISDEVFRRLHADEAARSRALMAAA

SEQ ID NO: 452527 - protein, 351 aa, unidentified
MSHKTAATVAHTIGIDTDKNTLHLIGLDDQGAIVLREKIARGRIAARLANVPRCLIGIEAGMATHYVARELGALGHDVKQVPPAYSKPFRQGHKNDFRDAHAIAEAVQRPSTRCVPVKTDDQLDLQALHRVRSRLVGQRTAVINQIRGFLLEHGIAVRQGLRFLRQQLPDILAKRSDVLSPRMIRIMEDLSGDWRRLDERIEHITKEIEVLAGTDVNCGQLMTVPGIGPIVASATVAAIGNGAAFARGRDFAAWLGLVPKQMSTGDRTILGRITKRGNRYLRMLFVQGARAILLRPKSWVKHSFGPWLTTAVRRLHRNILTIALANKLARIALSVLIQGRSYETRIVPAAA

SEQ ID NO: 452528 - protein, 349 aa, unidentified
MKKAYLAIDAHARHCVLGSMNSQGKFLGDVRFPTSEADLITQIVKIKAKEKVLAIEEGPLTYWMAQMLAPYVADVFVCDPRKNKAISMAATKNDQKDVHTLCRLLRLGELSRVYHPQEDHRAIFKSAVQQYIAFRKDECCLKFQIKAQFRGWGVHDVEGQTLFNPKHRMEYLSKVEQPAIRRQLDRRYQLLDEALKQQRMSLRDAEELGRRYEEIEHFRAMPGIGKIGSLVFDAYIQTPHRFASKQQVWRYCQLGITDRSSDNKPLGFKRLDKSGNSELKSMSYNAWKGSLITKELNAVSGFFMASMDRTNSRVKARLNTQRKILTVLWTMWKNEEEYHPELIFPGMLR

SEQ ID NO: 452529 - protein, 362 aa, unidentified
MRIIGCDLHVRQQTLAMLDTITGEVVELTLKHEGDNVREFYSSLPRPVRVGIEATGSMQWFVNLMEELGIECLVGHPATIRAAESRKQKHDRRDAELILKLLVEGRFPAIWLPPKELQDLRSLLRHRHQWVRIRTRIQNALQSIALANGLRRGPALWSQDGQNRIASLPLAPHTAYRRSELQAMYEKFEAEIEKLNQRVEEQASQRPRARLLMSHPGVGPVTALATEVFLGDPARFADSKALASYVGMIPREYSSGGRQRLGGLSKQGNPLLRFLWGEAGAHAARKDPELQRFYRRKLVQKGLGKASVAVARKLGIRLWIMLRDQIEYNEFCRRGQKQQKSSDACAGMPETPYGAKSHRPVD

SEQ ID NO: 452530 - protein, 339 aa, unidentified
MNEVTLIGIDLGKHSFHLHAQDATGRMVFRKKLSRQQLLRTLANVPSCRVVMEACAGSHWLARQLAGMGHEPRLISPQLVRPFVAGNKNDFGDAQAICEAACRPSMRFVSPRNEAQQTVSAMHRLRERLVRERTATVNQIHGFLLEFGISLPRGAALMSRLPTVLDHETLPARLVALVVRLRAHVQYLEEQLRQVEQDLKASLREDDKSCRLLEIPGIGPITASALAVELGDARQFANARQFAASIGLVPRQYSTGGKPTLLGISKRGDRNLRRLLVQCARAVMQHTDSRTDALSLWVKTLSTRRHSNVVACALANKLARIAWAVLARGTHYEARALTT

SEQ ID NO: 452531 - protein, 392 aa, unidentified
MRPVREICTLGAMWRGLETNLRLASEALPTETGSKQIGRACGASLQPSTLPSISVAVRDAAGKLVTESIIETKATTILEFIRGIRGSLWITFEEGTSAAWLYDLLKPHATKVIVCNPRKNALLNAGNKNDRVDARKLSDLLRAGLLTPVYHGENGMRTLRELGRSYITVTKDLTRVMNRVKALYRSWAIPCAGEKVYSPRRRHAWLERLTEAGVRRRAEQLYQQLDALRRIRREVRTELLAESQKHPAHQLLRQIPQLGPIRVALLIGLIQTPHRFRTKRQLWAYCGLALQTRASGEYRFSGGELQASKKLPALRGLNVNHNHDLKNLFKGAAMHVGTSTDPLGDFYRNLLAKGMKPSMARLTLARKIAAIVLAVWKKGARFDPGELKQQTA

SEQ ID NO: 452532 - protein, 321 aa, unidentified
MQETRLCIGVDVSKAELIISFNDALRARNVANDAASITAWLREVPQGSFMAMESTGRYHGLLAQLAYQAGMRVYVLNARDVHFYAKALGTRAKTDSVDARLIARYLVQHHEQLHAWQPANRLQQRLHDLLTRRAQLAAQRSAVRQVVSGVDASDIDVSGLYQAFDSLLKAMDARVQELIASDEQLAAGCRRLCTITGIGPQTSALLATLLSRLTFVNADALVAYCGLDPRPNDSGTRHGRRRLSKRGPALLRRQVYLAGFSASRSHALKPLYLALRAKGFASTPAFIILGRKLLRAAFAVWRGTQSFDPTRLFPQNSLQKP

SEQ ID NO: 452533 - protein, 342 aa, unidentified
MQITTIGLDIAKNVFQVHGIDAVENVVVRKQLRRGQVLAFFKAVPPCLVGMEACATAHYWARELTKLGHRVRLMPAKDVKAYVKRNKNDAADAEAICEAVRRPTMRFVGVKSAEQQGRLMQHRTRDLLMRQRTQVINVLRAHLAELGITAAQGVEGLKELLTIIASDEDERLPADAQASLIVLAAELQAVQTLIGSIEKRITVQHRGNEASKRLETIPGIGIVGATAITATVTDPKAFRSGRDFAAWIGLVPRQDSTGGKQKLGHISKQGDRYLRRILVVGAIAVLQRARQQPKKYPWLTQLLARKPFKVVAVALANKMARIAWALLAKGGTYRAPKLAAAA

SEQ ID NO: 452534 - protein, 345 aa, unidentified
MELHTIGIDLGKTVFHLVGLNRCGEVVVRKKFSRTQLLRFTANVHVELIGMEACGGAHFLGRALREQGHEVRLIPAQYVKPYVKTNKSDYIDAEAIAEAVARPTMRFVPIKTDDQLDLQSLHRVRERWVMRRTAVINQIRGLLLERGITLRKGRRYVDAALPLILEDADANLSGALRMLLAQLKRELDQLAMQIDEADALIEKTAQENEACRRLVAIPGIGPVTATALIAAIGNGGAFHKGREFAAWMGVVPREYSTGGQQKLLGISKRGNSYLRRLFVQGARAVMQQRTKQSSGLSAWLAQLTARTHRNVAAVALANKLARIAWAVLAKNEHYRPPVLANVAAA

SEQ ID NO: 452535 - protein, 334 aa, unidentified
MQNITLIGIDLGKHSFHIHCQDKSGKALLRKKFTRTKLMQFLATCPPSVVVMEACAGAHFMARRISDFGHETKLISPQFVRPFVKSNKNDFVDAEAICEAASRPSMRFVQPRTEPLQAMRALHRVRESLIRDKVKTTNQIHGFLLEFGINLPTGDAVIKRLSLVLAEHEIPEYLSRLLVRLHTHYLYLVEQIAELESELSQSINADDTAQRIMTIPGVGPITASLLSSQPSDGKQFSCSRDFAASTGLVPRQYSTGGKSTLLGISKRGDKNLRRLLVQCARSFMMRLERQHGKLAEWVREQLNKKHSNVVACALANKLARIAWVITTQQKEYQA

SEQ ID NO: 452536 - protein, 327 aa, unidentified
MIYLGIDISKARLDCTLLDPATDKRKTKAASNDPKGFEALSAWLDKQGFAPGDVHGVMEATGVYHEQAALWLTDAGMRVSVVNPAQVRDFARGLAMRTKTDGTDSVALARYGALIQPQPWEAPPPEIRELKALITRLEALETDARRELNRREKALVAQAPALVRESLDNHLAALKQEIARLQQAIDDHVNRHPGLKADRERLLSIPAVGDKTANRMLAVLHSRKFRSADQVAAFLGLVPVEHQSGSSIQKRPRLAKNGDARTRAVLYMAAIVAAQYNPHVKALYTRLCAKGKTKMAALGAAMRKLVHLCFGVVKHQTVYQPNWLPGS

SEQ ID NO: 452537 - protein, 375 aa, unidentified
MSDHSEAYVAFDSSKLRNAVAIASEGRDGEVRFIGEIENSAVATAKLVRKLAGKYARLTFCYEAGPTGYGMYRQIKKLGHACMVVAPSLIPKKAGDRVKTNRRDALSLAKLLRAGELTAVWVPDERHEAMRELTRARGAAVEDLRRKRQHISAFLLRHGLHYAGKTSWSKAHGRWLCELKFAHVEERITFEEMLLAARQAAERIARLEEAIRHAVPQWSLREVVTALMALRGMDLVAATAFLAEIGDLSRFQSAPEVMAYLGLVPSEDSTGDTIRRGPITKAGNRRARRILVECAWSYQHPPRVGKDKQAKVAAAPPAVRTIAWKAQCRLCARFRRLTGKGKLKTVAVTAVARELAGFIWAISREVATVEQPSVG

SEQ ID NO: 452538 - protein, 292 aa, unidentified
MPNSSAGIAQLQTWLKNRKAERVHVCLEATGGWSEEVAIALNEAGHIVSLVNPARIKAFAQSEMLRTKTDRIDAALIARFCRLHEPQPWTPPAPEIRILQGLVRREHSLIEMRVAEENRRDAPLVAPPVMASITAMLKQIDREMERVEREIEQLFKDYPTLRRQRELLISIPGIAETTAARILGEMPNITEFRDVKAVAAYAGLSPRHYQSGSIEYRSRLAKTGNAHLRRALFFPAITAIRHNPPIRDFAERLRARGKNKMTVVAAAMRKLLTLAYGVLKSGRPFDPAYGIA

SEQ ID NO: 452539 - protein, 349 aa, unidentified
MTNQTQFFVGIDVSDRTSVLVVLNADGEKVRQKQISNRARSLQTEFSNRAPMRIALEVGAQSMWMARTLRGFGHEVYVANPRELRLISGSTQKSDANDALLLARLIRVDPELLRPIRHRSEDAQQQLLLVRARRALLDARTQLVNAARGLVKPFGIRIPKCTTRTFEDRAFETLPDELRARLVPLLESIGDLCTSIAEYDKKLEGLAEGIEAVRRMRTIPGVGALTAFTFYYSIDDPHRFRRARDVGPYLGLTPRRSQSGERDPKLGITKAGDPYLRALLGQCAHRLLGPLTNTACALKDFGLRKGTEGEGSRMRALVAVTRKIAVLMLTLWRDEKEFVAYPKGELMAA

SEQ ID NO: 452540 - protein, 348 aa, unidentified
MDKITAVGLDLAKQIIQVHAIDATGRVVLRKVVRRERLLALLAQFPRCVVGMEACSGAHHWARELTQLGHDTRIMAAEFVRPFRKSMAAKNDANDAEAVCTAMLQPSMRFVTRKSVEQQALLCLHRVRQGLIEERTASINRLRGLLAEFGQVASQSAPALQRMLSVLLAADTRLPALVHRCAQDLREHVRAVEGRIAALDREIAQHAQSSESARRIAAVCGVGPNTASAVVATVGNARDYRNGRQFAAWLGLVPKQYSSAGKTKLGRITKRGDAYLRTLLIQGARSALQAALRRAPAKRDRLSAWIVQLAQRIGYHKTLVAIANKHARIIWALLARDAAFDRAYAGTH

SEQ ID NO: 452541 - protein, 486 aa, unidentified
MAKRKMSTFERLNAGKMNRSERRELGRRVAASDPGLTVVHADAGGIDVGNESHFVAVPPDRDGSPVREFGCWTESLNQMAEWLRSCRVDTVAMQATGVYWIALYDILEQHGIRVVLVNAQHTKNVPGRKTDVQECQWLMKLHTYGLVRDSFRLQQDMEYARTIWRLRDRHVKDAGREIQHMQKALTKMNIQLANVISDISGLSGQAIIAAVLKGERDPYKLADLADYRVKASREEVARSLEGNWRAEVLFELHQAVDSYRFAHRQMQECDEKLALYLTNLPTRTLDIPAPSNQALETAVQKRKKARKSRDNEPRMDLKAELKRICGVDLTSIDGINVMTAFTVISEVGTDMSGFQNENHFASWMGLAPSKDISGGKTVGRGKKKVKNRVAVALRMAATALLESDTNLGARYRHLRRQLPSYKVAVKAMARYLAVLIYRLLTRGEAWVDRGAAQFERRRAERELATLLSKAKAKGFALVPIADACQS

SEQ ID NO: 452542 - protein, 420 aa, unidentified
MHSSGLEVFVERKEERVVFVGIDWSERHHDLCVMDAGGTVLAKGRVAEGVEGLARMHELVATYAEEPSEVVVGIEIDRGLLVGALVAAGYAVHAINPLSVDRYRDRHRVSGAKSDPGDARVLADLVRTDQHLHRQVAGDSELAEATKVLARAHQSLIWSRQRHLNQLRSALREFYPAALQAFGTDLASGDALGVLAQAPTPAEGRSLSAAKIATALKRAGRRRRVAERAKEIRSALRSFQLQAPEVLSRAYGEVVRSDVAIVAEMTSQIDALARELEDRFEEHPDAEILRSLPGLGLVLGARVLAEFGDDPTRYADPKARKNYAGTSPITKASGRSKVALARFARNRRLADALQMWAFCSLSTSAGARRYYDAHRAKGHAHRRALRSLANRWVGILHGCLEHRVGYSEDVAWPTVEQAAA

SEQ ID NO: 452543 - protein, 341 aa, unidentified
MSIVGAFDVHRRQLTFEYLDTCSGELNRGRIMPADRPQLRAWLARFAGQEDVQFALEGCTGWRYVVEELLAAGITPHLAEPADTAALRGKKRHAKTDKTDTRHLRVHLMAGDLPGCWIPPEHVLEARATARLYKDLVDERGAWHQRVAATLFHQGVPAAVSVAKPDGRAAAEQAFLSPAGRQAVQTGLRQIDRLTAELEPLRRQLDMLSRRQPGCAALRAAHFGIGAVTSVAIWAELGDVRRFGNSDNVVRHTGLDITVYSSDGKRSAGHLSRQGPQLLRWALYESAKCAARPAAPDYGYYTAARDDRGGGRATLSVARKLARRCYHTLRELGEDALAPAA

SEQ ID NO: 452544 - protein, 411 aa, unidentified
MRRVIGIDVHRTFGEVVFWEDGRLRHAGRIDMTRTALEGFGKSLLASDEVVVEATANSMAVSRVLAPFVARVIIANPLQVKAIAQAHVKTDKIDAGTLASLQAAGYLPQIWTPDAETERQRRLVARRYQVVRHRTRLKNEVHSILHAHLIPKCPHADLFNARGRAWLAAQQLPDDERAAIDRHVRQLDRLAEDLALLDREIAQDAMDDPAVNRLMTITGVNLAVAAGIVAAIGDISRFNSPQKLVSYFWLNPRVRQSGLGAAHHGRISKIGRSHARAMLVEAAWAAAKAPGPLHAFFVRIRARRGHQIAAVAVARKLTVLCWHLLTKGEDYLWARPALVANKTRAMQLQAGHPQQKGNRRGPAYAYNIKALRDHEMVIAAQAERNYEQFVSQWKARRPRAGARAPQFGKTT

SEQ ID NO: 452545 - protein, 348 aa, unidentified
MITIGIDPHSRNHAAAALDERGAVLAQLAVGSGPRELDRLARWIAGMGPKRIVAIEGARGFGLALARSLLGAGETVLDVAPALTVAERRSARRPGKDDRGDAVAVARVAMRERGLPRVLPEESGTDLKLLVDARDQLVADATRTRNRLHALLVAIAPGYHEQVRDLTSSAALMIAKRLASRARGADRVRSTLACSAIARLRSLGAEIGTPEREITASLDRAAPANLLGICGVGPLVAAKILGEVRDVSRFPSPAAFASYSGTAPIPASSGTVIRHRLHRGGNRQLNRALHTVALTQARRDDRARAFLARKRAEGKTHREARRALKRHLAVAVYRALVMDAQDVLTSTT

SEQ ID NO: 452546 - protein, 307 aa, unidentified
MIIPPDVVGIDVSKHHLDIFHAGVAMRIANTPEALADPVRAWAAAGAFVLFEATGVYDGVLRRTLAAAGLAHARVNPGRARDFARAAGFLAKTDPVDARMLAVMAAALKPAQTPPPEADRETLAALIRRRDQLVAMRAMERTRASEAGDAFTRADAEAHLDWLDQRISGLDRLIREAVRASASLSLQASLLRTAPGVGPVAAHVLMALLPELGQRSPKTIAALVGLAPLNADSGQKRGQRLIRGGRKRVRDALYMAALAAIRCNAAFADFYTRLRAAGKPAKVALIAVARKLLTKLNAMIRDKARFT

SEQ ID NO: 452547 - protein, 319 aa, unidentified
MVNNAIKFKMIGVDVAKLKLDIAFDDKHIITIDNQKDSFKQLLKLIADATQVCFVMEATGGYEKPLSNFLLARGITVCIVNAKRVRDYAKAIGRHAKNDRIDAQVIRLYAEMAQPKQLEQRSTEAHQLEALMKRRDQLIKQRTMEKQHLEAANDADSIRSIKKFIKAFDKEIERIEVNIKKLIETDNALQDLRKQLTQVDGIGEVTISILMAQLPELGQLSNKQISALVGVAPFCKDSGTMKGRRVVWGGRASIRSVLYMATLSAIRYNKPIRTFYQRLVANGKLKKVALVACMRKLLVILNAMVKNGSEWNPDYVKLI

SEQ ID NO: 452548 - protein, 357 aa, unidentified
MRRPKAKSNDKLIAGIDLHGNNLVIGVINQDGTRLMHRKLDCRLEQVEEFLRPFKLRLQSMAVESTFNWYWLVDGLRAQGYPIDLANPAKIEQYSGLKHADDKDDAFHLADLQRLNILPKAHVYDPELRPVRDLLRRRTNLVHQHTALLLSLQSLYARTTGQRLDLGEAKKMEPKQAPQLYEHPANQLIAQVQVEHIGALAKSIHRIEKAVLDCAREIPLYEKLLTLPGIGRILGMTITMEVGDISRFKTAGDFASYCRMVDAKRWSNGKCKADNNQKCGNKYLAWAFVEAANFARRYDESCRRWYDRKAAKAGKIIATKALGCKLAKAAWYVMAQQCNYDEKRMFPELANKPMKTS

SEQ ID NO: 452549 - protein, 331 aa, unidentified
MEQRKTIIGIDVSKKTLDVFIKTIEVHIQISNDSEGFKKLLALLKVNKLKPEDCLFVLEFTGGYEYRLVQFCQAKMFSYVRISGLALKRSMGMVRGKSDKIDAKRIAEYGDEKQSKLAAETGSLANIVRLKRLLSQREDFVADRKAYDHRYKELQYMMDLPDSDSILKRFKKTVADFQKHIEKTEDEIVKLIKANDAFQLNFELLTSIKGIGQINAWTMIAYTENFTSFQNGRQFGAYIGVVPYDFTSGTSIKAKSRTSKMANQQIKALLQMAARAAVLHNKELNLYYERRIALGKHHMAVMNEIKFKLVNIMFAVVKKQKPYVDKYKIAA

SEQ ID NO: 452550 - protein, 349 aa, unidentified
MNGGKKNIKLDKNQPIYLGIDVHKNSWSLSIIHCNELMGRFTISPAITLLKKLLERYNGCNIYSVYEAGFSGFKLHRDLIEIGVNNIITPPNKIPTQAADRVKTDKRDSLKLANYLSKGLLMAIYIPPPEQLNLRQVLRTRDQYMKKHNRVIQQLKMLLHQQGINTEVVGVPKWLIDDLKQKEFPEYIKLSIETYIEEMLFLEDKIKIFDKIYKGGPKEECYKKTYEIIKSTPGIGPLIATALTYEIGDWKRFNNEKEISSYLGLTPSEYSSGEHVHRGRITGQGNSWLRGLMIEASWLLITEDKNMGDFYNRIKNERGKKRAITAVARKLICRIFSMVKNETKYKIAA

SEQ ID NO: 452551 - protein, 368 aa, unidentified
MKNSSTVKRSSAQGRKQRHSALTVGLDLGDRSSRYCVLNEHGEAVMERSLATTTKGLDQAFGSIPRSRIALEVGTHSPWVGRHLAKLGHEVIVANARRVRLISESTRKNDKLDAKTLARLARIDPQLLSPIRHRSEQAQADLIMIRARAALVEARTALINSVRGLTKSYGERLPSCASYQVCEELAGSLSDPLQAALVPLLTEVESLTERIREYEQKLEELARQRYPEVELLKQVQGVGTLIALTFVLTVEDPHRFHSSREAGCYAGLRPKRKESGQSRPQLGISKEGDPYLRKLLVQGAHCILGRFGQDSDLRRWGLKLAARGGKNAKKRALVAVARKLAVLLHKLWISGERYEPLRASNKPQTAAA

SEQ ID NO: 452552 - protein, 317 aa, unidentified
MSTSGSFIGIDVSKTQLDLAVHMTGKPWQVAYDAAGVKRVVKHLRTLAPTLIVLEATGGLEMRVVSALAAAQLPVAVVNPRQVRAFAHATGTLAKTDRLDAQVLAHCAAAVQPTPRPLPDAATQQLSAVVTRRKQLVDMMTAESNRLGAQPNAALRKRVRAHITWLTKELGRTEKELAQLIQQSPLWRVQDDLLQSAQGVGTVLSQTLLSEVPELGHLNHKQMAALIGVAPFNRESGGYRGKRRIWGGRARVRVVLYMGALVATRHNPVIKAFYERLLAAGKEKKVALTACMRKLLTILNAMMRDQRKWQDIRSITH

SEQ ID NO: 452553 - protein, 419 aa, unidentified
MSFKIIKSNCCGLDVHKTWIFACIGITDPLNRTEYKQARFSSFTKGLQALCDWLAKYNCIDVCMESTGKYWIPVFNILEKNNFWVTLSHPKYTKPQKGNKTDRKDAKWICDLYMCGMVKPSFIPPADIRELRDLVRYRFKLTCMITSEKNRAHNCLTVSNLKLDDVFSDIFGKSSRSITEQILQHPGETFDVAPFVDSRCKTPVEEIQAAVDGAISAEQAVKLRQCLSHIDELEEHKAEIEREIFRLSDKYGDALALIRTVPGFDKNPLTAIQVLSEIGGDMSVFPTAKNLVSWAGCCPRNDQSNQKIKSTRISRAGSYFKPVLVQIANALIKSKKHPEFTARYRRIKARRGHKKAIIAICRMLLTAIWHILTDLKPYTPEGFLEARPVKEIKVLTTSQALNLLKQRGYIIKDEVVPVT

SEQ ID NO: 452554 - protein, 349 aa, unidentified
MLYTGLDLHKSFSYITTMNDKGEILGQKKLPSNGEVVEFLKEFDEKMEVAIEATPSWYWLYDHLEDEGFDVKLSHPLRTKAIASAKVKTDKVDSATLAHLLRSDLLPLSYVPEKPVRLNRELLRYRASLVKIQTRIKNKVHTILAKNNMSHDYTDLFGKAGMAFLYSLSLPENYTIALEGYLSVLETVRHEIRSASKKVQQLAEDDQDSVLLMSIPGVGYYSALLIKSEIGDVKRFPSAKQLCSYAGLVPSTHASGNVCYHGHITKQGSKWLRWILIETAIHAVKRTGPLRRFYFKVERKKGGKVAKVATARKLLEWIYHMMRDYKTFQQVEKVAEFLGRGEPVKNSGL

SEQ ID NO: 452555 - protein, 329 aa, unidentified
MGTNEARQWVGIDVSQAKLDVALRPLGRYWQVANNEAGWQTLLTDLQTVTVALVVVESTGGMERGVVQVLQRHEIAVAVINPKRARDFSKASGRLAKTDRIDASMLAHFGEALQPLPKPLASEHQEALSDLVHRRSQVIELLNSEQRRRHSAGNRTAQADIDTHIDWLKQRVKALDEEIDQLRQADETRQQRYEWMTSVPGVGRVVATTVLALLPELGQLSTKRLASLVGVAPFNFDSGKLRGKRHIVGGRALVRSTLYMSALVAIQHNPVIMAFYQRLLSAGKSKKVALIACAHKLLGILNALVTQGQSWQDPKDSEPTQTATPATSS

SEQ ID NO: 452556 - protein, 353 aa, unidentified
MAHTPPPRVTIGVDTHKDLHVAAARDELGRRLGTTMAPATRAGYATLLDWAAGLGEVTAWGVEGTGSYGAGLARFLCVRGQRVLEVNRPDRAARRRRGKSDPVDADAAARAVQAGEATGTPKAQDGVVEMARALRVARQTAVKARTQAINAIKGLLVTAPTGLRQQLACLSTTRLVRQAAALNSDTLTTPTAAAMLALRGLAQRYQHLDAEITLLTGTLDQLTANHAPALRELLGVGPDSAAALLIAAGDNPRRLRSEAAFAALCGTSPVEASSGKTRRHRLNRGGDRQANAALHRIVVVRLRWHQPTRDYVARRTAEGKTSKEIIRCLKRYVAREVFAVLHQIGQQNLTTAA

SEQ ID NO: 452557 - protein, 368 aa, unidentified
MKTKTKTPSVVSTSPAAVMSEFTLGLDLGDRAHYVCVLDTSGQIVREASLPNSRPALAQLLVDFPRATVALEAGTHSPWISRYLTGLGATVFVANPRKLHAISRNERKCDQRDAQMLARLARADVALLHPIEHVTAQAQHDLLGLKLRDALVRTRVNLINTVRFTLKSLGHSVGNPSSESFHKTVLADIPADCLPVVQPLLTVLTLVTEQIKGMERDLMQRSKKDYPVTERLQQISGVGPITALCFVLKIGDPERFSRGRDVGAYLGLCPRRDQSGGTDKQLRISKCGDAMMRRLLVTAAHYILGPFGPACALRQYGQRLAGTGSAREKKRAVIAVARKLAVLLLSLWKHGTDYEPRVTTSVLVMTPA

SEQ ID NO: 452558 - protein, 394 aa, unidentified
MRFAGIDIASETHVVAVVSENSDVLVKPTSFAEDATGYQQLFARLGAPGELLIAMEATGHYWKNLFAALVSAGYAIALLNPLRTHRFAEEDLERTKTDAIDALGIARFAAQKRPPTTRLPDPATEELRELVRLRERLLQDFGDRVRQLHRLVDLGFPEFTRYVHGLDSELASAILHDYPTAAAFHGVSAKRLAALRYDTRHKVGLELAQTLLDAAQRSVGRHHGPAYRVQVRYLCEDLDTLRRRLRELDHDIEGKLRQHEVGNLLTTIDGIGSTTAARLIAELGNPADFRSASALAAYVGPIPGLKQSGKRKSSRASITPLGNARLRAALWMPTLTAVRTNPWLRAHYQRLRARGKLPKVALVACMHKLLLAVYSVAKHRRPFAPKLTTEPAHP

SEQ ID NO: 452559 - protein, 300 aa, unidentified
MCILNDSVPLRYIGLDIHKAYFVAIGVNRDKEQVFGPQRVANGQLAAWIRQELTDRDAVVLEMTTNTWTMVDALKPYVHSVTVTHPPHVHLITRAQVMTDKKAALILAQLHAAGLLPAVWIPPVEVRSLRALVAQRWKMVQLATQAKCRLQSMLHRYHFDRPPKSDPYTPQMRDWWEALPVEPLERFRLQSDLDTVTFAQQQKVRIETCLAQFAARDVRVPLLAQIPGIGFINAVTILAAIGDIVRFPTANQLVGYAGLGTKVHDSGQTQWRGRITKMERRDLRRAMDEAAQTAARSHLK

SEQ ID NO: 452560 - protein, 354 aa, unidentified
MSEKLNTTVAVIGIDIGKNSFHVVGLDARGAIVLRQKWSRGQVEARLANMPPCLIGMEACVGAHHLSRRLKALGHDARLMPAKYVRPYSKGQKNDFRDGEAIAEAVQRPTMKFVATKTAEQLDLQALHRVRERLVSQRTGIINQIRAFLLERGVAVRQGLRFLRAGLPQILATRTDVLSPRMVHLIEDLAGDWRRLDECIEGLSAEIETLVQHDPACQRLMTVPGIGPIISSAMVAAIGRGEVFSKGRDFGAWLGLVPKQTSTGDRTILGRISKRGNRYLRVLFVQAAWVVLIRPKSWERYGLKPWIEAAKKRLHRNVLAIALANKLARIAWSVLAHGRNFEVRKIDEAAAQSV

SEQ ID NO: 452561 - protein, 350 aa, unidentified
MDIVVERCAGLDVHKRSVTACARVPDQAGGRSEELHTFPTFHADLERLRDWLLSLGVTTAVMESTGVFWKPVWQSLEDSIDCVLVNARHVHNVPGRKTDVADAAWLARLGECGLVRSSFVPEPVFRRLRDLTRYRRRLVESHTREAQRIDKVLEDAGIKLSSVASKTLTVSGRAMVESLIAGERDPEVLAQLAKTRMRAKLPELRRALVGRFGEHHALLCQVALGRADDLGEAIGRLDSEIERLIEPFAHHRERLCTIPGVGQRTAEVIIAEIGVDMGRFPTSAHLASWAGLCPGNNESACTDRGRLGRGPHPRHLPGCSVLAHRPSPRCQPGRSRSRPHHSACRLPHPP

SEQ ID NO: 452562 - protein, 342 aa, unidentified
MFYIGCDVSEKSSYVYVTDGKGRKVESQEIPTDKDGYRRYFKRWMNKPVKVAVEAGGHSRWIHDALKKMAISVYIVNPNKVKLIAKNKKKTDKVDATFLAKLLRIDELPERVYVAEGDSRELRDLLRSRHQLVTSTTCLMNHLRGMLRQEGIKLQAKAFNAASTFTRLLTNKSVPKHLHPIITSYEKTIAELRTQRGALDDVIAEYGNTDIELLKGVPGFGEVASKTTYAAISTVKRFKRAKQLTSYCGLVPSVFSSGERADYGHITREGRSEVRHVAVQGVRAILRSTNSESKPLRKWYERIARRRGSKTAVVALARKLIEIVFYVLRDRRPYNAQLLHVS

SEQ ID NO: 452563 - protein, 337 aa, unidentified
MIVIGVDVHKHSLSAVAVDEVGRQLDGLETSDAGELLSWSKRVGRRRLWALEDCRHVTRGLERTLQRERQRLVRVPPRMTAPERRRGRVRGKSDLIDALAIARAALREPVLDSPRPEEARLRELKLLVDHRDDLVDERRRAQQRLRWHLHELEPTLQVPLGALDRSVWLERLGRPLARRKQTIQVRIARELLGRCRNLTRSIGELDRELQALTTAMAPRLLELPGCAALTAAKLLCEIGPVDRFRSDAQLARHAGVAPLDASSGKHQRHRLDRGGNRQLNCALHRIAVTQGRVYGPAKAYLERKQAEGKSRREALRCLKRQLARTIYTTLKSEPRLT

SEQ ID NO: 452564 - protein, 355 aa, unidentified
MTSTKYIGMDVHTESISMAVRNSVGKVVMESVIETKASMILQFIEGLRGDLHVTFEEGTAAAWLYDLLKPHVARLVVCNARRNALLKVGNKSDRIDARKLSELLRGNQLHPVYHGEHGLRALKELVRSYLTISKDLARVMTRVKALYRSWGIPCSGTQIYSQLHRVTWLSKISEPGVRLRAAFYFQQLDALRTLRQEVRQELLAESHKHSAWKRLCGIPSIGPIRAAVALGVLQTPHRFRTKRQLWSISGFAIETRSSADHRHVNGQLQKVKKRVSIRGLNQNHNHDLKNLFKGAAVIASTKPGPFQEFYTALLAKGMRPEMARLTLARKIATIVWIVWKRGVSFDAQYLKPQTV

SEQ ID NO: 452565 - protein, 331 aa, unidentified
MMGFRYFLGVDVAKAKLDCLLLDSVEQRRRSKVVANTPEGFEQLVKWLTKQGVGCQQVHAVLEPTGVYHERALFALSQAGIAVSLVNPAQLRRFAQGLGIHTKTDACDSAVLARFGEMIKPAHWQPAPSKARALRALLARRDVVAQDLQRERNRCEALVIEDTPERVRQSLTDTITFLEQELQALQKSIDEHIDDDPDLKRIWDLLQSVPGVGQRVADHFTALLAGRDFKSAEQLAAYLGLVPIEWQSGTSIKGRPRMSKAGPASLRQLLYMPAVVATRHNPHVKALYQRLLAKGKAKMSALGAAMHKLAQLCFGVVHTGQPYRADWPGRA

SEQ ID NO: 452566 - protein, 350 aa, unidentified
MLTIGVDAHKELLVAVGVDQDGTELEGWTGTNGATDWEALAAWASALSAERVWGIEGSGNYGRGLAQYLVQHQELVYEINPRLTAAVRKRNRQPGKSDRRDALAIARAVRQEGNRLPRVYPDDVTAVVALLTAEREDALAEATRLRNQLHQVLGQLDPDYQQSWPSLRDLASLDELVNDPPAAETELAKAQVAMVCRVASRLALLEGQIAELAGEIEAQATTHYAGLTTLCGVGLLTAGMLAGLLGPAERFASDAHLAAYAGVAPLEASSAGVLRHRLNRTGNRQLNMLVHRIALTQARCSSDAQTYLARRQTEGKSWREAIRALKRFIIRRIWKRWHEIGVAAASGASV

SEQ ID NO: 452567 - protein, 343 aa, unidentified
MDHFAGLDVSVKETSVCIVDDTGRIAREVKVASEPEALLQVLMNPGYHFKRIGLEAGPLSQWLFSALADAGLPVICVETRHMRAVLKAQINKTDRNDARGMAQMMRVGLYRPVHVKTLRSQKLRMLLTHRKLLQSKAIAIDNDLRATLRNFGLKVGMVGTVKFEARVKELVEDLPDLAVLVEPLLIVRRVLREQVGILHRRLLVIVRDDDVCRRLMTVPGVGPVVALTYRATVDVPARFRNSKAVGAVFGLTPSKYQSGEVNRTGAISRCGDEMMRAMLYEAAQIMLVRSTKWSWLKAWAMKIARHRGVKKAIVALARRLAVIMHRIWLDGTEFRWTRDVAAA

SEQ ID NO: 452568 - protein, 380 aa, unidentified
MQTITLYLGLDVHKDSITIAIAEPGPKGEIRLFATITNDLHALEKALSRIRKAHPDAQLEVAYEAGPCGFGIARRLKQLKVPCLVAAPSLIPKQPGSPFKTDKRDARTIARLLRAGELTGVYIPEPTDEAIRDLCRARTDAVDDLRRCRHRLKAFLLRHGYRYQGKANWSQPHMRYLRELVLPHPAMKTILEEYLQGIDAAHARVERIEASMLSLLEAWRLKPAVQALMAFRGFQLVASMITVSELGDIHRFEHPRQLMTYLGLVPTESSSGPRQRLGSISRCGNGHQRWLLTECAEHYALPPKISKELSRRQEGQSEAIRALSWKAQNRLHLRFIKLLGRRLQRNKAKVAIARELCGFIWALLRTQPCYQQPTSSSTAG

SEQ ID NO: 452569 - protein, 341 aa, unidentified
MSESALIGIDLGKHSFHLHGQDKLGREVFRKKFSRQQMMTLFGNLPACTVVMEACAGAHFVARQLMAMGHEAKLISPQFVRPFVKGNKNDFVDAEAICEAASRPSMRFVSPKTEAQQTLSILHRLRESLVRDRTKTANQMHGFLLEFGISLPKGLAIMKRLASILAEHELPVRLTVLLQRLHEHFCYLDEQIKALDKELASQLADDDLGSRLLSLPCVGPITASLLAVEMGDGRQYRCSRDFAASVGLVPRQYSTGGRANLLGISKRGDKHLRQLLVQCARVYMQRLEHQKGALADWVRSLLGRRHSNVVACALANKLARIAWALAAHHTQYEAGPDALNA

SEQ ID NO: 452570 - protein, 416 aa, unidentified
MEVVYPRCGGLDVHKKSVSACIVIREQGKVDKAERRFGTYTGQLEELASWLGEHEVSHVVREATGVYWKPVWNVLEGRFELMLVNPQHIKALSGKKCDRGDAAHLADLLQHGRLHGSYIPSPAIRQLRDLTRNRARTTQEAARIKNRIQKILEEANLKLGSVASEVLGTSGRRMLKQVVAGEQDPAKLADLALGRLRKKRAQLLPALAGKVTDHHRRMLDKLLRALEVREREIAEDEADIRRAIAPFAKAVQAWMQEPGVDEITAWSLVAEMGPDMAQFPTAEQAASWSCVCPGNYESAGKQRDGRTRQGNPWLRAAICEAAWGATHSKKSYFHAQYRRLCPRRGPQRALLAVAHSMIVVGYYLLKYDLLFKDLGADFFDQRNREHAARRAVKRLSALGFEVILKERTPEMAPSTP

SEQ ID NO: 452571 - protein, 304 aa, unidentified
MNGIGIDVSKRQLDIGTTDGETLQVSNNRSGFSELDVWLKKRPTRQIVLEATGGYEQPVLDFLHKAGHPVARANALRARKLAQGLGQTAKTDRLDAYALAQMAALVKLPPYQPLQSWQQKMREFVRARRQAIDALTIARQQQEMVLDRELRRLLQGNITRLQTLVERLGKQIVEQVGQQPQLKMLKSMKGVGPVLQAVLASYLPELGRITGKRIASLVGVAPMSHDSGTMRGKRSIHGGRAEIRQVLYMAAMSAMRHEPRLRDFYQSLRARGKEGKVAIVAVMRKMLVILNARVRDAESGLVPA

SEQ ID NO: 452572 - protein, 344 aa, unidentified
MITIGIDPHKSSHTAVALDATGHVLGELRVAATKTTLDQLLRWAERWPDRIWAVEGATGLGHLLAQRLVASQETVLDVPATLAARVRLLARGHGRKTDGIDAASVARVAQSQPDLRHVGAEDHSSVLRLLSDRRDELTQERRRVVNRLHRLLRDLLPGGAPTELATEAAARLLNRIRPKTAVDLERKLMARALVADLRRIDRALVQNRTRCSAAVAASDTTLTTVFGISDVLAAKVLGHVGDVSRFGSADRFASYSGTAPIEVSSGEVRRHRLSRNGNRALNNALHLAARVQTMHAGPGRDHYERKLAEHKSSREALRSLKRQLAKVVYRHLVADRAHRLALAS

SEQ ID NO: 452573 - protein, 411 aa, unidentified
MRVHHNVCCGIDVHKKSVTACLMWGPADKEPEFEIRRFGTMTRELQNLAEWLKQAGCEAATMESTGSYWRPVWNVLEGQIAKLILANAQHVRALPGEKTDRKDGKRLAELTRHGQVRPSYVPPRAILELRDLTRYRSKLLSAGSSERNRIQKVLEDANIKLGSVLSDVFGVSGQKMLQALVKQDSVATAKVAQLAQWSLKPKIEAIQQALEGKLTDHHRFLIDVSMRHMRFIEEQLIRLDEEIQRRLQPYQEEYALLQTIPGIKETGAARILSEIGADMSPFADGDHLSSWGSVCPGNNESAGKKFQSKIRKGNVHLLSALTECAWAATKKKDCHFRNKYYRLKSRRGSQRAIVAIDHAMLKCVYVVLSQRKPYEEPKPTSLTEAQKQRKASSLCRQIRALGYDVKIQKTA

SEQ ID NO: 452574 - protein, 366 aa, unidentified
MKKNSTVATSRKQIFKEKKLTIGMDLGDQSTYYCVLDEAGEVILEQKLPTTKQAMKQVFGRIPRSRVALETGAHSPWVSRQLTELGHEVIVAHAQKVRLIGESSRKDDRLDARMLARLARIDPRLLSPVQHRSAEAQAHLTVIRARAALVGARTALVNAARGLAKSYGERLRKCGTQQVSKELAAGLSAELRGALEPLLAEVESLNQRIAEYDRRIEQIAKEVHPEVALLKQVKGVGTLIALTYVLTVEDPHRFRRSRDVGCYLGLRPGRRNSGHSQPQLHISKEGDRYLRTLMVQGAHYILGPFGQDSDLRRWGLKLSERGGSNAKKRAIVAVTRKLSVLLHKLWVSGEVYEPLRNHSSVAGAAA

SEQ ID NO: 452575 - protein, 361 aa, unidentified
MFRQRTFVGLDVHARSVVGHAMDEHTGEVWQQLLPADPPGIWGWLESLPQPVKVTYEAGPTGYGLARFLRGRGVGCLVAAPSKLTRPAGNRVKTDTRDAEHLCRLLRLDEIVEVIVPDPEQEAARDLVRAREDVRGDLMRARHRAAKLLLRQGILYSGRKTWTADYERWLQRQRFDAPPRQLAFEDAVEAVLLTTDRRDRLDAAIEAMAADSSYTPLVRRLGCLRGISTLTGFGLAVEIGDWHRFSGSSIGAFLGLVPTEDSSGESRSQGSITKAGNGHARRLLVEAAWHHRRSYRHPGTRMRNRWQLAPAPARVRGHEGNRRLHSRWQAFQARRKRDTIAAVAIARELAGWAWSLAVMDD

SEQ ID NO: 452576 - protein, 370 aa, unidentified
MRIIGCDLHTRQQTLAMLDTETGEVVNLMLMHEGNNVREFYSKLPRPVLVGIEATGSMPWFLNLLEELGIEYRVGHPAQIRAAEPRKQKHDRRDADLIMKLLAENRFPAIWLPSKELLDLRALLLHRHQWVRMRTRIQNALQAIALANGLRRGPSLWSYDGQAQIAFLPLLPHTAYRRSALQAMYKNMESEIDNLTRQVAEQAGNRSGARLLMTHPGVGPVTALATEVFLGDPQRFTDSKALASYVGIIPREYSSGGHQRLGGVTKQGSPLLRFLWGEAGAHAARRDPELKRFYRRKLVHKGLGKARVAVARKLGIRLWIMLRDEIDYREFCRRGQMQQKMVRPVAGMPETSNGAKSHRPVDEATRLPES

SEQ ID NO: 452577 - protein, 394 aa, unidentified
MKLIGIDIGKNKHFFCVMDQQTGEIISQPVSFSNDKEGFDFLVQEIKSYPKDSILIGMEDTGHYHFALLKYLLDLQYTVALINPKTTDFNRKMQGGITKNDKLDTINICDVLDTPERKKQYRITKVNSFDLYEQKQLTRHHHNLKEEENVYKNRLQKCIDIVFPEFNKLFNSKYGTVYMNILKTFGSAENIANTDIRTIRKCFEIEGRGNRISLTPERLKECARSSIGISSSAEVIQIKHLTAQIELIEEQLTEIDKKIEEFSIQNNSPILSIPGISHFSGTSILAELGDISNYSKPSQIIKFAGVAPLHYESSQFNAQHTSITKKGSKYLRKTLYQIILPVIKHNPVFNKYYQLKISQGKGHRCAQGHCVRKLLRIIYHLLKTNQQFDPQLLR

SEQ ID NO: 452578 - protein, 340 aa, unidentified
MEDTIYDHYIAIDWSIKNMAIARMTKKSNKITAVDVPSDIEDLQAYLKNLRGSKILTIEETTTSQWLYTELKKYVDRILICDPIRNKLLNEGPKTDKIDACKLVQLLKAGLMKEVYHSTDKFLYLRRVVSGYEDLVTSGVRLKNQRYALLRACGKNGKEKAGSPIDSQGEQFVLDCLDRQIEAYETEKEGYGKEFERLARKNIEIKHQKSLPGIGTINAVKIVARVVTPYRFPDKGHYLSYSGLIKLDKISGGRSYGKRNPRYSRQLKSVYKSGVLAAIGGNNPIHDYYEYLIQEDNCPKFNARQKACRRLATLSLGVFKSGKKYQPFRRKDVKSNARSA

SEQ ID NO: 452579 - protein, 354 aa, unidentified
MRFYNQHHEFYVGIDLHARQMYLCIIDNTGTIHFHRNMPANPEHLQRALQPFGDNIVVAVECIFTWYWIADFCTERGIDFVLGHALYMKAIHGGKTKNDKIDSQKIATLLRGGMLPEAYVYPRQMRSTRDLLRRRQYFMHQQSEILTHIQNTNTQYTFTPFPTRIKYQNNRSDITERFDDPMVKKTIEADVTLLDILHHILVDLESQILRQARQHDPVALHILRSIPGVGKILALVILYEIHDINRFPAIGNFISYARLVKCSHESAGKRKTGGHNKIGNAHLKWAFSEAAVLFLRSNEPAKHYHQKLVGKYGKAKALSIIAQKLGRTVYIMLKRKEPFDPKRFFQDGAHEMTA

SEQ ID NO: 452580 - protein, 371 aa, unidentified
MKNCITFVGLDVHKNSIEVALADAGREGEVRHYGAIGGDMDSFSRLLRKLVSTGKELHFVYEAGPCGYEIYRYLTAKGFDCAVVAAPAGDPTKGARKRIKNDRRDAKTLARLHRAGELTYVFVPREDDEAMRDLTRAREDASNAQRVARQQLTGMLLRLGFRYNGKTSWGLAHFRWLSDIKMPTPAQQVVFQESINAIKETTERLGRLTQQIEVLAPAWRMFPVLQAYQALRGVSLIVASTVVAELGDLTRFDNPKQVMAFLGLIPSEHSSGERSRKGGITKAGNGHARRVLTEAAHAYQFPARVSRALLLRQEGLDKAILDIAWKCQVRLCSRFRRLMAKGKNRKTVVTATARELIAFMWAIAKQVPISA

SEQ ID NO: 452581 - protein, 418 aa, unidentified
MRRVIGMDIHRTFAEVVFWEDGRLRWHGRVDMTRSGLEGFGRSLAKGDEVVLEATGNAMAVVRVLSPYVARVIMANPLQVKAIAHAHVKTDKIDAGVLASLYAAGYLPEVWLPDAETERRRRLVARRNQIVRHRTRVKNETHAILAAHLVPPCPHAELFNGPGRVWLARQALPGDERAAITRHLRELDRLGEDLTVLDREIAEATVDDPAVRRLLTIAGVNLTVAAGLVAAIGDIRRFASPQQLVSYFGLNPRVRQSGLGLAQHGRISKIGRSHARALLVEAAWAAAKAPGPLHAFFLRIRARRGHQIAAVATARKMAVLVWHLLAKETDYLWARPALVAHKLRALELQAGRPMKKGNRRGSAFAYNVKALRNQEMAIAEQAERAYQHFVAQWQPKPTRNRRATNPTAWSRGAPRQPG

SEQ ID NO: 452582 - protein, 516 aa, unidentified
MSFADRLTLLAFGQTNLPEITQRRRAFSAVQRFFGLDIHREYLVATAVNRELEVVFGPVRVVWQNFETWAARHLTETDAIVVEMTTNTWEVYDLLAERVHSVTVVHPPHVKMITEMPVMNDKKAAEALAILHAAGLLRGVWVPDQTVRDRRNLVAQRHDRVRAATQAKNRLHSILFRHQIEKPESSLPFSAKRRDFWLSLPVSPVEKLAIELDLETIDQADAQRAKIEAVITEAALSDERLPFLVQIPGISTIGALTILAAIGPIERFPSPKKLVGYAGLGAKVHDSGQKRTTGRITKSGRKDLRAAMVNAAQSAVRSHSHWKQEFARLEPRLGRNKAIVAIARRLLVSLWHILTKHQADKFADVDQVASGFLNVAYQDVGARNLPDGKTAPEFVRQNLDAIGLGKDLQRVKYGKHEYLLPQSSLPGAPPAAKPRGKGQRQNTRAAQAARSTEAARKRAEIAAKQAEAEARMGRPRKRRSDKGTKRGPNRITTGQPPAPKAKTATKSVTRTAAKAK

SEQ ID NO: 452583 - protein, 341 aa, unidentified
MKKFIRTAVDLGKNYFQVHGLESEGGRSISRKVKRSKMHEFYSQIEPCRVGMEACGSAHYWARQLTAMGHEVVLIPPAYIKPYVKRGKNDVVDAAAICEAMSRPDMRFVPIKSADQQAVLMLHKTRELLVKQRTMAVNALRGHLAEFGIVAAKGIGRVDELLALAKADAALPHIAGAAVACMAQHLEGLDLSIETVDEEIAKAHRQNPISCLLDEIPGVGTLIASATAASVPDPGVFKSGRDFAAWLGLTPRQNSSGGKQKLGAITKQGNRYIRKMLVTGATSVLRVAGKRKGALADWINALRARKPERLVAVALANKLARICWAIMTTGEGFRTDTYVKA

SEQ ID NO: 452584 - protein, 341 aa, unidentified
MQDWTRLIQWIGLDVSSKTFTAAFTNAFTNQTVRPKQEKFEVNRRGVRQLLSWARDIGGGEPFGIAMETTGAYSERLAKLISDERKDLHVSLCNASSISHYVKSFTEAKSDKADASYIARYAAERRPAPRILRTPELEMLRAATRDRERLVEQRVRMLEANATISSKFVLQVNSGVLKAIDKAIAELDAKIKTLVMSDAEIAREISIMVTCPGVAFISAATIYAELGPLAQYTRRQLSALSGVCPVRIESGTSVHRSRLSRRGSKALKRILFLDAQFAIRKVPAIKALHDKLMTRVDSSKLTARCACMRKLLLTLRGMVVSQRAFDPDYKPESYKKNELTA

SEQ ID NO: 452585 - protein, 420 aa, unidentified
MNAVGIDVSKGKSMVAIMRPFGEIVSAPFEIKHTASDINSLVELINSVEGESRIVMEHTGRYYEVLAHQLSEANLFVSAINPKLIKDFDNDSLRKVKSDKADAVKIARYALDKWQNLKQYSVMDELRNQLKTMNRQFGFYMKHKTAMKNNLIGILDQTYPGVNTYFDSPARSDGSQKWVDFASTYWHVDCVRKMSLNAFIDHYQNWCKRKKYNFSQSKAEEIYGKAKELVPVLPKDDITKLIIKQAVNQLNSASTTVESLRTLMNETASKLPEYPIVMAMKGVGASLGPQLMAEIGDVSRFTHKGAITAFAGVDPGVNESGSYEQKSVPTSKRGSSDLRKTLFQVMDVLIKTHPQDDPVYQFLDKKRAQGKPYYVYMTAGEQVSKNLLRTSERISFISSRILIIIIIFRPALVWWSYFDT

SEQ ID NO: 452586 - protein, 449 aa, unidentified
MGNCAGIDWASEKHDVLIEDPAGEELWAATFAHDEDGVSALCAAFARFEVEVVAIERPDGLLVELLLEAGVQVLGLHPNQVRAARDRFRASGGKSDRFDRFVLCELARTDRHRFRVLEPDSDQTKALRALTGAREDLVAARVALANQLRAELERCWPGPIGVFFAIDSPISLAFLARYPSPLDARGLGEKWMAGFLKAHGYNNRKTPAQLLERLRSAPTGRAGEIETRTRRQIVLHLTSTLQVMVEQIRGLESEIAEALRAHPDGEIFRSFFHSPDCVICAATLLGEIGDCRGRYPHRDAIAADAGHAPVAVESGKRKHAKFRWACNKRLRNALGILAYSTTRWNPWAADRYPQARARGHNHRRALRTLGRAWSRIIWRCWQTRTPYDPEPHTGLQQHITVTIPTPSGPRPDLNATQRMAGAAVTQRAAHRAERAALDSKPPIATNAMA

SEQ ID NO: 452587 - protein, 394 aa, unidentified
MGKLYVGIDISKNSSSAHGLDEGGKDLFNLSFEMSSSGFSELIQAIDQKREKDSEVVVGMESTACYHINLYSFLISQGLETVVINPLLIKNFSKMSLRKTKTDKKDAKTIASFLLIHRDSIHQMNISEEFQDIRDLSRERASLSQQISTAKVEIGRIMQSLFPELEKIGDLFTKVMIHFMKQFPSARIVKASSVSKMRKNLRQTPCSEKILFTAEQIMEAAKTSVATVSPAKEVILLGKIETLEHLEKRCHDIDRVLTRSCECMVIEDMKILKSIKGISNKTATTFLAELGPISNYASYKKLIAYAGIDPSVYQSGEYDGSGKISKRGNRHLRRVIWLMTVSVIQHSKWLKAYYQKKRKAGQPYKKAVIGTAHKLIRVIFSMLTHKVTFQEVKL

SEQ ID NO: 452588 - protein, 328 aa, unidentified
MARNGLVVGIDVSKPKADACIRSLSLRCSEPSTPNGLAAMVAWLQAHDVTTAVMEATGSYERPWAEALRNAGIKVRIIDPKRVRHFAKSAGRLAKSDPIDAEMIAWFGETFDDDIGLPHDPAREHLDRFVTARTALSKMLIQIGNQGEHRQPRPIAKAQAAVVKTLRTQIAKLDAEIAVLIEANEGFARRAKIIDSVPGLGDRAVAGLIAWFPELGHITDTQAAALLGVAPFDDDSGRHHGERHIKGGRSELRTLLYMPVVAAATQHNPVLKAYYQRLAAKGKKGKVIVVACMRKLIIILNTMLARGQLWNPPTRAPAPAAGAGSATA

SEQ ID NO: 452589 - protein, 437 aa, unidentified
MRRKKNKANKSVNLQILPVVNPNAAGIDVGAKEHLVAVPCDRDPKPVRTFQAFTPDLHELAAWLKRCGIQSVALESTGIYWISLYEVLEQYGFEIRVVNARHVKHVPGRTKTDVLDCQWIQKLHSFGLLNGSFRPDQQIRKLRTYMRLRDNLGVFSTQAVHHMQKALFEMNVQLSNVISDIVGETGLHIIEAIIAGERDPKQLAALCSTRIKASRETVAKSLHGSWDEALLFALKAALETFRFSQTKIQECDCCIQQHLAQFESRVEQINSPQDLKTQLHRVCGVDLTKIPGIKEQSAQIIISEVGLDMTQWKTEKQFCSFLGLCPDNSISGGKVLHRATRKVYNRAADALRLCAQSLTHSKSALGAKYRRLKARLGAPKAIVAMAHHLARLVYRMLRYGQNYVEQGIHQYELKFQLQRIKWLKKEAKSLNLQLVPA

SEQ ID NO: 452590 - protein, 373 aa, unidentified
MEKTIKYVGLDVHKNSITVAIADEGRNQEVRKYGTIPNNISSIDKFLRKVVSDGSIPNFVYEAGPCGYPLYRYLTQKGYKCMVVAPSLIPKKSGCRIKNDNRDAIELARLHRSGDLTGVYVPHPEDEAMRDLTRAREDAKSASRKTKQQLGAFLLRNGHAYTGKSPWLKAHFNWISDIKMEHPYQQFTLQEYIDAVHTCNERVDRHTAQIQKLVEHWRMGPVVKALQAMRGVSLIVATTTVAELGDLSRFNHPSKLMAYLGLIPSEYSTGESIKRGPITKTGNCHVRRVLVEAAQAYRLPARVSRILVKRQEGLDSKIRKIAWKAQVRLCDRYRRLVAKGKPKNVVVTAIAREMAAFIWAISRCVDPVIEGRE

SEQ ID NO: 452591 - protein, 340 aa, unidentified
MSLVMGLDQHRAQISAEWIETTTGEVSRARIAPADRDAVRAFVGRFDGEGLEVALEATTGWRFVVEEFQRAGAEVHLAEPAEAAALKGKKKRAKTDWADARHLRELLLIGRLPESWIPPAHILDLRARVRTRHLLSHQRTEWQQRMHSVLYHHGFPQQRNLLTAEKREWLAGLSLPAAAREQLTIALSVIDTLDLKLIPFDRDLRAFARKQPGCRTLIDAIYGVGELTAVTILAELGEVRRFQNSRDVVRYAGLDITVYQSDDHRAPGHLSRQGPPALRWALYEAAQRARFPASPDRPYYEQLAARIGGNRACLALARKLLKRSYHLLKALGDQALAPVA

SEQ ID NO: 452592 - protein, 344 aa, unidentified
MDQITRIGVDTSKSVFQLHGVDEQEQPVLLKKLRRQQVLSFFAKLAPTKIGIEACGASHHWARALAELGHEVVLLPPQYVKPYVMRGKNDAADAEAICEAMSRPKMRFVAVKSAEQQAAQMLLGVREGLLRRRTQISNQIRGYAAEFGHVAAKGLSRIEALLAELADDGSLPSLAKEMFAVLDGQYRHVDAQIREVDAKLKSLHRSDEQSRRLAEIPSLGLITATALSVKVADPNAFRSARDFAAWLGLTPKDHSTAGKSRLGKITRAGDEMLRSLLVNGATAVIRQAMSGKGRISAWLAALLKRKPRKLAAVALANKIARIAWKLMVSGERYDASRGILPVSA

SEQ ID NO: 452593 - protein, 351 aa, unidentified
MLLIGCDYHPSVQQIAFVDTETGECGEQRLSHSDGEAEKFYRDQKLKGGMVRVGMEATGHARWFERLLAELNFELWIGDPAQIRTQRVRKQKTDRQDAQLLLRLLTEERFPRVWVPSPENRDLRQLLWHRHRLVQMRTRIMNQLQAVAMNEGIRRKSGLWSKSGRTQLESLLLAPWATRRRQDLLELVDRLDASIKPLSSAIEQEAKQRPEALRLMTHPGVGPITALGFVLIIGSPERFRCGKQVGSYVGLIPCEDSSAGYQRLGHISKQGNALLRFLLVEAAQAAVRCNAEWRRQFLHLAMRRERRIAKVALARKLAVHLYWMWRKGWDYQKTVEFGSHAGQPVHGHGVK

SEQ ID NO: 452594 - protein, 428 aa, unidentified
MDKRTKNLIRIRESRTLIVGVDIAKKTHWARMIDSQTGIETGTAFSFKNNTEGFSRLLGKMTRAREQIHAEGIVVAMEPSGHYWKPLAAYLAGLGITVVTVNPYHVKKQKELDDNSPTKNDRKDALIIATLTWQGRFSNCYLPTGVWAELRGYTAMRQQQKRKLNASLNNLVAILDEYFPEYQEVFKTLAGKASQHVLRHTPFPEDILKFTVEELAQELKGATSNRVGEKRAALLLQKAATSIGIKEGLAMARLRLSNCLEEIAFHQGQLARTEAAMVDALLRTGMSQSILSIKGVGVVTAASFLGEVGSLERFDNWRQVRKLAGYNLVEDSSGDRKGKTCISKRGRPGLRSTLYQASIVLVAHNPEFRELYHYLKTRPKNPLKAKQALVAVACKLLRVMFTLARENRLYDPEKVMGAYRQQQLKIVA

SEQ ID NO: 452595 - protein, 326 aa, unidentified
MISPAKQKVVGIAVSKDSLAISYLVEEKVQHLEKENTRAGFRQLLKQCGTESLYVMEATGIYYLQLAYYLFEHGVQVGVVNPVVIKRYIQMHLGKGKSDKKDAQWIRRYGEHSQVASWQPEQQIIVECRQLEQVTEQLIKQRTMVINALEALKQQPVASSLAIKSLQQTLKILDKQVKQIQEKLLDTLEKAFAREIKLLSSIPGIGRKTAGMLLLFAGDFQKIDNYRQLIAKAGLSPREYTSGTSIRGKTRITKMGGSLIRSKLYVCSFSAKKSNAACKALYERLVAKGKNGKLALIAVCNKLLKQAFAIVKSGIPYQPNYMQISA

SEQ ID NO: 452596 - protein, 453 aa, unidentified
MAQRNRSVSLKPGKSRQALTLTHPNAAGIDIGSVSHFVAVPPDRDDEPVREFASFTVDLHRLADWLEACGIDTVAMESTGVYWIALFEVLDARGFNVLLVNARHVKNVSGRKSDVLDCQWLQQLMSYGLLRGAFRPADAVCVLRSYSRQREMLLCSQARHVQHMQKALVQMNIQLSTVISDVAGATGQRILRAILAGERNGRALAELRDARIQASADEIAKSLQGNWREEHLFALKQAVALFDFYATQLVECDEVIENQLIALAVHADTPMPGKKRSRARNEPRFDLRERLFQMCGVDLTRIDGINVTTALVVMSEIGMDMTRFETVKHFTSWLGLCPGTKITGGKLLSGKTKRSANRAAQALRLAAAALRTSKSALGAYFRRMCSRMDKPKAITAAAHKLARLIYTLLTKGQEYTDQGQDYFEERYRQRVLHNLTQRAAKMGLRVVPADAVA

SEQ ID NO: 452597 - protein, 353 aa, unidentified
MEKVSKIDFTGQHIYVGLDVHKKSWSVSIRTPQFEHKTFTQPPEVEKLTNYLEKTFPKATYHTVYEAGFSGFWLHDRLKEKGVDCMVVNPADVPTKDKERTGKTDRIDCRKLARGLCNGELKSIYVPSRNQVEDRSLVRTRQSMVRKQTRCKNQITSILYFYGIAVPEETRWTKQFLNWIESIQMERTSGNFTLKTHLEELKHLRQLIANLNRAILSLSRTEDYRDNVILLKSIPGISTLTAMILLTEIGDISRFSSLDKLASYAGMVPDIRSSGETEYSNGITYRRNAALRSLLIEAAWVAARKDPALMMVFNNLSLRMKKTQAIVHIARKLLNRIRFVLKNRQKYVLAIVN

SEQ ID NO: 452598 - protein, 339 aa, unidentified
MTVGLDVHKATACAAVRKNGQEIATWVMPMDNQTIVASLKRFGPALKKVVYEAGPTGYGLARALKKAGLPVEVIAPGKVPQAPNADSKTDRLDARKLAEEAEKGSLQKAVIAIPTEQEEADRQLARLRDQLIGKQRRVKQQIKSLLLQHGLPEPAGLAHWSAEGLAALKAMRLRHQLQLSLEVLVGELEHLVVLRKRVERHEVWLMKQRRHRRGARLLQTHPGVGVVTATAFRLEVYQPERFATPEQLAKYVGLAPRVRQTGPKRRGGPLIPAGRGSLRSLLIEASWRWIRDDAAAAKTYRRLVRNTGSGQKAVVAMARRMAVHLWCMLCRGQEYRPAA

SEQ ID NO: 452599 - protein, 395 aa, unidentified
MNKIVHYIGLDVHKDSIAVAIAPQNSTEVRRYGIIGGTLDAVDKLLKRLSQPNIELRLVYEAGPCGFVLCRHLRHKGIHCDLVCPSLIPKKASDRVKTDRRDADQLARLYRAGELSPIQVPDQEDEAIRDLIRARTAAVHDQRRARNRLKGFLLRLGFRYTGKTSWNEAHKRYLSGLLMPRPAQQIVFQESIHAIDDAAERVARLTQAVEDALPGWKWEPVVRALMSLRGLQVLSGMTVIAEAGDLSRFENPRSLMHFFGLTPSEHTSGDKRVQGGITKCGNAHCRRVLTEAAWHYRLKPLVSEAMQKRQEHQSKEVRLIAWKAQQRLHKRFRQLAVRKKSVVAVTAIARELVGFVWAIACQVKPAPRPPAPEVIRTCQGKVYRLDPEKKMPKTK

SEQ ID NO: 452600 - protein, 310 aa, unidentified
MENIVIGIDVSKDRLDVAVRPSGEVFAIERNPAGLEQLTLRLGALSPNLVALEASGGFETVVAAALAAARLPIVVVNPAQIRAFAKAVGQRAKTDPIDAGVIAHFAEATRPEPRPLPDDATRLLADLVARRRQILEMMVAERQREKRVTVPHLRKSILRLLKALERELTSVDTDINDAVRGSPAWREKEDLLASVPGVGPTIARTLIAELPELGQLSRREIAALAGLAPFTRQSGQWRGRSFIGGGRTTVRTALFMGAMVAKRYNPILKAFFDRLVAAGKPKMVALIAVARKLLTMLNAILRDRRPWQTA

SEQ ID NO: 452601 - protein, 346 aa, unidentified
MKILLKQTVGIDVAQKELVVSLGRMDEQISIEVYAYKVFPNTKKGFSSLVLWVNNQTLTTTEVRYVMEATGVYHESLAYYLCSVQKQVSIVLPNKISNYVRTLDIRTITDKSASQAIARFGLERQLEVWQPPLKIFNDLRQLCREREQLVQERTMLKNQLHAERTSATSSEKSVKRTNKRIALIDTQEKEIREEIAKLIKGDEVLAEKMKIISSIPGVGNLTAVTIIAETNGFELIKNKRQLVSYAGLDVREKTSGTSVKSKPRISKRGNRNLRKVMHFPALAAIRTDERFRDIFLRLVSRHGIKMKAIVAIQRKILELTFILWKNNSYYNSEYAYQILPSAAIAM

SEQ ID NO: 452602 - protein, 367 aa, unidentified
MPAADLGSVTTVWSALMAEVMIGIDPHKSSHTAVAIGSGEEPLGELQVHACPSQAGTLLAWAAAWPERTWAVEGAAGLGHLLAQQLVAAGEQVLDVPPKLAARVRLLQAGDTNKNDPGQAARILERVTPAGAVARARCELAAEFLTDIRRLDAQLRDTTKKLAAAVKASGTSLTGIFGVGPVIAGTVIGDVRQVFRFPSRDHFAACNGTAPVEVSSGGRKACRLSLRGNRRLNHAIHMAAVTQIRHKHSQGRAYYERKLAEGKTHKEALRALKRRISDAIYAALAAGARQTAATCSKGPGGQPGNHSVSRAASSHPVRRLFGQATPGPATTIRPVTTAGPAPIQPNRAPQRRAAYSAAASKKPRPAT

SEQ ID NO: 452603 - protein, 586 aa, unidentified
MSSSTSCEPVAIGVGLDTARYGHHATFLREDRQPAIEPLEFLECQAGYQELEKVLSKLAQHHGNIHFHIRVDAASQYATNLLAFLHRLPWPKTISVGEPRRNKQYREVHFPKRKADATESHACARFAIVERPLSSATVDPEVLALREVASWLEFQVKQSTRLVNRLHNLLSRVFPELATLQNDLQARWVLRLLEKYPTAERIAKARLSSVTGIPRLPSEKGQQVHQAAAQSIAAERGAVIEEVVRESVRALQASLDAEKRLEKLLIQTFRELPDERAKQVATIKGIGERTAAVLVAKIVSIDRFPTASHLTSYFGVFPEEKSSGVDRDGNPNPSRSKRMSRQGNDLVRKYLWMSAMSAISGCNPVVVALYARLRQRGRRGDVALGHCMKKLLHQVFGVWTSGKPYDANLASKSTCGRPSNEEQVAEKKEAEGHKTGNTPVRKTVTSTSTDIVPAKAQLVKQTTPSSDGDGSIDLAYLRSQITMEQVLRHLGYFGRLRGNGSQRRGPCPVHGSKRARGRNFSVHLGKDVFQCFHPPCGAAGNVLDLWCAIHRLTPYEGARHLADTFDLELTRDREEEPVTEPVVLNR

SEQ ID NO: 452604 - protein, 376 aa, unidentified
MEQYTEAFVGIDTAKNKHALAIADPGRDGEIRYLGEIDSAPAAVQRMIRKLAGRYEKLYFCYEAGPTGYGLYRQVRALGHDCIVVAPSLVPKRPGERVKTNRRDAVTLARLLRAGDLTPVWVPDAVHEAVRDLVRARTAASEDLRRKRQQLLSFLLRHGRIYSGRKHWTKMHLHWLAQQKFDHPAQQIVFQDAVDAIEDAATRLRRLDQQVAEIVPSWSMAPVVEAYQAMRGVSFGVAATFVAEIGDLRRFDNPRQLMAFLGLVPSERSTGERVRRAGLTLAGNKRARRVLIEGAWSYRYPARVAKPCRRGSRGCPKRFAQSPGRRKFACAPVTVDSPPPAKSVRWSLQQLPARWRRFCGRSRNTSRPPHDREPGK

SEQ ID NO: 452605 - protein, 363 aa, unidentified
MMAPPVAGIDPHQDSFSVGIIDANGVELTHETFPNTAAGYVAAVELLTAHGVVRVGIEGSASWGAHVAIALVAARFDAHEVPPQRSAAQRRARRLEKTDVVDSLSTARALLAEPTLGPVQALEIYDSLVAKIEAVLEHRRMLVEVRTLVLHYAQDQIAKLPSEIRDQLTATGKIESRLRRLHDIDTTAVSTMAGAYRLSWLIALIDQDRQARRQIRQLERDLDALLDEHGTTLRDEPGIGPIAAATLLAEVGDPFRFARESKFARWCGTGAVAVSSGEGSGAPVRHRLDFGGNRRINSVLYIASVTQHRDIHDARVFIDRKLAEGKTRREARRSHKRHLANRVIRRMWNDEQQRLTKTVQRAA

SEQ ID NO: 452606 - protein, 428 aa, unidentified
MADHLNNKPYGAWIAIDIAKDFNAVLSETKEGKRQHFRMANSASDHDRFLSYLRTLPSPCIIGFEATGNYHRALGHRLVAAGFEVCFISSVASARYREVMFNSWDKNDPKDAAVLLELLKQGITQRYVDPLIAGHHDLQELSKTYYQVTLSRTRLQHSILTHYLPLYFPEMGKWWNSTRSAWWINYLLHFPIPSAVTKHSQAEFCQIASPVVGRKVNKAAKLIELYETARHSIGLPVEEDSLACKTFQIQLRRYQEINDCRTQLELTAQAVLADNPDSAILQSVPGIGPINALTILAEGGDLRRFSHHRQFLKYCGFDLAKNQSGNYRGQEQISKRGNARLRLALWMSVNRAIQQPENSFQQKYLRYIKNAPQDKDLQRKARTAVAAKMARVVYGLVKSKQMYQGYYEKALPSGSIPLCRAVEAARTS

SEQ ID NO: 452607 - protein, 368 aa, unidentified
MPLNPSEKGKVMDKITRIGVDLAKNVIQLHGVDSAERIVVRKAIPRQKFLEWFANLAPCLVAMEACSAAHYWARKLRALGHVVRLIAPQFAAPYRKGGKHVKNDARDAEAICEAASRPSMRFVPVKTPDQQNVLVLHRMREGFVEERTALVNRLRGELVEFGVFLPKGIDAFRARFINALEDGTTELNGTARTALLRGWEHWQALDVEIARFDAQIAAQVKQDSDAQRVMAVVGIGPLTASAATATVGDARQFKNGRQFAAWLGAVPKQASSGGKTRLGHITRQGNTYLRTLLFQGARSAVTSAPRRDDRLSRWIVQLQARIGWSRTCVAVANKHARILWAILAKGERFDPSYVQTRPMPAGRGTATV

SEQ ID NO: 452608 - protein, 340 aa, unidentified
MNITTIGLDLAKNLFHIVGLDAHGHEKMKKRLSRSQGLKHFAKCPACVIGMEACASSHYFAREFRKLGHAAKLIPPQYVKAYVRGQKNDTNDARAIAEAVRVPSMRLVAVKTVEQQDLQSLIRLREGAINARTACANRVRGLLGEYGLVMGKSLGALRRALPEILEDPSNGLTGVFRRALNQERQHLLELDAPIDTLTAELTALSTQDDRVQRLQTAPGYGPIVACVFASVMGDGAQYRRGRDASASLGLVPRQHSSGGKNVLLGISKRGDRYLRSLLIHGARAVVNAAQKKDDSLSRWINRLRETRGMNKATVAVANKLARIGWAILRHGTTYQPAQAS

SEQ ID NO: 452609 - protein, 426 aa, unidentified
MYSNTQNSKIAAITERTLVIGIDIGSETHYARAFNWRGIEFTRKPFIFNNDDEGFEAFRVWIEELKTGHDLDKVMLGMEPTGHYWFNLGAFLQDNGMRPVHVNPHHVKKSKELDDNNPSKNDRKDPRVIARLVIEGRYSYPYIPTGIYADVRNLSNLRLQAQSELTRIKNRIARWFAIYFPNYKDVYGKLDAVTGLAVLKVAPLPEDIVKLGAEGVNKIWRDAKMRGAGMKRAMTLVAAAEHSVGCTEASEAARYEIRILLSDYDLYAERESELMGMINESIAEIPYIDKLLEIKGVGLKTAIGFVSEVGDISRFDDPKQVQKLAGYAIVENESGKHKGEHHISYRGRKRLRYVLYEAAISVVAHNAEFKEIYQHYITRDKNPLKKMQSLIAVACKLIRVFYMLATTDNHYDGQKMICDIKRPVVA

SEQ ID NO: 452610 - protein, 340 aa, unidentified
MSLVLQPLLPFPDSCQGMSPHQQGRGTKMTEHCYGGIDVSKDRLDVMVLPDRKSFSVDNNAAGYSELVKRLRGLSIAAIGIEPTGGYERAVIRALLAADLSVRRINPNKLRQFGRARGVLAKNDRLDARLIAEYVAIMPTRVVQRDPATEQLAEVVTMRRQLCDEHVAVENQTAHLEDAMLRRLNKRRLARLAADILLLDRRMAQIVASNANLTRRYELLTSMQGVGPTLAFTLVALLPELGQMSRKQIAALVGLAPYDFDSGRLKGHRCIYGGRLPVRNVLYMAALSACRYNPALKVFYHRLAATNKKPKVIIVAVMRKMITTLNAMLRDNVAWQPKSA

SEQ ID NO: 452611 - protein, 361 aa, unidentified
MVGTISAAVVEAGEVTGGVDTHADTHTAAALDHLGRVLGQASFPTTRVGYCDLLVWLRGHGTLVAVGIEGTGSYGAGLARYLRGEGVRLVEVDRPDRRARRRQGKSDPVDAVAAARAVQAGTATGTPKSRDAVVESIRAIRVARTGAIKARTAAINALRQTIITAPAELREQLAGLGSSALVVACARLRPTGDLTDPVQGVKTALRRLAKRHQDLSEEIADADRELEALIAATAPHLVERMGVGPEVAGQLLITAGDNPDRLTSEAAFAALCGTSPLPASSGRTDRHRLNRGGDRAANSALYTVVMVRMRYHQPTRDYVERRTQQGLTKREIIRCLKRYVVRELLPLIREALDQSRSATAG

SEQ ID NO: 452612 - protein, 407 aa, unidentified
MWYAGIDWADTHHDAVVIDEAGRQADALRVMHTKEGLAELTSFLLARAKTPDQMACIVETNQGLLIAALLEAGFTVYPVNPKTVDRRRSASGAKTDAIDAYLLAKTGRADLVDLRPLKPDSPLVQELKVLTRDQDALIQSRTRLVNQLTACLKAYYPVALQLFAKLQQRSTLVFLQTYPTPQAAQAASVAEIEATLRKGHHSNPTKIAQQIFARVHQPQLIADTITTRTKARLMLALVSQLLPLIEQIATYDKEIKRLFLTHADNAVFRSLPGAGKRLAPRLLAEWGDDRTRYTGSNSVQALAGTAPVAFQSGNYAKAHKRYACLKPLRNALYQFAWQSTKQEAWALAYYRRKRAEGKSHSVAVRALANVWVVWVRIIYRMWVNKTSYETATFEAARLAHAPRPHAA

SEQ ID NO: 452613 - protein, 353 aa, unidentified
MDTIYIGVDFHARQQTICYLKTETGEVVSCELKHQDKQKVRAFYAQFRGQVIVGLEASGYSPWFERLLEELGCEVWLGHATEIRRRARWRQKNDRRDAELILDLMLHNEFPRLHRPAVQSREVMRMLRYRQKLIKIRTMSKNSLQAIALQSGLAKGSRLFTKAGQQELGTAEMSPVMQWQREHWLQLIEPLNQQLLETMVWFKAQSKGDVSITRLRTHPGIGLLTSLCLVHTLQPVSRFRNTRKVAAYAGLDPVERSSAERKCFLGISKAGSRLLRYLLVEAAQTAVRKDEDLKRFYQRLAERRGRPKAKVAAARKLLIRAYIMLRDEIDYAEFRHRAVAARLARRSHRPESA

SEQ ID NO: 452614 - protein, 346 aa, unidentified
MFYLGLDVHGKWTTVKGFNPQTGEGVEWVRVPNDPQAMAAALAGLGGPLYGAMEAGTNSWAMYRLWRPLFAELTVVHPADLWDRQRDRQAKTDRRDALRMAQKLYRGELKGIYIPDERTQDLRVLVRSKVRATRWVTRLTNEIASLLRSWGYVGQRSLLSKQGLKDLEQVRDLPEHSARVLLLWRQLLSTAQAIEQELERAVDSEAAQDADCALLQTVPSVGPFTALLVKAEVAQVARFATADQLVSYVGLAPRVRQSGERCRYGKLGPWGNRWLRYGLVLLANRIANSRKDTRLRRVYLRSCLRQKHNAAKIAVARKAAHLMHYLLTHREVWKEESQERRALRAA

SEQ ID NO: 452615 - protein, 342 aa, unidentified
MSVIIGVDPHKATHTAVAIDRTEVELARAKVRATCRQVPQLLDWAASLGERTWAIESADGLGYLLSQQLIDAGETVVDVPSTLAARVRVLGTGRSDKNDPNDALSVAIAALRTPGLREVLSAEHTAILRLLAKRNVDIGNQRSRVVCRLHSLLMELSPGGIAKELNTSDAIALLDHVEPTGAAEIARHDQALELLADIQRLDEQLKVSHRRIRTAVVASNTTLTEVFGIGPILACYLIGFTGDIGRFTSRDRYAAYTGTAPVERSSGGRIVHRVSQRGNRRLNHALHMVAICQIRHPHSDGRAFFERKVAEGKTKKDAIRSLKRHLSNTVYRKLIEDQRRVM

SEQ ID NO: 452616 - protein, 350 aa, unidentified
MEPSNKIIGTAYVGIDVHKRSWKVCLLGDFGFMKQFSCKPDTNTLTKSLTNLLPDFSFECCYEAGFSGFILHDELNEIDRFNCIIVNPADIPTSDKERAQKEDKRDARKIATQLKAGGIKGIYVPAKSDVGLREIQRLCHTTTKELSRSKIRIKSFLMRHNIIPPKEQFKTARQHWSAKFIKWLNELELSNAGLRFTLTELTKCVERLRIQKTQILKELRKQIQTSGKESVFNKITDIPGIGIIGGVTIITEVIDIKRFRSYESFHSFIGLVPSTNNSDTTEKIRGITRRSNRRLRNTLIEASWIAIKFDTDLFHLYHELKQRMTSNRAIIRIAKKLATRIRFNLLQMQP

SEQ ID NO: 452617 - protein, 320 aa, unidentified
MLSFGGIDVSKDRLDVMVLPEEQCSSVPNDAAGWAKLVEQLRGFSISAVGIEASGGYERGAVRALLAAGMSVRQVNPFKLRQFARASGVLAKNDPLDARMIASFIAIMPTRPAQPHAPAVERLAEILTVRRQLSDAKVAAENASRLLEDAMLQRLSRRRIARAAADIDMLDGRLVEIVMADAALVHRYQLLTSMPGVGPVLACTLIALLPELGRMNRKQVAALVGLAPYAFDSGKLKGARCIWGGRASIRRVLYMAALIAMRCNPALKAFHNRLAATGKKPKVVIVAVMRKMIITLNAMLRNETPWVDRSSGRHSVLTAR

SEQ ID NO: 452618 - protein, 343 aa, unidentified
MEIITIGLDLAKSIFQVHAVDEAGEPVVRKALRRAQVLPFFAKLPSCLVGMEACGTSHHWARELTKLGHQVRLMPPAYVKPYVKRGKTDAADAEAICEAVTRPTMRFVPAKSGEQQAALALHRTRDLLVKQRTQLVNMVRGLLAEFGIEMARGLHRALELARRLSAGEAPEVPALAQRVVTGLADQIGALQVQLAKLEKELLVWHRSNELSQRLATIPGIGVISATALAASVIEPERFRSGRQFAASLGLTPLQNCSGGKERLGRISRMGDRYLRRLLVVGMTSLIRRARTKPESVDPRLPAMLQRKPARLVTVAAANRTARVAWAIMTRGGTYHSTMVAQAA

SEQ ID NO: 452619 - protein, 357 aa, unidentified
MDVSSQQPPTTAGLDLGDKYSYLCIIDQHSGEVIEEGRLRTTPEALKRRFASERPMRIAIEAGTHSPWVSRLLEECGHEALVANARKLRLIYSNKRKTDEVDAENLARLARVDPKLLYPLKHRGEDSQAHVAIVRSREALVSARTQLVNHVRGAVKSFGARLPKCPAVSFHNKAPEHIPEALLPALGPLLETIGSLTRRIRQYDRRLEAIAKEHYPETELLRQVEGVGPLTALTFVLTVEDPYRFEKSRSVGAYLGLVPARDQSGDRDPQRRISKEGDEMLRKLLVSGAHYVLGPFGSDSDLRRHGEKIAAQGGKNAKKRAVVAVARKLSVLLHSLWISGEVYEPLRNTHRSGAQAA

SEQ ID NO: 452620 - protein, 423 aa, unidentified
MAYRIAGIDVHKKMLAVVVSDVEVDGEYRFERVRYGSTPEHLRLLAEWLITQQVEEVVMESTAQYWKPVWGALERYWKPICQEREGAGPKSGTLHLAQAQSNRGRRGRKKDFPDAERLVKRLVANELILSFVPDAEQRLWRTVTRRKYQLTRSHIRLQNQLEGLLEECHIKLSSLVSDLLGASARRMLKALAEGETNPAALAAMADRNLRATQAQLCDVLGACTELKPIYRRLLKMFLEELQFIDQQISKLDQELANLLSRHNDAVVHLAEIPGLGVDSAQQIIAEVGAGAATFPSAKQLSSWVGACPGDEESAEVSKSHRSPKGNRHMRRILNQAANAAVKSKGTIFEIIYRRLVSRLGHNQTIGAVAHRLCRLIWIILHSGVRYEERGPSVSAKTRRHRTNRMIRELRILGYRVEPLVATG

SEQ ID NO: 452621 - protein, 348 aa, unidentified
MDKITAVGLDLAKQIIQVHGIDAAGHVVLRKAVRRERLLALLAQFPLCVVGMEACSGAHHWARQFKQLGHEPRLMAAEFVRPFRKSLAAKNDANDAEAICTAVVQPNMRFVSIKSVEQQALLSLHRIRQGLIEERTATINRLRGVLAEFGVVLPQSVPALQRALPTVLADAERLPAVVQRSLQLLLEHLRELELRLAEFDRQIAQHAKSSAPAQRLAALPGIGPLTASAVVATVGNAQDYRNGRQFAAWLGLVPRQYSSGGKCKLGPITRRGDAYLRALLVQGARSTLQAALRRAPARHDRLSAWIVQLAQRVGYHKTLVAIANKHARIIWALLAHEQTLDLARTTTH

SEQ ID NO: 452622 - protein, 403 aa, unidentified
MVFVGVDWAESHHDVCLLDEQGKVLGKRRIPEGLEGVRRLHELIAEHFEEPDQVVVGIETDRGLLVQALLAAGYQVYAVNPLAVSRYRDRHTTSRAKSDAGDAKLLADLVRTDRHNHRPIAGDTELVGAVQVLARAHQNLVWSRQRQVNQLRNTLREFYPGALEAFGTDLASVDAIAILEQAPTPAQGRSFSQAKITSALRKAGRERNLEAKAAEIQTRLRTPQLEVPPLLTQAYGRSVAASVRLLRQMNQELATLERELAAHFEMHPDAEIYLSLPGLGFVLGARVLAEFGDDRTRFAHPKARKNYAGNAPITKASGKSKVVLARVARNRRLADACHLWAFSALTRSPGARRYYDQLRGRGKTHQQALRALANRLVGILHGCLTNRETYREDVAWPTLGVAA

SEQ ID NO: 452623 - protein, 455 aa, unidentified
MAKKAKKIKTKKGLKLEIVNPNAAGIDVSSTEMQVCVPEDRDGDNNRRFGTFTCDLHEISAWLKSCEIDTVAMESTGVYWVPLYMRLVADGFDVLLGSAQAIKNFAEKKDDEVDAEWIMLLHSYGLLKASFQPCNYTREIRNLVRHRDNLLRSSAKEVQHMQKYMELMNIKLTNVISDILGVSGQAIIAAINKGERDPKALAALADPRCKSPREIIEKSLEANWDENLLFTLKQSFELYHFMQKQIEQTEKKAEKIILKYKASLPKVIVGQNGCKRSEKAEAVKNRISIDIEQYAHEFWGVNIMRVPGISKGSTFRLLGELGHDFVEKFDSYKEFCNWANLVPNNKISGGKLLSSKVPKRKNPVGQILRVAANSLKNEKSPMGNYFRKIRSRKGHNHAIVATANKLGKIIYSMVKNQTEYDESLVQEDQAKILKMKLKRTERELERIKKQLSECA

SEQ ID NO: 452624 - protein, 371 aa, unidentified
MTSIIYVGMDVHTTNYTICCYSITTDKVFAMATMEPDYMNIKKYLERVDKELGGDSHFQCGYEAGTLGYSLYHQLSGQGIECVILAPTTMATTRKKKGIKNDKRDAANIAKCLAYNTYSPVYVPDGEDNAVKEYIRMRNDMKDMLKKTKQQTLAFCTRNGKRFTEGRDYWTQKHLAWLGKLDFGDAILNETLREYLATYHQATEKVELYDRRISEMARTERYAEKVKKLKCFVGIKDHTALATIVEVGDFARFPAARNFSSYLGLVPGEDSSGDSVQRTGITKAGNSHVRKLLIEAAQCYSRGAVGAKGKALKTRQAGNDPKVIAYADRANERLKRKCYRIMFKSKRNIAVTAVARELACFIWGMMTDNIA

SEQ ID NO: 452625 - protein, 321 aa, unidentified
MNYVGIDVSKATFVVAYSSAKSSETKTFENTTKGVHKFIQTITTEDTHCVMEATGNYSMLLVYLLSKAGITVSMENPLKIKNFARVMLSVVKTDEIDARMIAMYGEKMNPAPFKLRSDSLMVLKQKRTVLRQLKKQLNANTNLLESMEALPFIDSVCKKILDKTVKFLMKQIKEMEEELSSLANIEYRKQMDLLTSIKGIGVTLATALIVATGGFTYFDNAKQLTRYLGLSPIYQQSGTSVNLKGHINRNGDSYLRSQLYVAAFSSLRCNTECKACFDRLRANGKPGKVAVIAVANKLVRQAFAVVTQGKKYVDGFISAKK

SEQ ID NO: 452626 - protein, 458 aa, unidentified
MYLGIDVSKGYADFLLMDENKQSMERSFQLDDNYKGHQELVMYLKNHSSEGKTIICGLESTGGYEQNWLTVLKRISKQLPVEVYKLNPKGVKHQIESTLKRTITDSVSAEGIANYVANNYQQKKQDWHKSTHQDEQVTDAQHCFNLINGFIKQQTARNNQIEKLLYQNFPELLTFCKQGIPNWMIRLLVKYPGLMSIKRAHVESIDGIKGISWAKAERIKELAKTSVALSSHPVKEVMIKALAEDIQYHQTRIEEVKTYLCGIYTNGDLEILSSIKGIGEWTATALSVLIGSVDRFEGTSEIAAFYGVNPKFKQSGDGKWGIHMSKQGSSSMRSLLYVAANNVVLHEPYFKKLYHHYISKGMKPKVVRGIMMHKLLRVVYGMLKNRTRFDKSIDEKNQQKNQNHNEQPITKTSRRYQKLNTDAPISRSNYKKRRAVLECQISETDMITASSSTTQLQI

SEQ ID NO: 452627 - protein, 428 aa, unidentified
MDEITEEPTALVERVAALDIGKATLTACVRVPHETKPGRRRQEVRTCATTTRSLLGLRDWLVCQGVTRVVMEATSAYWKPPFYLLEDDIAECWVVNARDVKNVPGRPKTDKLDAVWLAKLAERGMLRPSFIPPRPQRQLRDLTRYRRTLTRYRRTLTHERTREKQRTEKLLEDAQVKLSSVISDIFGKSGRDMLDALIAGQRNPYALAALARGTMRAKTSVLQEALTGHFTDHHGFLLAMMLSRIDALTAQIGTLTARIEQAIAPFAHQVAQLDEIPGIGIIAAQDLIAETGADMSRFPTPAHLVSWARFAPKARQSAGRSKAATTGKGNPWLGGTLGESAAAAARTSTFLASRYKRIVKRRGKQRALVAVGNSLLTIAWHLLSDPSARFTDLGPTWHDRHTPQRRKRQLIAELERLSGMKVTLEEAA

SEQ ID NO: 452628 - protein, 346 aa, unidentified
MRFYTTPHPFYCGIDLHARTMYLCILDQHGEILVHRNMKTTPEAFLHAIDPYRQGLVVAVECMFTWYWLADLCADEGIPFVLGHALYMKAIHGGKAKNDKIDSQKIAALLRGGMLPQAYVYPAQMRATRDLLRRRMHLAHKRAELLAHVQNTNSQYNLPAIGKKIAYKANREGVAERFADPAVQKSIEVDLALITYYDELLRDVELTILNTAKHHDANTLYLLQTVPGIGKILSLVLLYEIHDIHRFPRVQDFVSYCRLVKCAKASGGKRLGTSGAKIGNAHLKWAFSEAAVLFLRDHPAAQKYLARLEKKHDKGKALTILAQKLARAVYYMLKRKGAFDRETFFQ

SEQ ID NO: 452629 - protein, 323 aa, unidentified
MNKDIKYFGIDISQKVFDVTDSDGNYYQFKNNELGFKKFSKLLDFNSYCVMEATGYYHYQLAYYLLETGFKVSVENPLSVKRYIQMRLSKLKTDKSDSKLICEYAMHVELKLWKGNSKEVQECLQITRALWVYTKQRTMLKNKLHGESVLGEPSKIVVRSLKRSLKQLYKTMQALEERLLFLVKDTHKDLFTRITTIPGIGRKTAIMLIVLTGGFERFSSASELCSYAGLTPMIRQSGSSVKGRPRISKMGNQKLRNLLFMCSFTACKYNKACRDLYERIVAKGKSKKLALIAVCNKLLKQAFAIAKFGLIFDATYKSTLVKN

SEQ ID NO: 452630 - protein, 355 aa, unidentified
MTSSKYIGMDVHKESISIAVRNAAGKIVMESVIQTKASMILQFIDGLRGDLQVTLEEGTSAAWLYDWLKPHVTKLVGCDPRKNASLREGNQNDRIDARRLAELLRLDHLHPVYHGAHGLRSLKELVRSYLTITKDLGRVRSRLKAIYRSWAIPCTGKQVYAPRHRAEWLGKIPEPGVRRRAEFYYQQLDALRTVRQQVRRELLAEGKKHPAWQRLCQIPAIGPIRSAVLLGILQTPHRFRTKRQLWTYSGFGIETQSSADHRSVDGQLERVKKQISIRGLNRNCNHDLKNLFKGAAIVAATKPGPLQEFYTALLAKGIRPEMARLTLARKIATIVLLVWKRGVSFDAQHLKPQTA

SEQ ID NO: 452631 - protein, 363 aa, unidentified
MNKKIVAQNTEVVIGVDVHTTSHVVTAKTGKEFVDQRRIGPDRRAWSCYLEKFPGCNISAVYESGPHGYNLYDMLREMDGTNGQRIEAYVAPAANVPKAPGKKNKKTDRRDSKDLVWAYESGSFEPVVVPDEVCRAERELLRTKESLAGDITMLKNRIHGRLKNHGIDYPEEKLFCDGWQGEVLKRAKTLQDPTREIHAVLKLWFKMLKQTEEALAAVKKRIKRLYAKGSRSETARKIKENVPGIGVESAMVIATEVADFTAFRNSDAFASYTGLVAGAHNSGDTERSGPITKEGNQRLRHVFIECAWTHIRYDDDAARRYAELKNRRGARRAIVAIARRLAVKVYHLVVHGGAPDQVRPASM

SEQ ID NO: 452632 - protein, 425 aa, unidentified
MRFIGMDVHRDHCEVAIAEAGKVRSAGRVPTRPKVLEAFARSLDPKDEVVLEATFGAVAIAAIIKPHVRRVVIVDPRRLKGMGPRKTDRRDAKVLAELLAAGYLEEVWAPDAATQVLRRLVSRRAALMRARTRAKNEVHAALARTLSPRPPMKDLFGKGGRLWLAEIALPADEQLTVEGCLRQIDALEAEISKLDLALAERTLASPEMRRLMTVPGVSMQTAVTFMAAVGDISRFPTPRKLVAYLGLDPRVRQSGESPARHGRISKAGHSDARHMLGEAAWSVVQAPGPMKAFFERVRARRGVQVAATATARKLCVLFWHLLTREEDYTFAQPSMTRKKIRELELATGAKPQRGRQHAGGPLRNPKVREAERAVSAQAELAYRRLVTDWRQQGGEKGAGATPGRASIRPSTGQAARQDSAPDPAL

SEQ ID NO: 452633 - protein, 341 aa, unidentified
MDDVTLVGIDLGKHSFHLHGQDAKGKALFRKKMNRKQLIEFFATFHACTVVMEACAGAHHMARKLAAFGHTVRLISPQFVRPFVKSNKNDFVDAEAICEAASRPAMRFVTPKTQSQQTLSVLHRVRESMVRERTRTVNQMHGFLLEFGISLPVGNTAVTRLPSVLAMHELPPRLVTILERLRQHFKYLEEQIGEIDQELARQLVDDEVGQRLMSIPGVGPVTASALAAKMGDAKQYGCSRDFAASVGLVPRQFSTGGKTNLLGISRRGDKNVRRLLVLCARAYMRGLEKRTGRLADWVRAMLAQRHSNVVACALANKLARTAWAIVAHRTTFDAGYATHPI

SEQ ID NO: 452634 - protein, 404 aa, unidentified
MKRTKARGPVQRDAKEVMTEVLGKLTGKLHVPAVSTSAKEKRRGNTVGPNRDRLTVGVDLGDRWSQYCILGLEGETLAEGQLRTTQEDVGEFFQAMTAARVVVEVGTHSAWVQDVITELGHEVLVANPRLMEGSKRRKRKSDRIDANKLARLGRVDPQSLYPIRHRSREVRQDLVVLRARDALVSVRTELINTTRGLVKSMGTRLPRCSSPSFAEKVKDAIPDEVREALLPLVQLVATLKDCIARYDQKIEELGREKYGHTTLLRQVKGVGPITSLAYVLTLEDPQRFSSSREVGPYLGLVPKQEDSGDSQPQLGISKAGDRMLRRLLVGSSQYMLGAFGPDTDLRRYGLRLCERGGKNAKKRAVVAVARKLAVLLHHLWVTGDVYEPLHHTGAETRTTQATAA

SEQ ID NO: 452635 - protein, 346 aa, unidentified
MEHYVGLDVSLKLTAICIVDRTGKIEREGVVASDPETIVAFIKSHAPHVARVGLETGATSTWLWTELNKVGLPVICIDARHAKAALKLQINKSDRNDAVGIARIMQCGWYKEVRVKDLDSHAIKALLVSRALLVKIKRDIENQVRGLLKNLGLVIGQAKMNVFAVRAAELADARPELAAAVEPLLRAREAIERQIVDLDHKVMRLARSVAQVRQFMTAPGVGPITALCFLATIDDPTRFRRSRSVGAYVGLTTRRYASGEIDWTGRISKCGDKMLRTYLYEAANVLLTRVAKWSALKAWGIRLAKRSGLRKAKVAVARKLAVILHRMWIEGTEFKWLSNQAAKQPA

SEQ ID NO: 452636 - protein, 372 aa, unidentified
MNYNTVYVGMDVHKESFSLCAYTIEAEKAFHYQRTEADYKNVLRYLEFLRTVYGNDANFICGYEAGCLGYTLYHQLMANNVKCIILAPTTMLEQRSKKRIKTDKRDAEIIAKCLAQHNYSPVHIPTAKDEETKEFLRMRDDHKLALKKVKQQILAFCLRHNYRYDGKSHWTAAHLKWLKALTPETLYKEILDEYLLTYQTLSDKIERLDKRIEELATQDEYKEAVKKLCCFIGVKTHTALSVLVEVGDFKRFASAQHFASYLGLVPGEDSSGDDQNRLGITKAGNRHVRLLLTEASQCYARGQVGFKSKELKSRQSGNTPAVIAYADKANERLRRRYYKMVLNKYKKHNVAKTAIARELACFMWGMMTDNIA

SEQ ID NO: 452637 - protein, 338 aa, unidentified
MKTYAAIDLHSNNGVLVVTDETDRVLRQKKLANKLELFVAELEPFRATLQGVAVESTFNWYWLVDGLLKHGFPMMLVNTAAIQQYEGLKYTDDPYDARWLAHMLRLGILPTGHIYPREERAVRDLLRKRSSLVQQRTANILSVQNLEQRNRGTKISSGEVKKLTEESIGELYDNEDLGWALTTTIKVIEALTEQICCLEKAVLKKARLRDEFKLLLTVWGVGDILGLTIMYEAGDMSRFADAGPFASYCRCVQAQRLSNGKKKGENNRKNGNRYLAWAFVEAAHYAIRYYPEAKRFYDRKAARTLPVVAIKAIAHKLARASYHVLRDQKPFDPKKVFP

SEQ ID NO: 452638 - protein, 319 aa, unidentified
MAQNDLVVAGIDVAKDKVDVCIRSPSLRRTFASTAEGRRELVSWVRRQKVGKAVLEASGGYEREWAKALRNAKIEVRIVDPKRVRSFAQSAGRLAKNDAIDAEMIAWFAETFDEARGQAWDAAREELVQIVNARQALLEQQTQMQNRSEHAVPIPVRKMHERLLKAITLEVARLEAAIAALIKASPHFAETAEIIESVPGLGEITSAGLIAAMPELGQVSNEAISALLGVAPYDDDSGKRRGERQIKGGRRKVRNLFYMACLGAATRHNPVLKAFYRRLIAKGKKAKVALVACMRKLIVILNIMIARREKWDASRHAVG

SEQ ID NO: 452639 - protein, 343 aa, unidentified
MNLSYVGVDLAKNVYQLHGVDRHGELVWKRRLRRGQWLQALLDKAEPGCEIGMEACTGAHHWARELQSRGYTVRLIAPQFVKPYVKSNKNDANDAEAICEAMSRPHMRFVTVKSVEQQDIQATHRVRTEIKDHRNAKANQIRGLVAEYGLVAPQTLLALRGAIPQWLEDAENGLTDYFRSLLHGLWDDLLTLEDRLKELDKEIEKLARSNEVTKRLQQLRGVGPIVATALVATVGDGAQYSKGRQMAAALGLTPRQNSSGDKHRLFGISKRGDVYLRTQMIHGARAVVSQAKHRNDPLSRWVTDIAKRRHPNVAAVALANKTARMAWAMLRNDTDYDPGLGAC

SEQ ID NO: 452640 - protein, 385 aa, unidentified
MGSQTFIPRDYDVFAGLDVDKRSISVTFTDHQGLLKSLHMPYSVEHLVNHVRKHFPNQKVAFAYEAGPTGYGLYDGLVTQEFRCLIASPSMIPKAPGQRVKTNRLDSQGLSQNLRGGQLKSIHVPTAVYRELPHLTQLRDTFVSEMVGMKQRIKSLLLMEGIEFPPAPAGSQWSFMVKNKLRKLPCSSTVRFKLDQWLDSLEFNEKQVLKTTREIRRFCQNDPELSQCIKYVMSVSGIGWIVASQLLARIGNWRELTNIRQLAGFLGLVPTEHSTGDRTDRGSITHTGDGRLRSKLIQASWSAIRKDAELREFFGSICRRHPRRQGPRVAIVAVARKLSVRISVVLMKQRPYVVREKVHSAPLTQEETSPQGTTRRLREPGDKDS

SEQ ID NO: 452641 - protein, 345 aa, unidentified
MKHTIIGVDLAKHVIQICIVKNNKIISNKEIQARDFTHWLAKASKAIIVFEACATSNYWKQVALKMGHDARLISARLVSKIRQHQKTDKNDALAIVQASQLVNIKFIKGKTFDQQELQSLMRMRELAVRQKVAIAKQIDSLLLEFNIKISPRTGGIKGTVLSVLEDAENGFSMTFREGLQIAWQFYLQALQSILDYEHLLEKMLKIHPQCIKLMALEGVSTINAINLYIALGCDDIGTFKTGREAAACIGVTPIQYSSGGKIKLGSIGKYTRNTQLRSYLIVGAMAVVKVVAKREPKTKKEQWLKQLIERRGMKCAAVALANKTVRTAFALLTQGTEYSAQPLEG

SEQ ID NO: 452642 - protein, 330 aa, unidentified
MEPKYIGVDLHKAFFQACAITATGDRLWEGRFDRTPDGVAAFGSRCHGATHVAVEATGPTWSFVDAVVPTGARVCVVDPRKTRLKAGYAAKTDRLDARRLADALRRDSVVSIYVPPPAIREVRELCRGRHQVVRLRARLLQMIRALLLRAGLGDPPVTRLVSPRGLTWLQQVSLPPDAEQTLRRLVRVLELVHHEVLDAEARVAAAAKADPIARALDVLVGIGPVFALTIRAEIGDVARFRRGPELASYAGLVPRVYSSADRYRSGRITREGSPWLRWVLVEVAMHAMKRRDHVGRWARQLAVRKGGFKARVALARVVCDEIVRVWPTSA

SEQ ID NO: 452643 - protein, 345 aa, unidentified
MKITTVGIDLAKNVFQVHGIDERGKAVLRKQLRRAQVAVFFGNLPPCVIGMEACASAHHWARTLQRFGHTVRLMAPQFVKPYVKTNKNDVADAEAICEAVGRPNMRFVPIKSIEQQAILSVHRVRHGFVRARTAQANQIRGLLGEFGLIIPQGICNVAKRVPELLEDASNELPVPFRHLIDRLTKHLKELDRQVKEFEQEIIAWHRSSELSRKLEKIPGIGPLAASALVASIADAHSFKNGRQVSAWLGLVPRQSSSGGKPTLLGMSKRGDAYLRTLLIHGARSAILAAKNKVDNTQGWLTNLLNRRHPNIAAVALANKNVRTVWAILAHGTEFKADYVPTRMTA

SEQ ID NO: 452644 - protein, 316 aa, unidentified
MSEPVYVGIDVAKASFEVAASGEMQTFSLGNDEAGHAELCQLLIPLAPRLILLEATGGHERLLALALAAAGLRVSVINPRQARDFARCMGKLAKTDHIDAQVLRGFAALLDAQGHEPRALLDEQQRELTALVARRRQLVAMLVAERQRLALAHPKAKASILAIMDAIAAQLHDVDGQLREHVQAHHADLAKLLTSVKGVGPTTASTLLAQLPELGRLNRKQITSLVGLAPMNRDSGTLRGQRHIFGGRADVRRVLYVAALVGTRFNPVLKAFYAKLLAAGKPKKVALVACMHKLLIILNAIARTKSPWSNEITGIA

SEQ ID NO: 452645 - protein, 375 aa, unidentified
MTSMPTASRQRQRRPQTRPDRTVFAGVDTHKELHVAAVIDASETVLGTHSFSTTRAGYRAMLAWIREFGEPARIGIEGTGSYGAGLTRHLATAGITILEVDRPDRSDRRRKGKDDDLDAISAARAALHQRRTVTPKSKDGAVEALRVLRVARAHAVRERRSTLQLLRMTIVSCPDELRDQVRNLTRMQLIRTLAAWRPDVSNATDPVTAYRVALKSLARRYLELSDEITGLDELINPIVEALAPALLARVGIGIEVAGQMLVTAGDNADRMKSEAAFAMLCGVAPLPASSGMTQRHRLNRGGDRQANRALHLAVVSRLRLDPKTRAYVAKKTAEGHSKLEIIRCLKRYLAREIYFLLNPGQPAAPPRPPRRRIAT

SEQ ID NO: 452646 - protein, 345 aa, unidentified
MKITTVGLDLAKSVFQIHGVDGRGKAVLRKQLKRSEVVQFFANLPPCLIGMEACGSAHYWARKLTALGHEIRLMAPRFVKPYVKTNKNDRNDAEAICEAVARPNMRFVPIKSAEQQALLALHCARSGWVKARTAQVNQIRGLLSEFGIVLPQGITRLRHRLPEILEDGDNGLPGLMRALLSTLQTHLKELDQQIVALEREIVAWHRRNENSRRLERVPGIGPITASALVASIGNAHNFKNGRQLAAWLGLVPAQDSSGGKTKLLGISKHGDVYLRTLLIHGARAVLRHLEHRPAATNSWLARLVARRNRNVAAVALANKNARIAWALLAHQRDFASDYVSTATTH

SEQ ID NO: 452647 - protein, 397 aa, unidentified
MYIVGIDIAKRKHEAAVIDGEGTVIIKPFSFTNNCSGYNRLLAMLAKAKLPLDEVSFAMEATGHYWLALFTRLQKEGFRVQVINPVQTNSIRSFYIRQAKTDPRDALLIAEVIRFGHFSESTLHPENIYELRELCRGRHAIVSMQADVKRKVVALLDQVFPEYETAFTNLFSDTSMAILQTCPTPKELSEMPLEELCHLIEVSSRKRFRMAKAQELQALARNSFGFAMAGDVFSTMIRLYAKHLDFLKQQVREMDRKIAEIMDTLDTPITTITGIGPTLGAYILSEIGDISRFSSAAKLAAYAGIDPTMRQSGEYNGVRNRMSKRGSPYLRHAIWLAASSAVLHDPALKLYFQKKRDEGKPYMASVGHACRKMVSIIYAVMRDNKAYTPCIPNEISA

SEQ ID NO: 452648 - protein, 351 aa, unidentified
MQPMLTGQVDHVIGVDTHRDTITAAVVEAVTGGVLAQRTSGTQRMDYRHALSWAKHEAPQRRAWAIEGAGSYGAGLATYLLAQGETVYEIDRPARLARKNGAKNDDLDSIRAAREALARQHLATPRARGLREAMRALLVTRNGAVLMRTESINHLKSLIVTAPEGLRDQLRRHSTLHQVDQCARLRVRPEHSLEHRGTIRALRATARRIQVLEAEANELELNLRELVETCCPTLLQLHGVGVITAAQIFIAWSHPGRVRNEAAFASLAGAAPIPASSGQTIRYRLNHAGDRQLNRALHTIVLTRLRTDEQTRTYAARRTAEGKTPREIKRCLKRAVARQIYRHLNEAAHAA

SEQ ID NO: 452649 - protein, 355 aa, unidentified
MDSTKYIGMDVHKEAISIAVLNSSGKLVMESIIETKAITILQFIQGLRGSLHLTFEEGTWAAWLYDLLKPHVREIVVCNPRRNAYLKEGSKSDRIDARKLAELLRSNLLRPVYHGEQGVRALKELARSYLTISKDQARVMTRLKAVYRSWAIPCTGKQVYALRYRLEWLGKIQEAGVRRRAEFYYQELDALRSLRQQVRRDLLLESRKHSASQLLRQIPSIGPIRAALLVALLQTPHRFRTKRQLWSYIGLGIEAHSSAEHCYVAGELQRSKKQISIRGLNRNHNHDLKNLFKSAATIAAAKVGPLQEFYAALVAKGIRPEMARLTLARKIAAIILVVWKKGVAFDAKYLKPQTA

SEQ ID NO: 452650 - protein, 360 aa, unidentified
MEVGQTVADHGVVGGVDTHKDLHVAAVVDELDRVLESRCFATTRHGYKQMLTWMRSFGQLRRIGVEATGTYGAGLLRYMQNAGVEVLEVTTPDTHDRRKRGKNDDLDAQNAAHAAFAGRRTVTPKSRDGMVESLRVLKACRKTAVVARRVALQMIHNTIVCAPDDLRETLRKMTRMQLIRTLAAWRPDLTDYRSVVSAYRITLKSLGRRYLELHDEIADLDTMIVAIVDELAPALVARNSIGHGSAAQLLVTAGDNAERLQSEASFAALCGASPVPASSGKTTRHRLNRGGDRAANSALHIIAIGRLRTDPRTKAYIAKRVAEGHSKLEAIRCLKRYIAREVFSLISQRKRKINQGRNAA

SEQ ID NO: 452651 - protein, 376 aa, unidentified
MTDSTTTTAAAATAAGTILAIDLGKFRSVACRYDAAAGTHAFETIATTPAAVHDLLVADAAPPRLLVIEACGVCGWISDLAESLSIEVRVANVLGEAWKWRRVKRKTDRDDALKLAKLAASDQLPSVHVPRLAVRQHRSLIRHRHALIDRRTGIKNTIRSLLDAQGLSMPMRSRGWTVASVNELKKLARPLSECDGDTLWRGQLDLELRLLEAVSALIKEADKKLDAIAAQDERVRRLKTIPQVGTRLAELVVSTLDDAKRFKTARQVSAYAGLVPKQYQSGQMNRLGRITGQGPGLLRRVLVQVAWGLQRRRETRGHAVFERLCHGQRTRRKQAAVALARKILIWCWAILRDGSVWAGDGDDACDRRRRRRLAVA

SEQ ID NO: 452652 - protein, 407 aa, unidentified
MLFVGNDWAEAHHDVELVDAQGTVLVRRRLPEGVTGLATLHGWIADHLGEDDEPDQVLVGIETDRGSWVQALIAAGYTVYPINPLQVARYRERHGVAGAKSDPGDAHVLAEIVRLDRAHHRPVAGDSTIAEATRLAARAHQSMIWTRQRSTNTLRSLLREFYPAALEAFHEDLAGRDALAVLKVAPDPERGRRLTVSRVKALLKAAGRQRNLQTRAAEIVAALRTEQLPIRAGLVEVYAVSVGALVAVITEMVTQTGVLEEQVKQGFGQHPDREIYLSQPGLGPILAARVLAEFGDDPDRYADARARKNYAGMAPITKASGTKRVVLARWARNRRLADALYQQAFAALTGSVGARACYDRHRARGATHHQALRTLANRLVGILHGCLNHHTLYNEATAWPTKHQLAA

SEQ ID NO: 452653 - protein, 520 aa, unidentified
MATTRSRNRPSRRRVPTSVGKPRGVLHPRVQQVGPEHFGILCFDCAKARSKFLLADFYGRVVLPPTVVAHTRPALDAAVAQIRDAFAQHQLRDGLVAIERTGRYHRIVQRTFAAAGFETRILHPFVTKQYRQPVDPGNKTDDADLAAIHRATVTGCALLEATRDEAWTTLQLVIRHRRDLVGKGAALNCQIRDHLEAALPGYAACFDKLWESPIPWHLVRHYPTAGQLRAAGLTTLCHALHQAGIRFQQRTVQAVLDWAAQAAPGDVAASQHLRIALALYDDRQRKTQEIQALEREIAARLVQTPYVLLLSFPGINVVSAADFAGEMGPIEHYANAKSITGRAGLRPSRYQSDQVDRANGPLVRHCNRSLRAAILGIADNLIVCNHHFQALATQWAAQAKDPRHTRVKVGLRFCRIAFQMVAGRQVFRHPSIQGRHYILDKLTAFHRAHDTGMVEVLRDLQAAIGQVPPREHAAEAKPLQEELQRIRDGHRRGPQVLGDILPIVLARLGVGVVQSEESGE

SEQ ID NO: 452654 - protein, 343 aa, unidentified
MTYYAALDVGLRTVALCIIDEVGVVKLEKSLPSEIEDIVACLRDFGEEIACVGLEAGTLTQWLTYGLRAAGFKPIVLEARHVQAALAAMRNKTDRNDARGIAQIVRTGWYREVHVKSIESHYVRTLLAARKALLRKCIDLENEVRGLLKVFGIKLMPGLRHGAFDKAVREPIEANGALHHALVPLLDVRLELYRAFLEMDRRVKVLAHADQICQLFMTAPGVGYIVALTFKAAVDDPSRFKRSKNVAAHFGLTPRRYQSGERDNPGHISKAGDTEVRSALYAAANIVMTRSTKPSSLKAWGNRLARSKGRKRALVAVARKLAVILHTMWIDGTEFCMETREAA

SEQ ID NO: 452655 - protein, 369 aa, unidentified
MDEHSEIFVGIDVAKGRNAIAIADGERSGEVRYLGEVDASVASMTRIVRRLAEKYDRVQFCYEAGPTGYGLHRLITALGHACMVVAPSLIPRRPGDRVKTNRRDAVALAKLLRAGELTAVWVPDEGHEAMRDLVRTRAAAVETLRVHKQQVSAFMLKHGRRYPRRTAWSMRYLRWLQEQQFDHPAHQIVLQEMVEAVRLAKERVERLERTIEEFLPAWSLAPIVGALRALRGVDLIVAATFVSEVGDIGRFDHPRQLMGYLGLVPSERSTGDTVRRGGITKAGNRRVRHMLVESAWTYRHPPKIGKQKLYLLQSVPPKVREIAWKAQTRLTARYRALAGRGKRTTVVCTAVARELVGFMWSVAHEARPA

SEQ ID NO: 452656 - protein, 367 aa, unidentified
MEEVGELELHVERIAALDLGKAVLEACVRVPHPSKPGRRMQELRTYSTTTRSLLELADWLRCHRVTRVVMESTSSYWKGVYYLLEAAGFECWLVNAREVKNVPGRAKTDKIDSAWLCKVAERGMCSPSLVHPAPIRQLRDLTRYRRSLVRDRTREMQRVEKLLEDAQIKLSSVISNAGQRDPAVLAEMAKGSMRSKTAVVKEALTGFFTDHHGVILSMMLDNIDRLSGQITVLDARIEEAVAPFSPQAEQLAEISGCGPVAAQELIAEIGVDMGRFPSDAHLVSWAKFCPQTHESAGKRKNTKRPKGNPWLGATLGAVAATVARTDTFLGARYRRIAKRLAAALEAVTGQKILIREGKVIVINPDAA

SEQ ID NO: 452657 - protein, 410 aa, unidentified
MEVILKCCAGLDVHKDSVEACVRQLSADGKVEHEVRHWGTTTRELAEMSDWLSSLGVTHVAMESTGVYWKPIFNVLEEQFEILLANAHHLKNVPGRKTDIRDCQWIAQLLQHGLLKGSFIPPRPQRELRDLTRQRTQLVDEASRVSNRIQKVLEDANVKLGSVASNVVGASGRLMLEAIIAGQDDPVQLADLAKRRLRAKIPQLEQALYGKLTNHHRWMLKLLLDQLQTTEQFIARLDERIAELTRPLEPVLEKLDGIPGVDRRVAEVLLAEIGPDVTPFPTDAHLASWAGICPGNNESAGKKRSGKTTKGSRWLRQALVQAAWAASHKKDSYFQTHARNLMHRRGRKRGLVAVAHSMLTVIYHMLKQGTDYRELGPQFLDQLRAKHLIRFHVRRLQQLGIEVNLTPAAA

SEQ ID NO: 452658 - protein, 410 aa, unidentified
MELLHRRCCGLDVHKETVVACLRLVADGKVTTEVRTFQTTTADLLRLSEWLAANDCTHVAMEATGVYWKPVWHILDDGEFVLVLANAAHVKNVPGRKTDVNDAMWLAELLAHGLIRASFVPDTQTQEMRNLMRTRKQLVREQSSHVLRVQKTLEDANIKLDSVLSDLMGKSGRAMLEALIAGETNPAKLAGLADRRVKASPEELREALRGRVTKHHRFLLRLHLNQIDALDAAMATLDAQVEANLGPFRTAVELVTSVPGVKNLGAHVIVSEVGIDMSRFPSAEHLLSWACICPRNDESAGKRRSNRMRKGGAWLKTTLVQCAWAAVKKKDSYLQAQFYRIKARRGPQKAIMAVAASILTAIYHMLKDGTMYKDLGRDHFDRRSTDRQKKRLIKRLTDLGYAVAIKPLAA

SEQ ID NO: 452659 - protein, 385 aa, unidentified
MPRIRTEHEGTIFQRRILKKIEQSSASPISIGLDVHKNSIHAAIFQGDTVLTDWRTSANYIALANQILPLLPFTKTVAYEAGPTGFSLARILQRIGFNVVVCAPAHTPRAAARQNKSDRIDAAKLAKLSAYNMLTAVTIPTEQEEQERLVLRHRNALVDKARRVKQQIKAEFLFFGTGEIASWSRKEIERISEIPCSENQRFALDSLLREMDMLDDEIKATNARIERIMKQHHADAKTILESHPGVGPVTSATFALELFRPKRFRNGRHVASFLGLAPGKDQTGESDRPQPLLKRGQARLRTQLIEAALRWIRLDPAARTVYGRIASKKKGNVKKAIAAMARRLAVRLWTMWTRGEMYDPEKAGRYEIQAKERRRVARKVTAAAS

SEQ ID NO: 452660 - protein, 328 aa, unidentified
MSDSILGIDVSKETLDAYCARGQRKQGRTFANSPDGWKLVRAWLKAVGSKQAHVCMEATGRHSLGVALALHEAGHVVSVVNPAQIRDFARTKLGRNKTDKVDAALICEYAELFKPEPWTPPSPAMRRLCELQTMRAGIIRSRAEWKNRIGSGLGDSTATKLAAATIDHFTSQLEAIDRAIGETIKQDAELRGRCDLLLSVIGVGETLAASLMAEMPEPGVLRRSGEMVAYAGLNPSHHRSGTSIDRPTRISKIGNATLRSSLYMPALSAMRFNPAVKALVARLKTAGRLKPKQIVVAAMRKLLVICFGVLKTGRRFDPAIAMPASTLK

SEQ ID NO: 452661 - protein, 381 aa, unidentified
MKITTIGLDLAKNVFQVHGVNERGVAVLRKQLKRDQVAPFFARLQPCLIGIEACGGAHYWAAKLTGLGHRVKMMAPQFVKPYVKTNKNDSLDAEAICEAVARPNMRFVPAKSPEQQAVLSLHTAREGFVQARSAQANQIRGLLIEFGLIVPQGIGHVYELVPLLIEDATNELPAAFRLLIDRLLQHLKELDRQVQELEGEIEQWHRSSEVSMRLETIPGIGPITASALVASACDPSNFRNARQFAAWIGLVPHQNSSGGKTQLLGISKRGNVYLRTLLIHGGRALVQLARTRPERAGSWLGRLASRRHHNVAAVAMANKNARLAWALLNSGRAYEPGHVPAPAAWPARRVTVGAKPTDSLHRLLWQSNVDGKTGRTEAGRT

SEQ ID NO: 452662 - protein, 356 aa, unidentified
MSHTTTLPTVPNLTIGLDLGDRMSRTYAVDAAGVAVHESSIATTIAGITHYFGERGRCRVVLEVGTHSPWVSRLLAALGHEVIVANPSAMFAGAPRRRRNDRLDARFLARQGRVDVELLYPITHRTAEAQQHLEYLRARDQLVGVRTKLINHVRDVVKSNGARLPRCSTEVFPKRAAGELPSALAPALTPLLEVIADLTSRIGRAETQLATLTREHYPVAERLQQPAGVGPLTALAFVLRIEDAKRFRKSRDVGAYFGLVPRLDDSGDSTPQLRISKAGDEFGRRLLVSAAHYILGPFGPECDLRRHGLAIAERGGRNAKKRAVIAVARKLAVLLHHLWVSEASYDPDHLQKRRAA

SEQ ID NO: 452663 - protein, 395 aa, unidentified
MFIVGIDIAKRSHEAIIIAEDGQVVRKAFSFRNNCTGYNLLLEQVRRLTLVKSQIVFAMESTAHYWLALYARLLKDGYTVMVLNPIQSHSLRELYIRKAKTDARDSLIIADLVRFGRCKASNVPQDKILALRELCRSRAYLVDMAADLKRKLIALLDRIFPEYESLFDSVFSKASIAVLSKYSTPQKVKNANLRKLTDLLMESSNGHFGEWKAHQLKEAACSSFGIDDSGGVYSTLLGVFLEQILSLTAQADSLEKQISVFFQEFNNPLTSIPGVGTVLAATILSEIGDITRFSSADKLLAYAGLDPSVKQSGEFKSNQNRMSKRGSPYLRRAIWLASTVAVHRDPMFQIYYEKKISEGLHYMNVIGHVSRKMTAVIFAVLRDGQPYQPILQSAG

SEQ ID NO: 452664 - protein, 421 aa, unidentified
MSLSLYVGIDIGKFSHVASLISPKLLFKHHRYEACPTLAFEQSRSGFEKLLSALTEHAPPSVCHVLLENTGHYGRAIEQYLQEKGVQVYRISVSTEKRGKQKSDKRDAQALAVLLYNQIERHIIVTDKSQIAHRLVPPSDTARLLHGLVQHRLELVHETTRRKNKLTAICDELFPELTQVYADPNTPSALQLREKYPTPQAVASADLEDLCNTRKHHRPSKAKLAELQDLARSTIGTKDQSRLTCLLIEQRQLMKELALLNEHIEALNIEISKAVSTSREGRILTSFPMIGPIHAAVLIAELRGYCGWSPLQQQTGTSKDSMVLQQAGNRLLKHTIYLITLQAVHMDTPFKVLYDRLIPIKCHYDERTGRYRGKMKVIGRVAGQIIKLIYVLLRRDHDLIAGGGQVPDPELYDPLKHKIKR

SEQ ID NO: 452665 - protein, 427 aa, unidentified
MTNSQDLKFNAIENTDAIVGVDIAKNVHWAGIILPNGKEIKKSFSFNNNRKGFKSLVETVKNVLIMYNFKNVIIGMEPTGHYWKSFARYLKKIEWIHVVTVNPKKVKDSKELDDNCQTKSDKKDCITIARLIKDARYFEPYLPEGVWAELRNLSNTRAELVRKQNAVKCRIVATMDEYFPEYGKVFKQILSRTSEEILKRCPFPEDIKSMGKEELLKHIKETVKRGYSKKQVNTIYELAIESIGTTEGLTGARVQLQMYVEEAELIKKQIERTEIYLEEQLKETGYYESIISIQGVGIVSAAMLVGEIGEIDRFDSYEQIRRYAGLNLVENSSGKHQGKTTISKRGRGLLRNILYRMAFTMVATNEEIKQLYKYLTTRKERQLKKKQALVAVTGKILQIIYAVVTKNEEYEATRVFTQERIEQLKVA

SEQ ID NO: 452666 - protein, 349 aa, unidentified
MVVIGVDSHKRTHTVVAVDGTGRKLAERTASTAAAGHLELVRFGRRWRDRTWALEDCRHLTRRLERDLLAAGEAVVRVPPKLMAGTRRSNREPGKSDPIDALSVARAAVREPDLPTARLDGFERELRLLVDHREDLVADRTGHQERLRWFLVELGIAEPPARSLDRRVVLDRLEAELAPRTEPVARFARDLLARIRELTAAANALEAEIRALAERLAPSLLALAGCGHLTAAKLVGQTAGIGRFRSRAAFARHNGTAPVPVWSGNTVRHRLNRGGDRQLNVALHRIAITQLQRPGPGHDYLAKRMAAGDTKTEAIRALRRRLSDEVFRRLTTDETARIQAPAASLAVAA

SEQ ID NO: 452667 - protein, 375 aa, unidentified
MYSSAAYIGLDVHKATISVSVSPAERMAETIHIGTIANRPGAILEVAKKVAKRHGEPLSFCYEAGPCGYGLYRELTGAGYECVVVAPSLIPTRPGDQIKTDRRDSIKLARMHRAGELISVWVPGEEHEAVRDLIRARETSLQALSRARQSLQSFLLRRGIIYTGKASWTKIHRRWLSRVKLDTPVEQAVFQEYVNAVEEAENRRDRLTKEIEMLIPSWSMGPVVMALQSMRGVGLITAATVVAEVGDFNRFDNPRQVMAFLGLIPSERSSGTTTRRGGITKAGSARARRVLAEGAWSYRFGPRIGREQLPQIEGLPNSVTDIAWKAQLRLSHKFRRLLATGKPKNIAATAIAREMVGFMWAIAREVSPPPESADR

SEQ ID NO: 452668 - protein, 347 aa, unidentified
MRFYTQQHQYYCGIDLHARTMYLCIIDGEGTVLVHRNMPTERGSLLRAIDSYRDDLVIAVECIFTWYWIADLCAELDIPFVLGHALYMKAIHGGKSKNDKIDSQKIAAMLRGGMFPMAYAYPQEMRSTRDLLRRRNYLMHYQSELLSHIQNTRSQYNLPAFEKRIRPMGNRTDLANHFPEPMVRESIETDIQLLDTLHQILLKMERTVIEQARHHDPVALQLIRTIPGIGKVLSLVILYEIQDVRRFPEVGNFISYARLVKCPHESAGKKSGSRKNKIGNAHLKWAFSEAAVLFLRDHKPAKEYHHKLVSRYGKAKALSIIAQKLGRTVYFMLKRKEVFDPNRFFSS

SEQ ID NO: 452669 - protein, 321 aa, unidentified
MESKTAVVYAGVDVAKATLQLHLQGQQSEFSNTPKGLDQLCTQLQTVPSVHVVCEATGGYERALVKVLHQGLIPVSVTNPARVRAAAQAQGQRAKTDQIDARGLTDYGQRYQPKPTPPTSATQDQLVALTQWLKQLIHGRALAKTQAEHHQDPFVRRQHAKLMTHLQSQVEAVEKQIEALLQQDAALQQRVHCLDEIQGVGPRTAWLILAHMSELGSLNRQEVAALAGLAPWTRESGTMKGMRCIGGGRPEVRLALYMAALSAARCNPVLRTLYKRLRAKGKLPKVALTAVMRRLLTYMNHCIKALPSGTATANTQELKTA

SEQ ID NO: 452670 - protein, 312 aa, unidentified
MAQMVITAGIDVSKAWLDVALWPTKAELRVERNAAGYHRLGAWLSEHGVMRVGLEASGGYEVEVIDALQARGFEVARFNAQRVRLFAKAKGRLAKNDRADARTIAQATAVLLDAAPPQRRRDLEPLVEHLTYRRRLRDWIVDCTNQLEHLKDKALRRKLIARRAAWQNELAAHDRTLASLVAQHDEWHDLEQRLRTVPGVGPVLAQTLLALLPELGRLSRRAIASLSGVAPFDDDSGKRAGERHIKGGRAVVREALYMAALAAKRYNPLIAAFANRLAGKKPKVIIVACMRKLLVILNAMLRDGTDWQAKAA

SEQ ID NO: 452671 - protein, 482 aa, unidentified
MKAKPPEKIQKATNPSTRGHWNEMNCKQRREMMRKIQSEDISLEVVHPDAAGIDIGNESHYVAVAPSRDKQPVRCFGCTTGELKAMTDWLKQCGIRTVAMQSTGVYWIAVYDILEQAGLEVYLVNARETKNLPGRKSDVQESQWLMKLHSYGLLRNSFRPSQEIRTMRTYWRQRNDLVQSAGRHVQRMQKALTQMNIQLANVLSDVSGVTGQAIIKAILGGQRDPHKLAEFRNPRVRASEEEIARSLEGHWEEDLLFVLQQEQDGYEFCQKQMAECDRQLNHYLEQREDRSQGAPLPEEKRKGRRKKKSGNKPQFDLRTGLFRMSGTDLTRIDSIDVMTATTILSEAGWDMSKWETEDHFVSWLRLCPDNRISGNRIIGKGRLPTNNRVTIALKMAASALRLSDTYLGAQFRRFRTRLGAPVAIKAMAAKLARLVYRMLRYGMKYVDKGAATYQEQHRQLQIKQLKRKAATLGYQLIGVPAT

SEQ ID NO: 452672 - protein, 390 aa, unidentified
MNENQGKRIIGLDMHPDVYAAAALSVDPKTHHAAWVQDRMPTAELEAWAAKRLIPDDVVVLEASGNSFEVAARLHAIGFSAVVLESAQAGKIRDNFCNDDRHSAVKLAKVYRSGLAKEVWQPTATTREHREVFFAHRNAVKDATRCRNRIHCFLNEHCVRLKRGVRLTTPSGEAAAQAAKPWSALQADLIAEAFEQLRQVEARRKKLERIMVRELVANPGWARLWRLMGIRHRVAFGLMAMVGDVHRFPTAKKLVGYLGLAPRKTQSGNDAKGRDGGMGKFGRGDVRGLLIQSAQNALTQRNSPWHHWGWKLMMKKHRNEAVAAVARKITVSVWHLLMGHFTPLLEVTEHLRAKLLRLATVIGKDGVKALGFDDRDAFVSAQIQSIQLST

SEQ ID NO: 452673 - protein, 319 aa, unidentified
MDTSTPAPSTYVGIDVAKDHLDIAFGSETPPERIAYTGEALQTLLVRLQGLPAAQVIVEATGGLELRLMAELWAAQIAVARINPKRVREFAKASGRLAKTDQLDARLLAQFGAALRPAATPLASEDAQALADLVKRRRQLVDMRTMEHNRLLSATSSLQVRIQKHVTWLDEEVAALEQDISECIQHSPTWAAKDAVLQSAPGIGPITARTLLAVLPELGTIDRKKIAALVGVAPFNHDSGRMRGKRFVQGGRPAIRSVLYMATLTAIRHNPIIKAFYDHLLAAGKDKKLALVACMRKLLTILNAMVRDNRSWQPAGAAS

SEQ ID NO: 452674 - protein, 343 aa, unidentified
MKISRVGVDLAKNVFQLHGVDRHGETVLKRRLSREKWISVLIKSAEPGCEIGMEACGGAHHWARLLMAKGYTVKIIPPQFVTPYVKSNKNDANDAEAICEAMSRPNMRYVTAKTVEQQDIQATHRIRSELMCHRTAKANQIRGLVTEYGLVAPLQIASLRAAIPRWLEDAENGLTSRFRALLHGLWDDLLGLDDRIDSLSQEIGSIAKSDPLARRLQQLRGVGPLVATALLATVGSGEQFSKGRQMSASLGLTPRQHSSGGKDRLLGISKRGDAYLRSILIHGARAVVAQAKHKDDRLSRWVTEIAERRHPNVAAVALANKTVRMAWAMMKHDADYDPEFAAS

SEQ ID NO: 452675 - protein, 341 aa, unidentified
MKNKSFIGIDISKNVIDASIFCKGAPIKDFPHAVFNNSHKGFGEMCTWLKKNHVVLSNSLFGMEFTGSYSMELEKFLNARKYQFCMLSTHVVKHYPMGPKDKNDKIDSAKIADFLYRYDGTECVKPYKMPDKTMQRFKALMNERKFLVEQRTCFMNRRQLCTTKEGAQLYDSYIKQLSHDIENIELKVQKLLETDDSLFTTYKNLLTIPGIGFVNAMNVIVITRNFTAFDTARQYANYIGVAPHFHTSGTSVRWRPRPSARCDGQAKADLSMAATVAVQYDAELQSFYNHKLGGKQDSDTKRKALNAVKFKLVLRMFAIGKQNRKWEPLDSKSSNEKLAIS

SEQ ID NO: 452676 - protein, 344 aa, unidentified
MGYYAGLDVSLEETAVCVVDEKGQVVKEARVASEPDALIQFFRKLGLAMDRIGLEACSLTAWLHDGMTGAGLPAVCMETRQAKAAMGSMPVKTDRNDARGLAQIVRTGWFRQVHVKSAGCRSWRTLLVGRRMVLNKLRDLENGVRAALRESGIKLGKPGRKQFAERVRTLAADDPVLTALVGPLLSIITTMTRELARLTKQVLDIVRDDAICRRLMTVPGVGPLTALAFRATIDRPERFRRSRDVGAHLGLTPRRYQSGETDVTGRISRCGDELARTALYEAANALLVRSKKWSALRVWGMKVAKTRGMARARVAVARKLAVILHGMWRDDTDFRWGKEAPANA

SEQ ID NO: 452677 - protein, 395 aa, unidentified
MFIVGIDVAKRSHEVCMITSDGQTVQRPFSIRNNCTGYNLMLEKIRKHTNIKSQIVFAMESTAHYWLALFTRLRKDGYHVILLNPIQTSAMRDMFIRKIKTDAKDSFIIAELIRFGRYAESNVAQDRLLALKELCRNRFYLVDMAGDLKRKLIALIDRVFPEYEAQFDTIFCKSSVAVLKKYPTPQKLSNAHLDKLTELLWNSSNGHFGEWKARELKELARNSFGVEDCDGAYSTLILLMLDQIQSLSGKADALEKEISQLFQSFDTSVTTIPGVGPIIGAVILSEVGDISRFSSADKLAAYIGVDPSVNQSGEFQAAHAHMSKRGSPYLRRCIWMASQVAVQRDPMFRAYYEKKAAEGLKYMTIIGHVTRKMTAVVFAILRDHKVYEPILPTAA

SEQ ID NO: 452678 - protein, 324 aa, unidentified
MGGVDVSKEGLDIAVRPGDEAWSEQNNQAGIKALTRRLKKLAPQRIVLEATGGYEYELALQLGKAGLPVAVINPRQVRDFAKAVGRLAKTDPIDAKILSHFAEAVKPPCRLMKDPKLEVLDQLVTRHRQLVEMIVAERNRRMSLRGEAQNDIDVTIRFLKGRLKQVDERLKALIDKDPEWNRRAALLNSVPGVGPVLISSLIAELPELGTINRKQIASLVGVAPFNNDSGKSRGRRHIWGGRAHLRALLYMSVIAGLRFNATIRGVYQHLRQVGKPAKVALVACMRKLLVQLNAMAKSAQTWNAHLPIPSVLASAELIPVKLPA

SEQ ID NO: 452679 - protein, 371 aa, unidentified
MKVANDQRQIEDLVARAGESAAEVRWAVDLVSPMASLLLAILLTSSQKVVYVPGRMVAGLAGALGGEGKTDAKDARVIADIARMRRDLAPVTADDELVVELARLTSHRADLMADWVRGVNRLRELPGSIFPALERSFDYSTRSALILVTGFCTPAEVRQAGHGGVTAYLGERGAWRKGIDAMAATAVQAAAGQTVVLPGEAATAALVKQAARKLLDLDREIKDTGKLITSRFRGHPQAAIIESLPGMGPILGAEFLVATGGDTRAAFGSPGRLASYAGLVPVPRDSGRVTGNWRRPRRYNRALRRVFYMAALSSLKADGPSRTFYQRKRTEHRIHTQALLALARRLVDVLWALLRDNRTFSPAPPNLISTA

SEQ ID NO: 452680 - protein, 369 aa, unidentified
MNKIVKYIGLDVHKNSIAIAIAEEGRQRDVNFYGVINNDMDQLYKFLRKLISQGAEPRCVYEAGPCGYNIYRSLSEKGIDCVVVAPSLIPKRSGDKIKTDRRDSETLAKLHRAGELTSVYVPSLEDEALRDLVRAREDSVNALKRVKQQLGAFLLRHHIFYPGKSKWCKSYFNWLAGIAMPHPAQQIALQEYIETVYDCKQRVERIAEQMRQLSKQTRLYGLNKSLQSLRGVSEIVSAVVVSELGDLTRFDSPSKLMAYLGLVPSQHNSGDKKRTGSITKTGNGHVRRALVEAAQAYILPAKKSRCIVKRNEGLPQEIRNIAWQAQVRLCSRYKRLVYRGKNSNLVKTAIARELAGFMWAIAHKVPNVV

SEQ ID NO: 452681 - protein, 426 aa, unidentified
MNCKLNDKINQVEETSLVVGIDIGSTVHYARAYDWRKMELGKVFKFSNTLEGFEALSRWMENIQALRKKEKILVGLEPTGHYWFALGQYLQSKGIKLVMVNPYAVKQSKELDDNNQTKNDTKDPSVIAKLVIDGRYSIPYVPTGAYADLRIMFTNRTRISREIGAIKNHLARWFAIHFPEYKEVFGNYESKSSLLLLKEAATPSSIVALGAKGINKIWRDAKIRAVGIKRATTLYETAKKSIGQNQGTAAAEVEMKLLLEDYEAKMRQYVSIMAALEEAARRIPGTERLLAIKGIGLVTVAGFLAEVGDLGRFESPKQIQKLAGLSLKENSSGKHKGETTISRRGRHGLRNVLFNAVIPLLATNDEFRSLHEYYTTRAVNPLKKKQSAIALCGKLIRIFYVVLVKGTVYDGRKMLADIHRNGNQAA

SEQ ID NO: 452682 - protein, 418 aa, unidentified
MAFKIFRKNCCGLDVHKTWIYACIGITDPNGRTEYKQARFSAFSKGLRELADWLAKYSCFEVCMESAGKYWIPVFNILEKTCFVTLAHPKYTKPQKGNKTDRKDAKWICDLFMCDMIKPSFIPSPEIRQLRDLVRYRSKLTNMLSGEKNRAQNCLTVSNLKLDDVFSDVFGKSARSITQYILDHPGEAFDVAPFVDKRCKTPLDEIQAAVDGAISPEQAVKLRQCLAHIDELEAHRKEIEQEILLVADPFSAVLDLLYTLPGLDKNPMTAIAILSEIGPDMSVFPSSKHLVSWAGCCPRNDQSNNKVKSRRISNAGSYLKPLLVQVANALIKSKKHPEFKERYHRIKSHRGHKKAVIAVCKMLLTAIWNMLSKLEPYNPSGFLEHRPVNEKKVLTKSQALELLRLRGYTITDDTASVA

SEQ ID NO: 452683 - protein, 321 aa, unidentified
MTYVGIDVSKATIVVAYSSAKGSRTNSFKNTVKGIHEFIQTISVAEHHCVLEATGNYSALLVYLLSEAGIAVSLENPLKIKNFARVMLSVTKTDEIDARLIAMYGEKMQPTSYKLRNDTILILKQKRTVIRQLKKQLVATGNLKGSMEVLPFFDPKCKKTIEKTIIFLEKQIKGLEEELASLAQSEYKKQMDLLTSIKGIGVTLAAALIMATGGFTYFDNAKQLTRYLGLSPTYQQSGTSVNVKGHINRNGDSSLRSQLYVAAFASLRCNTECKACFDRLRSNGKPGKVALIAVANKLIRQAFAVVTQEKLYVDGFKSEKP

SEQ ID NO: 452684 - protein, 325 aa, unidentified
MKSAQRPLNIGADVAKDEIVVACAQQSFTRRKIANTRCALRAWLKTLPADSRIGMESTSTYHEPLAELAHKLGFIVYVLNPKDVRHYAKGIGQRGKTDRVDAQLIARFIANEHPRLYPFLPPTPEQRQLDRLLKRRTKLTRIRGALRQSLKGLNGFSSELNSLVARLDALMKRIDAKVATLIEASPESQEACSRLQGIPGVGPIVGSGVLNSLQRVPFSNADAFVSFCGWDPRPDDSGRKSGRRRLSKRGSGQLRYLLYNAAMAASRTKAWRPLYERALARGLSRIEALVILARQIARTAWSIYTHKTQFDPQRISQPSSPITRP

SEQ ID NO: 452685 - protein, 348 aa, unidentified
MKIIGCDFHPGYQQVVMWDQETGEVIEKALQHERKEEVRAFYAGLQGPVRVGIEASGQSQWFERMLSELGHEVWIGDAAKIRASCERKQKTDRRDAELLVRLLDEDRFPRIWVPTPAERDARQLLLHRYKLVRMRTQVKNQLQALALNQGVQRKWKLWSVAGRKQLEGLPLMPWASRRRAELLVLHDQLEASISELDVAVAEQANTRPTVRRLMTHPGVGPVTALAFTLTLGPAKRFRRGKQVASYFGLIPREHSSGGKQRLGHISKQGSSFVRGLLVEAAQSAVRHEPQMRRAYQRMAHRKCRALAKVAMARKLAVRLYWMLREEVDYARLVQGSHAEQPESFCGRS

SEQ ID NO: 452686 - protein, 366 aa, unidentified
MVRSGFNRSTLYPSSLRKETAMKKRIEGITVFGIDIGKNTFHVVGLDSFGKPVLHSKFRRDRLLVHFANTPAALIGMESCPGSQWLARKLQASGHTVKIIPAQFVKPYVKSNKNDTVDAAAIAEAVTRPTMRFVQIRQPEQSARQALHRVRDRYMSQRTGLINQMRGFLLEFGIAVRQGAGVFRMDVPRVLGDEENELPPSMRTLLADLWNDFKLLEIRIEELSKQIQRSVQYSDTARRLMTVPGIGPLAASALEASAGNGHQFTNGRFFAAWLGLVPREYSTGGKTTLLGISKRGNTYLRRLLIHGARSCVQTCDRQRHPLGAWITKLEQRMHRNKVIVALANKIARVAWKILIKPDEIYRWADA

SEQ ID NO: 452687 - protein, 354 aa, unidentified
MQNDRQSSETVILGVDTHLDIHVGAVISQAGKLLGTHIIQTNQAGYLELLDWARSFGSLERAGIEGTGTYGAALTRYLIKNSIYVVEVNRPDRSKRRLEGKSDPLDAENAARTVLSGSSKAIPKMQSGACEALRIISVARRNAVKACTQAINQLRALLVSAPQDVRDKLWKSKPHECVTACINSEVSEHSPLRIALCSTLRSLAKRWMALTEELNELDESLDKLTRKYASNLRSQFGVGPQTAATLLAVAGDNPERLKNEAALASLCGVNPLPASSGKTVRHRLNRGGSREANNALWTIALVRMRSDPRTRIYVDRRTGEGLSTKEILRCLKRYIVRELYPLILSDLAYANRRS

SEQ ID NO: 452688 - protein, 369 aa, unidentified
MGERTRFVGVDAHAKTLAVAIAEEVGQPESYGQIANEPTAVRKLVSRLGGRGVRLVVAYEAGATGFALHRQLAALGVECMVVAPSLIPSRPGDRIKTDRRDALKLCRLLRSGDLTPVWVPDEEHEALRDLVRSRGDAKQDEVRAKHRLSKLLLRRGITPPVGTRAWTQAYFLWLDRLHCDLPADQIVLEDYREQVRLARARVARLDKALIRCADGGRHAPLLAALQAFRGFGFLTAVTIVAEAGDLRRFATARQFMSYTGLVPGEHSSGSSQHRGHITRCGNAALRHVLGEAAHHARHAPHVSTTLRRRQRSVPRDIVDASWQAQERLNYRYRHLAGRLGRPIALTAVARELAGFVWAAGHQVEVVSAA

SEQ ID NO: 452689 - protein, 314 aa, unidentified
MTINNENAGVNVGIDVGKFQLDIHIWERDRHFIVENNEAGIREALKTLKRYRLERITMEATGRYEMAFASMAFEMGMPVAIVRPILVRQFAKAADQLAKTDKLDAKIIARFSAIMQPRLTTQRSKNLQLIKDLVTRRRQLINMRTQESNREKVSGKETARSCNRLIKAINKDIEWTENKLAKAVDDEPAWSERKQLLDSVPGVGNALVWTLLSEMPELGTLNNKEIAALAGLAPINRDSGKTKGKRRILGGRHNVRTTLYMATLSATQCNPVIGRFYKHLVGQGKHKKVALTAAMRKFLTILNAMVREGQGWAY

SEQ ID NO: 452690 - protein, 415 aa, unidentified
MLFIGDDWAEGHHDVVAQDDAGKTLARRRLPEGADGIARFHEMVASCLGEDAEPDPARVIVVIETDRGPWVKALAAAGYRVYPANPRQAARHKETVANSGKKDDFFDAGCLADMGRTRLHQMRELAADSDVAEAVKIAARAHQKLVWERTRHLLRMRSALREYFPAALEAYADLTLAGKDALELLAKAPDPESAARLTVTQITAALKRAGRRGDLAQRARDIQAALRAPHLDQPDVIAEAYAASVQAAAAVITALNEQVKIMEAKVSGLFRRHPDAGLHLSQPGIGDITGARILGEFGDAPGRYASAKARKNYAGTSPLTIQSGKKKTVHAQYIRNRHLIDALHAQALSALSVSPGARAFYDDLRARETGHDDAMRRVASRLVGILHGCLKTGREYDEATAWSHRAETPEAAEAA

SEQ ID NO: 452691 - protein, 383 aa, unidentified
MSQTVAAPIPAAVDHERTLVLAIEVSNKSWVIAAQVPGLPHTKAKRTIDPEAEALLAAIAAYRARAAATGRSIERVIAVYEAGWSGFWLMRHGVEVYVVQPSSVPVDRRIRRAKSDGIDSELLLRTLLAWLRGEPRVCSMVPVPDEADEDARRCVRERSELISERIGLTNRIGAILATLGVSDYNPLLRNRGGRLAELRTALGEPLPANAHAKLKRLLARLELVLTQIAELERERDAVVETEASDGASKMIQQLTALRGIGVQSATVLVREAFVRRFANGKALGSYAGLASSPYSSGGIDREQGIGKAGNRRVRTVMVELAWLWTRYQPGAAQVCWFRERVASTGRRVRKIMVVALARKLLIALWRFVIDGVLPEGAVLKPAA

SEQ ID NO: 452692 - protein, 343 aa, unidentified
MDHFAGLDVSVKETSVCIVDDTGRIVREVKVASEPEALLQVLTNPAYRFKRIGLEAGPLSQWLFSVLTEASLPVICVETRHMKAVLKAQINKTDRNDARGMAQMMRVGLYRPVHVKTLRSQRLRMLLTHRKLLQSKTIAIENDLRGTLRNFGLKVGMVGKVKFETRIKELVEHVPDLAVLVEPLLIVRRVLREQIGILHRRLLAIVRDDDICRRLMTTPGVGPVVALTYRATVDVPARFRNSKAVGAVFGLTPSKHQSGEIDRMGAISKCGDAMMRTMLFEAAQAMLMRSAKWSWLKAWAMKIARHRGMKKAIVALARRLAVIMHRIWVDGTEFRWTREAVAA

SEQ ID NO: 452693 - protein, 336 aa, unidentified
MTRIKKYTFFVGTDVSRETLDHAVMQGTQLLFHQQIRNEPAEIKNFVADLKKIPGFRLVKTVFGMENTGYYCNPLLTTLQKVKADIVVEGAKKIRNTLGNIRGKNDKVDAIRIAEYLYQCRDNLKIWQAKRPLIQQLANLNTLRDRLIGIQGMLKTPLKEQIGFVQQNIADKSVALNSRSIEALSADIKATEQTIATLIDNDERLKRLMLIITSVNSVGPVTALNILICTNEFLHIQDPKKFACYAGVAPFLNESGKFKGRAKVSHMANKKMKTLLHLCAFNAKRNDPELRSYFERKTQVEGKNKMSVLNAIRYKIILRIFACVAQNRLYVKEYTR

SEQ ID NO: 452694 - protein, 374 aa, unidentified
MEKVTRYVGLDVHGETIAAAIGEGYGKTRSLGQFPNRPEFVRKFIDRVGGPRGLKVCYEAGPTGYALYWQLTKMGVECDVVAPSLIPRKPGEKIKTDRRDAEKLAECYQSGTLTSVWVPDAAHEALRDLVRARAAAKRDESRAKHRLVKYLLRNGLRHPEDCRAWTHPWWRWVQGLELEFEPQKVTLADAVAAVLHEKERLARLDLAIDRAIEAAPPEKRAVIDALQALRGVAKLTAVTIVTEVGTFQRFRKPTELMGYTGLVPSEHSSGDRKAKGNITRTGNAHLRHVLGEAAWHARHRPWLNLRLKKVLPTLPPGVSEIAWKAQERLHRKFTRLTYHRKPAGKVATAVAREFVGFIWAIGRLAEDHARTDTA

SEQ ID NO: 452695 - protein, 345 aa, unidentified
MVILGADLHKRWHTVVAVDETGRKLADKTVRATPDGHLELRRWVAQWPGRRWALEDCRHLSRRLEVDLLRSGESVVRVPPTLMAGVRRSVREPGKSDPIDALAVAQAALREPDLPVATLDGPERELRLLVDHREDLVAERTRAQNRLRWHLLDLGVDEPGPRSLDRAAVLADLEARLAGRAEPAARLARDLLGRIRALTLVIRPLEREIGDLAASLAPTLLALPGCGPLTAAKIVGETAGMTRFRSKEAFARHNGSAPVPVWSGNVTRHRLSRGGNRQLNLALHRIAITQMRIDQRGRAYLERRRAAGDTKSEAIRALRRRISDEVFRRLRADEAARVMVLAAAA

SEQ ID NO: 452696 - protein, 347 aa, unidentified
MNQIIRIGMDTSKHFFQLHGVDAAEHPVLRRKLRRKEMLAFFAKLPPTVIGMEACGASHYWARELGQLGHTVKLIAPQHVKPYIKRNKNDGRDAEGLCEAMSRPTMQFVPAKTAEQQAALMLAGMRERLVGQRTQLSNAIRGYAAEFGLIAAKGLDKIEPLLADIAADEALPVLARELFAMHGREYAQLQAELKTIEARLMAWHRANADSRRLAQIPGIGPISATALVMKAPDPRAFPSGRHFAAWIGLTPKDHSTAGKTRLGKITRAGDERLRSVLVAGATAVIQQARRGRGRSSPPWLLALLARKPPKLAAVALANKNARIAWKLMTTGESYDGARMPDVSALAA

SEQ ID NO: 452697 - protein, 348 aa, unidentified
MAHFVGLDVSVKETSVCIVDDAGKVILEQKVPTEPEDIIAVLSSLAETFGRIGVEAGPLSQWLVNALTAVELPVICVETRHMKALLTAQQINKTDRNDARGIAQMMRVGLFKPVHVKTLAAQEQRMLLTSRKLLQRKLLDVECDLRGTLRNFGLKVGVVSRSRYEVRIRELVESFPRLAAIVGPLLAVRRVMRQQLAVLHKMLLDTVRGDPVCRRLMTAPGVGAVVALTYRATVDQPQRFVHSRAVGAHVGLTPKRYQSGEIDYDGGVSKCGDALLRTMLYEAAHSLLTHSGKWSWLKAWGVRVAQRRGMRRAIVAVARRLAVVLHRMWVDGSEFRWRKDSAAVPAVT

SEQ ID NO: 452698 - protein, 338 aa, unidentified
MKTFVGVDYHKAFSYGTIMTQSGQILKQGRFANHPQSVEQFLGDYAGDDCSAVLEATRNWCVMHDWLEDLTGEVTLAHPLKVRAIAEAKIKTDKIDATTLAHLLRCDLIPAAHVASPAARVLKRLLRHRMFLVRVQTMVKNRIHALLDRYPAIRAQRKADELFTKMGMAWMRQVAVDKDDRFVLDSELDFLEHIQEQVRQADRYLSNVGRRDRRVRNLETVPGIGRAFALLLVSEIDDIRRFGKPKALHAYAGLVPSTYSSGGHTYNGRITKQGNKYIRWAMVEAVWPAIQKNVQLNELYYRLAGRKGPNCAKVATAKRLLTIVYRVLSENREYRDGQ

SEQ ID NO: 452699 - protein, 427 aa, unidentified
MAFKPSGAQSVNDWHRTAYQTYVQLKPESTLPNRVNRLIGLMYELMKKVSAQMVKLIVQKPFFTIQTETMNKLNQLDFTGTTIYCGVDVHLKNWRIHIRDEEMELRDFSQNPDPVLLSNFLKKQYPGATYKVGYEAGFCGFHIQRRLTSLGIQCVVLNAADIPKSNKDKRQKNDKRDARNISEEIKKKQVGIYIPSVDWQYGRSLVRTREQQIADSTRMKARIWQFLYFHALATPQKQEVGQHWSRRFIEKLQAHDCHNNTQLKAALHIMLTDYVQKRKLLSETIKAIRQFYRQEPYNKYMELILSIPGIGEINAAVILFELQDIHRFKTFDQLCSYVGFIPDTDDSGETKRVMGITHRFNKRLRKALIESSWVVIRQDPAMLMKYKAYCKRMHKNKAIVRVAKHLLARIRFVLKEQQKYVEGVLAG

SEQ ID NO: 452700 - protein, 389 aa, unidentified
MGSSLHLNTPAACGEHGTMFVAFELGKTQWKLGIVLPGKARLSRYVIDGGDGEAAWQLIAKARARAEKQLGGPVRVMSCYEAGYDGFWLHRWLLARGVDNQVIDPASLQVNRRKRRAKTDRLDLEQLIGALIRLLWGDRLACKVVHVPSPAQEDDRRAWRERERLVKERTAHTNRIKGLLHGQGVRDALPRAKAFGGWLGSQRTGDGLALPAHLVDELKREHGRLMLVEAQIGEIEAQAEAAREAAAPSPLAARINQLIELKSLGPVSSQTLVGEVFFRDFKNRRQVGSYFGLTGTPFDSGDKTREQGISKAGNPRARTAAVELAWLWRRHQPASTLSRWFEERVGHQKGRVRRIAIVALARKLMVALWRFLEHGVVPEGANLRAAPHG

SEQ ID NO: 452701 - protein, 377 aa, unidentified
MNRVRFVGLDVHAETIAVAVAEQDGEIRSLGIIPNREDSVRKLVRKLGPVEQLRFCYEAGPTGYALYWQLTRMGAQCEVVAPTLVPVKAGDRVKTDRRDALKLARNYRAGELTPVWVPDAAHEALRDLVRAREAAKKDQLRARHRLNKFLLRHGRRPPVEVKVWTMTHLGWVKREVHFEQMAQEATLLDYLHEVEHAAARIARLDGAIEEAVKLAPPQMRAVIEALQALRGIAHVSAVTVVAELGELSRFTRAKQLMAYGGIVASEDSSGERTRRGSITKTGNAHLRRVVVEAAWAYRHRPAVGGTLRQRQEHVSEEVKEIAWKAQQRLHQRYRKLLAKGKNKGVVVTAVGRELLGFIWAIGTKVETAQKESLQQVA

SEQ ID NO: 452702 - protein, 364 aa, unidentified
MKKISKKQRAFAAESKPEKIVGLDLGDRYSHYCMLTASGELMEEGRIRSTVAALEKQFANEPRMRIALETGTHSPWVSRLLECHGHQVIVANARKIPVITASESKNDRNDAEQLARMAAFDPKLLHPVEHRSLERQQDLNLVHTRSVLVRARTMLINSVRGLVKSGGGRLPACSSAAFPGKAREVIPEVLKMACEPLLEQIAQMNRGIGEMDRQVEGLDKKYPEISILRTAPGVGPVVAACYVLTLDRAEAMETNRQAGAYLGLRPRQQQSGDSNPQRGIAKTGNNYLRSLLVQSAQYILGRFGPDSELRRWGLKLATSGGKRGKKRAIVAVARKLAVLLLSMWRNRRKFEPFPQAAAGLTVAA

SEQ ID NO: 452703 - protein, 308 aa, unidentified
MSQNVFVGIDVSKQWLDVFDTRNQQALRAANQETEFFSLIERLLGLAPALVVLEATGGYEEPLFLALRQAGIPVAKVNPRQVRDFAKATGRLAKTDRLDAQVLAHFAQVFQPAAQQPLRPQELSLWVTRRRQLVDMLTQEKKRLKQVRAQDLKDAIAYTIAHLQCQMKEVEKRIGQCIQAQPDLKRQAALLEKVPGVGRVLSHTLLSDCPELGRVNRKQIAALVGVAPFNCDSGQLRGKRRVWGGRASVRTVLYMATLSAVQISGTLRDFYLKLTEQGKAPKVALVACMRKLLCMLNAIVKASLLQPA

SEQ ID NO: 452704 - protein, 402 aa, unidentified
MNAVGIDVSKGKSMVAIMRPFGEIVSAPFEIKHTASDIHSLVELINSVEGESRIVMEHTGRYYEVLAHQLSKANLFVSAINPKLIKDFDNDSLRKVKSDKADAVKIARYALDKWQNLKQYNVMDELRNQLKTMNRQFGFYMKHKTAMKNNLIGILDQTYPGVNTYFDSPARSDGSQKWVDFASTYWHVDCVRKMSLNAFIDHYQNWCKRKKYNFSQSKAEEIYGKAKELVPVLPKDAITKLIIKQAVDQLNSASTTVESLRTLMNETASKLPEYPVVMAMKGVGTSLGSQLMAEIGDVSRFTHKSAITAFAGVDPGVNESGSYEQKSVPTSKRGSSDLRKTLFQVMDVLIKTHPQDDPVYQFLDKKRAQGKPYYVYMTAGANKFLRIYYGRVKEYLSSLPES

SEQ ID NO: 452705 - protein, 266 aa, unidentified
MYFIGIDISKYKHDCCIISAANQKVVSKVIIKNNKAGFNELLTIIHSLANPADIRIGFESTAHYALNLELFLENSLLTFMEVNPVLISEYKKSKTLRRTKTDSVDCESIARWLMTVEYKPLVKEIDTIKKEINQLIEEVHPHYMSVPGIGPLSAAVIYSEYGDISNFTNPGQMLAFAGIEPGINESGTESHGGKMVKRGSSQLRYTLINCCLPLIRFDMTFATYYAKKRGEGKPHRVAITHVAKKLIRVIYALESQDIDFNAQELR

SEQ ID NO: 452706 - protein, 417 aa, unidentified
MTEPYTWFLGIDWGYQTHRVCLMNSAGQLRDTRSVDHDGAAIDAYLTWLRAETGGPAQIAVAIESPRGALVATLLDRGFAVYAINPKQLDRFRDRHTAAGAKDDRRDAHVLADSLRTDRPAFRPVRVDDPVVLQLRELARIEDDCARDVSRLTNQLRDQVYRIAPHVLRLCPAADEPWFWTLLERAATPAEQQRLTRTEILTILKTHRIRRVTADDVRAALRVSRFGLAPGVVEATRDALSLLIEHLRFVIGQRTRCQRRQDALLTELRERPASETEPGEHRDAEILASLPGVGRMTTVAMLTEATQPLATRDYDALRAVAGVAPITKASGKRRLVQMRRACNGRLREATYHWGRVSMQQDPATAAYYRQLRARGHSHGRALRSVVDRWLRILMALLRHRSLYDPTRFALDAIAVPV

SEQ ID NO: 452707 - protein, 339 aa, unidentified
MRREDFECIGVDVSKDTLDVALFRGKVDWNEGHVKVSNNESGYKELKKWLRSKQAEKQRMRVCMEYTGLYAHDFRTWLEKEDITYYMVDPKRMHNFAPPLSIKGIRQTKTDKADAFRIAIYCSLFHDSMEPSRLPSPAFFKLKRLLAERKQYQKQVVLYKQQLHDISVYDTVSSRMRKQEELTNLGRCVRQTEKEIGEIIESDAAIKKNYDLLLSVVGIGLVVAVTTIVLTENFTVFANPRKYASYIAIAPFPHESGTSVRGATRVSKQGFRQAKADLSVCVLTAIRFDPDIREYWQRKKAERKHTGVVFNAIKFKLVLRMFAVVKRGKPYVNTKGYKG

SEQ ID NO: 452708 - protein, 454 aa, unidentified
MSLLTDRVRGVDPAPHFRIKVFFGVDAKPLAVEMRRIRVNLEEPSHNETTGSDSQFVGYAVNRLFATQSHKRKERVYEQSKVYGLDVHAETIAVAVAEADGEVRSLGVIPNRAESIRKLVKKLGPAENLRICYEAGPTGYVVYWQLTALGVKCEVVAPTLVPVKFGERVKTDRRDALKLARSYRAGDLTPVWVPDAAHEALRDLVRAREAAKKDQLRARHRLSKFLLRHGKRPPAGVKPSWTGNYLLWVKQEVHFEQFAQEFTLIDYVHEVEHAAARVQRLDGAIDEAVKALPPGMRAVIEGLQALRGIAQVSAVTIVAELGQISRFARARQLMGYSGAVASEDSSGERVQRGGITKTGNAHLRRVVIEAAWSYRHRPVVSAALRKRQEVVSEEVKEIAWKAQHRLYARYRKLTGRGKNKGQVITALGRELLGFIWAIGVKIEGEQKEPLRRAA

SEQ ID NO: 452709 - protein, 368 aa, unidentified
MNTVKFIGMDVHKKTITIAIIDQGRKKQPRIYGSIANQAEALDKFCRKMVSTAARLYFVYEAGPCGYGIYRHLIQKGFDCMVAAPSMIPKKSGDRIKNDRRDAAMLARLHRAGELTAVYVPDAHDEAMRDLTRAREDAVAAARKSKQRLNAFLLRNGLTFAGRTKWSKAYFGWLSDITIAYPAQQVALQEYIDTVHESLQRVNRLTDQIRQLVPDWRFAPVVSALQAARGVSLITAVTVLAELGDLNRFDNPSQLMAYLGLVPSEHSSGESIKKGAITKTGNGHARKALVEAAWAYRMQARVSRALLKRQQGVPDQVCQIAWKAQLRLCARFRKLTARGKSKQKVVTAIARELSAFLWAMVKQLQPVV

SEQ ID NO: 452710 - protein, 436 aa, unidentified
MEEVTDEPLYRDRVCGIDIGKAQLAATIRVPSEKNPARRASETREFATTRRGVLALADWLRCWQVPAVVMEATSDYWKPVFYRLEAEGFECVLADAKQVKHLPGRPKRDTSDSAWLAACFERGAVRSCFVATPEFRIIRLHTRYRRDLTDERTREKNRTEKLLESAAIKLSSVVTDLHGVTGRDIMNHLIAGERSPKVLAQLARARARRKITELEHALDGAEFFTDEHAALLTSMLQRIDQLNQEITRLTEVIEGLLAPYEEQLQQAESMPGWGRRSAQDALAETGPDMARFPTPAHLASWAGRTPLDAQSGKRAGRARHKKGNKYLGALTGETAVSAGKTATREGARYRRLARKRGKAKAQVAVGNTQLKVYHKLLSNPGMRYQDLGPDYYERQAAIRRKIAYHVREIEALGLDVTLTRPAPQPGPDGPASTPAA

SEQ ID NO: 452711 - protein, 384 aa, unidentified
MNHSTNILPVDYDQTLVLAIELSNKSWVLAGQVPGLSQTKAKRTIEPNKNDLLVAINGYRTRAAAAGRPVKRVIASYEAGWCGFWLARWLIAHDIEVHVVQPSSVPVDRRMRRAKSDGIDAELLLRTLLAWLRGEPRVCSMVPIPDEADEDARRCVRERSELVSERVGLVNRIGAILATLGADDYNPLLQSRRRRLTELRTGLGNPIPPNALAKIARLLTRLELVLVQIAELELERDAVAKTDAPDQAGKMIQQLIRLRGIGVQSATVLVREAFVRRFANGKALGSYAGLTSTPYNSGGIDRERGIGKAGNRRLRTVMVELAWLWQRYQPGATQVVWFRERVGSTGRRVRKVMVVALARKLLVALWRFVIDGVMLEGAVMKPSI

SEQ ID NO: 452712 - protein, 338 aa, unidentified
MQEQQYVGIDLHRRRSVIVRMNDAGEVLGTVRITNDPLKLAMAIAEAGPDPEVALEACYGWYWAADLLAAEGARVHLVHPLGLHWDSRRVKNDLKDATELANRLRRSDLPEAWISPPEVRELRELVRYRARLVALRTSAKAQVHAVMAKLGILPTQVDMFSPTGQVVLDQMPFEGVYGLRVESLRDLLEIFDREIAMVEREIHRFLKDDRGYKAIQVLSGIGPITAAIFVAEIGDVTRFPTARHLCSWAGMTPKLHESDTKSRRGRITKQGSTIVRWAAVEAVVRYHGGDVIAPAYRRIAERRGNSIARVAAARRLLTLVFYGLRDGEIRCVARKEAA

SEQ ID NO: 452713 - protein, 309 aa, unidentified
MTMMTVNTEIGIDVAKDWLDISNGKDVVRIKNNLQAIKRFLKQLCTTTCISIESTNTYHELFVEQAFLAKHTIYLIDAYRLSRYRDAVGVRAKTDTNDAHLLLRYMRAEKQQLTIFEPIPKAVKRLNRLLKARAKLAKSKATIGLSLKGVTELAQTRKALMKRIEQAMALIDKRIQTCIKDAGYSEDYTRCLSIPGIGPANAAALVAMFHRGHFRKSDSFIAFIGLDVRVRESGYYKGKRKLTKQGNPEIRRLLFNAARAAARTKTWNDYYLSMRARGHSTTATAVSLSRKIARLAFALLRDQSEYRAT

SEQ ID NO: 452714 - protein, 370 aa, unidentified
MDESIKFFVGLDVHKDSIAVAVAEAGRTPARLIGSIAHDVGKLRKLLARFGEAARVQVVYEAGPTGYGLQRELARRGYLCQVIAPSLIPKRAGDRVKTDHRDGLRLAELSRAGELRAVWIPDPADEAMRDLARAREDAVNARTQARHQLKAFLLRHDVRYVGKTSWSKIYYRWLATLNFGLPGAQTAFTEYWQAVTAADERVTRLTTASANSIEGWRFEPVVRALQALRGIDAISAIGLVAEIGDIGRFAHPRQLMAYLGLVPSEHSSGERVVRGSITKTGNAHARRLLTEAAWNYRFQPRIGRRAQQRAEDLPQAIRDVAWKAQLRLSGRFARLLARGKERNKVCVAVARELAGFVWAIASTQAKLPQS

SEQ ID NO: 452715 - protein, 421 aa, unidentified
MKNTAARKRKQVPEGYLIIGVDPHKKKHATVAITQDFTIRDRFKFNNTKEGLEFLLRRVKVEMVKSNCRGVMFAIETGGHYWRNVAYYLDERGIPFRFINQYTLKRRREGKDLNRRKNDYRDSEVAAQLLCTGEFVESTIPQGVYAELRTAHNAYRRLVKERTRIINLVKGLLDGLFPEFTQVFKDPCGLTALSVLSIGSIPGVIAGMTEDEFVATIEAKHQGRLMRKKLAAIHYAAKSSIGIAAGAKSLSSEISFLVEKLELIRGHICVIERTLVRLVDETEEGKYLLSIRGLNYIAVAGLLAELGNFKSYRSAKQMIKMAGSNPTETESAGKKKSRTPMSKQGRPVLRYCAWTSVIPMLRFNPDFRAWAKQRRERPIHANPLGGREIVGAALNRLLRLAFALVKNQTYYQSPQLVQVTG

SEQ ID NO: 452716 - protein, 418 aa, unidentified
MNENGDTRGSRRYVALDIHKKYCVIGGVDREGRVVLHAVRVEHADLEGWLKKNLRASDHVVFESTTNAWHVYDLLEPLVERVVVANPAKVKQIANARVKTDVRDTFILARLLAANLVPDVWVPPAHVREMRQLLSQRRQLVETHTQIVNRMHSVAHRHHLQHERGKRFNEKNTVWQRDKRLSKVEQFQLKLEMENRGYIEKQISRIGKEVAKMSHKNPWAQDMTYLMQLPGFGVITAMTILAAIGEVKRFESAKKLASYSGLTGGVDQSGTHLVQKGVTKEGRRELRWAIVEVAQRAVKSDPRWTHKFQELHKRMHRNQAIVAIARQLLELVWYVLTRRQPYRHFSQERIAYKYLTWAWQIDEAARDGLTRQQFARYYMMRLGIGHDLTRIALNPKYPRRIASEAELLALRPELDRIE

SEQ ID NO: 452717 - protein, 402 aa, unidentified
MLDTSEIAVYLGLDVGKGDHHGHALTPAGKTVFDKRLPNSEPKLRAVFDKLRGKFGTVLVVVDQPASIGALPLTVARDTGCHVAYLPGLAMRRIADLYPGEAKTDAKDAAVIADAARTMPHTLRALDLADETAAQLTMLVGFDEDLTGEATRTSNRLRGLLTQFHPSLERVLGPRLDHPAVTHLLERFGSPQALRKAGRRQLVNLLRPKAPRMAERLVGDIFDALDEQTVVVPGTSTLDVIVPSLARSLAAVHQQRRALEVQISELLEAHPLSKVLTSMPGVGVRTAATLLVTVGDGSSFPSAAHLASYAGLAPATKSSGSSIHGEHAPRTGNRQLKRAMFLSAFAALHDPASRTYYDRCRARGKTHTQALLRLARHRISVLFAMLRDGTFYEPRTSEATAA

SEQ ID NO: 452718 - protein, 354 aa, unidentified
MSQTSNTAIAVIGIDLGKNAFHVVGHDARGAIVLRQKWSRGQVEARLANLPPCLIGMEACVGAHHLSRKLASLGHDARLMPAKYVRPYSKGQKNDFNDAEAIAEAVQRPTMKFVATKTAEQLDLQALHRVRERLVSQRTGIINQIRAFMLERGIAVRQGIGFLRTELPTILATRTDALSPRMLRVIEELAGDWRRLDQRIDGLSGEIEALARQDQACSRLMTVPGIGPIISSAMVAAIGTGDVFSKGRDFGAWLGLVPKQISTGDRTILGKISRRGNRYLRVLFVQAAWVVLVRIKNWERYGLKSWIEAAKKRLHHNVLAIALANKLARIAWAVLAKGRAFELTRTDDAGVRPA

SEQ ID NO: 452719 - protein, 412 aa, unidentified
MSQTIQRFVALDVHKNYVVIGAVDTRQEVVLHPRRVSLIRLDGWARKHLKPTDAVVLEATSNAWHIHDLLKPLAARVVVANPYLVKLIAASFVKTDKRDALALARLLAANIIPEVWVPPHHVRELRALISHRRRLVSQRTAAKNRLRSVLMRHNIVPPAGQIFSTTHRDWWEHLSLSDSEKLRARHDLAIIDHLSPLMEEVEVELARLSVGEPWADRVAFLVQLPGIGLLTAMTLLGAIGDITRFASAKKLVGYSGLGSRVYDSGQTHRTGRITKQGRRELRSVMIEAAWVAVRFHPFWQAKFERLADRIGKQKAIVAVARKLLVVAWHVLTAQAADRQADPQAVARSLMTWATRYGLATSLGMSRALFVRRELDRLGIGQTMQRFKYNGHYYHFPLTMPATVTEEEVVVGG

SEQ ID NO: 452720 - protein, 328 aa, unidentified
MFFIGIDVSKAKLDCSLLLDVASNKRRAKVVANSKTGIVDLLAWCTKQQVPVHELHAIMEGTGVYHEQAALALSDAGATVSIVNPAQVKDFGRSLGVRTKTDGVDSFVLARYGALLKPKSWTPPAQEARTLQALLSRREAIAQDLQRERNRLEKADAIDTPPPIRQSINDSIDFLEKQLAKLQQDIDNHINNHRNLKDDRDLLISIPAVGPQVSNHLLSVMHNHDFQSAEQLAAYLGLVPVERQSGTSVLGRPRLSKAGPARIRAVLYMAAIVATQHNPHLKALYRRLQDRGKSKMSALGAVMRKLAHLCFGVLKTRQPYQADYGIST

SEQ ID NO: 452721 - protein, 351 aa, unidentified
MSWSSFSAAIATLGIDLGKNSFHLVGQDERGAIVLRIKLSRSQLTQRLANIPPCLVGMEACAGAHHIGRQLRALGHDVRLIPAQYVKPFLKGHKNDYRDAEAIAEAVQRPTMSFVAIKTPDQMDLLALHRVRSRLVSQRTSVTNQIRGFLLERGITVRQGLAPLRQALPGILGSYSDALSLRIVHLIADLAEDWRRLDARITDVSAEIEALAAQDEHCQRLMSVPGVGPIISSAVVAAIGTGAGFKQGRDFGAWLGLVPKQESTGDRTILGKISKRGNKYLRTLFVQAAHIVLVRRPHGARLGLWPWIETAGRRLHRNMLVIALANKLARIAWAVLARGHAYQPRSASHAV

SEQ ID NO: 452722 - protein, 343 aa, unidentified
MIKRTGLDIAKTVFQAHGVDEHEKPKLRKRLKRAEVRAFFAQLPPCEIGIEACGSSHYWARELSKLGHTVKLMATQYVMAYRKRGKNDANDAEAICEAVGRPNMRFVAIKSEEQQAVLMVHRARTLTMANRTAQVNQVRGLLGEFGLVVPKGVARLRRELPGILEDAENGLPVLAREVLAGLLEQLRESDVRITAYDRRIRALAEASEPARRLMRMESIGPQTATALVATVGDPHVFKNGRGFAAWLGITPRQHSSGGKERLGQITRQGDSYLRTLLVHGARAHLRVIDKKTDAKSQWARRLKERRHANVAAVALAAKHARIAWAILAHGTEYRPGGPQSAAA

SEQ ID NO: 452723 - protein, 342 aa, unidentified
MEKHTTIAVDLSKTVFEIAVSDEPGCVRERRRLSRGQMLKFFANRPAATVLLEACGSAHHWARSIEPLGHRVLLLPPHQTRRYVLGDKTDAADACALLEAHRNKKIIPVAVKTVPQQSLAALHRIRSGWMQTRTARLNAIRGILRELGLFIPQGPRHVLPGLTAFLSDPQQPIPVQLHPSLLTLAAEIRLLEQNIRDTERQLTAAVHRLPQATRLLTVPGIGLLSATALVAFVGPLDRFRSGRRFSSSLGIVPQEHSSGRRRHLGAITKRGDPYLRTLLIHGARSALLAASRAKHPDRLQAWAMRIKQRRGHNCAAVALANKLARIAWAVSVHQTNYQSTSA

SEQ ID NO: 452724 - protein, 363 aa, unidentified
MNCVIENTELSSHEGTRSQFNGSTGAIKLGIDVHQDYYVVVKQEGGTNPKPAQRFRKEAFLLWVAKLRSQGSDVHALYEACGFGFGLQRQLSALGITCQVVCPQKLDERNKRVKTDGLDAKALCLKLDRFVQGNRDALALVRVPTEEEEQKRAIHRQREQLVKARKQLEAQGRSLMVNHGFEPTTSWWKPRTFALLQVPAWMKELLSNSQPILVALHEKIRTLTQRLQAAAEAGQARGIGALSSVVIDREVGNWNRFTNRRQVGSYTGLCPGEYSSGNTRLQSCVTKHGNPRLRAALVETAWRLVRFQPHYKPVAKWRQILAKGALATKAARKKAIVAVARELAVDLWRIRTGRVQVEALGLF

SEQ ID NO: 452725 - protein, 355 aa, unidentified
MNSSKYIGVDLHKDSISVAVRNAAGKIVMESVIETKASMILQFIDGLRGDLHVTFEEGTSAAWLYDLLKPHVTRVVVCDPRKNKSMREGNQNDKIDARRLSELLRLNHLNPVYHGEHGLRTLKELVRSCLTVTKDLARVMTRVKAIYRSWAIPCTGKQVYAACHRAEWLAKIHEPGVRRRAEFYYQQLDALRVLRLGVRHELLAESKKHKAWKRLCQIPAIGPIRAAVLLGILQTPHRFRTKRQLWNYSGLAIEMHSSADYRSVDGELQRSRKNVLVRGLNRNCNHDLKNLFKGAAAVASSKPGPFEKFYAALVAKGMKPEMARLTLARKIATIVLIVWKKGVCFDAQHLKPQTA

SEQ ID NO: 452726 - protein, 358 aa, unidentified
MSTQTTATPKLYIGLDIHKKSWSVHFRTDISDHRGFTMPPQPEKLVEYVCNHFSDHQVSITYESGCCGFSAARYFTQTGWKVTVVNAADIPRIQKQQFQKTDRIDCRMLCKNLQQDQLKAIHIPTEEQDQLRSLVRHRNSVVKQIRQVKLHIKSMLLYQGIAIPEAFDNANWSKAFLQWLSEIPWQHYPATYSMQSKLRILTSLHIEYLNCANELRSYCRRHHQKDYYLLKTIPGIGGYLASALLAELGNMRRFSNEDQFSAYIGMIPAMRNSGNTESTLGITPRSKSLIRSYLIEAAWVAIRRDPEMQAYYRKHFGKNIKNVIVKVAHKLVKRILSVIKNERPYEVSYQHHSALKLN

SEQ ID NO: 452727 - protein, 438 aa, unidentified
MSNKVIFNLDELFISVGIDVGADFSWMSIALPNQQFVGKPYKILHNSIDSLTTAVSKIKEAEELYSLESRIFLESTGIYHYPLFCYLRDKGFNCSVINPIITKNSTNINIRKVHNDRFDSKKAALVGLKPDLKVSLMPSDLALNCRNLCREYYDLIDNRSAYVNKLQGELRMAFPQYLGIFSKVTINTSLTLLETYTSPSAFLEADKQEIIDIIKSTARFGLTYAQNKYNAIIQAATDANQFGYIIDSNIKRIRLYISFIRKYDEEINSILESLHELVDANEDSDFVKQIHLIETFKGAGFLSAVSIMGEIGDFSAFSKPKQLFAYFGLDPSVKQSGKFEGTKVQMSKRGSAIARRVIHTLTLQSISISRNREAKNPVLREYYLKKCDSKPKLVAMGAVSHKVCNMIFAILRDNKPFKIIAPQEHIQQYNAAKCDIAA

SEQ ID NO: 452728 - protein, 328 aa, unidentified
MYFIGNDVSKKSLDLAFFDQQRKRWSKPCSLGNDPKGWDALIQWAEKQTQAPREDICIVMEATGVYHLKAAAHLSRKGLNVIIANPQLASQYAKSQNQQNKSDKLDARSLQEYGSQLKKYHLFTHDSQEISQLKALLSRMRQLGKDLHRERNRLEKCDFQEGSSWTRTSIERLIGFITSEQKLTQQQIDQLIKQNQVLRHNQKLLCSIKGIGKLTSQWLLPILSTQRFNNARETAAFLGLVPCHKSSGTSLKTRGRLSGRGDADLRARLYMPAVCAITYDPTMKAFYQQLVAKGKPSKVALTAVMRKLVHICYGVIKHQTPYLENYAA

SEQ ID NO: 452729 - protein, 425 aa, unidentified
MNSKWNEKLNQVTENTLVIGMDIAKSVHYACFVDERGRVIQNSFAVHQSKEGFEAFYQEILRAMKETKKTDVIVGIEPTGHYWMNLAYFLDQYGIPLVMVNPLHVKRSKELDDNLQTKNDKKDAVVIARLMKDGRFSYPRLLKNIEAELRIGSTLRSKLTEDLASIKNRIVRWLDRYFPEFRQVYPAFGKMALATLEMTPLPQDIVGKTSEELVLLYRQVEGMRAPQLPKAKLLIEAANNSIGLIEGLQMARHEIATLLRQYRLLEGEIETVNSQLAEMARATAEYEFLNSVPGLGDATIVDLLSEVGSFTLYENPRQLIKLAGLTLRENSSGQHKGQKHISKRGRKRLRMILFKVIVPLIRHNEAFKKLHEYYTTRTINPLKGKQSMVVLCGKLLKVLHGICKKKVQFDERYMMNDLHCLGEAA

SEQ ID NO: 452730 - protein, 390 aa, unidentified
MIYVGIDVAKDKHDCCILGSDGEILFSPFTIRNTLQGFDELYEKIWSLTSDLTEIKVGLEATGHYHLNLLRSLLDNGLPSFVINPLHTNLYRKGQSLRKTKTDKVDAASIAMMLLTDRTLKPYSDISYHNEELKSLTRYRFDKVQERARLKISVARLVNILFPELEQLVPSLHMASVYALLSEFPGASFIASAHLTRLKNLLYNASRGRYGRDMAIIVRDAARTSIGAVMPAKSMELKHTIHLIEVLTEEIDEIETAVNSIMDTINSPITTIPGIKNRMGAMILAEIGDFSRFDNPDQILAYAGLSPSTYQSGQLTSSYAHMEKRGSRYLRYALFNSTQYVCIWDPTFKAYLAKKRAEGKHYYVAISHAAKKLVRVIYRMQMTGEVYKTA

SEQ ID NO: 452731 - protein, 427 aa, unidentified
MKLSYKINHVKSKNLLNIAIDVSKDDLYLCTEIGSDKIKCIRDNFENRISDIENKLKEYIALAHANNYDNIQVVCEPTGGYEKKLLILARQLGCHTAYVSGESVSKYKIIENNESSKTDTKDPRVILIVAKVGKLIKHRILPEEYNLLRHLNRMHEQEEEQKIYYKNQLHCEMKSLFSDFSYKDSFLYGSSGRVLVKRFHCNPYRIVKMGYSRFSKTMKKYVKYIKTDTLKRIYSDAKKSVRLNLADTLIELLEQRIKDLWQNYLRHEVSLKEIKDQMHHLYQKLIDKGENLPKAEKGFVSQVNLARIVGETGPFEDFNHYQQIIRFSGLSLKQRQSGKYKGKDKVSKKGDSRLRKILSQSIFHLVKKDRVLGEYYHRKKAEGMPGTKAMAVISRKLVAVLFALSKPGVVYDPQRLSTCKSQYKKVA

SEQ ID NO: 452732 - protein, 364 aa, unidentified
MTTLAQSDAPCRVLGGVDTHKDVHVAAVIDDVGRILATASFPTTRPGYRQLFVWLRGFGEIVAVGVEGYGSWGAGLARDLTARGVRVVEVNRPNRQTRRRRGKSDTVDAEAAARAVLAGDATVTPKTGTGPIEALRQLRVARGGAMKARTAAANQLHSLIDTAPDPVRAQLRALSFKQKVALVASWRPRNATTPEGASRYALCSVARRWRDLAVEIGELDARIKVILDDVAAPLLAVHGVGPDTAGQLLVTAGDNPDRLSHERSYAALCGSSPVEVSSGRTNRHRLNRGGDRHANSALWRIVIVRMNSHQPTKDYIARRTAEGLSKQEIIRCLKRYVARELFRHLQHAVTDPHHEVPALVQRAA

SEQ ID NO: 452733 - protein, 341 aa, unidentified
MKLKTITIDLAKNVFQVCGVNEHIKPQFNQKLKRSELLDFMRQQTPTVVVMEACFSSHYWGREIAKLGHDTKLIPAQHVTPFVRGNKNDHNDAFAIAEASQQANIRFVPVKSEHQQEISCLHRIRERLVKSKTAMSNQARGLLSEFGVVFPCGHKALLSGLTSVIDNPQYSHRLQDMVIDMLSEYDTTIERLKSIKKQLNEFVDESESGKILRSIPGIGVINASALLAAIDKGQAFNNPKEFAVWLGLTPKQHASGNISKMGGITKRGDRYLRKQLIHGARAFVSRAAKSTDPLALWATKLRLTKPFNKVAVAVAHRLARLIWILLTRQEHYRSTPGNLSA

SEQ ID NO: 452734 - protein, 460 aa, unidentified
MNRNKLKSRADRTMPMVHPNAAAIDIGATMHMAAVRADRAPEPVRSFGTFTADLHRLVDWFTECGVETVVMESTSVYWIPIFELLDARGFTVFLVNARDAKHVPGRKTDVSDAQWLQRLHSFGLLRASFRPKGQIAELRAYVRQRERLLEYAASHIQHMQKALTEMNLQLHHVVADITGATGLGIIRAILAGERDPEALACLRHYSCHSSVETIAKALTGSYRAEHLFALDQALALYDAYREKASACDVRIEAVLKELSTHRGRDHGSAPPVSRRRNRTDQANALAFDARAALFVLLGKDITMIDGLGPYLSLKLIAECGDDLTSWPSAKHFTSWLGLAPSNKISGGKVLSSRTRRSGGRAAALLRLAAVTVGRTDTALGAFYRRLSSRIGKAKAVTATARKIAVLFYNAVRHGMEYVDPGASSYETRYRTRVVNNLHRRAKAFGFVLQPVEPKAGAAVS

SEQ ID NO: 452735 - protein, 373 aa, unidentified
MQENSKIFVGLDTSKMKISVALAEEGRRGEVRFLGDIDNTSDAIRRLVRKLTGKFCELLFCYEAGPTGYGLHRQITALGHACSVIAPSLIPKRPGEHVKTNRRDALTLARLHRAGELTTIWVPDPGHEAIRDLVRAREAAMEDLRKKRQQLQSFLLRHGRIYPGLRSWTLVHPRWLSNLTFEHPAQYLVLREYRQAIEDAEARLERLTQQVADVVSTWSMAPVVEAYQAMRGVAFLTAVTFVAEIGDVRRFETPRQLMAYLGLVPSERSTGEQVRRGSITKAGNPRARRVLIEGAWTYRYPARLSRALQVRQERLPKTVRAIAWKAQMRLCARYRRLMAAGKRQTLVTTAIAREMAAFLWAIGHEVEPRSAAA

SEQ ID NO: 452736 - protein, 347 aa, unidentified
MRYFAGLDVSLEETTVCVVDDAGLIVREARAASEPEALVAFFRGCGLVMERVGLEACSLTAWLHQGLTEAGIVAICIEARQAKAAMGAMPNKTDRNDARGIAQIVRTGWYRAVHVKHPSCRSWRALLTARRMVLNKRRDVENGVRALLREAGLKVGTPSRKNFAARVGELVADDPVLAGLAGSLLSVIEVMTREVDRLTKRVLDEVRIEPTCRRLMTVQGVGPLTALAFRATIDRPDRFRRSRDVGAHLGLTPRRYQSGETDVQGHISRCGDELARTALYEAAHSLLIRSTKWSVLRAWGMNVAKRRGMARARVAVARKLAVILHRVWSDGSEFRWGRQVATPAAAA

SEQ ID NO: 452737 - protein, 337 aa, unidentified
MEYFAGLDVSMEETHVCVVTRNGTVIHEAKVPSMPASIAAALARVPSCQWVLFETGRMAPMLYHGLSQLGLPVVCVESRQAYQALKSLATHKTDRNDARGLAHLARTGFFKPVHVKSLPADAVRSRIIARKKLVGQRVTLENQIRGLAVVYGVRLPRTLSPDFIRHALQASEGIPGLSVAMRGLVAARVAVLAAVVAIDGDIRKMASASGACRRLMSIPGVGQLTALAFTAAVGDPGRFQRSRDIDAYLGLVPRCYQSGEVDYTGGISKCGDRRVRTLLYEAANVMLTRYKGQLKLKDWALAIAKRSTMRKARIALARRLAIIMHAMLRHGTEFKPA

SEQ ID NO: 452738 - protein, 456 aa, unidentified
MSQTKKSGTSRNLSLVHSAAAAIDIGATMHVAAVGPDRDEQPVRTFRTFTDDLQRLADWFAGCGIRTIVMESTGVYWIPVFEILEQRGFEVMVVNARDAKHVPGRKTDVSDAQWLQRLHEYGLLRASFRPQAEIAGLRAYLRQRERLLDYAAAHIQHMQKALMQMNLQLHHVVTDITGVTGMAIIRAIVAGERDPTVLAAHRDRRCHASVETVCQALVGNYREEHVFALAQALELYDVYQTKVRACDTQIEVILKRLKKNAASPKSKLLPTRQRIRQPNAPAFDARGALHAILGVDLTQIDGLGPSLALKLVGECGTTLEAWPTAKHFTSWLALAPHNKISGGRVLSSRTRRTSNRAASLLRLAAGTVGRTDTALGAFYRRLSARIGKAKAITATARKIAVLFYNTLRHGMAYADPGATYYEDRYRQRVLHNLQRRAKSLGFGLQPLEPSVQASVS

SEQ ID NO: 452739 - protein, 340 aa, unidentified
MTIVAGFDVHRAQITFDALNQDTGEVKRGRVGATPEAVREWAGRFGGEQVHVAVEAGTGWLFVCEALREAGAAAHLAEPAETSALRGPRRRAKTDREDARWLRTLLCEGRLPEAWIPPAHVREWRTRTRLRKTLVDERTRWLARVQATLFHHGVAGVPDKLLSALGRELLAGFELPEAARERIGVALALIEAIDGQLAPLEQELRQLARRQPGCRALMRHYGIGELTAPTILCELGDVARLSASRKAVRCAGIDIGVHRSDRRSRAGKLTKQSSPQLRWALYESAQAACRPTSPDRADYLALKARGLSHPRASLTIARKLARRCFHTLRELGPEALEPIT

SEQ ID NO: 452740 - protein, 345 aa, unidentified
MNITAVGIDLAKNVLQVHAVNARGKAVLRRQLRREQVTAFFAKLPPCLIGMEACASAHHWGRTLERCGHTVRLMSPQFVKPYVKTNKNDVADAEAICEAVTRPNMRFVPIKSIEQQAVLSLHRVRQGFVKARTAQANQIRGLLGEFGLVIPKGIWYIAQRVPELLEDASNELPLVLRQLIDRLTDHLKELDRQVRELEREILTWHRNCGLSRKLEQIPGIGPLAATALVASIADAKSFDNGRQVSAWLGLVPRQNSSGGKSTLLGISKRGDVYLRTLLIHGARSAILAARRRNDSRNGWLTNLLTRRHANIAAVALANKNVRTVWALLAHGRDFKPDYRPVRTAT

SEQ ID NO: 452741 - protein, 353 aa, unidentified
MKLPVIRKTLGFPTTNLDKEEEAPMEGRYVGIDLHRRRSVIVTMDDSGEVLSSIRIPNDPVAMSIAVAEAGEGADVAFEATYGWYWLADLLESDGHRVHMAHPLAMRGMTMNRRVKTDWKDATLLADLLRMGSLSQGWIAPPELRELRELVRYRAKLVALRSGLKAQVHAVMAKNGVLPSRVEMFGPGGRAQLDALELPVSFMARIDSLRDLIDLYDREVTTFEREIHHQLKDDAGYRAIQKIEGVGKVIGAVFVAEIGDIGRFSSPQKLCSWAGLTPKHRESDLVKHQGDITKQGNKLVRWAAIEAVSGRRGGPKLRADYEQISKRRGKYRAKVAVARKLLTVNDHRKRQHP

SEQ ID NO: 452742 - protein, 370 aa, unidentified
MLDTTTFVGLDVHARSIKAVSLDVMTGEVRCATFGYDAGAVAEWVRSVDPKARCVYESGVTGFDLQKRLSGLGVDCVVGAVSKMIKPSADRRRKNDRNDAEFLARMLSVGNVVEVWVPDDECEAARDLTRALEDARDDLSRSKQRLSKFLLRHGLVFDERTPTGRRKGNWTRAHWSWIESIRFAEGADNDVLAYYVDAVRRAAEEKARLEGLVEAEARKPRWRRRVDSLRCLKGVDTATAADLVFEAGEFSRFRNARSFAAWVGLTPSEHSSGESDRRGAITKAGNKHLRKALVEAAWHYLTCSGRPKDLAKGQAPDRVARRHAAKGVRRLVERREALLARGVHGNKANVATARELACWVWAVGLMAEEA

SEQ ID NO: 452743 - protein, 349 aa, unidentified
MKIIGCDFHPGYQQIAMLDLVTGEMVEKALSHERKEEVRAFYAGLEGSVRVGIEASGQSQWFERMLAELGQQVWIGDAAKIRASCERKQKTDRRDAELLLRLLAEDRFPRIWVPTAAERDGRQLLLHRHKLVRMRTQVKNQLQALALNQGVQRKRKLWSEAGRKQLESLPLLPWASRRRAELLQLLDQLESSISELDRAVAEQASARPAARRLMTHPGVGPVTALAFALTMGPAERFQRGKQVASYLGLIPIEHSSGGRQQRLGHISKQGNPFLRGLLVEAAQSAVQHEPEMRRAYQRLAQRKCRALAKVAMARKLAVRLYWMLRLQVNYAQLIQGSHAGQPGTFCGRG

SEQ ID NO: 452744 - protein, 406 aa, unidentified
MELVTLYKRVVGLDVHQAKIAVCAIIEDETGDVTVELAEFGGFKRDRQALAEWVATRDPEVVVMESTGIYWKSPYAALEKVGIVATVVNARHVKTVPGRKTDWADAQWLATLARSGLLRASFVPPAKLRELRHVARQRQQLVGILSGEKNRVHKVLSDGGIRLSVVVSDIHGVAGRAMVKALIEGRSPAEVLMLAGNRLKADRGELLDALDGELTAEHRFVLRELMAHVQELEQRIDRFDRHLLHELEPYRTTLALMQTIPGIDAIGAALLLVEIGNDMDAFGSVDRLASWVGICPGNNESAGKRKSGRIRKGNPWVRRLLCQFAHAASRTQCAFKSKFEALRLRRGHKRAIVAIAHKILKTVFLLIRRQTHYRDSAVDFEAMSVTRNAPRWLKMLKKHGFIPAAA

SEQ ID NO: 452745 - protein, 308 aa, unidentified
MTTIYTGLDIAKLNLQLHLAGRIHDLPNTAAGHRRLLKLLASQPGVHVVCEATGGYERDVVAALHQAKVPVSVLNPARLRHFARATGQRAKTDHIDAAVLSAYGQALQPKPTAPRSQQEQQLTELVRRRVQVLEILVAQRQQVERLTLPALRRQAQSLIRRLERDLKQIQEHLKELRTQAATLDERVQKLEAITGVGTITALGVLAELPELGTLNRRQAAALAGLAPHPRESGQWHGRRSIGGGRAPIRRALYMAALVAAHSNPQLKEFYQRLRAAGKPAKVALTAVMRKLIVLMNHLLKNPNFALQN

SEQ ID NO: 452746 - protein, 391 aa, unidentified
MIYAGIDVSKDKHDCFITNSDGKILFKSFTIPNNREGFEVLYQKITSTTDDLTNVKVGLEATGHYSYNILGFLLDKGLTTFVINPLHTSLFRKSLSLRKTKTDKVDSHTIATMLMSDVNLKSYSDISYHNEELKSLTRYRFDKVRERAKLKTSVSRLVTILFPELEKLVPTLHMPSISALLSEFPGAFQIASAHLTRLTNLLYETSKGRYGRDNAILFRETARASIGSNMPVKSLELKHTLKLIGELDAEIDEIEQEIKRIMDELHSPILTIPGISYRMGAMILAEIGDFSRFDSPDKILAYAGLSPSTYQSGQLESSHSHMEKRGSRYLRYALFNAAKFVCKWDPVFAAYLAKKRAEGKHYNVAVSHAAKKLVRVIYRLEKSGQAYNKIS

SEQ ID NO: 452747 - protein, 326 aa, unidentified
MHGVDADGQVVIRRKLKRRYVLAFFAKVPPCLVGMEACATSHHWSRELQALGHRVRLMPPAYVKPYVKRQKNDATDAEAICEAVSRANMRFVETKTVEQQSCLVLHRTRHLFIRQQTSVINAIRAHLAEFGIVAPVGRKGVEQLLDVVANTEDQRIPDVARACVAALGAQLRALKAQILEFDRQIMIWHRSHETSKRLDEVPGVGPALATALVASVADPKAFRSGRDFSAWIGLVPKQHSSGGKDKLGSISKQGDRYLRSLFVAGAFAVIRYAKIHGTKHRPWLTALLTRRPTKVAAIALANKLARMAWAMMATGARYNYPASLKV

SEQ ID NO: 452748 - protein, 485 aa, unidentified
MKKKTFKGGFTMKRYKPSHKPSASRKSSRSQKKQDLTILNPKSAGIDIGSRSHFVAVHHDSDNDFVKEFSSTTSGLLEIVSWLKECNVETVAMESTGSYWIPVYEVLESNDFDVCLVNAKFVKNVPGRKSDVEDCQWIQKLHSFGLLAKSFRPKDHCMKLRSLTRHHSTLIQHRSPHIQHMQKALLEMNIQLATHLRDITGVTGMKIINAIIAGERDPEIFAGLVHPLCKKSPEEIIKSLEGNYREEHLFCLKQARDLYVFYSEKVRECEAQIKVALDEQCKNISKDSALELMRFHEEKVKSNKEKNTRKRKSKMSFDPTLALKQITNVDLTEIPGIDQVSALKIISELGGSVDSWKTAKQFASWLGLCPGNKISGGKIMSGKTKPCVNRIAQILRMAANGLWNSKSYLGAYLRKMKSRLGGMKAVTAAAHKLARIIHTMIKYGKSYKELGEETFEKEHNERRLKSLIRRAKEMGLEVVPVKKGT

SEQ ID NO: 452749 - protein, 362 aa, unidentified
MVVVGTDAHKYSHTFVATDEVGRQLGEKTVKATTAGHATAIMWAREQFGLELIWGIEDCRNMSARLERDLLAAGQQVVRVPTKLMAQTRKSARSRGKSDPIDALAVARAVLRETDLPLATHDETSRELKLLTDRRDVLVAQRTSAINRLRWLVHELDPERAPAARSLDAAKHQQALRTWLDTQPGLVAELARAELTDIIRLTGEINTLAQRISARVHQVAPALLEIPGCAELTAAKIVGEAAGVTRFKSEAAFACHAAVAPIPVWSGNTAGQMRLSRSGNRQLNAALHRIALTQIRMTDSRGQAYYQRLQDAGKTKRAALRCLKRRLARTVFQALRTVHQPSSEHTQPAAACHRSYCSALVP

SEQ ID NO: 452750 - protein, 347 aa, unidentified
MRFYNRQHRHYCGIDLHVKTMYVCILDATGQTLVHRNVQSNPGAFLETSAPYRDDLVVAAECMFTWYWLADVCAAEGIPFVLGHALAMKAIHGGKAKNDKIDSQKIAGLLRGGLLPQAYVYPAAMRSTRDLLRRRLHLVRKRGQLLAHIQNTRAQYQLPEFGRRLAYPANRAGVSEHFPDPSVRKSIDVDLALLERYDDLITDLELTIVREAKRHDGDAFHRLRSVPGIGKVLALTMLYEIHDISRFDRVQEFASYARLVKCAHISAGKVHGSGGAKMGNVHLKWAFSEAAVLFLRHAPGGKKLLGEIEKKHGKGKALSILAHKIGRAVFYILARGTVFSMETFRAA

SEQ ID NO: 452751 - protein, 341 aa, unidentified
MTQYVGLDVSLKETKLHVLDEAGNRIWRGRCATDAAAIAAAVRRYAPRAVRIGLETGPLTTWLWTALRAEGLPMVCLDARHAKKALDMKVNKTDANDAEGLAHLVRAGWYREVRVKGRSAMLAKALLGARSQLLSMSLALENQIRGILKTFGRIVPKGAGGLFEKNVRALIMDDAEITAVVMPLLQARQVARGKCAALDRRIIRSVQGDATCRRLMTMPGIGPITAVAYVAALEKPDTFKRSRAVGAWLGLTPRRFQSGEVDYDGHISRRGDRQLRALLYEAAAVLLTRVRRESALRCWGLMLWKRLGFKRAATALARKMAVVLHAMWKSGTAFNPTLSTP

SEQ ID NO: 452752 - protein, 400 aa, unidentified
MISVGIDVSKEKSTVCILKPYGEIVSKPFEVYHVEQELSELATMLLRLNDEVRIIMEATGIYHLPVLSYFKEKGFFVAVINPFEMKEYRCQGLRRVKTDKQDAIAISHYGIDHWYRLKEYEAQENIYTELKLLGRQYCHYMRMRVESVLELTHLLDYTMPGIKTLLQGWNERNGKDKLGDFAEEYWHYDNITKKSEKQFIDSYLKWAKKKGYHQNQDKAIKIYALAKEGIPTVSSNTPSTKMLVQEAVRVLREVDHTLMTILTQMRSLAKSLPEYPIVRAMGGVGDVLAPKLIAEIGDVRRFHSGKALIAYAGIDAPPYQSGRLVGTERKISKRGSSNLRKIGYEVMRSLKTHKAPEDAAVYEFILKKEREGKSKRAAKIAGLNKFLRIYYARVMEVYRK

SEQ ID NO: 452753 - protein, 342 aa, unidentified
MKNTTIAVDIAKSVFEVAVSEQQGRVSESHRLSRSTFLRFFAQRQPATVLLEACGSAHHWARQLQSQGHRVVLLPPHAVRPYVPRNKTDRSDARALLEAARNTDIKSVPVKSCAQQALTALHRLRSAWLATRTARINTVRGLLREFGVVIPVGPKYVQQHLRAAIEDVGSPLPETVRPALALMGEEIRQVEERIDLVDRQLQRLSKQMPVVARLQTIPGIGPISSTALVSFVGDVARFPSARHFASYLGLTPREHSSGLRRRLGAISKRGDTYLRMLLIHGARAVLWGTHRKGPHERIRTWAANVERQRGHNKAAVALANKMARLVWAVWKKDEDFQELPAV

SEQ ID NO: 452754 - protein, 337 aa, unidentified
MEQRYVGIDLHRRRSVIYIMDGEGQKLSCVRITNEPDALMAAVAPAGEDAHVVVEATYGWYWAVDLLQDNGFDVHLSHPSGNDWGKRRVKNDERDARDLADLLRLGRLAEAWIAPPAVRELRELVRYRAKLVNLRSGLKTQVHAVMAKEGVLPNVLDMFGPGGARQLDGLELAEPYTLRIESLRDLVPVYDREILMLERKIHRRLSGDKGYEAIQELNGVGRTIAAIFCAEIGDVHRFRSAPALCSWAGLTPRHHESDTKVVRGAITKMGSRLVRWAALEAVARYHGGGWLHEDFCRIAERRGKKKARVAVARKLLTLVYYGLRDGEIRALRDRQAA

SEQ ID NO: 452755 - protein, 373 aa, unidentified
MPRYSTAFGMDVHLRSTTVCALDAETGEAVTRRFRGNPWGEVAEWMSGFPGPSLAAYESGYLGFAPQRELSGLGVDCVVAAVSKVPRSAADLSSKNDRNDAARMAKAILSHDISPVWVPSPEIEGLRDLAAAHDAATARLAAAKQRLLAFLARRGYAYGGTTPAGNPRRYWTYGFLRWLDKVRPADDGGIRALAALRNEVEAAAETRDDLLAEYRAAVAAGPLSAEVEALQSIKGCGFALAAAFASEVGDFSRFRSGRQVTAYFGLAPKQRSSADSVRLGGISGAGNALVRRLAVEGSWSYVQASHQPKLMPKGSGVPLEVRMHGRKGSERLLRRREEMLARGMPQAKANAATAAELVRWLWALGAMCREAGE

SEQ ID NO: 452756 - protein, 339 aa, unidentified
MNATPVGIDIAKNVFQVHYVDQETGEIVNKPIKRRQFLDHFANRARCLIGMEACSGAHHWARRLIQMGHEVRLMPAQFVKAFNIRNKSDAADAKAIWLAVQQPSKAVAVKTEMQQAVLMMHRQREQLVKFRTMQINGLRGMLAEFGEAMGKGRAAMAKEISVVLASVEERLPKVLIDSLREQWERIEKMDEEIAAIERRLREWKKEDKAVKMIGEIPGVGLLTATAAVAMIGDPKAFRSGREFAAWVGLVPRQTGSGGKVNLHGISKRGDQYLRKMLIHGARAVLSRAKEPGAWVDRMKTRRPSNVVVVALANKMARTIWAILAYERPYEKGYMSVKPV

SEQ ID NO: 452757 - protein, 337 aa, unidentified
MFYTGIDLHKHSSYLTTVDSSGNIIKQADIKNVYHNFVQYFSDLGNDNITTVESTMTWYWLNDLLTSLNIPLVLAHAKYVKAIAYAKVKTDKVDSHTLAQLLRMDYIPSAHKISNHNRTLRDALRARIKIVQRHTSVTNSMQLLLAKYNLSSPYQLEEIPRYQYEQLSEVESLLKEQMLDLEKQLYPFLIPNEDIQRLLWIPGIGKMNAFTILLEVDDINRFEDVKNFFSYCRLTPSARNSAGKSKQRSSKDGNKYLKVVFSDAAVHACHYYPPIRKYHNSKLRKKNKSVAKTIIAKEIARIVYYVLKNKSDFNNTFKGHQLELKSFQWPRITNPYA

SEQ ID NO: 452758 - protein, 343 aa, unidentified
MDHFSGLDVSVKETSLCIVDDAGRIVREVRVASEPEALLGVLTDPAWHFKRIGLEAGPLSQWLFNALAEAGLPVICVETRHMRAVLKAQINKTDRNDARGIAQMMRAGLYRPVHVKTLGSQKLRMLLTHRKLLQSKAVAIENDLRATLRNFGLKVGVVGAAKFEARIKELVENLPDLALLVEPLLVVRRVLREQIGILHRRLLAVVRDDDVCRRLMTVPGVGPVVALTYRATVDVPSRFRNSKAVGAVFGLTPSKHQSGESDRTGGISRCGDEMVRTMLYEAAHILLVRSTKWSWLKAWAMQIARRRGMKKAIVALARRLAVILHRIWIDGTEFRWTREAVAA

SEQ ID NO: 452759 - protein, 400 aa, unidentified
MNPVIGLDVSKGESHAQAFADRGTPYGKIFRFKHDLDGLASFLRYAQDLESFTGKRAAVVLEATGHYHSPVVQFLDEHQFVHIIINPLLSHQAKKANLRKVKTDAADAYQLGEMFYKEELEPYKKRGQYLMNLRYLTRQHESLTDMYVQAKLQFQAVLDQVFPEYHGVFGDLYAKVSLRFLALYPTSQAVLAMSEKDVMMHIQNLAGYVNPNCWTLERAQKLMAAAERNPFKETAFPSHLISLELLFNLLLQYQDHLSKLDQSIEDLAQELLEYDLIQSIPGIGTKLAATILAEIGEIDRFDHAKKLIAFAGIDPSVFSSGKFTATRNPITKRGSRKLRTALYQAVRCGLRSSRNKKLRLYYDKKRAEGKLFKVAVIACANKLIHWIYAILTKKEAFRLD

SEQ ID NO: 452760 - protein, 418 aa, unidentified
MRLFVGDDWAEDHHDVEVMDESGKKLAARRLPEGAAGMAQFHALVGRFIPDEAPSDPGDPDGAEVAVGIETDRGPWVAALVASGYTVFPVNPLQASRYRERHGVSGAKSDAGDAHMLADMVRTDSHQLREASGDSPEAAGIKVLARTHKTMIWDRTRSVQRLRHQLREYFPGALEAFDDLDAADTLELLGKAPEPARARKLTRAQVSAALKRARRRNIPEKTDAILAALRSEQLEQPEALAVAYAATARSLIALITALNEQVKTLQGQVEEHFGRHPDAEIYLSQPGMGKILGARELGEFGDDPDRYLNGKARKNYAATSPLTRASGKKKVVAARFVHNDRLVDALNAQAFAALSASPGARAYYDELRDRKIEHNDALRRVANRLVGILHGCLKTRTLYDEATAWGHRENLPQSSAAA

SEQ ID NO: 452761 - protein, 349 aa, unidentified
MIKTKVMTDILKQVAGIDVAQKELVVSLGKIDKSLEAEVYRCKTFANKLSGFKAMLVWVNKHATEQVPVRYVMEATGVYHESLAYYLSDQGLESSIVLPNKISNYVKTLDEKSITDKTASAAICKFGLERKLEVWQKPKRVFKTLKQLTRERDQLIAERTFLKNQLHAEQAEAEPSEDSIIRMKARIALVNTQEVEIRSEIAAIIKQDAKLMKEVQTITSIPGIGKLTAVTVLAETNGFELIRNKKQLVSYSGLDVKVKDSGTSVKSKPRISKKGNRHLRKAMHMPALTAIRHDERFKSIFVRLVSKHGIKMKAAVAVQRKLLEMIYIIWKTNKPYDIQYQQKKDSIAI

SEQ ID NO: 452762 - protein, 430 aa, unidentified
MEIVYPRSCGVDVHKSFTLAVICISESVKPKYIKKRFSTFNNQLIQFRDWLIENNCQNVCMESTGKYYIPVYNALEGHISNVVVANPKWVKAIKGEKDDNKDAKWIADLFKFGIVRSSYIPEKDIRILREFTRYQYKLVNMRSSEKNRFQNALTTGNCKLDIVFSDIFGKSASAIVDTILSNNPYTSEDILSKVHAGCKASHEDILSAVEGIQLNQFQKARIRIVQKHMEYLDSLLDEIQHHIDLMVANYEEYIQLLCTIPGINRKSAITIISEIGTDMSQWSSHRKLAAWAGLAPGCNESAGKKKSVKISKAGVYLKPCLVQVAHAAVKDKNCDYYADKFNKISKRRGKKRAIIAIARKILIAVYHLLKTGEVFNPTDMADVETTKKQRIEYVKNNLRNAFNQLSRTGLSEAEILQLIRKESTNSPQIE

SEQ ID NO: 452763 - protein, 349 aa, unidentified
MAIIGGFDLHRKQITFDYVDTESGEISAGQIRPATRAVLRQWLGRFKDAPHVAFAVEACTGWRFAAEELHRAGVEPHLAEPADTATLRGRKKRAKTDRADARHLRDLLVQQRLPEAWIPPRHVLEARTLARLYIALIQERTGWQQRIHAQLYHQGVPEVTDLRSAEGRAAAAAAELSSAGQQVVAIALSAVARLDEQLVPLRRQLEAIGTRQPAVVRLRRHFGIGRLLDTIIWAELGDCRRFSNSGQAVRFAGLDVTVWSSDAKRARGHLARQGSPELRWALFEAAKCAHRTTAPDYAAYVALRDRLDSTLATLTIARKLVRRCYHDLRELDPAVWQSPPADEPLYDAA

SEQ ID NO: 452764 - protein, 321 aa, unidentified
METWVGIDISKDTFDAAWIMDGKKNHLKLENGSSGFKRLLNEVPAGSRFAMEATGEYHLNCARYLSSRGNPVAVFNPFAVKMHMQSDLRRCKNDRADAYSIAKFAAEKNTDCWTCPTDDEIRLKHLDAVIDNLQKQIRQSKNVLHSLTQVNLSDDQAVSIIKKTISSLEALMEKARNRQLEMVETGKKEEIALACSIPGIGLETSLKFFTHVGNIERFGSSRSLISWIGLTPRNAQSGTSIHKNGSISRMGCTRLRGQFYMCAVVAIKYNPDCRSFYTRLKESGKPSKVALIAVANKLLRQLYAVLTKKEAYVPNFCTKAS

SEQ ID NO: 452765 - protein, 320 aa, unidentified
MASRESLFIGIDVSKQTLDVAFGADPHAPRETIPSTDEGVQLLVTRLQRLQPTLIVLEATGGLERMVFAQLLQAGVPTARVQPRRVRALAHAEGRQAKTDRLDARLLARFAERVRPPHHQATDEQRASLRDLLVRREQVIQMRTAEINRLTAAAPNLRPGIQKHIDWLDQEIRALEQELDNEAERTDEVRWKRELLESVPGIGAITARNLLLRLPELGTIKRTEAAAFVGVAPYANQSGAQHKPRHISGGRRDVRSVLYMATLAATRRRLVRRAFYQRLCQAGKPRKVAIVAAMRKLLTILGAILRQQKPWDPAVHTSAP

SEQ ID NO: 452766 - protein, 350 aa, unidentified
MIIGVDYHPSFQTIAFFMEETGECGEQELKHSDGQAEKFYRDLKQRGICVRVGMEATGYSRWFERLLAELGFEVWMGDPAEIKAKRVKKQKFDREDARLLLRLMRENNFPQIWVPGPENRDLRQLLWHRHRLVQMRTRIMNQLQALAMNEGYRWKKKLFSEQGRALLEKLALAPWASRRRQELLELLDRMNPTIEELTAAAEREARKRPEVLRLMTHPGVGPLTALAYVLIIGTPTRFQRGKQIGTYVGMIPCEKSSARKQRLGHISKQGNSLLRFLLVEAAQAAARSHPDWRRRYLHLAMRRHKSIAKVAMGRRLAIRLYWMWRNGCEYSPSLEFGSYAGQLGTGHGVN

SEQ ID NO: 452767 - protein, 387 aa, unidentified
MIYVGIDIAKETHVAAAVDSDGVIVIEPFSFSNNHEGFKLLKSKLDSLDKSNLLIGLESTAHYAENVIFFLHGCGYELAVINSVQTAAMRKTGIRKTKTDKVDSLLICKTLMVNSFRRYTENDIKTLKLKSLCRFRQNLKKSKARLKTQLTSYVDVIFPELQYFFKSGLHIKSCYELLKVYSSPDDIAALHLTKLSNILTKASRGRFGKQDAESLKSLAKSSVGVKNTYISIQITQTIAQIELIESQLNELETVIETAMDELDSVIMTVPGIGKLNGAMILGEIGDIKRFSDSSKLLAYAGLDPVINQSGKFNAKRTRMSKRGSKILRYALINAAWNVSLNNDTFKRYYDSKVAQGNSHYSALGHTAHKLVRVIFKLLNDNITFALV

SEQ ID NO: 452768 - protein, 341 aa, unidentified
MSESALIGIDLGKHTFHLHGQDKSGREVFRKKCSRAQMMQFFGNVPSCVVVMEACAGSHFVARQLMAMGHTAKLISPQFVRPFVKGNKNDFVDAEAICEAASRPSMRFVTPKTESQQTLSVLHRMRESLVHDRTKTANQMHGFLLEFGISLPKGLAIMQRLASVLAEHELPVRLTVLLQRLHDHFVYLDEQIKALDKELAGQLADDDLGSRLLSMPCVGPITASLLAVEMGDGKQYRCSRDFAASVGLVPRQYSTGGRANLLGISKRGDKHLRQLLVQCSRVYMQRLDHQKGALADWVRSLLSRRHSNVVACALANKLARIAWAIAAHHTQYEAGPDALNA

SEQ ID NO: 452769 - protein, 399 aa, unidentified
MIGIGIDISKNKSTVSAINDTGEIIMKPQEFKHSENELNKLIQWIKDQEDTVFVVMESTGHYHYPVLKKLYEEGIYVSVVNAYLMKKYGDIEIRKAKTDKKDAIRIAKYAIKKRFSLKKYEGEDEKYNDLKFLSRQYNQIVSIRVKAKIQFNNLLDEIMPGINKILTRTTGNSSKILYDFVEKYEHFDNIKRKGEQKFIKEYSAWSKKKGYRNGAIKALKIYELAQNSITTRSANNSTYIALKNCIKILRETEESSNSILTQMQTIAYTLPEYKIVRELKGVGDKLAPRLIAEIGDVRKFTSAKALNAYAGNDAPPHQSGQFEGTKRHISKRGSSSLRKVGYEIMMALKVTKPTEDNAVYEFMIKKESEGKAKNVAKMAALNKFLRIYYTRVMNLYKTL

SEQ ID NO: 452770 - protein, 345 aa, unidentified
MTQYKRIGIDTSKAVFTLHGIDQQDRPVLRINLRRAQMISFFKKLPPTEIAMEACGGAHHWARELAALGHEVRLIPPQYVKPYVKRGKNDRNDAEAICEAAGRPGMHSVPVKSVTQQAQGMVLKVRETLVGQRTLLVNTLRGHAAEFGVIAGKGLGEIGPLLTAIEQEASIPPEAKDMAVLLGRQIEDLDARIKEIDAKLTAAHKANAVSLRLATIPGVGPVTALTLAVEIDPAAFESGRHLAAWAGLTPKDRSTGGKQRLGGISRAGNERLRVLLVSGATSVINAAMRPGSRQMTDWLRSLLQRKPRKLAAVALANKMARMAWAMMTSGEAYRRPPAAAGAVPA

SEQ ID NO: 452771 - protein, 365 aa, unidentified
MESQSHYAVAGIDVHKKMLAVVITNVGQPGDWVWERRTFGTLDSDLRALASWLNEHDVQEAVMESTAQYWNPVWRTLEGQCKLHLAHAQSNRGRQGRKRDFADAERLVRRLVAGELVLSFVPDVQQRLWRAATRARHQLTCDRVRLQNQLEALLEDALRGAERMSDLHRQLLRLLLERLELVEQQREILHQTIAHALEEHSAAIARLIEIPGFGVNSAQQIIAEVGPQAVTFDSAAQLAAWAGVCPGRNESAGVSTSDRCPKGNRTLRRVLTEVALAAIKTKGCVFQLLYRRLVVRLGHAKTIWAIAHRLCRLVWKILHQGISYQERSDCPNTLLAKQRTRRLIRQLQALGYQVQLTPLTTNPAC

SEQ ID NO: 452772 - protein, 355 aa, unidentified
MNQEKYIGMDVHQATISVAVMEGRGKLIMECILETKAGTILEFIQGLHGSLSVTFEEGTSAAWLHDLLKPQVAYRVVCDPRKNALLKDGSKSDRIDARKLADLLRLNRLHPVYHGEHGVRTLKELGRSYLTITQDLTRVMNRIKALYRSWAIPCSGSPVYAPRHRAEWLAKIVEPGVRRRAERLYQQLDLLQPVRQQARRDLLLESHKHPAVRLLRQIPAIGPIRAALLVALLQTPHRFRTKRQLWAYSGFALETHDSGEYRMVRGKVRRNRERLTVLGLNDNHNHDLKNLFKGAALSASTCPGPLYDFYVGLLAKGMRPTMARLTLARKIATITLTMWKKGVDFDAQQLNRQAA

SEQ ID NO: 452773 - protein, 342 aa, unidentified
MQITTIGLDIAKNVFQVHGIDASEKVVVRKQLRRSQVLAFFKALPPCLIGMEACATAHYWARELTKLGHKVRLMPAKDVKAYVKRNKNDAADAEAICEAVRRPTMRFVQVKSAEQQGGLMLHRTRDLLMRQRTQVINALRAHLAELGITAAQGREGLKELLKIIASDADERLPADAHASLVVLAAELQAMQTLIGSIEKRITAQHRGNEASKRLETIPGIGVIGATAIAATVTDPTVFRSGRDFAAWIGLVPRQDSTGGKQKLGPISKQGDRYLRRILVVGAIAVLRYAKQNPEKYPWLTQLLARRPFKVVAVALANKMARMAWALLAKGGTYRAPALAAAA

SEQ ID NO: 452774 - protein, 368 aa, unidentified
MEEIRAFVGLDVHKTTISVAVADNWRGGEVRHVGTIENTPIAIGKLAHRLARRHGAIEFVYEAGSCGYNVQRQLTEMGLTCRVCAPSLTPRKPGERIKNDRRDAIALARLNRSGELTYVWVPDAVHEALRDLVRARHAACQDVRRDRIRIQAFLLRCDLRFEGKPWSTRHRRWLWNRQFAHSAQQIAFQTYLNALEHDEARKAEVEGQIRELLAGSPWAKLMQALQALKGVGPVVAATIVAEVGDFSRFAHPRQLVAYFGLAPGEHSSGATVRPRGITKAGSSLARTVLCEAAWNYRTTPKVGQWMNEHCPPVPQDIKALAWKAQLRLHKTYRRLTARGKRSVVATAAVARELLGFIWSIGQRVPLGV

SEQ ID NO: 452775 - protein, 352 aa, unidentified
MECVNNHQRKEEKTVSKITTIGLDLAKHVFHVVCCDGRGKLVSKRMLKRRQVLTFFAALPPCRIGMEACAGAHYWARQLQARGHEVILIPAQYVKAYVRGNKNDYNDALAISEAVSCPQMRCVGVKTPEQQDLQALHRLRERCVQMRTGLCNQIRGLVGEYGLVCPKGVAILRRQIPVWLEDGENGLSELFRRLLSQSYAQLQSLDAHIAFYTEELERQGRQNTVCQRLQTIPGFGPIAASVFYSQVGNGQAYRRGRDAAAAIGLVPRQHSSGAKQTLLGISKRGDRYLRSVLVHGARAVVARAGTKQDRLSRWINRIRAERGFNKAAVALANKMARIGWAVVANNTVYRAA

SEQ ID NO: 452776 - protein, 391 aa, unidentified
MIFVGIDVAKDKHDCFITNTDGEVLFKSFTITNNLDGFDELYQKIESVMEDVSKVKVGLEATGHYSYNLLGYLLDKGLPTYVINPLHTNLYRKSLSLRQTKTDKVDAHTIASMLMSDVNLKSYSDTSYHNEELKSLTRYRFDKVKERAQLKQSISRLVCILFPELEKLVPTLHQNSVYELLYEFPGAKYLANAHLTRLSNLVETASKGHYTKDTAITFREVARTSIGSNMPAKSLELKHTIKLIREIDAEIEEIENEIKIIMDEINSPILSIPGISYRMGAMIIAEIGDFSKFDSPDKILAFAGMSPSTYQSGQLDNCYARMEKRGSRYLRYALYNATAYVCFWDPTFKAYLTKKRSEGKHYYVALSHATKKLIRVIYQLESSGQQYIKAN

SEQ ID NO: 452777 - protein, 399 aa, unidentified
MIGIGIDISKNKSTVSAINDTGEIIMKPQEFKHSENELNKLIQWIKDQEDTVFVVMESTGHYHYPVLKKLYEEGIYVSVVNAYLMKKYGDIEIRKAKTDKKDAIRIAKYAIEKRFSLKKYEGEDEKYNDLKFLSRQYNQIVSIRVKAKIQFNNLLDEIMPGINKILTRTTGNSSKILYDFVEKYEHFDNIKRKGEQKFIKEYSAWSKKKGYRNGAVKALKIYELAQNSITTRSANNSTYIALKNCIKILRETEESSNSILTQMQTIAYTLPEYKIVRELKGVGDKLAPRLIAEIGDVRKFTSAKALNAYAGNDAPPHQSGQFEGTKRHISKRGSSSLRKVGYEIMMALKVTKPTEDNAVYEFMIKKESEGKAKNVAKMAALNKFLRIYYTRVMNLYKTL

SEQ ID NO: 452778 - protein, 283 aa, unidentified
MLTAEADKRKTKAVVNTAAGVQALLAWCAKHGAQPAQLHAILEPTGLYHEQAATALPQVRVSLVNPAQARDFAKALALRSKNDALDSYVLARYGQTLSPALWHPAPLHARQLRALLTRREALSKDLLRELNRKEKSQFSPSAPLVDGSIDKAIAFLREQIKQIERAIDQHIDNHPDLKQDCELLNSIPAIGPQAGNAILAVMHNRHIDSAQSLAAYLGVVPVQRQSGSSLNSCARLSKAGPSQVRATLYMAALVGTRHNPTSAPFTSACSKQEKAKRPRWARP

SEQ ID NO: 452779 - protein, 347 aa, unidentified
MSFIGVDLHQNSFTVCRRNTDGAESFETLTLSAADLERFCLSLDADDELAVEATGNSAWFRDCVRPCVGRVVVVNPSQFKVIRKSVKKTDRNDAAALALFLAKDMLPETRARTQGENELASLTQTRDLLVKQRTRLLNKIHALHVRKGLKLRKESLGSKRALASIDLALFSACEVIEIEVLREQALSLTASLARLDREIEGVASTFKGYEGLTSIKGVGPRSAAVLLSTIGNVHDFESADKLAAYFGIVPRVSQSNETDNRGRITKRGNKLARTTLVQCSLIAMRYSSYLKTYYDRIRQRRGTGKAIIATARKLLAIIYDTLKNGWVFDDFTQFSRRDPLIPAGQTS

SEQ ID NO: 452780 - protein, 426 aa, unidentified
MKEKIDYLSTLFVGIDIASRIHVISALDFNQDFFIKMKPVQNTQEGAVLLESMIVDVLKENHQFKYVVIAMESTGFYGVHLANYLSASDLLAPFSVRVYCLNPKEVKNYKKSFNDIGKNDGIDSFVIADFARVGRISIKPWRGSQYLALQRLTRHRMHITECIAREKTYMLNNIFLKFSEYALLRDGEHPFSNKYSATAEAILTEFTTNEDIVNSSVEDLVAFINTKSRGRIAEPEETAKIVQAAARNSYRLDKCLYEPLTISIASSFNCISSFEKELKAIDKAILQTVQGLNPEEYTVLNSIPGIGKVYSAGILAEIGSVRAFQNANALAKYCGIVWNDNDSGDFEAEDKRMSKSGNSYLRYYIIEATGSVIRHCPEYERFYQKKYAETRNHQHKRALALTSRKFIRLLYGLLDKSQLYSPEKSR

SEQ ID NO: 452781 - protein, 401 aa, unidentified
MPSLRENSQRIKRFRELKATLRTDRTRLLVGIDVAKAEHGVHLRHAHTRIVAPTLTIPNTTRGFTQLWVRIQQAQRATGCREVVCGLEPTGTYHQALATFLEGQGADVVLISSSVAYWNRRTQDGTWDKNDRKDAANCADLLEQGKILFASQPTGPLAELRRLVKLLRRARTELAACKARWRTALRPSLAPMGEPLPNRLRAELPTVLQAWERPTRGAPAQPRGRLPLGLATACADLGAQVTAVQARITTIEAALTPLAARLPAYALLRTIPGIGSTVGAILVAEIGDVAWFTKFSQLRKLAGLDIVRVQTGQYAGQWRISKCGRGLLRWALYQAAGGLARTAPGRARLATLKAKRHGDRFAGFKAMVELAAKQLRLVWGVWRSGTPYDPRRTGGLRRQPR

SEQ ID NO: 452782 - protein, 372 aa, unidentified
MKATKAARQQDKAKAVVMYMAAELSAKTWVLGFSDGSRDRVVTVKAWDQMAVGTAIAAAARKFGLPADVRVLAVQEAGRDAFSVHRYFESLGVESVVVDPASIEVPRRARRAKTDRLDAGRLLRLLMRWAGGEKQALTVLHVPSPEVEDRRRLLRERDTLVAARTRETNRAKSLLATVGLKVSKLPAKWPELLPAFRTWDNAPLPRNLLRELERLAARWRLLNEQLAAVNAELKATRSSVAQRLEGLKGIGPVAAETLDREFLWRDFHNRREVGGASGMTGTPFNSGDSQRDQGISKAGNARIRHVMIEATWLWVRYQPDSEVTLWWRKYCGGGPGHLRRKGIVGAARRLLIALWRYAAFGELPAGARLSAA

SEQ ID NO: 452783 - protein, 365 aa, unidentified
MSKNLIYVGVDVDDNSFHFTAYFPKTGEVLESKSRPTAKGLISKMEGIKKKFSDHSLKICYEASYLGHSLQRELVAPSSIPRVHGNNVKTDRVDAGKLAQFYAAGILTEVAAPGLEIEMARDLMRTRQYILLQLNELRRHIHSLLRRNGIHYKSDSPSATHWASHHKCWLERTIESLDGPLKINLKLLYQQMKWLEHTKFEYDKATDELAESDQYKTQAQAQALTCYHGVKNVFAMVMITEIGTIKRFAHPNQLASWMGLDIREYSSGGKHNRFGITKSGNRYLRTAFIEANQKLPHANMIGKELRTRRKKADPKFIHIAERCRERIAKKGRRLYHAGKHPNKIKVACAREMVGFVWESLNAVSA

SEQ ID NO: 452784 - protein, 370 aa, unidentified
MLYLAMDQHSKQITVCVRNADGDTVLSRQVSTRPEKLKAFLQELTEMDREFMAILEVCGFNDWLIEELRRWNCREIVLIHPEKPSKRKTDRRDARKLADLLWLNRERLAANERVHGLRRVYMVTQRECENRHLTALRKTLGQRRTRTLNKIHRIINCHNLIWDYPTKTFQTQAGRRWLDTIELPEFDRLEMDMLLKEWTTWNEQIAQVDEKIVERANHREPGEFVSAAQILMSAPGVSHYSALALSSRIGPIDRFPRPRSLANYFGLTPGCRNTGKATHRLGSITKEGSTIARFILGQLVLHFLKQDPRMRSWYRRIKKRRGSKIARVAVMRRITTVFWHMLTYQEAYSIGGPPPRLRQLNPPATRSDAA

SEQ ID NO: 452785 - protein, 443 aa, unidentified
MADVNKTIKHWRFQMNYTQNEKIEQVTDSTMVVGVDIGSQIHYARAFDNRGRELTKRIFSFHNDLEGFNSFNLWAETLKTENKKTAVLIGCEPTGHYWFAFAKYVNDHQKRLVMVNPFSVKKIKELDDNSPKKTDSKDPKTIAKLVVDGRYSIPYMPEGIYAEIRDLVYSRDRIMKQHNISANRVQRWLAIHFPEYLGLYTRFDAISGLAVLEKAPLPKDVIALGVNGIRKIWHDKKMRGRGVTEDRAKTLVEAAHNSVGLDGGIGTKSELYMLLEEHRLWTSQLEAVNKVLEEMILKVPHVEKLLAIKGVGSITIAGFIAEVGDIRRFDSPKQIQKYAGLELVENSSGKHKGRTRISKRGRRKLRKILYQVMVPLLARNKEFRGIYDYYVTRVKNPLKRRQAMVAVSCKLIRVFYAVLTKGVEYDRFKMMSDIHRKSDIIAA

SEQ ID NO: 452786 - protein, 395 aa, unidentified
MSQFEHSRLAQFRQLRKEIRGSQEYLIVGIDAAKERHHAFFGTATGKTLFKRLVFDNSREGFEKLLFQTKVLQAQDLLPKVVFGLEPAANYHKPLGEYLIRHGQQVVLVSGVAAKRNRELLDNRWDKHDTKDASNVADLISQGKCLYYEHPDPRIRDLRLLLSWKKRGKRQEQGLRVCIRNGLLAQYCPELDRTFRRLIPSGKERDLLSALRELSSPIGCEVHPAVAFVAQVLIKELQQIREVLRAVQGKIQALCSRLPEYPYLLSIPGFGPEVSSQVLGAIGDPFRFQNGKQVLKMAGLDLSAERSGKRSDLATPVLSKKGKADLRYALYQAALIASTRNREFMAYYTRKLRGRAQEKGIRTKMRVKLAAKLLIIAWTLMKRKEPFNPGRLAIA

SEQ ID NO: 452787 - protein, 353 aa, unidentified
MDTIARIGVDLAKNVIQIHAVDAADRVVTRRAIARNRLLSWFANLNPCLVAMEACSAAHYWARKLRALGHEVRLIPPQFVAPYRKGGARVKNDARDAEAICEAAGRPNMRFVPVKSPTQQSVLVLHRMRTGYVEERTALINRLRGLLAEFGLFFPQRINQLHKYFVDSVEDASNELAGPAREALMRAWEKWHALDEEIAWFDRKIAEHANQDIEAKRCMEMCGIGPLTASATVATLVDAHQFRNGRQLAAWIGIVPKQNSSGGRQRLGRITKQGNDYLRTLLVLGARSAIAAAARRDDRLSRWILQLQARIGYQKTLVAIANKHARILWAILVKGEKFDPSHAPARPRPTAGA

SEQ ID NO: 452788 - protein, 402 aa, unidentified
MNAVGIDVSKGKSMVAIMRPFGEIVSTPFEIKHTSSDINSLVKLIKSIEGESRIVMEHTGRYYEVLAHQLSEANLFVSAINPKLIKDFDNDSLRKVKTDKADSVKIARYALDKWQNLKQYSVMDELRNQLKTMNRQFGFYMKHKTAMKNNLIGILDQTYPGVNTYFDSPARSDGSQKWVDFASTYWHVDCVRKVSLNAFIDHYQNWCKRKKYNFSKSKAEEIYGKAKELVPVLPKDDITKLIIKQAVDQLNSASITVESLRTLMNETASKLPEYPVVMAMKGVGTSLGPQLMAEIGDVSRFTHKGAITAFAGVDPGVNESGSYEQKSVPTSKRGSSDLRKTLFQVMDVLIKTHPQDDPVYQFLDKKRAQKKPYYVYMTAGANKFLRIYYGRVKEYLASLPES

SEQ ID NO: 452789 - protein, 402 aa, unidentified
MTYDYVIGMDVCKYFHHACVLDIDGTQVLSKRINQNEKSLRALFSTFSAHDHKVLVVVDQPNNIGRLTVAVAQDLGIDMRYLPGLAMRQLSRIHAGNAKTDIRDAYIIAHAAKNLPESLRSVDRVEEAFLQLKVLNGIDEDLARSYTRLINQIRSALVGCYPQFEQALRGQIIHRKWVLHLLARYGGPTKIKRLGKAKAAAFARRYKARNPEPVLDAIFAAISEQTVAIAGAHYAEMGVAMSAKDALLKLEHRKQIEQEVIELINDIPHTQILLSMPGIGPKTAAQILMTAGDMSDFPSVGHLASYAGLSPRTNQSGTSIMSNSLNRAGNKKLKNALWQSSFASIRFHERSRQFYERKRREGKRHNAAVVALARRRLNVLYAMMRNHEHYHDPTPSQEDLAA

SEQ ID NO: 452790 - protein, 438 aa, unidentified
MSNKVIFNLDELFISVGIDVGADFSWMSIALPNQQFVGKPYKILHNSMHSLTTAVSKIKEAEELYSLESHIFLESTGIYHYPLFCYLRDKGFNCSVINPIITKNSTNLNIRKVHNDRFDSKKAALVGLKPDLKVSLMPSDLALNCRNLCREYYDLMDNRSAYVNKLLGELRMAFPQYLGIFSKVTINTSLTLLETYTSPSAFLEADKQEIIDVIKSTARFGLTYAENKYHAIIQAANDANEFGYIIDSNIIRIRLYIGFIRKYDEEIAGIIEALHELVDSNQDTDFVKQIHLIGTFKGAGFLSAVSLMGEIGDFSAFSKPKQLFAYFGLDPAVKQSGKFEGTKVQMSKRGSAIARRVIHTLTLQSISTSRNGEPKNPVLRDYYLKKCESKPKLVAMGAVSHKVCNMIFAILRDNKPFEIITPQEHIKQYNAAKCDIAA

SEQ ID NO: 452791 - protein, 313 aa, unidentified
MPVALSNPIVGVDVAKNELVIYQADSDLLEAIPNTKTSIKQWLKALLGPVSIAIEATNIYHLEFADLAYAAGCTIYMVGGYELKHYREGVKIRAKTDALDAKLLARYLKNEAEELHPWTPPSPLYRQLLSLFRRRAALVQARVGLVQSWSNEPLLKAAFAEQIKSMQRLETMIEKTINDQLKQAGLLGQLKRCLKVEGIGFLTGARLLTAFQRGEFSNADAFIAFLGMDLRVSKSGQKDGRRSLTKRGDPEARRLLHNAAMSASRTIAWKGFYEAQRARGFSTTQALVMLARKLARVVFALLKGQSEYQTKVS

SEQ ID NO: 452792 - protein, 395 aa, unidentified
MTIAVYDHAPKPPASLDHATTITAVVELSKRTWLVGGHVPGLERRPLKRTEDRAAGLLRILTTWRKRAEQAGRTIARIVVAFEAGRDGFWLARWLRRTGIEAYVIHPSSIPVPRGARVKTDRIDTGMLLRAFLAWLRGEPDACRMVAILTREEEDLRRPSRERAELVTERTRLTNRIRSLLTVHGLSEINPNTPATSRKLAQLRTAEGQPLPPNARAELERLFERLALVKKQIKAIEADYARHTAENKRVKGEHDLAAQARTLFQQLVTVTGVGAATAATLVAEVFMRSFADRRALARFVGLTGTPDESGSRRRDRGLMKAGSARVRHIMIQLAWRMLYHQPNATLVQWYRDRVAKANGAGRKTFIVALARKLLIALWRFVQSGEVPEGIRLATV

SEQ ID NO: 452793 - protein, 424 aa, unidentified
MSSDLEIAAFIGLDWADQQHVIRLRVAGSAPVESQLLDQKPETLRSWIGQLRQRFGGRPVAIALEQSRGSLLYALMNVDFLLLYPVNPQNLAQFRKAFYPSGAKDDPQDALLLLEMLEKHRDRLRVWVPDDADTRCLRLLAENRRKLVNRRTALTNQLTSLLKESFPQALDWAGPLDSLRACDFLQHWPSLQLLHQTSTSRLRKFYRDHTRLNSDAIHQRLDQIRQAQPLTRDSAVLAAAELMIPALVRQLRCLIESIQQFDQQLKDRFLQHDDYTLFHSFPGAGPALGPRLLSAFGSNRNRFECAAEVQMLSGIAPVTERSGKSHWVHWRLACPKFLRQSFHEFAAQSILFSTWARALYDQLRSRGTSHHAAVRTLAFKWIRILFRCWKNRTPYQEQIYLASLRRHGSPLCAALSPPTPGANL

SEQ ID NO: 452794 - protein, 316 aa, unidentified
MTGTPTYAGIDVAKDRLDVVLRPSGEYVEATNDERGIRSVVRRLRKGDVALAVLEATGGLEQPAAAALALAGVPVAVVNPRQVRDFAKATGKLGKTDRLDAAVLAHFAEAVRPEPRPLADEHTRELSAVVLRRRQILAMTTAEANRARTAPKAVSKRIEAHLRWLRKELARVDGELKRVVEESLVWKERAALLMSVPGVGPTLSATLLAELPELEHLDRRRLAALVGVAPLNRDSGTLRGIRTVWGGRSGVRMALYLAALCATRHNPASRELYGCLVASGKPKKVALTTCMRKLLTILAAILRNRTPWQPRLLPAS

SEQ ID NO: 452795 - protein, 371 aa, unidentified
MLLRCCSILSAPYMEERVMALNHRWCVGVDLHKDTLTACVFCGCCGEVSFQKIACRCRRQIAEYFAALPRPHAVAIESVGFYRWLWEMLEPIVEELVLADATQARALAGRRLKTDREDSLNIAELLAAGRLPRSYAPPMEVQWLRDLTRHRNSFSRQHARILHRVKSIMNANNRPGPARMQSDGLIRYLKAQGEKLPARHVEMLWQCVDALTLTERQIAHTERTIGQVVRRESFREVYGILTSFPGVALVTAATVMAEVGDFKRFPDTKAIGRYAGLNPRVYASGGKQRMGHIAKTGSPDLRWVLQQAAWTAIRYDEHVKRIFLRIAKRAGRKAAAVAVARKLLTWMHIAAKKGEPYRTPGARHTVLPGAA

SEQ ID NO: 452796 - protein, 368 aa, unidentified
MNEYKLKAAPTAVSKEQNSQKNPKANRILIGVDAHLKSYEAARKIDNGAVGVAQSFRSKEAFLLYVEKQREQAEEVVVLYEAGPLGYTLYRELKASDIECLVCAPRSGEQKRKRRKNNSIDARTLSSDLFNYLNGNEQALQAVRVPSEAQEQARVESRQHDALVEERKRIGAMGNSLLLSQGYGSWSNWWRPKAFERLSKGVAPWIVKHLGRWVGILRELDQQIQQAKAELTQHYQGPRPKGMGAPSLAQLNAEVLDWTLYSSRRKIGCLAGMVPSEWSTGEAQRLGAITKVGVPAIRRIITEMVWRMILFQPEYKPVQKWREVLEGPNRGLKKKAVVAIGRQLIVDIWRLQTGRISAQELNLIMVEG

SEQ ID NO: 452797 - protein, 331 aa, unidentified
MDEARRYVGIDVAKATLDVFIRPTGAVFSVTNEELGIQQLCRELEPADFVILEATGGLEVPVASALATAGIAVAIVNPRQVRDFARATGRLAKTDRLDAEVLARFGELVKPAVRPLADEPAQALEALITRRRQLVEMLTAEKNRRSRAPKVLYRSIDEHIRWLEKRLSGLDEELGTMIRGTPLWRERDELLRSVPGVGNVLSSTLLAHLPELGALNRKQIAALAGLAPFNRDSGSLRGSRCIWGGRAQVRRVLYMATVAGIRSNPAIRTFYLRLRAGGKHAKPALTACMRKFLVILNAMLRNKTHWQTPALDSSNILLSPLLSAVPEHGCC

SEQ ID NO: 452798 - protein, 418 aa, unidentified
MREEVSTVELLVPRCAGLDVAKDEVVACVRVPDGQGGRRQEVRTFPTFTSGLEALADWLAAEGVTQVVMEATGQYWKPVWYVLEEAGFQLLLVNARHVKILPGRKTDVCDAAWLAELLEHGLLRGSFVPPAAIRQLRDLTRYRKRLIQTHSAECQRIQKALEDAGIKLDSVAADVLGVSGRAMLAALVAGERDPEVLAELARGRLRTKLPQLRQALRGRFSDHHALLVGLSLAHLEHLEGAIATLDTEVDQVISPFARARDQLDTITGVGKRAAETIIAEIGVDMAVFPTAGHLASWAGRCPGNNRTGGKRRSGRPTKGNRWLGEVLTECAWAAARSRDTYLAAQYWRLARRIGKKKAAMAVGHSILVIAWHLLANDCDYQDLGGDFFVRRDADRARQRAVAQLQALGYRVTLEPLAA

SEQ ID NO: 452799 - protein, 472 aa, unidentified
MPHVGGQLQAQFMARIRGRDLQRCLVVPVDVGKSTAMALVADHYGEVVVEPFEFPLTEPGFAVLASAIARSEAARSAEVVRVGVESAGHYHRTLVARLRSGGYEVVELNPAAVKESRAQQLLARLKSDARDLGAMAELMVRGAGRQPALRTDALATQAAWVAHRRRKVTARVALANQVIGELDLVFPGLDDCFKDVLRAKAGRIIVSNISDPDRVRRQGVEGLRRFVARRGVALSTPKATEVVEAARVALCLPAAERAAMGRVLSADLALLAALEGEIVAAEGALAEVLGDTPAGVLQSLPGIAVVRASNYGAGIGDPTRFPNAGAAYRAAGLVPALYESAGRTRGRQHISREGSVDLRQAIVELGRGLSQHDPDFKAYRRRLLNADKPPSVAAVAVGHRAHRLAFAMLRDQSPYDAAKWAKSVAAGKTAMAKTQRARQNDVTCPPPATSLAQGGEAYKNNNKNAAGRRARG

SEQ ID NO: 452800 - protein, 341 aa, unidentified
MKNKSFIGIDISKNVIDASIFCEGAPIKDFPHAVFNNSRKGFGEMCTWLKKNHVVLSNCLFGMEFTGSYSMKLEKFLNAKKYQFCMLSTHVVKHYPMGPKDKSDKIDSAKIADFLYRYNGTECVKPYKMPDKTMQRLKTLMNERKFLVEQRTCFMNRRQLCTTKEDAQLYDGYIKKFSRDIENIELEEQKLLATDDSLFTTYKNLLTIPGIGFVNAMNVIVITRNFTAFDTARQYASYIGVAPHFHTSGTSVKWRPRPSARCDGQAKADLSMAALIAVQYDAELQSFYNRKLGGKQDSDTKRKALNAVKFKLVLRMFAIGKQNREWEPLDSKSSNEKLAIS

SEQ ID NO: 452801 - protein, 360 aa, unidentified
MAKAKTLVGLDVHATKVVAAVLDAESGQLQTFGMSGDIDGAAGFCAGLPRPVRVAYEAGPTGYGLARELAKRGVECVVAAPSKIPRASGDRVKTDRRDAEHLVRLLLAGKLHAVRVPGDEEEALRDLVRARDAVRMDLMRARHRLSKLLLRHGIRFDDGQAWTQRHRDWLATITLDWPAAHTTMLDARGAIDALWDRRDGLEREIVALLPTCPWAVQVRRLRCLRGVDTLTAVGLCSEIGDFERFARAEQLSSYVGLVPCESTTGQQRRLGTITKTGSGHPRRLLIESAWHYRARPSIGRALTDRQADQPPEAIAISWSAQRRLHRTWTRLEARAKRRTIIAVAAARELAGFCWAITQIK

SEQ ID NO: 452802 - protein, 345 aa, unidentified
MEQISRIGMDTSKHFFQLHGVNATEKVVLRKKLRRKEMVAFFKTLAPTIIGIEACGASHHWARLLQSFGHRVKLIAPQLAKPYVKRGKNDAADAEALCEAMNRPTMRFVPVKTAEQQAALMIVGLRDRLIRNRTQLSNAIRGYAAEFGLTAAKGMAHLDPLLERIQTDESVPDLARELFAAQAAEYAQLQAQIDDVDAKLMAWHKADECSRRLAKVPGIGPIGAVLLTMKTPAPQLFKSGRQFAAWIGLTPKDHSTAGKVRLGVITRAGDEGLRSVLVVGATAVIQHVRRGGRGSPWIVDLLKRKPPKLAAVALANKMARIAWKLMVTGENYAAKSAPAALASVS

SEQ ID NO: 452803 - protein, 366 aa, unidentified
MGKISTMALDRIEIFKDQKLTIGLDLGDRFSHYCILNEAGEVILESKLPTTPKGIEEVFSRIARSRIALETGTHSPWVSRQLTQLGHEAIVAHARNVRLIGDSSRKDDQLDARTLARLARIDPALLGPVRHRSAKAQIHLTVIRARAALVGARTALVNAVRGLTKSYGERLRSCGSEQMNREIAKGLSQELRDVLEPLLAEIESLTERIAEYDRRVEQIAKEIYPQVAVLRQVKGVGPLIALTFVLTLDDPHRFRRSRDVGCFVGLRPGRRNSGMSEPQLHISKEGDRYLRTLLVQGAHYILGPFGQDSDLRRWGLTLAERGGKNAKKRAVVAVARKLAVLLHKLWVSGEVYEPLRNNRKAMSAVA

SEQ ID NO: 452804 - protein, 334 aa, unidentified
MENIALIGIDLGKNSFHIHCQDRRGKAVYRKKFTRSKLIEFLATCPATTIAMEACGGSHFMARKLEELGHFPKLISPQFVRPFVKSNKNDFVDAEAICEAASRPSMRFVQPRTESQQAMRALHRVRESLVQDKVKTTNQMHAFLLEFGISVPRGSAVISRLSTILQDNNLPLYLSQLLLKLQQHYHYLVEQIKELESQLKRKLDEDEVGQRLLSIPCVGTLTASTISTEIGDGKQYASSRDFAAATGLVPRQYSTGGRTTLLGISKRGNKKIRTLLVQCARVFIQKLEHQSGRLADWVRELLCRKSNFVVTCALANKLARIAWALTTRQQTYEA

SEQ ID NO: 452805 - protein, 347 aa, unidentified
MRFYNHQHQYYCGIDLHVKTMYVCILDGAGQVLVHRNVPSTPAAFLEAVAPYRTELVVAVECMFTWYWLADLCAAEHITFVLGHALAMKAIHGGKAKNDKIDSHKIAVLLRGGMLPQAYVYPAAMRSTRDLLRRRLHLVRKRGALLAHIQNTRAQYNLPAFEKRLAYPGNREGVVEHFPDPSVRKSVEVDVALIDQYDALVIDLELTIVREAKRHDGDAFHRLRSVPGIGKVLALTILYEIHDITRFDRVQEFASYARLIKCTHESAGKKLGTGGAKMGNVHLKWAFSEAAVLFLRHTTEGKRLRTRLEKKHGKGKALSILAHKIGRAVYYMLARGTVFSMEKFLAA

SEQ ID NO: 452806 - protein, 343 aa, unidentified
MPIVGGLDIHRKQITFDYLDTVTGEVRRGQVRPDDRLHLRGWLARFAGRDDVAFAVEGCAGWWYVAEELAAAGIAAHLAEPADTAARRGRKRHAKTDKTDARHLRVLLAEGRLPECWIPPGRILECRALLELYNDLRRERTAWAQRIHVVLFHQGAPALGEGALRTGQGVAGLRDAAADCLSVVGQLQVATALEMIDALEARLHVVRHQLTDAARHLAGAKVLAARLYGVGPVTALAITCWLAGAGRFSSSRQAVRFAGLDITVSSSDRKGPPGRLSRQGPPVLRWALYEAGKTHTRTSAPDHGYYAQFCAGCPPDAAPSLCWRTCIGLTGKRWPCWSTWPTM

SEQ ID NO: 452807 - protein, 370 aa, unidentified
MLSSSPTERVVIAVDPHKASWTAAVIDTALQPLDVLRVDVGADGYRRLRRFARQWTQPVWAIEGAAGLGAPLTRQLADDGVEVIDVPAKLAARVRLLSTGHGRKTDEADAISVGIAALTSTRLNTATVDASIIAMRALVEHRDDLVKTRTQTVNRLHVLLTHLTPAGAPRGLTAERAADILRQIRPREPATKTLRSLAADLVAEIRALDRRIAKAAADIEAAVESSGTTLTELSGIGTLNAAKIVARVGAISRFRSADAFATYTGTAPIAASSGDVTRHRLSRAGDRQLNCCLHTMAISQIARDTPGRDYYRRKRAAGKSHREALRCLKRRLSDAVYRQLLRDAARHEAGPGGHSGAALTSSAASSNPAH

SEQ ID NO: 452808 - protein, 317 aa, unidentified
MMNTESHIEINVGVDVGKSKLDIVLHPLDLHFSIPNDDEHIQKIVQVLKTHQVKRIVTEATGRYEHAFVFACDKADLPVVVVNPTNIRRYAQAIGVLAKTDKIDATVIAQFAATIQPDIKPIPDRQSRIIKDLLIRPTQLLEMQTMEKNRLQIMPKELHSSIKALLKSLQTQIEKLTLKLDQLVAEVKHWRIKTEILTSVPGVGKVLAYTLLSELPELGKLNRKEIAALVGVAPMNRDSGSYNGKRRIRGGRHRIRTVMFMAMLSSIQCNPVFKRHYEHLKAVGKLPKVALIACMRKLIVILNTMLKNEERWNEKSA

SEQ ID NO: 452809 - protein, 339 aa, unidentified
MLYVDIDVAKNKHDVTALNVPGKTVLKPLTFSNNKAGFELLDLSLRQINQDCLIALEDTGHYAFNLLNFLHEQGYKVYTYNPLLIKEFAKSLSLRKTKTDKKDAHGIALKLLSDPNREQFQHDNRQVELKILARHIHRLKKKQSDWKVQYTRCLDIIFPELDKIVGKHSEYTYQLLTRYPNPQKRIEAGFDKLIEIKRLTASKIQDILSVAPRSIGTTSPAREFEIIKHYKRLIDKAETCVNDLMAEFNSVITTVTGIGNRLGAVILAEIRNIHAFDNPAQLQAFAGLDSSIYQSGQIDLAGRMIKRGSPHLRWALIQAAKACARFSPAFKAYLKTKLE

SEQ ID NO: 452810 - protein, 344 aa, unidentified
MQITTIGLDLAKSVFQVHGIDAAGQVVVRKSVRRAQMLAFFSKLPPCLVGIEACGTSHYWARELIRLGHEVRLMPPAYVKPYVKRGKTDAADAEAVCEAVTRPTMRFVPVKSPEQQAALSMHRARDLLVKQRTQLINMLRGLLAEFGVDIPKGLERALLMARQVIEGNAPEVPIEAARIVTTLSQQALDIHVRLRQIDRDLAIWLRGNDVARRLMTIPGIGTVGATALVASVTDPLQFRSGRQFAAWLGLTPLQKSSGGKERLGRISKMGDKYLRKLLILGMTSLVRRAKYTPKTVDPRLADLLARKPVRVATVAMANKTARIVWAVMARGETYRAGHRPALAT

SEQ ID NO: 452811 - protein, 328 aa, unidentified
MGSTPSWAVAVGIDMAKGSFVTAVGNEESFELANESAGHDALRQRLQGREVGLIVLEATGGYERPLVAVLQMAGFKVAVVNPRQVRAFAKGMGYLAKTDRIDARMLQQLGEVLLHREDLDHWVKPAASSERERLRALVTRRRQLLAMQVAEQNHLELCHADLRKSVKAMLKSIGTQLRHVDEDLQRDVKAHYADLAQLLSSVKGVGEQTVSTLIAEVSELGKLNRRQIAALVGLAPMNRDSGTLRGKRMIAGGRASVRHALYMPTLVATQHNAVIKRFYDRLVALGKPKKVAIVACMRKLLTILNAMVRSNRPWDASLHERPDPVHAA

SEQ ID NO: 452812 - protein, 341 aa, unidentified
MERLYYIGLDIHKKTISYCVKRVDGKIIQQGKLAADRKTLLHWMEGLPGPWLGAMEATLFTGWVYDFLKPYAVDLKVAHPEMLKAITAAKKKNDRADAEKIADLLRVNLLPECYMLSEELWELRRILRYRNMIVRTAVKMKNKMSGLLMEVGATYSKEKLHSRKYFNNLLERIEDVPDSVKNMLKLSRSSLEMFDAVQKKLVRTLREDKLIHERVHRLTSIKGVGEVMALTWVLETGDSSRFHSARQAISYCGLCSAQRESAGKEQRGPISKKRNKHLQTMLIEAAKLAPRWNPQLAAIHEKELKNGHRNLATLAVARKLVEYMLAVERQQKDFVPSGLAA

SEQ ID NO: 452813 - protein, 350 aa, unidentified
MPQRNVPRPAAVYGIDIGKNIFHVVGLGNDGAPVQKVRFRRDTLLQFFERAAPAIVGMESCAGSQWIARKIQALGHKVRLIPAQFVKPYVKSNKTDIIDAEAIAEAATRPTMRFAALKSEEQADLQALHRVRDQMIGTRTRLINQMRAFCLEYGIALRQGAGLFKVDLPQVLEDQSNDLSSAMRKLLADLFADLRQLEQRIGDITKEIEAIAAREDVARRLMTIPGIGALGATALLAAIGNGRQFQKARDLAAWLGLVPREYSTGGKQKLLGISKRGNRYVRKLLVHGARSCFRHLDRTRDRLGSWLDGLQARMHPNKAVIALAAKIARIVWVILTKPGALYERRDPAFA

SEQ ID NO: 452814 - protein, 304 aa, unidentified
MPNQYKHIGVDLAKSSFVADLPKGVTSFAQSPAGLLRFLSQLPARAWVVCEATGGYERALARACHQAGVRVSVVNPRRVRQFARSQGILAKTDRIDARLLSLFARKTEKLRASRAPVHAEAVLRELLQAREALVEALKHETNQAEHATGLPLLEGLAAARRALLEKHIKQIDAEMERVIGSDQGLAARAQRCAQVQGVGPVTTAAVLALMPELGSLEKGQAAALLGVAPIAAQSGTCDKSRHIEGRPPPPAQNRLHGRTERRPPQPRSLRLLPAPPRTRQTRQSRPLRPHAQTHRIAQSSPQIS

SEQ ID NO: 452815 - protein, 380 aa, unidentified
MEVTTMKHYNTVYVGMDVHKENFSLCCYTFENDTTAHAQTISADYRLVLKYLDSMRRVYGENAEFICGYEAGCLGYTLYRELTAHNVICKILAPSTIPTVQGKKHIKTDKRDAANIAKCLANRSYNAVHVPTKDDEQVKEFIRMRDDHKQALKRTKQQILAFCLRQGIHYTGGDNWTQKHLQWLHSLKLGDIYQEILTEYLLTYDKLDETLKRLDRRIEELAEGDRYREPVHKLKCFIGIETHTALSLVAEISDFNRFSSAEKFASFLGLVPGERSSSDSQHRLGITKAGNSHLRRLLTESAHCFGRGKIGYKSEKLKKRQQGNSPEIIRYADKANERLRRKFYKMTFAGKKHNVASTAIARELACFVWGMMTDHISVVS

SEQ ID NO: 452816 - protein, 356 aa, unidentified
MGKDTTAVGGLTIGLDLGDKHTVGCVLTGSGEVEETFRVATTMSALGRTMAGFESSRVVLEVGTHSPWVSRLVEQAGHEVIIANPRRVRLIAENDSKTDEVDAELLARLGRVDPGLLKPIVHRGKRAQHDRILLLARDGLVRSRTQLVNQVRGFAKSLGHRMPSSSTGAFPRRVREQFGKELFPGQSVMLEMIDRLTQEIRRMDREAEKLCNDRYPETGVLRQVKGVGALTALGFVLTLEDPSRFAKSRTVGAYLGLRPRSRKSGEQQPQLRITKAGDELLRRYLVGAAHYILGPFGPDTELRRFGLKLAERGGKAAKKRAAVAVARKLSVLLHRLWVTGEEYQAIGYGQPTQEAA

SEQ ID NO: 452817 - protein, 408 aa, unidentified
MKDSGKRYIGLDVHKHYLIALGVDEDLNVVLPARRVELSHLESWMKKTLTKQDDVVLEMTTNTWQLYDELCAHAGSVLVVHPPHVALITRSQVMNDKIAASILARLLAKGLLVGIWVPPQEIRELRGLVAQRKKMTGLVTQAKNRLHAVLQRHHLAPPEGNPFQEAQSAWWLALPLGKLEKVNIQSDLETLRFAESQRGQLTLMMEEIASQEEQLTRLLQLPGFGVVSAVTVWAAIGNIQRFTDAQHLVGYAGLGTKVHDSGMTTRTGRITKAGRRDLRMALIEAAQVAANSHPHWKAELARLQPRLGRNKAIVAIARKLLVAVWYILAQHKTDRFAEPDRVAQKLLKFAYQLGKENRPAGQSAAQFVRQRLDVLQLGSELTTIAWGSKKPIPLPPSTNKVSDVPNTK

SEQ ID NO: 452818 - protein, 344 aa, unidentified
MPTSTPSPTRYHLFVGVDIAAHTCTTVWMAPAATPCRPVTLDQTPRGFAALQARLLAVDHAAADILVVMEATGSYWVALATTLAHAGFAVAVINPDQAHNFAKALLQRAKTDAIDARTLARLAATLHPAPWTPPPAIYTELQQRLAERDTLIGLRQQVRNQRHALVQLPVVVPAVRARMEELIATFDAQITAIEREITQVLPQDARWAASAALLMSIAGVGLLTAAWLLVTTLNVTIGATPAAVTAYAGLAPVPKESGTSVRGRGAIGHGGNKRLRTALYRATLSATRDNPLIKAFYDRLRAAGKPTKVARCAAARKLLHLAWAVVRKGQVFDPLYRQRHQSTA

SEQ ID NO: 452819 - protein, 355 aa, unidentified
MNSSKYIAMDVHKDSISLAVRNAAGKIVMESLIETKASMILQFIDGLRGDLHVTFEEGTSAAWLYDLLKPHVTRVVVCDPRKNKSMREGNQSDKIDARRLAELLRLNHLTPVYHGEHGLRTLKELVRTYLTVTKDLARVMTRLKAIYRSWAIPCSGKQVYARCHRAEWLGKITEPGVRRRAEFYYLQLDALRVLRQDARRDLLAESKKHKAWKRLCEIPAIGPIRAAVLLGILQTPHRFRNKRTLWNYGGLAIEMHSSADYRSVDGELQRSRKNVLVRGLNRNCNHDLKNLFKGAAAVASSKPGPFEEFYAALVAKGMKPEMARLTLARKIATIVLIVWKKGVCFDAQYLKPQTA

SEQ ID NO: 452820 - protein, 355 aa, unidentified
MSILAERLDYVIGVDTHLHSHTAAVLTATGGLVASARIDAEEAGYVHLVQLVGRKAPGRRVWAVEGTRSYGAGLTGHLLRLGEVVGEVDRPRRPARKHGKSDEIDAVRAAREALSMGELASPRSSGRREALRIAATTRQEVMGERTRAMNQLRDLVVSSPEHIAARFRDRSGRSHSLERLTKRCLALRVTATHDVEDRIRLDTMERVANRIVQLEREAAHYESEMTELIRQLAPGLLELPGLGPATAAMVITTYSHRGRFRSEAAFASMAGVAPIPASSGQQQRHRLNRGGDRRLNQALDLIVKNRIRYDPETIAYMKRNKGGQRTDRDLRRILKRYLARSLFRFLERTPPLDKG

SEQ ID NO: 452821 - protein, 351 aa, unidentified
MNIIGCDLHTRYQVIALLDTETGEILTRRLEHENGEARAFYARLPRGARVGIEATFPARWFERWLAECGHELWVGDAAHIRASVVRQQKTDTRDAEHLLDLLRTGRFPRIWVPSVEERDLRQLLVHRTKLVRTRTAVKNQLHALAMSQGVCRKRQLWSARGRAELDRLPLLPWASRRRQELLAWLDQLNASVSDLDQAVEEAAQARPAVALLRTHPGVGAVVGLAFVLTLGPVERFPNGRKLVSYLGLNPREHSSGGHQRLGAISKQGNSMLRWLLVEAAQTAARLDPELRRTYYRLKFRRARGVAKVAIARRLAVRLYWMLRQQIDYAQLVRMSGSPSSGVVPLRAGSGN

SEQ ID NO: 452822 - protein, 348 aa, unidentified
MHIAVLGIDLGKNSCSVAGLDASGRVVLRRRLHRDSVVKLASRLPACVIAMEACCGAHHLGRLLQAYGHVIRLMSPEYVQPYVKAQKNDERDAEAIAEAATRPTMRFVDVKSEDQLDMQTLHRARSRLVGQRTALINQLRAMLLERGIAVAQGRHRLARYLAQALDDGNAEPVPLSLRIRLLIEDMRAQWSELDRRIASFDAEFVAATRSDEAARRLSTIPGIGALNATALVAAVGDARSFARARDLAAWLGLVPRQATTGGRPRLLGITKRGNKYLRTLLIHGARAALPSLATTEGALGNWLRGLSARAHRNTVIVALANKLARIAWAVLRSTAIYSARISDRPTAV

SEQ ID NO: 452823 - protein, 340 aa, unidentified
MDQASIIGIDLAKHSFQVHGAGADGSVAFRKKLSRGKVLDFLASQPPCVVAMEACGSAHHWGREAEKLGHEVKLVPPVYVKPFVKRQKNDMADAEATTDAAQHPTMSFVAVKTEEQQARGMLFRTRDLLVRQRTQTINALRGHLAEFGVIAPQGPAHVSRLASALEDPCSGLPEQVRELGGLLLEQIAGLDEKIGGLERDVHTGARQDEEAARLMTIPGIGPITAMALQAFAPPMESFRRGRDFAAWLGLVPRQHTTGGKPRLGKISKMGQRDLRRLLITGAMSVVQNAARRGETTDPWLASMLARKLRMLVAVALANRMARITWALTTKKENYRAPGIA

SEQ ID NO: 452824 - protein, 354 aa, unidentified
MTGSYDYHIGVDYHKSYSHLVVQDSSGKTLRSGRVTNDRQSLGGFLEHYRENSHAVIEATRNWMVMYDWLDDICDDVVLAHPLKVKAIADAKIKTDKIDATVLAHLLRADLVPEAWAPSEKSRELRVALRERMFYVRLRTMTKNRIVTVFDRYPEQTAQLKKLGDLFGKAGRIQLAEVNVSDIDRIQIDRGLAFIGDINERIKQSETTIRAMTKANANVKLLKTIPGIGEFFARLIDAEIDDIHRFRNAKKFAAYAGLVPSTYSSGGKTYHGKIIKQGNKWLRWAFVEAVAPAIASDAQLRAQYEQLKIRGTNKARVAIARKLLTIAFQILRDQRAYEPRGTTTEGASTISRLS

SEQ ID NO: 452825 - protein, 350 aa, unidentified
MDRYIGLDAHASSCTVATVGPSGRRLHSQVVETNAGALIRVLRGIAGTRHLCLEEGTHASWLHEVLSPHVEELVVAAVRESRGPKSDKLDAFGLAEQLRIGAVKRRVYKQRGEFGALRHRAKAYTLLVSDSVRVQNRIKSLFRSRGVAVAGKGVFSTAEREVWLKKLPAPARSLAELLMQEQDGLLELRGKAEEAMLAEARKHRAWRLVKSCPGLGEIRTAQLLPIVVTPYRFKNKRAFWAYCGLGIVMRSSSDWVRTQSGEWVKAPIQQTRGLNRNSNRTLKGIFKGAATTVIGQAKDEPLYRHYLQLLDGGTKPNLAKLTLARQVASIMLAVWRSEEVYDPARVGQAV

SEQ ID NO: 452826 - protein, 412 aa, unidentified
MMEVLYERCCALDVHKKTVIVCVATRDGKQTRTFATMTSDLLELADYLVSKGCTHVAMESTGVYWKPIYNILDGLGMELLVVNARDIKAVPGRKTDVKDAEWICDLLRHGLLRGSFIPDRSQRELRELVRYRKGLVQERSREVNRIQKVLEGANIKLGDVATNVMGKSGQAILEALVQGNTDPESLAGLAKGKLRRKNEQLARALQGLIGPHQRMMLSTQLGHIRCLDGQIERLNREVEERMRPFEEAIEAIDAIPGVGRRIAEEVLAETGADMAQFPTAAHLASWVGVCPGNNESAGKRKSGRARKGNPHARQALVEAAQSAAHTKDTYLSSQYHRIAARRGNKRAIVAVAHTILTIMYHILTERTTYRELGPDHFDKLNQDAVARRAIKKLETLGYKVTIEPLSTLECSA

SEQ ID NO: 452827 - protein, 347 aa, unidentified
MEYFAGLDVSLETVNVCIVNAAGDILLEKKIAAEPAAIVHLLKSFGSPFKRIGLEAGPTSSWLYGELRAAGYGAICLECRHVKAGLSAMRNKTDRNDARGIAQLVRLGWFRQVHVKSEEAQRTRMLLVNRQQLLTKALDIENSVRGSLKVFGLRVGVVARRGFEARVLELVADDPILLAVTEPMLRVRQALFEEFERLDRLCQQLARRDPVCRRLMTVPGVGVVVALTYRTGVDAPERFSKSRDVGAHFGLTPKRYSSGQTDYDGRISRCGDEMVRTALYQAANVLLHHGRWSSLRSWAMRIAKRGSVKGAKVALARRLAVVMHRMWTDGTDFRWSDTSRMTAPTAA

SEQ ID NO: 452828 - protein, 540 aa, unidentified
MCGGCPPALLEFKHLMLSLFGITINLSGEKVSALGFEPVPEFLPPARFKSGNNVVHRHRMSTRLMIPGIFYFSFYRIGGFMNQYFLGIDASKGYSDFVMLNEKKQPVIENFQLDDTFEGHARLYELLRSFNQDHPEATIYAAVESTGGYENNWFQSLLKFQGSLPIKTAHLNPLGVNYNHKADLKRNVTDKISAQNVAEYMIAHPEKVSYQHQDSLASLRKQWGFITMLTKQSTQLLNQLESLVYNANPEILMYCKDGTPQWVLKLLTLYPTALRLSKAKVKSVARIPYVSKDRARQLVATAKKSVASASDNVTQQLIVATVKQVVDLKKTIKEQTKILTNECAVPEVELLKTFIGISDYSAIGLMLEIQSIQRFLLSKKLASFFGIHPAYKKSGDGTWKYRMSKKGRKEPRRILFMVAMSAIKSNPLIRSIYQQAVQRGMEKKAAVGLCMHKILRIIYGMLKHNKTFDPEIDRKNRQKKPLRQRRVRQDKNRRYQDFDSKAPISSRQKIKRKERKQSQNVSNVECGISEASVPITELAN

SEQ ID NO: 452829 - protein, 435 aa, unidentified
MITFCGLDVHKRVVEACLVDASGQVVHRQRFDLTLANLTTFARRHLGQKAKAALEATSNTWAIVRLLRPLVGEVVVSNPMQTRAIAQARVKTDKVDALVLAQLLRCDFLPQVWQPDEATERLRQQTRRRAALVGMQTAIKNRLHAVLAQRLLAAPAELFSKAGLDWLQAVELDEVGRQQRDSELRLLNYVAAEIAALDQILAEKAHACEPVKLLMTVPGVNVTVAQTVWAALGDIHRFRDGDHAAAYLGLVPRTRQSAERCYHGPITKAGSCQARWMLVQAAQQVGRHPGPLGHFFRRLAKKKNRNIAVVATARKLVVIAWHLLSKNEPYRYAQPLATEAKLQKLRVRATGQKRKSGPAPGTAASAKCQPGVTTRTVKPLAQVLHEEGLPPLAPVPPGEAKTIAAGDCAAYVASLETVQVRPRRPRKKTAPAPVS

SEQ ID NO: 452830 - protein, 400 aa, unidentified
MIRDFARGFDWRGYEFSKRAFRFSNTQVGFLTFIRWVEEMMKKTEKTKVIVGCEPTGCYWLTFQKFLTDRDILLVTVNPYSVKKCKELDDNSPEKSDLKDPKTIAGLVREGRYSTSYLPEGVYAEIREAQVCRDQIMKQHVRLSNQIQGWLQKYFPEYLECYKDFDTASGMMVLEHAPLPEDIIKLGAGGINEIWRNAKLRAAGIKRAKTLVEAAQESVGLSGGEAARLEIWFLINDYQTKTKQLERLDEFLSKEIMKVPHVEKLLAVKGVGLSTVIGFVADVGDIGRFTDPKQVQKLAGLEITKASSGKKKGQPCISKRGRRRLRRTMYESARSLISWNEAFSEVFMYYRYRTRNPLGGMQAKIAVACKAIRVFYTILKTGCEFDAEKLRRDIIRPEAA

SEQ ID NO: 452831 - protein, 317 aa, unidentified
MTAPSLCIGIDVAKGELVVAQWPDPAPWVVANDESGVRTLVDQLRALGPALVVLEATGGYERAAVAAVAAAGLPVVVANPRQVRDFARATGQLAKTDRIDAVLLALFAARVQPEPRPLPDAARQALDGLLTRRRQVLDMLTAERNRLAQALPPIRRDIAQHIRWLERRLHDVDQDLDRTIQASPVWRAQENLLRTMPGIGPVVSRTLLGALPELGTLSRKQIAALVGVAPLARDSGTRAGKRLVWGGRAPVRAALYMAALVATRRNPAIGRFYQRLLRAGKPKKLALVACMRKLLTILNAMMRTNTPWQPLAAPECP

SEQ ID NO: 452832 - protein, 407 aa, unidentified
MDLLKTVFGIDVSSRKSNVCIMVNGQKVNDYAISNDMVGFNRLLGDLKQVTKPQIIFEATGVYSRRLQAFLDMHELRYVMMNPLEARRKTKDDLHQNKTDKLDALYLAKLQSEHPQRLAYVQNKEYQELMANNRIYEQASHDLITNKNRLHKAVQLTFPEIEHLLANPRGKNYWSIALRFPHPDIVLETKEADIIDFLKGLSGIGKKRANDITQNLIRLAKVACPAVKKNSAHVRGLKMAINNILSAEEECQTALQEMAKLAPKRDLEILTSIPGIGENTALRIISELGDIRRFNNPSQLNAFVGVDPQVYESGNLTAHLSISKRGTAIGRKVLYLAINQIQSAKKAGNPCHIADYYEKRKRSSETASHKKAAIASIHKLLRTIFALIKNDQLYSYDVAKHNQRLLS

SEQ ID NO: 452833 - protein, 409 aa, unidentified
MRYYVGVDWADQTHAVWVVDESGTKITARTVPHTAAGFSEWGRELDEWRAQGIERWAAIERPDGRVVDFLLDHGVVVYPVNPKALDRARDRFRQSGAKSDPFDARVLADFLRTDHPHLQALQPSSDAAQELKLLTEDCQRHIRQQTRLVNQLTTTLKAYYPRALEVAELTTALAREFLHAYPTPAALTALTARQWQRWARGRRLSEARIGDLWAVLQQPQLPVPAHVVRAKARLMQSLVEQLTPVVVAVVQYRKAIDDFFARMPAAQWARTLPIGKRGITAPTLWARLGDAPGRWESFRHLQAQAGAVPVTKRSGKQRVVHFRFACDKSLRQVVDQVAFLSLLSSKWARAYYDQQRARGHAHHQALRALGAKWLKIIFVMWHRQVPYDEQYHLATMTRQQLRQRQKQIA

SEQ ID NO: 452834 - protein, 403 aa, unidentified
MNAVGIDVSKGKSMVTILRPFGEIVSSPFEIKHTSSDIHSLIKLIHSIEGESRVVMEHTGRYYEALAHQLSAADLFVSAVNPKLVKDFNNDSLRKIKSDKADSVKIARYALDKWQSLEPYSITDELRAQLKVMNRQFHFYVKQKTAMKNNLIGLIDQTYPNANTYFNSPTRSDGSQKWVDFVSTYWHVDCIRKMSLNAFVEHYQNWCKLKKYAFNKSKAEEIYTKTKELVPVFPKNEITKHIIRQAIDQLNSTSVTVETIRTLMNETASKLPEYSIVMQFKGIGPSLGPQLMAEIGDVTRFTHKGALTAFAGVDPGVNESGSYAQKSVPTSKRGSSNLRKTLFQVMDVLIKTMPQDDPVYQFMDRKRTQGKPYYVYMTAGANKFLRIYYGRVKEYLSVLPDPS

SEQ ID NO: 452835 - protein, 416 aa, unidentified
MHIVYARCCGLDVHKRTISACVLLQEASGQVQQEMRRFGTMTRDLLELADWLQEQQVTHVAMESTGVYWRPVWNILEGQFAMVLVNAQHIKAVPGRKTDTRDCQWIADLLQHGLLRGSFVPPTPIRQLRDLTRLRTSLRQDHTAVANRMQKILEDANIKLASVARDWLGVSGRAILTQLLAGEENATKLADLSRRRLRAKLPQMQLALEGRLTDHHRWILRVLWDQLEFLEAQLTKVDAQIQVHLQEYQEAIALCITIPGIEEVAAANLLAEIGMNMVQFPSAQHLASWAGICPGNHESAGKRLSGKPHKGNTWLRRSLCQAAWAASHTKATYLSARFRRLAARKGKKRAIVAAAHNILIILYHVLKTKQPYRELGADYLDRINAAQLKCYFVKRLENLGLQVTVQHVDKAAAPPT

SEQ ID NO: 452836 - protein, 325 aa, unidentified
MTPTTILGIDIAKDTFQVTVLQAGRAAAGEFSNNRAGFKRLSAWLKKRRARQVWACVEATGRYGEDLAEYLYAQGHSVSVVNPLAIKRYAESQLTRNKTDAVDAALIADFCATQQPALWAPPAPEIRELRELLHQYGALQASRQQAHNRLTSGFQSATVLAQLQAQIDFLDQQLEEIEQRIYQHIGAHPELKRQHALLDSIPGVGRLTAARLLAEDLSRFDDARSAAAYAGLTPMNRTSGTSVRRRPKLSKIGKASLRRDLYFPAVAASRKPIFGALYARLLAKGKTTMAALGAVMHKLLRVAYGVLKSGRAFDPNYAAQFHFAS

SEQ ID NO: 452837 - protein, 343 aa, unidentified
MQMITTIGLDIAKSVFQVHGVDAGGQVIVRRQLKRRYVLTFFQKLSPCLIGIEACASSHHWSRELQALGHTVRLIPPAYVKPYVKRQKNDAADAEAICEAVTRANMRFVPTKTPEQQSGLVLHRARHLFIRQQTGIINAIRAHLAEFGIVAPVGRHGVEELLTVVADPNDKRVPEIARACLLAFGAQLRRIKEQILEFDRLIRAWHRSNEMSMRLEEAPGVGPVLATALVAAVADPKSFRSGRNFSAWIGIVPKQHSSGGKNRLGNISKQGDRYLRGLFVAGALSVIRYAKIHGTKHRPWLTALLARRPTKVAAIALANKIARMVWATMARGERYKEPVALAR

SEQ ID NO: 452838 - protein, 361 aa, unidentified
MTGMVTYVGLDVHARSTHAAAIDVSTGELLRARFGPGVEEPVAWLAGLRGPVRACYEAGPTGFGLYRAASAAGVNVEVIAPGKTPRGPSDRVKTDRKDAELLARLLLAGSLTAVVVPPVAVEAARELMRAHDACRRDLMTARHRVSKMLLRHGWVYPESSTWTVAHRRWLARQQFQETASELVFADLTASVDGLTARKAAIAERLSRLAEDEAWWPTIARLRCFRGVDTLTAFALHLELGGDWQRFARANALSAWLGLIPALHQSGESSHQGSITKTGSGFARRLLVESAWHYGRPPRIGVTLKNRQQGQPDHVLQIANRAQQRLHRVYHRMRGRGKPHNVIVVACARELACFLWAAATAD

SEQ ID NO: 452839 - protein, 346 aa, unidentified
MTIVEDVRAITGGVDTHADTHVAAALDPRGGLLGVREFPATAAGYAGLLSWLGGFGAVALAGIEGTGSYGAGLARHVAAAGIRVVEAVRADRQDRRRNGKSDPLDAVSAARAAQSGRAAGAPKGRDGAVEAIRALMVARRSARNERTQAINQARSLILTGPDDLRARLARHSAAALAGAIAALRPRPGDAAGYAVRVALRELGRRVEFLDGQLERLDELIVPLVTARAPGLLALHGVGPDTAALLLVAAGDHPERLRSEAAWAHLCGTAPIPASSGKVRRHRLNPGGNREASHALWRIVITRMSSHPATRAYVERRTKEGLSKKEIIRCLKRYVAREVYRHLRAVG

SEQ ID NO: 452840 - protein, 425 aa, unidentified
MNYKQNEKINQVKESTLVVGIDIGSTTQYARAFDWRGIELGKVFPFSNSREGFESLKAWMQHLQDKYKKLDAIVGIEPTGHYWFDLGAYLEDEGILLVMVNPYAVKQTKELDDNSQSKNDRKDPKVIAKLVTEGRYSAPYTPDGVYADLRIMVANRKRLIREMTQIKNRFARWFAIYFPEYTDVFGDYEAQSSMLLLKKVCTPEAIVELGAEKINQIWRDAKLRAVGMKRATTLCETAKRSIGLKKGSSAARYEMKLLLEDYEYKKAQLDAVMEEIEKLCRKIPESEQMLAIKGIGVITVAGFLAEVGDVRRFESPRQIQKLAGLSLRENSSGKHKGQTTISKRGRSKLRAVLFNAAIPLIAKNPEFKSLHEYYTTRANNPLKKKQSVIAISCKLIRVFYAILAKGVTYDAQKLISDIHRQPQAA

SEQ ID NO: 452841 - protein, 485 aa, unidentified
MKAQRAKAYRRSHRHQSGPIRPAASMPVVNPHAAGIDLGATEHWVCVPEDAVPEGQANVRAFGAFSADLDQLVEWLRACGIKTAAMEATGVYWVALVQKLEQAGIEVVLANARHLKHVPGRKSDVKDCQWIQQLHSYGLLNGSFRPTQDICALRSLLRHRQNLIESCGREVQHMQKALQQMNVHLHHAVSDLVGATGLRILDAILGGERDPQQLVQLRDEQLCTKTTREELEKALAGDWREEHLFVLRQALATYRHLLNQVLECDAQIEQALVQVIIPQPAPLESPIPPNPKAKDGAPAQTKKKRFHRLKTGTSLKRDLTQELKRVCGVDLTQVIGLNVLSVLIIISEIGLDMSRWRSAKAFCAWLGLCPGNKISGGKVLDSRTAHVINRAAILLRTLAPRIGKTDTWLGIFHRRMRARLGPAGANTATARKLACLIYHLLKYKEDYIEVDHLVFLEKIRKQRIARLRKQAQELGMQLTELQQAA

SEQ ID NO: 452842 - protein, 361 aa, unidentified
MDSSKVQPKVTAGLDIGDKYSYLCLIDTDSGEVIEEGRLRTNPEAFRRRFASEEAPMRIAIEAGTHSPWASRVLEECGHEVLVANARKTRLIYANKGKTDEVDAENLARLARVDPKLLYPLKHQGEESQAHMAIIRSRQALIGCRTQLVNHVRGAVKSFGVRLPKCPARSFHKRASEHIPEALRPALGPILETIGSLTERIRDYERQLETIAKDHYPHETDLLRQVEGVGMLTALTFILTLEDPYRFEKSRSVGAYLGLVPARDQSGERDPQKRISKEGDEMLRKLLVGSAHYILGPFGKDSDLRRHGQKIASRGGKNAKKRAAVAVARKLSVLLHRLWVTVEVYDPLHNTHRRTKQEEAA

SEQ ID NO: 452843 - protein, 338 aa, unidentified
MSQDTVFVGLDYHQKSIQVCVLDTEGEVLVNRSCENSSESLRTLIERFDARQVRVAIEACCGAADLADELVDQFGWCVSLAHPGYVSRMKQSPDKTDFGDARLLADLLRVGYLPKVWLAPEYVRELRRLVRYREQLAATKKATKLRIRALLREQRLRCPHARPWTVVWQEWLRNTKDLSEQGRWVMDQHLTDLAEVQTRLASVEARMRTWCGEDSLIAFLLTLPGIGFLTAVTIRAEIGRFDRFVSGKQLSRFCGLSPRNASSGERQADAGMIKAGRPQLRVVLIEAAHRLARYEPRWADMAKRLRRKGKPGSVVAAAIANRWMRWLFHQVQTPELAV

SEQ ID NO: 452844 - protein, 341 aa, unidentified
MHITTIGLDIAKNVFQVHGIDEAEKVVISKQLRRGQVLKFFASLRPCLVGMEACASAHYWARELTKLGHEVRLMPAKDVKAYVKRNKNDAKDAEATCEAVRRPTMRFVGAKSAEQQGRLMQHRTRDLLMRQRTQVINALRAHLAELGIVAAQGREGLKQLLAIIADEKDARLPIDARASLVVLAAQLQALQTMIGLIERRLLVQHRANEASKRLESVPGIGLIGASAIAATVADPNAFRSGRDFAAWIGLVPRQDSTGGKQKFGPISKQGDRYLRRILVVGAHSVLRRAKKTPEKYPWLAQLLARRPFKVVAIALANKMARVAWALLARGGSYRVPALAAA

SEQ ID NO: 452845 - protein, 455 aa, unidentified
MSKKQQSKKQQNKQVTTLQLGIIYPGAAGIDVGSMNMMVSYPGAEGIQTVKEYGAYTEDLHAMANQLKESGITHVCMEATGVYWMAVYEILEQYGFNVTLVNARHYKNVDGQKTDVKDCQWLQQLHAHGLLRASHIAEEQYRELRTYIHERGVLQKNKSDTLNRIHKVLTQMNIKVQHIISDIEGVTGMQIVERIAAGINTPQKILEGLNIHKLKAGKEDLEKSLKGVFKPWYVKVLKQHLTAYHFYKKQMLAYELEIESILKTLLPSPAQQITIEKKTVKARKNQYHFNLKKYLHEIAGVDLTEIDGLDENTVLTIIAVVGLNMHKWPTAEHFTSWLNLSARPKKSGGRTIGHQRRFTNNSATQAFRMAAQTMWQQKGTLGHLYRRLSHTKGTKKAIKAVARRLAVIFYNMVKKQTAYDPKIVALDEAKIKARKISRLQKEAEKLGCRIEILVA

SEQ ID NO: 452846 - protein, 349 aa, unidentified
MRHIGVDLHKTNFVVCFLNADDTARTETFPLTADGLLRFTRQLNDEDEVAVEATQNIYYFYDQVKRHVSRIAVVDTYRFQVIARSKKKTDRADAAALARFLKLGWLPEVTVPSEQTRALRQLLEARETLVSTRTKLKNMAHAAFSRNGIALRRAAFASQVSRARLLEREDLPLHDLAILRACLRQIEELGKEINALEAEIIARGKVLKGLRRLLQVHGSNLLSAISLLAEIGDITQFETSKQLVSYAGLATSTRQSNETTRHGKITKQGRRRLRTVCIGAVLAMVNRTQTPLMEFYQKKKQEKGAGKAICATARNLLTVIFVVLKKELDYWYLEDRLYNRKLRALDAAA

SEQ ID NO: 452847 - protein, 344 aa, unidentified
MANLNQFCDFTKLIGIDIAKSVFQIYSCDTQTGEITNVQIKRDKVLESLANCGKCLIGMEACGSSQYWARKLQALGHTVRLMDPKLVKPFVRHNKSDKADAEGVCHALVSGVRAVAVKTETERDIQTLLTMRALLVKQRTARINHVRGLLAEYGHVMPKSVDQFDKKVDECINSLEGDAVQLVIDMLRDTVKSIRDEHDRIKTIQREISRLANQTRNAKHFLTVSGVGDTIMAYMCVLLADPTQFSSGRQFAAYLGLVPMHTGSGGKTVTTKIPGRCDKALRALLVQGAHAVARSKYRTDWVKNILAKKPKKVAMVAIANRMARQCWAVASKGQDWRRMPVTAA

SEQ ID NO: 452848 - protein, 343 aa, unidentified
MSEQKITGIDLAKTNFYLFSINAHGKPAGKTKLSRNQLLNWLVQQPKMTVAMEACGASHYWAREIRKLNHDVMLLPAQHVKAYQRRQKNDYNDAQAIAEACQHGTIRPVPIKTLEQQDVQTFLKMRRLVSMERTQLINHVRGLLAEYGIVFSKGATELRQKLPALLEDAENELTDTMRTLLHRQYIRLITLDNELEWYDSEQKKYVRQDPVCKRLLAIPGFGPLVSQAIKSWMGDGKQFRRGRDASAALGLVPRQFSTGGKQVLLGITKCGDQYVRSMLIHGARAVLFRASEKTDSLSVWVNRIREKRGFNRAVVALANKLLRIAWVIIARDEMFLPATKQNQ

SEQ ID NO: 452849 - protein, 337 aa, unidentified
MTLYCGIDLHANNSVISVIDERDDVMYEKRHPNDLPVIRDVLEPFRDDLLACVVESTYNWYWLVDGLMDAGFDVRLAHTGAIPQYAGLKHSNDQTDARHLAHLLRLGILPEGHIQPREQRAVRDLLRRRLLLVRQKMLYHLSLQSLIVRHTGERLSANQIKALDNDAIADKLADPIRLGGQLTHLARCWHERAIAMLEEEVLKHLKPRRDYQLLSSIPGVGKILASTIALETGAIERFPGPGQYASYARCVNTERVSNGKLKGRGNKRNGNKYLAWAFMEAAHYAAIWSPEIKRFYQKRQAKRHILVAKKTVANKLAKASYHMLKRQEPFDVNRAFG

SEQ ID NO: 452850 - protein, 411 aa, unidentified
MDVLYKTCCGIDVHKMKLVACLCKGHKQEIKEFSAKTKDIKAMANWLEENQCEMVAMESTSVYWKPLVNIFEMRGLNYMIVNAKDFKAVPGRKTDVLDSAWLADLLRHGLLKSSFIPSREQRELREATRYRKAITEERARALNRLQKLLEGANIKIGSVLSTITGKTTMNLLDYVLNNDEMMDEKTAETLIISRISASVKEVTEAMEGMMTPFQKMMMKQVLTHLHELSERIEEMDIIIDTYMAEYWGAIKKLEQIPGVGKKSAEIILAEIGLDMNQFPTAGHLASWAGVAPGNNESAGKRKSGRTRKGNKILKSTLAQAAKSAAKNKNSFFHAQYQRIAIRRGKNRATLAVAHSILIAIYHMLKDDQEFIDLGSDYYYQFNTEKKINSYLKKLAALGYRVDEHSTISPVG

SEQ ID NO: 452851 - protein, 349 aa, unidentified
MEQNEVILGVDTHLDTHVGAVISDTGRLLGTLSVGTDTAGYLDLLTWANSFGPLRRAGVEGTGTYGAGLARVLRDHEIEVLEVNRPDRATRRSRGKSDPTDAENAARAVLSGKATAIPKEQSGAAEAMRAVSVARRSAVKAKTQAINQLRALLVSAPQEIRERLLKTKTAECVENCARVRSLVKTPMLKTLTATLRLLAKRWLTLAEELKALDAMLESLTRQHAPRLRERFGVGPQTAAVLVAVAGDNPERLKSEAALAALCGTSPLQASSGKTVRHRLNRGGDRSANNALWTIAMVRMRSDPRTRAYVDRRTKEGMSNKEIHRCLKRYIVRELYPLILADLADSTRVA

SEQ ID NO: 452852 - protein, 348 aa, unidentified
MEHVGIDVHKNQSQICIITSEGEMIEKRVSTERGRFETALSSHRGARIVIEASTESEWVARCLEGLGHDVIVADPNYAPMYGQRTRRVKTDRRDARALAEACRSGTYRRAHRTSDERRHLRGQLAVREGLVRTRTRYISLIRSLLRREGLRVRSGSADTFLERLAEVDLLDQLRREIKPLLAVMGPLGKQIARVDRQVAELASEDRQVRTLCTAPGVGPVTAISFVATLDRAERFRGAHQVEAYLGLVPSEKSSGERQFKGGITKCGNTRTRWLLVEAAWILLVRAKSVKAQPLQAWAQRIAARRGRRVAVVALARRLAGILYAMMRDGTEFNGMRLAPSTDRLSATA

SEQ ID NO: 452853 - protein, 479 aa, unidentified
MSDHLIAIGCDSSKGRIDIEIRNHHGTVLHTGVFDDTPDDHAALSRLVDDLRERYPEARFLVGIESTGGMERNWLAFFRREKRWVKTMRVFKLNATAVHAFRSSQLHRAPGDAAAASDIARFLLERCATRQPAVEAESGPIVFYRTVRALSGELIATSQRLQTLLVAAQPDLVRFCRYGVPAWILALLERYPTAAMLARAKPATVDAIPHINGERAAELTENAKRSVASLTDTATAATIRLLVARMHDTQARIDQGQADLLSIITADPQSPLAKAVELLDGIPGIAPWSAACLACEIGNPNRFAHAKAIIAWAGLDPIAEASGDERHDYGISHRGNAHIRAILFPLAMAGVLHNPVLKDFYHRLTTVNGKTHLEALVAVMAKLLRIAHAVMLSGKPFDPAHEAKRRKQADAAQTARSDTKAETPTPPPAKLNAPISRREATRRKKAAAPGAEVRDQSPKRVPGRGPQTQDPALVGHAKG

SEQ ID NO: 452854 - protein, 422 aa, unidentified
MLARTQDNEEIIERVAALDIGKAELVCCGRVPDEDHRGRRLQEVETYSTMTRPLLGMADRLACLGVTRVVMEATSDYWKPVFYLLEAAGFETWLVNAKDVKHLPGRPKTDKLDCIWLCKVAERQMIRPSFVPPPLIRKLRDLTRYRADLVAARTAEKNRVEKLLEDAQIKLSVVVSDIFGVSGRDMLAALAAGERNPAVLAQLARRAMRKKITVLQEAFTGFFTDHHAFLLSRMLARVDAIAGDIAALDARIAEQIAPFAAAVGKLDEVPGINLAAAHAIVAETGLDMGRFPTAGHLVSWAKYAPGVNESAGKKKGKNSTGHGNPYLARVLGNAAAAAAKTGTFLGERYRRIARRRGATKANVAIGRSILVIIWHLLSDPDARFYDLGSGFYTTRIDPDRRRRNHVRQLEALGYTVILERTA

SEQ ID NO: 452855 - protein, 337 aa, unidentified
MIVIGVDVHKHSLTAVAVDELGRALAEWGGPVEGEVVSWAQALGEERLWAVEDCRHVTRGLEQTLLGEGERLVRVPPRLTAPQRRRGRSRGKSDSIDALAVARAALQEPLLDGPRPGEETLRELKLLVDHRDDLVVERRRCQQRLRWHLHELDQRLAVPLGALDRAVWIDRLGRQLARREQTTQVRIARDLLARCRMLTRSIVELDRELQARTKTIAPGLLELAGCGALSAAKLLCEIGPIDRFRTDAQLARHAGVAPLDASSGKHQRHRLDRGGNRQLNCALHRIAVTQGRVHAPARAYLERKQNEGKTRREAIRCLKRQLARTVYTTLKNKPLLT

SEQ ID NO: 452856 - protein, 344 aa, unidentified
MTNIQHKETAQEAKPDLFAGIDVGAEELILVIRKNGKPFNPQKFANTPADRDRLVKKLVKLPGIIVCMEATGVYHFDLAIALHDAGVSLMVINPKASHNFAKVLMKNSKTDAVDANTLAEYAARMDFVAWTRPSDETIALRSFARRINALTGQKAAAKNHLHALNATSETPKAVLKDAKLAITQLEKRIDRLTAEALVLIGKHPKLERILALLIGIKGIGNTSAIALMGELLLLPPDLSHREWVKFAGLDPRAFDSGKSVHKKTRISKAGNRHIRAALYMPALSAKQHDPHVKAYFQHLVANGKKPLQAVCAVMRKLLHAIHGMLKHNEPFDNTRFYAIPTSAE

SEQ ID NO: 452857 - protein, 355 aa, unidentified
MAADQIAVIGGIDTHTDVHQAAVIDTVGRHLATEAFATTPTGYQQLLDWLRSHGELLAVGLEGTGAYGAEIARFLAANGVTITEVDRPDRKARRANGKSDPVDAYAAATAVLAGRATGTPKSRNGIVEAIRALRLARSSAVKARTQTINQIRNLIVTAPAAVREKLRGLPTGALIDTLARSRPAGDLADPACAVRVTLRRLARRHQLLSEEIAETEAELAPLVAHAAPTLVALPGVGPETASQLLITAGDNPERLRSESSFAHLCGVAPIPASSGRTHRHRLNRGGDRQANKALHIVVTVRMRYDARTREYVARRTAEGMSKKDITRCLKRFVAREIYRHLPRPRIAAEELTQAA

SEQ ID NO: 452858 - protein, 352 aa, unidentified
MNIIAFDSHKRYTFARIENENGKNVQEFRIEHRRGNIAGFLSRQPAGCPVAVETIGNWYWIIDEIEQAGMQPQLVHARKAKLMLGCINKTDKLDAKGLNQLQRSGTLPTVWIPNRDIRDKRELPRTRMVFGRDRTRLKNRIHSVLDKYGLQDSFEDISDIFGSKGRRRLRRVMEQLPEKTYYTTELLLEHLEQTQQKIDGIEQRMKQMFEETADSRLLETMPGVGFILAVVILQEVGDIRRFSSAERFASYCGVTPRVHASGGKVRYGRLRPDTNHYLKWAFSEAGNSVAVNRERRPHRHVSRLYNRIRHRKNHAKAVGAVARHLAESTYWILSKGEAYRERGPSKVSSTGA

SEQ ID NO: 452859 - protein, 402 aa, unidentified
MKVCGLDVHKDTIFCAIYNGKAYSEVKEYETMTEQIRKMGKHLQEEGVVRVAMESTCIYWTPVWDLLEEMGFELVLVNPYLIKQMPGKKSDVKDAQWIASLLHKGLLRSSMVPDPLIKALRIYTRKYARFQQRASQILTEMDRIMVTASIRIGSCVSTLDSKSVISIIEALIEGKTDPDYLVTLVYANTANKKNGKLRRALTGNFKEHHRIPLKWAKQQYDLFQQQIRECLFYMEQICSEHYSREMELLTSMPGIKNTAAMCIIAETGADMNAFENSGKISGWAGLRPRNDESAGKFKSKAITKGNKYLRAILVQVAWAASRTKGCYFKEKYQRLALRKSNKKAIIAIARKMLVVVWNLLKNNEPYNPALVHIYDPVKVERSIAYHQKEIERVSKLLPLKVV

SEQ ID NO: 452860 - protein, 341 aa, unidentified
MEQATTIGLDIAKHVFQVHGADGAGHVLFRKRVTRGKLLGFLAAQAPCVVAMEACAGAHYWAREIGKLGHRVRLIAPAYVKPFIRRQKNDAADAEGTCEAAQRPSMRFVPVKTEEQQANAIVFRVRDLLVRQRTQCVNALRGHLMEYGYVFPKGITHVETLVAVVEDLQSSLPDSVRAILKLLVDTFTALEAQIAVLDAEIKQRSKSDPTARRLMTIPGVGPIASTAIIALVPVAEGFAAGRDFAAWLGLTPLQKSTGGKQKLGAVSKRGERTIRRLLIIGASAVVQQASRRGAPKGSWLAQMLARKPKMLVTVALANKMARTVWALLVKGGSYRIPAVAA

SEQ ID NO: 452861 - protein, 322 aa, unidentified
MNKYKETFGVDISKDVFDVHGSKSGHNQFSNSPIGFKLFLKLLPESSLVVMEATGYYHYSLSQFLCKHKIVVSVVNPLSVKRFIQMKLSRIKTDKRDAQAICDYGIYNTVPLYNQISDMQSECRQLLSLKANYLKRRTSTKNKLHGEGVLGIPSKLVVQSLLLDKKHIDRELAKIEKRLLLLVKTTSQRELTLLKSIPGIGDKTAVFLIVATDSFNKFSNASQLCSYLGTTPMIKRSGSSVRGRSRISKMGNRNLRNLMFMCSMSAYKYNKSCKAIHDRIVSKGKSSKLALIAVCNKLIHQAFAIVRSGVEYNPHYISVRKN

SEQ ID NO: 452862 - protein, 455 aa, unidentified
MKKEKPKMGIVKMGSGLPVFNPYAAGIDIGDTLHCVAINDGNGGHEVKTTSAFTCDLHEIVDYCKSNGVTTVAMESTGVYWLALYLLLEEAGIESYLVNAKHAKNVTGRKKDDTDSIWLQKLHTCGLLQKSFQPDSETRLLRSYTRQRKKLIQLGSDSIRRMQKALELMNIKIHTVISDILGKTGMGMVKAIIAGERNPEILCTLCDPRIKASREDIIRSLQGIWKDEYLFMLEQAVENYEFLQKQVKSCEERIQQQLLKQVAIVKEGDITCIEETPQKKAKAKAKAKKNQFDFSLLPYLIAIAGVDLCQIPGISEVTALEFISEVGVDMGKWKSSKHFAAWLNLTPNTKISGGKIISSKMIKKNNKAGQLLRQAASCLITNKTAIGDYYRAMRARLGGKGAALATAHKLSRIIYTMLLKQTEYNPGMIIENHEKSREEKIKKLEKQLARLKQAA

SEQ ID NO: 452863 - protein, 355 aa, unidentified
MKQEKYIGMDVHQATISVAVMDSSGKLIMECILETKAATILEFVDGLRGSLSVTFEEGTSAAWLHDLLKPHVSCLVVCDPRKNALLKDGSKSDRIDARKLAELLRGNQLHPVYHGEHGLRTLKELGRSYLTLTQDVSRVMTRIKALYRSWAIPCSGATVYAPRYRAEWLAKIPQPGVRLRAERFYQQLDLLQPVRQEARRDLLSEGRKHPAVKLLRQIPAIGPIRAAMLVALLQTPHRFRTKRQLWAYSGFAIETHDSGEYRYVKGKLQRNRERITVRGLNGNHNHDLKNLFKGAALSASTRPGPLYDFYAALLEKGMRPTMARLTLARKIAAITLTIWKKGVSFDAKQLHRQAA

SEQ ID NO: 452864 - protein, 466 aa, unidentified
MAYKRKNVKSKERKRMPRSLKAIQPNAAGIDLGSREHWVAGPPLEDETPNVECFGTTTPELLRLADWLKEQGVETVAMESTGVYWIPLFEILDSRGFEVVLANARQIRNVPGRKTDIEDCQWVQLLHACGLLRGSFRPSDDICQLRALIRERNTMVEQRADWVRRMQKCLDQMNVCVHQAVSDITGVTGMAIIRAIMDGERDPHALARLRDRRCRKSEAQIAENLTGNWRAEHLFNLRQALKMYDQLCAVIADYDSEILSYIATLQPADTSDESAPPPASKSKAKNLVKRGQEPMRQGLYRFCGLDMTTIDGIGVDTAAVIVSELGLDFTVFPNENHFVSYLRLAPNLSISAGKKVPKKSKASTCTRVATALRMSALTLRNSKTALGGYYRRVAWRKGASVAVFATARKLAQLIYRLIRYGQAYVDTGVEAYEARFNQRRLKSYTKALNAMGYNVEPLKTKEAILA

SEQ ID NO: 452865 - protein, 358 aa, unidentified
MKIIGCDLHARQQTIAMLDSETGELQEKTLEHQGETVRKFYSALSGSILVGIEATGSMQWFLELMEELGIECRVGHPAKIRKAETRKQKHDRRDARLLLTLLAENRFPTIWMPSSEQRDLRTLLRHRHQWVRLRSRVQHTLQSMALNHGLRRGRSLWSQAGQGELRALPLAPHASERRKALMTLYPRLQESIDELDRQVSEQTQQRTDARRLMTHPGVGPVTALATEVFLGDPMRFSDGKALASYIGMIPSEHSSGRRQRLGAMSKQGNALLRYLWCEAAMHAVERDPELKRFYRRKLVQKGLGKARVAAARKLGIRLWIMMRDEIDYQEFCRRGKARQESGSVRAGMPDRNSGPAEQ

SEQ ID NO: 452866 - protein, 392 aa, unidentified
MIYVGIDVAKDKHDCFITNSNGEVLFKSFTIPNNRAGFETLFQRIEAVSDDLTKVKVGLEATGHYSYNLLGFLLDKGLTTFVFNPLHTNLYRKSLSLRKTKTDKVDSRTIATMMMSDMNLKSYSDTSYHNEELKSLTRYRFDKVKERAKLKSSVSRLVCILFPELEKLVPTLHMASVYALLFEFPGADAVANAHLTRLSNLLSESSKGRYGKETAVMFRDTARHSIGSHMPAKSPELKHTIKLIQELTIEIDEIEAAIKRIMDEEIQSPILTIPGISYRMGAMIIAEIGDFSRFDSADQILAYAGMSPSTYQSGQLDNCYSHMEKRGSRYLRYALYHATKYVCHWDKSFGAYLEKKRSEGKHYNVTISHATKKLVRLIFAIEKSGKAYLPAT

SEQ ID NO: 452867 - protein, 304 aa, unidentified
MSSYVGIDVAKLELVVHVLPQEQGRIFANSAVGLAELVAWLQQMPCQRIVFEASGGYAQALLKCLNQANLPAVRLSAQRPRELARALGVKAKTDALDARVLAVAAQLLPAAVSEPLPETTAILREWLQLRSALVGERDSHRRRLQQLQHPQVQAFLQEWVAKLQVQIKDLDKLLAKLVRDEPTPLDKAPGLGPILRATLAARLPELGRLDRRQIAALVGLAPYNRDSGRWRGQRRIAGGRADVRRVLYMATWSAIRGDAALASCYQHLVAAGKPKKLAVTACMRKYLTRLNAMKRDNAPWRTGA

SEQ ID NO: 452868 - protein, 470 aa, unidentified
MTPRIQKRLRQPPSHEPLHVTHRHAAGIDVHANVHWVAVPPGDAPLPPPDHPPNLPAHVRSFGACTADLIDLANWLAECGVKTIAMESTGIYWIPLFELLESRGFEVLLVEPRQSRHAPGRPKSDVLDCQWLQRLHSYGLLTASFRPADQVVVLRSYLRQRQMLIRYGSQHVQHMQKALEQMNVKLAEVVSDVSGVTGMAIIRAILRGERNPLELAKLRNDHCKRTEAQIARALYGNWRAEHLFALQQAVTLYDCYRQQLQVCDEQLHAYLGTFADQSQGRPRPQRQVRRRRERRPNDPAFDVANLLYRIAGVDLTVLEGIDANTALVILSEVGRDVSRFPTAKHFSSWLGLSPQHQGSAGKIRSRRVQHGASRAGRTFRLAVLGCHHAKHALGAFYRRIQARAGSPKAIVATARKLAERVYRLLKYGAEYVCQEMEAYETAYRKRLLKGLARRAAELGYRLELATPNGS

SEQ ID NO: 452869 - protein, 342 aa, unidentified
MNLPIRIGMDTSKSVFQLHGVDENEGVVVRRQFRRAEMIRYFERLPPVLVAIESCGSSHHWARLLQSFGHEVKLIPPQYVKAYVKRGKNDAADAEALCEAVTRPSMRFVPVKSKERQAACMLMTVRERLVSVKSQLSNAFRSYAAEFGIVGPAGRQNVTALIKRVLVDDSLPEMARDLFRLQAEEYAAVQARLAKIEAKLMKWHREDDVSRRIATIPGVGPIGSSMLSMKAPPPETFRSGRDFAAWLGLTPKDHSTGGRQRHGGITKAGDSVLRSTLIVGATALLRHIRKGRHKPTLWLASLLERKPPKLVAVALANKFARIAWRLMISGGVYNRPVAAMPN

SEQ ID NO: 452870 - protein, 339 aa, unidentified
MNYTTVGVDISKNVFQLHWVDAETGEIVSKQLKRAVFLEHFANRGACLVGMEACGGAQHWARRLIDMGHQVKLMPGKFVKAFATGNKNDSVDARAIWMATQMPSKAVAVKTEAQQAILALHRIRQQKVKFRTMQMNSLRGLLTEYGEVVAKSRTALDKAIPSVLAKLVERLPAMLIESLRELWSDLEKLDKQIADIERRLQMWLKEDKACKAIAAIPGVGLLTATAAVATMGDPKSFKSGREFAAWLGLVPAQTGTGGKVKLLGISKRGDTYLRTLLVHGARSVLFLAKEPGPWIENTKQRRPANVIVVALANKMARMIWAVLAHDRPYRKDHVSIRQV

SEQ ID NO: 452871 - protein, 474 aa, unidentified
MSTELNPKKQAKRRRKNKASATQHQINTGTNPHAAGIDIGADELVVAIPPDRCAENVRTFRSFTANLYQLRDWLLEHKITTVAMESTSNYWVNCYDLLAEAGIDCYLVNARHVKGVPGKKTDVCDAQWLPQLHAAGLLKKSFRPDQEILSLRYLTRYRDSLIREAGNHLRRMQKVLTEMNLKLHHVFSDIDGVSAQTIIQAILAGERDPKTLAALRNGRCLSSEADILAALQGKYRPELLFVLGQLQKNWLEQQKHIADLDDQIHNLLQKIAPAEKAPQAPGDQAPKSQKRRQLGKNALNLDYCQESQHYFGIDLTEVDGLGPSVILALLSEIGNRQQLLDSFKSADSFCAWLGLCPCNAISGGKVLRSATRKTKNPLNEALRLAAFGISRARSRLGEYCRRMKGRLGKAQGITATAHKLARILYALIQSGSPYSENTAFPPKPQNESKQRRQLEILAQKLGLQVTPIPATTLT

SEQ ID NO: 452872 - protein, 381 aa, unidentified
MQKQNTKMSETKQTIYFGIDEHKKDWTVSFRSKSAGLDTKRFEPEANKLVSYLKCTYPDHKYESVYEAGFGGFWLDRELRALGVKNIVVNPADVATKGKEKAQKNDKKDAQKLARELASGNLEEIYVPSVEDEAIRTIPRLREQTVKDQTRVKNRIKSLLCLYNVDIPRNDEMPHWSANFIKYLSELKGLPAETKYTLDTHLAILAFIRAQLSQIIRKMRQSVKEDKVLKAKIEHLSSIPGIGFITAMGVQTELIDIERFPSLDNLASFVGLSPAVYSSGEHSKDLGITKRYKKYLRNRLIESAWMAVRYDAELRGNYEEYVKRMSKQKAIIRIAKKLLNRIMYVMKNNVDYKPKTTKSETKKKSVTKQNEKKKVKLKRVS

SEQ ID NO: 452873 - protein, 402 aa, unidentified
MFYVGIDIGKRHHEVGVIDDKGQPIGKTLRFANSKAGSDKLLEYINQHKLTPDNSVFGLEATGHYWLSVFSFVHKLGFKTTVFNPLQSDALRHFYIRKTKTDVKDAYLIAQVIRMDAPDETPFIEEDLLQLRHLERLRYSFVDQASDIKRKVISLLDQVFPEYEQLFSDTFGKSSTELLMNYTLPEELLEVDTSVLVNLLQEASHGRLGETRALKKANQIRESALNTFGITIGTGVFKLQIQLLLEQIQLIEKHLTEIEQAMIEISNRQEHYLTTITGISDVTACVILGEIGSIKRFERPEQLVAYAGLDASVHQSGDFNSRNTRMSKRGSPYLRRAIWQAAFVASYHDPALSLHYQRLRKRGKAHGTAVGAVARKLTHIIFAILRDNKPYEPKPQPDPKAN

SEQ ID NO: 452874 - protein, 345 aa, unidentified
MPIVGGLDIHRKQITFDYLDTVTGEVRRGQIAPADRGHVRAWLARFAGHGDVAFAVEGCAGWRYVAGELAAAGIAAHLGEPADTAALRGRKRHAKTDKTDARHLRALLAEGRLPECWIPPAQILEYRALLETYHDLRRAHTAWVQRIHAVFFHQGAPPLSEGALRTEPGLAALRAAAAAHLSAAGQQQVATALDMLAATEARLGPLRHQLRQAAAHLTGAKVLAARLYGVGPVTGLALTCWLAGKDRFSSSAKAVRFTGLDITVHSSDRKGPPGRLSRQGPPMLRWALYEAGKTHARTSAPDHGYYATVKDRKNSKRAALSEARKIVRQACHILTELGDDALTAA

SEQ ID NO: 452875 - protein, 346 aa, unidentified
MSKPESSAISAIGIDVAKAMLSVCFRRPKADESALTLRNTDADIRKKLLPHLDGFTGRVVMESTGHYHWRVALLLTEAGYKVFVVNPILAKQYTSSNIRKVKTDPADASGLARMAELADNLPRCFALTRETLNLRKKLSVIASIAKQMQALKATQRQLAEGHEILRTGASRGEDALDTTIKQLTKTADLLEDEFVKESAALGTDSTAATIIDGIPGVSPFVAHLVLHWLAVLPDITAKSWIGYAGLDVSSRESGSWHGRCRLTKRGNSFLRRRLYSSAWGATMSDEKFKEYYDKMRADGRPHVEALLIIARKIVRIMFKLLETKKKYDPSLFTFGKKTKLTLDIAL

SEQ ID NO: 452876 - protein, 343 aa, unidentified
MQDVATVGLDIAKQVFQAHGADASGETLFNTKIKRENVLEFFSKLKPCLIGMESCATSYYWARQLLEFGHDVRLIHTSYVKPFVKRGKTDANDAEAINVALTQKTMRFVPVKTLNQQAAITIFRTRSLFVSQRTQLVNALRGHLAEAGLVAAKGIQNYSKLLKLMESAADTVLPTVMKQALTDICDQIHRLNDLVTKLDKEIERRVQHDENACRLLTIPGVGPKTAMCVIATIPDIHRFPSGRHFSSWLGLTPRTHSSGGRSVLGRITKMGNSELRTMLYLGGTVIMMRDKKTPIGRWASRLRARRPYKVAVIAVANRIARIIWALLTNGGVYDPTYGREASA

SEQ ID NO: 452877 - protein, 341 aa, unidentified
MGQASTIGLDIAKNVFQAHGADAVGHVVFRRRLVRAKVLEFFTRQAPCVVVLEACGGAHHWAREIGKLGHTVRLIPPAYVKPFVKRQKNDVADAEAICEAAQRPGMRFVPVKTDLQQASALVFRTRDLLVRQRTQCINALRGHLAEYGHVVPKGTDQVDQLVALIKDETSPVPEAARGILQVLIDTCEALGKQIDDLDAEIGRRAKDDPVARRLMTIPGIGPIAATAITALVPAPEGFRAGRDFAAWLGLTPLQKSTGGKQKLGAISKMGERTIRRLLILGASAVVRWAVHRGAAPGSWLAQMLARKPRMLVTTALANKTARIVWALLMKGGTYKAPAVAA

SEQ ID NO: 452878 - protein, 415 aa, unidentified
MTDQREWYAGVDWASESHHVFLTDADGRRIAERSFQHGGEGLAEMAAWLMATSGAAAAFQIQVAIEVPHGPVVETLIERAFKVHAINPKQMDRFRDRFTLAGAKDDSRDAEVMASALRTDPRCFRLLASADPGVIELREWSRIAEDLGAERNRLTNRLREQLWRYFPAMLELENDLGAEWLLDLWEAVPTPEKSARIRQTTIAKLLKRHRIRRFDAAHVLDVLRRPPVQVAAGTTEAASAHIATLIARIRLVNRQIKDAHQRLDTLTTRLIPTEEAGPGQKKQHDVEILASLPGVGRIVLATLLAEAFDVLQRRDYAALRSLTGVAPVTKRSGKSCIVIRRQACHDRLANAMYHWARVAVQHDVTSRAKYTALRSRGHSHGRALRSVADRLLNVACAMLKSGVAFSPSSAAQKPV

SEQ ID NO: 452879 - protein, 443 aa, unidentified
MNTTINTPQTHAQPNAAPGPEPDFAAFVAIDWADQKHDLVLLPAGSKTKEPLTLEHTPEALSDWVAKLYQRFPTGKIAVILEQSRGSLLYALLPHERLQLYPINPKTSAKFREASYTSGAKDDPLDADLMLDILLHHRDRLKAWQPDEPITRQLQLLVEARRRFVADQVRLTNRLRNTLKSYFPQALDLAGDDLASPMACAFIQKWPTLEAAQQIKTHLLRKFYYAHQCRSEDLIQQRLQLLAKAKPLTTDTAIVAAQSLLAQTTAREVAALPAILAEYEHRIKDLFTQHADFTIWDSFPGAGPALAPRLAAAWGTQRDRFPDSQAMACHSGIAPVKEASGKSVWIHMRWACPKFLRQTFHEMAKSSLQFCAWAMCYYQMQIQRGKGRQAAIRALAFKWQRIMWRCWHDHVPYDDVKYLASLKRNASDFYTRLVAAPVKSTGE

SEQ ID NO: 452880 - protein, 413 aa, unidentified
MKKNSNSQTKSVQKTRPTKARGPVQRDSKEVMAELVAKLSEKLEQKPTQKKAAEGKPQSAPGPNRDRLTVGVDLGDQWSNYCILGLEGETLAEGQWRTTREDVASFFGALSAARVIFEVGTHSAWVREVVVGCGHEVLVANPRLMEGTKRRKRKNDRLDAQKLARLGRVDPQSLFPIQHRSTEVRQDLVVLRARETLVAMRTQLINATRGLVKSVGARLPKCSSPSFSKKVEEAIPAEVREALLPLVRLAEELSDQIRVYDERIEKLGREKYGHTKLLRQVKGVGPLTSLGYVLTLENPDRFRKSRDVGPYVGLVPKQEDSGDSQPQLGISKAGDMMLRRLLVGSAHYILGPFGPDTDLRRYGLQLCERGGKNAKKRAAVAVARKLAVLLHRLWVSGEVYEPLRHSAPTAEAA

SEQ ID NO: 452881 - protein, 466 aa, unidentified
MTSFYLGIDVSKGYADFLVLNHKKQPVVKNFQLDDTFEGHTRLYEILNQFLAGHEQATLYAAVESTGGYENNWYQALTSFQASLPIQTARLNPLGVLHNSKADLKRIKTDKISAQSVAEYLIAHPEKVSYQQEDRLAGLRKQWSFIQMLTKQCTQFLNQLHSLIYTANPELLGFCRGGMPAWVMKLLLQYPTACRLAKARAKTVAKIPYVTLERAQKLIADAKCSVASNADDVSAHLIVATVSQILHLKKTIAAQTDSMAAQCNLPEVKLLKTFIGISDVSAIGLMIQIQNITRFKTVKKLASFWGVHPVYKTSGDGSGGFKMSKQGHVQPRRILYLVALTAIEHNPVIKAVYEHHIRQGKEKMAAIGICMHKILRIIYGMLKNNTVFDPEIDNANRIRLMAAKTAAPKKDKNRRFQQYDISAPISRRQRKKRLEREQSQSVNNTECGISAPVPMATIIADILAKL

SEQ ID NO: 452882 - protein, 401 aa, unidentified
MKSLSGGIDIGSESHHVIIMDGTGKVLYDRKVAHKFREFREVIGEFRGLEEREQGEITFAIEGKNGYGAPFDRILIESGFKLYNVDNLKLRRFRDVFGAEWRNDRRDAKMLAKMLKLKDHMDAEEEKAFIAIEKTPAVHEKLRILSRHQQSLIDEKVRIQNRLRKRLLEVCPDILEFGDTDGKKLLQLLKKYPEFSKYKKITLAALLKIETIGKKTAISILEGLRNIQYVEELTGIYKAIISSYCRRILELKEEIEMLDRELEETGEKSAEVMQLKSIMGVGTKLSSRLAGEIGDIRRFTRESQLAVYCGVACIDDDSGKKKKTKAVYKANRICKATIIEIAGCTIRYVQESKAYYDKKRAEGKDHNHALRCLARQLIKVIFKMLTENREYIYKEELKKAA

SEQ ID NO: 452883 - protein, 456 aa, unidentified
MPEKEKRPHARSSGRLSTINEHAAGLDVGSTFHVVAVRADQDDQPVRTFRSFSGDLHQMADWLTSVGIKTVAMESTGVYWIPVFEILEARGFEVLLVNARDVKNVPGRKTDVNDAQWLQQLHQHGLLRGSFHPRADLAQLRTYLRLRERMVEYAAAHVQHMQKALMQMNVQLHHVVTDITGATGLRIVRAIVAGTHSPEQLATYRDVRCDASEETIREALTGNYRAEHVFGLKQALELWDFHQAKVAECDVEIEAVLKSLNEAHVEPEEPIPAVRHAKARNEPKFDVRSALYTLLGADLSQIHGFGPYTVLRLVAECGDDMKKWPTAKHFTSWLTLAPGNKISGGRVLSSKTRRSSNRAAALLRIAAVNIGKTQTALGAFYRRLSARTGKAKAVTATARKLAVLFYRALRFGLAYADPGAGYYEERYKRRVIENLQRRARGLGFTLVEIPEAGGVS

SEQ ID NO: 452884 - protein, 351 aa, unidentified
MPRATSSTNVIATIGIDIGKNTFHVIGLDVKGAIILRHKLSRGQVYARLANIPPCLIGMEACVGAHHLGRQLSALGHDTRLMPARYVRPYSKGQKNDFRDAEAIAEAVQRPTMKFVAIKTVEQLDLQGLHRIRERLVCQRTSVINQIRAFLLERGIAIRQGLRILRTEMPIVLAKTDKLSQRMIHMIEDLCTDWRHLDRRIATVSKEIETLSEQDDGAKRLMTVPGIGPIISTATVAAIGTGEVFSKGRDFGAWLGLVPKQMSTGGRTILGPISKRGNRYLRMLFVQAARAVLLRPQSWEKHGLKLWIEAAARRLNRFKLAIALANKIARIAWGVLHGGRNFEVRPTNQAA

SEQ ID NO: 452885 - protein, 348 aa, unidentified
MTLYGGIDLHSNSNQSAILDQDRKRVMRRKLNNDPDAILRFWEPYKADLAGIVVESTYNWYWLADLLLDHGHRVHLANPSAIQKYIGLKHSDDNHDAFWLAEMLCLGILPEGYIIPKELRAVRDLLRKRAHLVRVRTSLILSFQNILTRNTGTKLSSNDLKVLREDRAQPYLQHNQDLLLAGSASKNVIDVMSRQIYRIEQAVVQKVKLEPTFTHLLGLPGVGRIIASTIQLETGPLERFAKVGCYASYCRKVNSQWTSNDKVKGHGNKKNGNKYLAWAFGEAAERARMFDKASREFYQRKLRQKKSPALAHGALAHKLARAAFYILRDKVPFDPQKMFGHPEEPLDN

SEQ ID NO: 452886 - protein, 321 aa, unidentified
MSRLWIGIDVCKDFLDAHARPAGTGQRFDNSPAGIEQLVAWARTFAPERIVFESTGPYQKAAVGALLAADLPAVVVNARQVRDFARGTGQLAKTDRIDAGILAHFGEVVATVLRPLPPAEVLEFRDLCDRRGQLVRMLAAEKNHRHAAQGATAKVRKNIDQVIAFLERQIEQLEGRMDRIVAHSDTFKAKDDILQSVVGIGPQVSRTLLVHLPELGQGSRQSIAALVGLAPFADDSGTSSRIRHIRGGRGKVRLALYQAAVAAVRYCPVMKAFYATLKARGKASKVALIAVARKLLVLANALLRTGTRYQPRTNPVCPQNA

SEQ ID NO: 452887 - protein, 345 aa, unidentified
MSMLTDRIDLVIGIDTHKRTHTAAFVDRLGAVHEVFEVEANAAGYRRLLRVADAHAGQRVWAVEGTGSYGAGLTTALIAVGEHVVEVERPGRPKHRPSGKSDPIDAVRAAREILSRDHQIEPRQRGNREAIRVLLATRSGAVLARTKAVNHLHALIVTAPDELRARLSGTSTGELTRRCAALRVRGDMTDEYCATVMALRACARRAIACGQEADELEPELLRLVRAALPELLDQPGVGPITAAVIYLAWSHHGRIRNDAAFAAMAGVAPLEASSGQTVRHRLNRGGDRQLNRALHTIVLSRMMFDPETKAYVERRRAEGKTSREIRRCLKRHVARRVFKLLEHAP

SEQ ID NO: 452888 - protein, 352 aa, unidentified
MQCIAFDAHKQYTWALVEDEGGKVVREQRISHSKGALIEFLAGCEAGSAVAVETVGNWYWIADEIEAAGMVPRLVHAGKAKAMSGSINKTDKLDVRGINRLQRSGTLPTVWIPPRELRDARELPRTRMVLVGQRTRLKNRIHANLAKYGATSREATDLFGVRGRVVLGERIRELPSQTRYATERLVEELDHLQVQIDGFEARMAELFRDTEDLELIETLPGVGFILGVVILMEVGDVRRFPSAGQLASYSGMTPRVHSSGGRVRYGPTRPDVNRYLKWAYAEAANATAIHRRKHAPWHVSRLYERVRHRSGHQKAIGAVGRHLAEATYWILRKGEPYRDPTLDSVVKPKGEA

SEQ ID NO: 452889 - protein, 346 aa, unidentified
MDHFVGIDVSLESCAVCVVNQSGAIVREAKVSCEPEALIAFLQDLDHNLACVGLEAGPLSQWLHRHLRDTGLDSVLMETRQVKGALKAMPIKTDRRDALGIAQLIRMGWFRPVHCKSVSAQELRALLGARRTLQKSMISIELSMRGLLRGFGLKLGRISRRKLPDRARELASGNEMLTAMVTSMLRGQAGLRSELARIELRLRRIARQDRICRLMMTTPGVGAVVALHVKAGIDDPTRFRSSKMVGPHFGLTPRREQSGERDVVGAISGAGDRSVRTALFQAATVMLYHSHSKNWLKAWGMRVAQRRGMKRAVVAVARRLAVVLHRMWSDNAPFRLTRSTADGAAA

SEQ ID NO: 452890 - protein, 370 aa, unidentified
MSVYVGIDVHRKRSQVAVVTEDGTVQLNKNTVNGTAPILRLIGDLPSGTPVAFEAAFGWSWLAQLLEDYGFEAHMVHPLRCKAIASARLKKTRAGAVTLAQLLRADLLPEAWIAPPAVRQLRALLRHRTGLVRLRTQLQNRIHAVVADFGYDWSGSYLSGPGRGWLAELELPAVSREIITDCLTFIDALAPEIDRIDGELRQHAKTDPRVKILTTLPGVGQFTALVMLAEIGDISRFPSSRKLASWAGLTPAVRGSDRTVRHGHISKQGSAWLRWVLNQAAQTAKRSPEFSATYAVIAKRHGKKIATIAISRKLLTRAWHLLAAAQAAGPAAPGGSAATAAHPQTGRVTKPRARSLQRHEQADGRARSSD

SEQ ID NO: 452891 - protein, 351 aa, unidentified
MPRTSTVHAVTTIGIDTGKNTLHMIGLDMRGAIVLREKVSRGRIASRLANLPSCLIGIEAGLATHYVARELAALGHDVKQVPPTYAKPFRQGHKNDFRDAHSVAEAVQRPTTRFVPAKTDEQLDLQALHRVRSRLVSERTAIINQIRGFLLERGIIVRQGLRFLRQALPDILAKRTDVLSPRMVRIVTDLASDWRQLDERIEPVTDEIESLAKSDDGCRRVMTVPGIGPIISSAMVAAIGNGAAFARGRDFSAWIGLVPKQMSTGDRTILGRITKRGNGYLRTLFVQAARVILLRPASWPKHSFGVWLARAAQRLHRNVLAAALANKLARIAWTVLAQERSYEARVTKAAA

SEQ ID NO: 452892 - protein, 342 aa, unidentified
MTAIGIDTHKATLAACAVDELGRPVGEATFANDPAGHLEFIAWARAIAPEVTIGVEGSSSFGAALARSAQSAGLVVREVPPHLSRVERLRTRRPGKSDPGDALAITRVTARESNLPPIRLPDRTTELRLLLEAREDLVAESNRARNRLHAHLLTLAPGYGGTVTNLVAARHRATVGRLLRGLGGVQAELARGLLLRLARLEREVKALTSRIGALVAGHPLLGLPGAGPITAARLIAEVGDVRRFRSADALAALAGVAPIPASSGQVQRMRLNRDGNRQLNRAFYFIAVIQSRFYPPAKAYVTRRMEVDGKSWREAIRALKCMLVRPVFRLLVEGAAAQVEAA

SEQ ID NO: 452893 - protein, 441 aa, unidentified
MSEITPSVSPEPEWAAFVAIDWADKKHCWKLLAAGSVTPEEGTLANTPEALSMWAANLQERFAGRAIAVCLEQSRGPLVYALCKFPHLVLYPVHSTTAARYRQAFFPSGSKDDPVDTTLLLELLTRHRDRLRRLNPETPETRLLQMLVEQRRKLVDERTRYSNQLTAWLKMYFPQVLIWIDNIDSPLGCDLLERWPSLEQLKCVNPAKLHDFFTTHNSRSEQRIQERINAIYQAVPAVNDPALLQAGPASVQALVRILQVLNSAIADFDQRIESAANNHPEAPLFVGLPGAGPVLRPRLIAAFGTQRERYQDAGELQNYSGIAPVTKRSGGTQSIHFRRACPKFLRQTFHEFAGHSIQKSTWARAYYRSQRELRKDHHAAVRALAFKWMRVLYACWRDRQPYDEATYARSLEKRNSPLAKLTTALQWKDVAGFKKLSPKTT

SEQ ID NO: 452894 - protein, 348 aa, unidentified
MNYYAGIDVSVEYSSVYLVDASGKIVREAKVETTPEAIIAWLGSFGHPIERIGVEAGPLSQWLHRAMSEAGLAVELLETRHVRNALKAMTVKSDRKDARGIAQLMRTGWFRPVHCKSMEAQEVRAILGARKLVQSKLLDVENSLRGTLRNFGLKVGHTTTRSFGGRIRELVAGHPSLEVIGTSLLSVRDVLLRELNGFEKRVRGMARTDARTRLLMSVPAVGPIIALTYASAIDDPARFKSSKQVGPHFGLTPKRYQSGETDRSGRISKVGDAAVREALYQAAHVMLTKPVRGCTALKSWAMRLAKRASMKKAKVALARKLAVIMHRMLADNVAFNPAPKAAASAMAA

SEQ ID NO: 452895 - protein, 339 aa, unidentified
MNYTTVGVDIAKNVFQLHWVDTETGEIVSKQLKRAVFLDHFANRGACLIGMEACGGAQHWARRLIDMGHQVKLMPGKFVKAFAIGNKNDSADARAIWMATQMPSKAVAVKTEAQQAILALHRIRQQKVKFRTMQMNSLRGLLTEYGEVIAKSRTALDKAIPSVLAKLVERLPAMLIESLRELWNDLEKLDKQIADIERRLQMWLKEDKACKAIAAIPGVGLLTATAAVATMGDPKSFKSGREFAAWLGLVPAQAGTGGKVKLLGISKRGDTYLRTLLVHGARSVLFLAKEPGPWVESMKQRRPPNVIIVALANKMARMIWAVLVHDRPYRKDHVSIRLV

SEQ ID NO: 452896 - protein, 409 aa, unidentified
MQSDFQYFVGIDWGSQQHRVCLMDRDGTIVEERWIEHSGSSLAELVDWLRRQTLESPQALAAGIEIPRGAIVETLLEHGFAVFSINPKQLDRFRDRYSPAGAKDDKRDAFVLADSLRTDMHCFHAVRVDEPGRIRLRELSRLEDEVGEELNRSINRLREQFHRFFPQLLELSESAGEPWLWTLFESAPSPARAARLTEAKIARILQQHRIRRFDGRQVRAILKTKPLTLAPGAAEAAGEHALLLLPRLRLLHQQRADIARRVDALLQELASGGDGPSCEHRDEAILLSLPGLGRKVAATMLSEASQAIAERDYHALRCYSGAAPITRQSGKKKVVMMRYGCNQRLRNALYHWSRTSIVWDPGSKKTYAELRARGKSHGSALRTMADRWLRVLFSMLRHNTVYNAQFKAA

SEQ ID NO: 452897 - protein, 357 aa, unidentified
MNITQIISFANTHFFIGIDAHLKNWKVTIRMGGIELKTFSMNPSPLELIAYLHKHYPDGIYHIVYEAGFCGFWALRIFRQHNIDCIIINPADVPTTNKEKVNKSDPIDSRKLARTHENKELHGIYIPDTFHEELRALMRLRYRIIQSQTRIKNRVKGLLYCQGIQIPLQFSGRDRWSHAFILWLGQLQLKTSAGNFTLQNLILQLKEIREHNKNILKQLRKEAQHPDIAPIMKALQGVPGVAFITAMYLYTEIIDMKRFPNDDALANFVGLVPSTRTSDENVYSNGISFRQNSFLRTIMIEAAWTAVREDPAMTLKFKELSKRMKSQDAIIRIAKKLVKRIRHLWLKQEEYVYALVA

SEQ ID NO: 452898 - protein, 392 aa, unidentified
MIYVGIDVAKDKHDCFITNSDGEVLFKPFTISNNREGFETLFQRISSISDDLDKVKVGLEATGHYSYNLLGFLLDKGLPTYVINPLHTNLYRKSLSLRKTKTDKVDSRTIATMMMSDMNLQSYSDTSYHNEELKSLTRYRFDKVKERAKLKSSVSRLVCILFPELEKLVPTLHMVSVYALLSEFPGADAVANAHLTRLSNLLSESSKGRYGKDTAVMFRDAARGSIGSHMPAKSLELKHTIKLIQELTVEIDEIEAAIKRIMDEEIQSPLLTIPGISYRMGAMIIAEIGDFSRFDSADKILAYAGMSPSTYQSGQLDNCYSHMEKRGSRYLRYALYNATKYVCHWDKSFGAYLAKKRSEGKHYNVALSHATKKLVRLIFAMEKSGRAYLPTT

SEQ ID NO: 452899 - protein, 392 aa, unidentified
MVISVGIDVSKDKHDCFIVSSEGEVLADVFTIPNTMDGFHCLLQRIRDCTTPQDKIKVGLEATGHYSYNLLGFLLDNGLATYVLNPLRTNLYRKSLSLRKTKTDRVDARTIAAMLLSDVGLKPYTDTAYHNEELKSLTRYRFDKVKERAKLKSSVSRLVCILFPELEKLVPTLHMASVYALLEVFPGAKQIAAAHLTRLKALLESSSKGRYKRDMALEIRDAARNSIGSRMPAKSLELQHTIRLIRELDAEITEIEEQIQSIMDKLHSPITTIPGLGFRMAAMILAEVGDFTRFDSPDKLLAYAGMSPSTYQSGQLKNCYPHMEKRGSRYLRYALYNATKYVCHWDPTFADYLAKKRAEGKHYNVALSHAAKKLVRLIFAMEISGMPYRLAA

SEQ ID NO: 452900 - protein, 347 aa, unidentified
MMMTIGGDSHKRTHTFVVVDELGRQVDEKTVRATSDGHLDAIGWAAQWPERRWALEDCRQVTRRLEQDLVRSGESVVRVPTKLMADMRRGAREPGKSDPIDASAVARAALREPDLPVARLDGPEREMRLLVDHREDLVGERTRMQSRLRWHMHELIPEHVVQLRSLDRFHVLDDLERRFVAIGGPVADIAAELTTRIRELTIRINELYREITSIVTSLAPSLLALEGCGALSAAKIVAETAGADRFRSRAAYARWNGTAPIPVWTANPRFRLSRGGNRQVNAAIHRIAITQWRGQGAGHDYIKGRIERGDTKRSAIRALKRRISDEVFRRLHTDLAHRQPAPLEDAA

SEQ ID NO: 452901 - protein, 457 aa, unidentified
MNRKRTKSKVDRTMPMVHPNAAAIDVGATIHMAAVSADCTPEPVRSFGTFTTDLHRLVNWFKECGVETVVMESTSVYWIPIFELLDARGFTVFLVNARDAKHVPGRKTDVSDAQWLQRLHSYGLLRASFRPKGQIAELRAYVRQRERLLEYAASHIQHMQKALTEMNLQLHHVVADITGTTGLRIIRAILAGERDSKALAHLRDYRCHASAETIEKALTGSYRAEHLFALEQALALFDAYHEKVSACDVRIEAVLKELSIGRSRGSGSLPSSRRRTDQTNAMAFDVRAALFALLGQDVTQINGLGPYLSLKLIAECGDDLSAWPSAKHFTSWLCLAPSNKISGGKVLSSRTRRSGSRASALLRLAAVTVGRTDTALGAFYRRLSARIGKAKAVTATARKIAVLFYNAVRHGMEYVDPGASFYETRYRKRMVDNLHRRAKAFGFVLHPAEPTPSVAVS

SEQ ID NO: 452902 - protein, 339 aa, unidentified
MQVYAGFDLHANNNYLGVVDANGKRLFRKKLPNDPEMILGALDPVRERLAGAVVESTFNWYWLVDLLMEAGYQVHLANPTAIQKYSGLKYSDDTNDAFWLAEMLRLGILPTGHIYPKEQRAVRDLLRKRGHLVRIRTSLILSLQSTIARNCGKRIKNNDIKRLRKDMIAPILEYNEDLALVGEVSKEMIDYLTRKIRTIELFIERKLEKKETYRYLHTMPGVGRVLALTISLETGDIRRFEKVGNYSSYCRKVPSEWTSNGKKKGKGNKKNGNKYLAWAFSEASECARRDNDTVRAYYDRKLNKTNRMTAHTALAHKLARAAYYIMRDHVPFDPEKLFA

SEQ ID NO: 452903 - protein, 345 aa, unidentified
MNKSTPAFTATVFCGIDVSAASLSVALIVPDHAVTQREFPNSSSGHKALVAWLSKHNAPVRVSLEATGIYSLDLALALDADESVEVAVLNPKLVNRFAQTLRRSKTDAIDALVLAEYSQRMPFVAWQRPGVNQLRLRILGRYIESLTTDLAEVKNRLHIAENTSTTPRALLADLKQAQAALERRLTKMRREPMKLIQTDELLRERFALLVSIPGIAEISALQILSELVLLPPGLTVRQWVAFSGLDPVHQVSGTSVHKPPRISRAGNRHLRRALYMPTLSAVRFDPYLRVFYRALRQRHKTGLQALMAVARKLLHAIYGIFKSGRPYDGRKLFPQIQLAVETIAG

SEQ ID NO: 452904 - protein, 345 aa, unidentified
MELHTIGIDLGKTVFHLVGLNLRGEVVVRKKFSRTQLLRFTANVHVKLIGMEACGGAHFLGRALREQGHEVRLIPAQYVKPYVKTNKSDYIDAEAIAEAVARPTMRFVPIKTDDQLDLQSLHRVRERWVMRRTAVINQIRGLLLERGITLRKGRCYVGAALPGILEDADAKLSGALRMLLAQLKLELDHLDMRIDEADALMKKTVRENEACQRLVAIPGIGPVTATALIAAIGNGAAFHKGREFAAWMGVVPREHSTGGQQKLLGISKRGNSYLRRLFVQGARAVLQQRTKQSSGLSAWLAQLTSRTHRNVAAVALANKLARIAWAVLAKNEPYRPSVGADVAAA

SEQ ID NO: 452905 - protein, 469 aa, unidentified
MHFHRIGGIVNDYFLGVDASKGYSDFVMLDGKKQIVIENFQLDDTFEGHSQLYELLRRFNQDYPQATIYAAVESTGGYENNWFQSLLNFQGSLPIKTAHLNPLGVSHNSKADLKRNVTDKISAQNVAEYMIAHPEKVSYQHQDSLASLRKQWGFITMLTKQCTQLLNQLESLVYNANPEILAYCKDRTPQWVLKLLTRYPTARRLSRAKVNSLARIPYVSTERAKELIATAKKSVGSANDKVTEQLIVSTVKQILHLKKLIDTQTEILANQCQIPEVELLKTFTGIGDYSAIGLMLQIQTVERFLTSKKLSSFFGIHPEYKKSGDGTYKYRMSKKGRKEGRRILFTVAMTAIQSNPLIREIYQQAVDRGMEKMAAMGLCMHKILRIIYGMLKHNKPFDPQIDLKNRQKKPPRQKKGGPDQNRRYQDFDSKAPVSRRQKMKRKERKQSQNAVDVKHGISEAPVPTDQLAN

SEQ ID NO: 452906 - protein, 419 aa, unidentified
MLYDSRVHMDRTFVEFLPSSAHLLGGVFMTYFIGIDIAKYKHDCFIMDQDGSVIRDSFSFPNDRSGFCLFLSVLDSLDPSYEKRIGFESTGHYGLNLKCFLEEHDISFMEINPILIKRFSSATTLRRTKTDKADAALIASYLTTVEYITYPIQSYHIHNLKSLTRSRDALVKLRSGQLVMITNVMDKIFPEFKPFFNKSLKSSTAMYLLRNYTVPSKMASMNSESYRKMSSKLKKTISYARFSKLRELAKNTVGREDPCLTFELNTYLDIYQSLDSKIKEMEAHIEEEFKKIHSHIQTIKGIGWMSAASIYSEYGGIENFQTPNQMLAYAGLDPSRSESGEHAYKGHMVKHGSSHLRYVLLNCAEMVILHNPVFYDYYRKKREEGKHHRVALSHVARKLVRIIFFLEKNNVDYDPKKMR

SEQ ID NO: 452907 - protein, 344 aa, unidentified
MDHFAGLDVSVKETSICIVDDTGRIVREVKVASEPEALLKVLGNPAYCFKRVGLEAGPLSQWLFSALAEAELPVVCVETRHMQAVLKAQINKTDRNDARGIAQMMRVGLYRPVHVKTLRSQKLRMLLTHRKLLQSKAIAIENDLRGTLRNFGLKVGMVGKVRFEARIQELVENIPDLAVLVESLLIVRRTLREQIVILHRRLLAIVRDDEVCRRLMTIPGVGPVVALTYRATVDVPARFRKSKSVGAVFGLTCARYQSGEIDWSGKISRCGDEMMRAMLYEAAQSMLRSKKWSWLKAWAMQIARRRGMKKAIVALARRLAVIMHRIWIDGTEFRWTREQAAAAV

SEQ ID NO: 452908 - protein, 366 aa, unidentified
MASISAFVGLDVHKDTISVAVAAAGSGRAEQLGTIPNDLTKLLGVLRRVADKKSIRCCYEAGPTGYGLVRALREKGFSCDVIAPSRIPKMAGDRIKTDRRDAERLARFLRSGDLTPINVPSEATEALRDLVRARADAKADERAARHRLAKFLLRHDYRFPGRTAWTKTHMEWIRSRRFEYAAQHAVLREYLQSVEQLGDRIARLDRDIATAIETSECRELVEALQALRGVRLLTAASIAAEIGDFRRFASARDFMSYLGLVPSEHSSGLSQRRGGITKTGNHHVRRLLVESSWSYRFKPRLSRAIRDRSKNAPSEVQTVAWKAQHRLNDRYRRLLVRSKRRQVVVTAIARELAGFVWQVGQLTANA

SEQ ID NO: 452909 - protein, 402 aa, unidentified
MIFVGDDWAEDHHDIHVMDADGTRLASRRLPEGLPGISRFHELVAAHVAEPSQVVIGIETDRGLWVQALGAAGYQVYAVNPLAVARYRDRHQVSGAKSDAGDAKLLADLVRTDRHNHRLMAGDSSEAEAIKVLARGHQNLIWARTRHTNALRSALREYYPAALEAFDDLADRDALAVLGRAPTPTEAAHLSLAKIRSALKRAGRQRNLDARAQEIAAALRTEQLAAPAAITAAFAATTRAAVAIIIELNRQISDLEISLAAHFETHPDADIYLSLPGLGDVLGARVLGEFGDDPNRYTDATSRKNYAGTSPLTIASGKKRAVLARHVRNRRLYDAIDQWAFCALSNSPGARAFYDHRRDAKQSHHQALRALGNRLVGILHGCLRHHTPYDEHTASAHRAAAA

SEQ ID NO: 452910 - protein, 445 aa, unidentified
MSTPATPSLPVLDPLATFVDVGSEQMHVSIAGGPPEVFGTVTAELHRLRDWLKERGVKSVAMEATGVYWLPLYGVLEAAGFEVVMVNGKYTRNLPGRKTDMKDCQWGGTLHAHGLLRGGFVPPAEIRRLQDYLRLRNDHVQSAAASVQHQQKALERMNVKLHDVISSLVGASGQKVIQAILAGEREPERLLALCDVQIQKKKADRVKESLRGTWAEEHLFALRQAVENWQHFQRQIAACDQQIEAVLRQINGADQSGPSSPSAKRPGVNAPQIDGLHGLLVQMCGGKDLTVLPAHTDYSLLQLIGEVGTDLGQWPTEKHFTAWLGVAPGTHQSGKRKGSVGRKRNRAGRLFCVMARSLARSKHIALGGFYRRMAGRRGGLVANIALARKLAVLFWRVMVKGVAYVEQGLAKYEEQVLETKHRALQRLAKQLGRVVLPNLTELNQT

SEQ ID NO: 452911 - protein, 411 aa, unidentified
MEAMIERCAGLDVHQETVVACVLFGPLDKKPKKSIETFRTTTKGLLELNDWLTSMQVTDVVMESTGVYWKPVWNVLESNFQLVLANAKHVKNVPGRKTDFKDAEWLAQLLRCGLIEGSFVPPEDIRDLRDLTRYRKKLVHNRTAEQNRIHKILQDANIKLTSVLSNIFGQSGRQILEAIINGEKIEEKDLQKMVHWRVKASLSEIAETVNGRIRRHHRDMLRYHWEHMIYIEQVIEELEEQIDQCLTPYRKEVELLDTIPGVNKDAAAVFVAELGVDMSVFKNSSKRMASWVGVSPGNNESAGKKNSSKTTKGNKALKTMAVECVLGTSGQNNRINAHRKRITKRQGKKKGTIASAHLILTIAFNILKTGEPYQELGANYMKKEQKNKELKMIEYLKRKGYNISPSDQKTA

SEQ ID NO: 452912 - protein, 320 aa, unidentified
MNQIPQEIGVDVSKDELVAATYGLESVVHLANRRAAIRRWLKQLPAGCRIGVEATSTYHLPLAELAHAAGHCVYVLNPRQVARYLGSLRQRGKTDLLDAQGIARFVRNETDQVHPFTPPSRAQRGIASLIRRRHLLVKQRAALRQSSRSEPWLQKAIQPLLTGYRCLLAELDEELETLLAQTPDLALQRQRLQSIAGIGPLVSLALSNRLSQTDYRRSDALVAAFGLDPRPRESGTYQGRRKLSKQGHPEDRRLIYLAAQGACRAGLWQTERTQWEARGLSKTAVNCIIARKLLRIAFAVWRSEKLFDPTLIGKQTCART

SEQ ID NO: 452913 - protein, 411 aa, unidentified
MENIFPCCAGLDVHKDSVEACVRRIEPNGRWHQQTRHWGTMTRDLLAMADWMAAQGVTQVAMESTGVFWKPIYNILESRFTMLLVNARHLKQVPGRKSDVRDCQWIAQLLQYGLLKGSFIPPRSQRELRDLTRHRTQLVEEKTRTANRIHKVLQDTNIKLSSVATDVLGVSGRAMLEALITGEEDPVKLAHLAQRKLRSKIPELEKALEGHLTEHHRFMLQLLWKQLAQQEELIAELDRKIEEQTRPFAAEIDRLDAVPGVDRRVAEVVLAEVGADMKPFSAHENLASWAGMCPGNEESAGKRRRRRITPGNPWLKPTLAQAAWAASHTKNSYLASQYRRLAGHRGRKRALIAVGHSILVIFYHMLKTGTSYTDLGGDFFDRLQPERLTRYYVKRLERLGHKVTLESRAAA

SEQ ID NO: 452914 - protein, 453 aa, unidentified
MPRRQTTRGRSTGALSTINPDAAGLDVGATFHVVAVAADRDEQPVRTFGTFSGELHRLADWLQEIGITTVAMESTGVYWIPVFEILEARGIEVLLVNARHVKHVPGRKSDVNDAQWLQQLHQYGLLRGSFRPRDGVTQLRAYLRHRERLVEYAAAHIQHMQKALMQMNVQVHHVVTDITGVTGMRIIRAIVSGIQAPEMLAEFRDARCAASPEIIRAALTGNYRAEHLFALRHALELYDVHQDKIAECDREIETVLRTLNAERPTPEAPLPAVRHAKSRNEPHFDARPALYTLLGADLTQIHGFGPYTILRLVAECGDDMSRWPTAKHFTSWLSLAPGNKVSGGRLLSSKTRRSANRAAVLLRIAAVNVGRTQTALGAFYRRLAARIGKAKAVTATARKLAVLFYNALRFGLAYADPGASYYEARYRQRVLDNLRRRAQQMGFTLLPTPASHG

SEQ ID NO: 452915 - protein, 324 aa, unidentified
MITNTSTVTVFVGIDVSKDHLDVHFLESAKHVVVENKTQAISKLIIKKISDPATTLVVLEATGGYESVVVKALQEHKIPVAIVNPRRVRDFARAIGNDAKTDSIDAKTIALYGKVTNPKPTPAKSEEFEKLDSLTTRRQQLLELINQESNRLQQTHDQEVREWIESSLESLKKQLKNVDDRLKACLKADPAVARIVEIVESVNGCGAVMACTAVARIPELGNVSNAAIAKLIGVAPINRDSGTFVGKRFIGGGRGDVRRVLYMATLVATRFNQRIKGYYQHLLAKGKQKKVALVACMRKLLTILNTLVKKNEIWKDEMSVPVNH

SEQ ID NO: 452916 - protein, 388 aa, unidentified
MMIYYIGIDISKYKHDFCIISNTGEVIVENLFFENNKKGFQELLEKLKPYNKSDVHIAFEATGHYSKNLELFLIDQGYSFMKMNPLVIHQFLKARSLRRTKTDKADSLAIANYLMSVPYKPNSDLLYNIFTLKSLCRAREQLIKERSKYQVLLTNQLDLTFPELKSFLNNRISATLLFILEKYTNIDHISLMRDYDSIKNVSRGKFSYAKFAKLKELAKNSIGHHDENTDLLISTYVSIIKTLNDKIDPIEKQISTIIKDLNPRMLTIPGLGEISAATILSEYGDISNFSSPNKMLAFAGLEPSIIQSGTIENDGKMVKHGSGHLRYSVMNAAMIILRYSPIFYDYYLKKRSEGKCHRVALSHVCKKLLRVIYTLEKNNIDFDPSLLK

SEQ ID NO: 452917 - protein, 352 aa, unidentified
MMIIGCDFHPRFQQISFLSEETGECGQRRLMHTAEAEQYYRSLSGAKVRVGIEATGSYGWFRRLLSELGHELVVGDATQIRASNPRRQKTDKRDAEHILGLLVQDRFPAIWQPPAENEQLRQLLLHRSRLVRLRTRVTNQLNGMAKNEGFVVAGGWSGKRRQAIEALPLPGWYAERRTDLLALLDRIEERIAPLNKAVSQAAASDTEACLLMTHPGVGPVVSLAYVLTIGNWQRFPRGKQVGSYLGLIPSEDSSSDKRRLGHISKQGNTLLRWLLVEAASTAQRYDASWHRQYVRLSMTKHHGVAKVAIAHKLAVRLYWMLRSGEDYRQVMERGSRVRQSECPGGHSRRPIE

SEQ ID NO: 452918 - protein, 318 aa, unidentified
MNSQNNQNEINVGVDTGKHQLDIHIRPLDISFTVSNDEKGIKEAMVVIGKHSPTRIIIEATGRLEHEFIAACSQKGLPFVVANPMHIKKFAGAIGQLAKTDRLDARLIAHYGEAIQPSLSQLKPEVMRNMSDLLSRRRQLITMQTMEKNRVQIMPKQITGLIMPILTAIKNQLDKVDQKLLKLIENCDEYKVKNDIIQSMPGVGKVVSFSLLSNMPELGYLTNKQAAALIGVAPINKESGVYQGQRKIHGGRHQVRTVMYMAMMSAMRCNPGFKAMYQRLVAAGKPKKAAIIACVRKMIIILNSMVRDSVSWNPEMGK

SEQ ID NO: 452919 - protein, 389 aa, unidentified
MKIYVGIDIAKLNHFAAAISSDGEILLEPFKFTNDADGFQLLVSKLESFDKNSIIIGLESTAHYGDNLVRYLVAEFYQVCVLNPIKTCQMRKNNVRKTKTDKVDTFVIAKTLMMQDDLRFITFFDLDMMDLKALGRFRQKTIKQRTRLKIQLTTYVDQVFPEIQYFFKSGLHQHAVYALLKEAPSPKEIASMHMTHLANLLKVNSHGHFTKEQAKELRILAQKSVGANDSAISIQITQTIQQIELLDSQLEKIEAEMTDIMKFNDSVIMTIPGIGYINGGMILGEIGDIHRFSNPNKLLAFAGLDPSVYQSGNFQAKTTRMSKRGSRVLRYALVNAAWNVVRNNATFKAYYDAKRAEGRSHYNALGHCAGKLVRVIWKMLTDEVEFNLE

SEQ ID NO: 452920 - protein, 343 aa, unidentified
MEAITTIGLDIAKSVFQVHGIDAEGNVILRRQLKRRYVLTFFQKLPPCLVGIEACASSHHWSRELQALGHTVRLMPPAYVKPYVKRHKNDATDAEAICEAVTRPNMRFVATKTPEQQSCLTLHRTRHLFIRQQTSVINAIRAHLAEFGIVAPVGRQGVEQLLGVAADTNDKRLPEVARAGVAALGAQLRMLKARILQFDRMIRAWHRSNEESRRLDDIPGVGPALATALVASVADPKAFRSGRDFSAWIGLVPKQNSSGGKDRLGNISKRGDRYLRSLFTTGALAVIRYAKIHGTKHRPWLTALLTRRPTKVAAIALANKIARMAWAMMAKGERYKEPAALAA

SEQ ID NO: 452921 - protein, 367 aa, unidentified
MEKHNTARKSSCGGKRTTGKLTIGLDLGDRSSRYCLLDEQGEVIEEGSLPTTRKGLDRVFGSAGRCRLAMEVGTHSPWVSRYLARLGYEVIVANARRVRLISESSRKDDKLDAKTLARLARIDPELLSPIRHRGVQAQADLMMIRARAVLVQTRTALINAARGLTKSYGERLPSCATYQMGKDQAELLSPAIRAALEPLLAEVETVTERIREYDKQLEQLCQTRYPETKLLKQVHGVGTLIALAFVLTVEDPHRFRKSRAVGCYVGLRPKRRQSGQSRPQLGISKEGDVYLRTLLVQGAHHVLGPFGKDSDLRRWGLKLAAQGGKNAKKRAVIAVARKLAVLLHKLWVSGETYEPLRLANRAQTVAA

SEQ ID NO: 452922 - protein, 311 aa, unidentified
MTDHTIGVDISKSHLDAFRLEDGAAQRFENSAAGIRALITWLGKAPVARIVFEPTGPYHRSFETALSGRFPLTKVNPLRARRFAEASGTRAKTDAVDARILAQMGAALALEPDRPVSESSRDLKDLQVARTGLVKERTRLRNRGQTHGHRVLKRHTKTRLQLVERQINELDTEIAKCIAENEAMARKREILRSIPGLGEVAAAAILTFLPELGTMGRKQVGSLAGLAPHPRESGLWKGKSYISGGRKPLRDALYMPALVAMRFNPDLKAKYTALRDAGKPAKVAIVALMRKLLETANALAKADRLWVERTP

SEQ ID NO: 452923 - protein, 401 aa, unidentified
MKVFIGVDPHKLSATIEVVDDRERLLATGRFGTDKAGYAAMRKTVVRWPERTWAVEGSNGAGRPLAQRLLADGEHVVDVPAKLSARARLFDTGHNRKTDAHDAHAVAVVAVRTLGLRVLSYDVELEALRMLVDRREELTRQRVQTVNRLHRLLAELTPGKAKKDLTALQAKAILASVRPRDLAGKTRRRLAAEQLSELMVVEKKVKTLTKELKTMVLARESTLMELRGVGPVVAARVLADVGDVARFADRNRFASWTGTAPIEASSGEIVRHRLSRAGNRRMNHMIHIAAISQIRLDTDGRAYYRRKLAAGKTRAEALRCLKRRISDALYRQVRHDARATTQAHDVDAGGHRGATLQSSAAGSHPHTGTSDQPLPGLAPTTLPAPAPARKTSATKALQPAS

SEQ ID NO: 452924 - protein, 327 aa, unidentified
MAKQKQPKEVTFEEVVERGCGLDIHKKEIVATVNGTGITQETRTFQSTTRSLTELKEWLLTLRVTHVAMESTGVYWKPVLNILETGGFTIMVVNARHIKYVPGHKTDKKDSAWICKLLRAGLLKGSFVPCRSQRDLRDLTRYRRKLVQQQAAEHNRMIRIFEDANLKLSSVFSNIRGKTCTAVIDAVIAGETNPEKLSELSTHWKLKSTKEEIALAVEGKFTEHHIFMIRAIRTSISNIEAEIDHLDKEIERRMQPIEERIRKLCEIPGMSTNSLRELLAEIGVDMDVFPTAEHLTSWAGLAPGNNESAGKKKVHTPTTETKLLRLS

SEQ ID NO: 452925 - protein, 332 aa, unidentified
MVTGGVDTHKDAHTAAVLDQTGRLLGHNQFPATQKGYAALLAWLRGHGSLVRVGVEGTGVYGAGLAAFFQQAGVELVEVDRPDRKTRRWQGKSDPVDAEAAARAAQAGRATGTPKTRGGRVDALRALRVARRSAVAARADAQRQIRALVVTAPSPLRTRLQSLPITALIAYCHTRRPDPTQTHDPAVATLLALRVLARRHQQLSTEIDELDALLEPLVARINPALLTLNGVATDVAGQLLVTAGDNPQRLSSEAAFAMLCGAAPLPASSGRTQRHRLNRGGDRQANAALYRIVCCRLRWDPRTRAYAQRRTTEGMSKKEIIRCLIRAREEIV

SEQ ID NO: 452926 - protein, 350 aa, unidentified
MNVKQYIGFDVHKKSISYCVKLADGTIVEEGKLRANRVSLREWAGKRLEAWQGAMEATLFSSWIYDTLKPFASKLEMGHPAMMKAISAAKKKSDKLDARKVADLLRCDLLPVCWVAPPEIRELRRMLRYRNLVVRQAVQMKNKISGLLMESGAEYSQRRLHGERYFAELMEKLEEIPESVKDLLKLSRGSLETFQATQQQLLKQLQKHRKLAKRVKLLRSIPAVGEVTALSWALEIGEPQRFASIADAVSYCGLTSALISSADKQQRGPISKQRNPHLQTVLIEAAKLAPRWNRQLAALHKKEKQRGDSNQATIAVARKLVAYLLAVDKSGKEFEVRTPLEPGSEIQPAA

SEQ ID NO: 452927 - protein, 361 aa, unidentified
MNYIFVGCDSHDKTLVNRIALNREAAERKGFAATGAGRRKMIEYLKERSRLAGGATVVVAYEASGNGFILCEELKKAGFECHVLAPTKIERSTKQRRNKNDDRDADRLLEILRGHYLAGNKIPSVWIPDPQTRDDREPVRGRQDLSQKQTAVKTQIQMLVKRHGFEKPAIAGNSWSKPYRRWLKSLTEDGHPGWGMQKALGSLLRQLEFLEKEVEQLDEAMTELGDTPRWKPIVQAMRKEKGVGLMTAMKYATDIGDFSRFRRGRQVGAFYGLVPSSHESGENDDRKGHITREGSPSGRQVLCQSTWSRVQHDQHEREVYLRLVDKNPKKKKIALVACMRRLTVKLWHVGLEAQVKLKAAV

SEQ ID NO: 452928 - protein, 375 aa, unidentified
MEHHSEAFVALDTAKLRNAVAIADAGRAGEVRYLGEIDNTEAETRKLVAKLASKHARLTFCYEAGPTGYGLYRLIKSIGHDCIVVAPSLIPSKPGDRVKTNRRDAVNLVKLLRAGELTAVWVPDERHEAMRDLVRARDAAVKDYRIKRQNVSSLLLRLGRHYPGKKTWGRAHINWLTGLKLEHREQRIAFEEMLLAVRQVRERIERLEQAMREAVAEWTLAPVIEAVQAMRGIDMVGAIAFLAELGDLSRFENPRQLMAYLGLTPSERSTGESVKRGGITKAGNTRARRLLIEAAWSYRFPPRVSKDMQARIGAAPRTAREIAWKAQMRLCGRFRALTRKGKRPTIVVTAIARELSAFIWAINREVVGSHAAANQ

SEQ ID NO: 452929 - protein, 341 aa, unidentified
MNVKTIGIDLAKEVFQVHGIDEHGKRLFNKQFKRAKMLSFFANIPPCLIGMEACASAHFWAGKLMSMGHNVKLMAPQFVKPYVKTNKHDAPDAEAICEAVTRPNMRFVPVKTPEQQAVLALHRSRQSFIKQQTAQANQIRGLLAEFGIVVPRGIQQLQLQLPEILEDADNSLPSLFRVQLSLLQHPMAYLFDVIATLDKQIEQCYRQNALCKRISKIPGIGPITATALIATIGNASNFENSRQLAAWSGLVPRQHSSGGKQLLPGISKRGDIYLRTLLIHGARAVLQSVKRKQDVVSGWASRLLARRNNNIASVALANKNARIVWALLAKDQEYCAPIMNV

SEQ ID NO: 452930 - protein, 411 aa, unidentified
MNPLYRRIAGLDVHRMLYVLTVLIELDDGTLEKHQRSFGGFKRDRRALVAWLLELRVGLVVMESTGIYWKSIYAALEQAGIPAHVVNARHARNVPGRKTDISDSEWLAQLGRFGLVRPSFIPPQDLRELRLVARYREKLAQILAGEKNRLHKILDDAGIKLGAVVADIGGVSAQAMIEGLIAGMPVEELPGLAKGVLRNKREILEQALDGELSPRHRFVLQHIQSHIHALETELKDLDRYLIDAMAPYADYWHLLQTLPGLDQIAAALILVEIGTDLGGFLDAAHFASWAGLCPGNHESAGKRKSGKTCKGNHAIRYLLCEAANAARRTNSALKSKYQSLVGRKGHKKAIIAVAHQMIRIIFVLFTRRVPYRDSGIDYQALVVAKNAPRWIQALKKYGFWPTPNPVPAPAQ

SEQ ID NO: 452931 - protein, 435 aa, unidentified
MHHRRPSQKGGSGLERDYRIYVGIDWATQAHQACVLDSAGQILAERSFAHAGNAIAAFAQWLNELAGGHPEQVAIAIEVPRGAVVETLVERGFHVFAINPKQLDRFRDRYTVAGAKDDRRDAFVLGDSLRTDQPCFRRVRLDNPLVIQLRELSRVDEDLMREGNQLTNRLRELLHRFYAQTLPLCPAADEPWLWALLELAPSPSVGRRLRPQRVQRLLREHRIRRLRAEEVVAALRAPALSVAPGVVEAATEHIALLLPRLRLVHTQRQRCGARIEALLDDLQAAQDEDEEQGEHRDVEILRSLPGVGRVVAATVLAEASGALADRDYHGLRALAGIAPITKHSGKHRTVLMRHACNGRLRNALYHWARVAAMCDLPSKTYYAALRRRGHTHGRALRSIADRLLRILIAMLNSGTLFDSSKACPPQLRVLSEKVA

SEQ ID NO: 452932 - protein, 339 aa, unidentified
MGILYVGIDLAKNVFAVHGVDEHGKAVLVRPSVARAKLHELIAALPPCIVGMEACSGAHHWARLFLQHGHTVRLMAPKFVAPYRLSGKQGKNDAADAMAICEAVQRPNMRFVPVKSQDEQARLCVHRVRQGLVEQRTATINRIRGLLAEFGIVLPQRAATVRREATVHLEDLPGWANTAIGDLLSDVHRLDERIAEYDHHVLQMAHDDQRSRALMQLSGIGNTTASALVSTIGNAHDFKNGRQLAAWLGLVPGQYSSGGKTRLGSITKAGDRYLRTLLVLGARAVLAAARTKDDRLSRWAIALEERRGYWKAVVAIAAKNARMAWAVLAKGENFKLLEA

SEQ ID NO: 452933 - protein, 416 aa, unidentified
MQVLYPRCCGLDVHKRSITGCCLWFNNTRQLQEETRQFGTHTTELRRLATWLREHEVKNVVMEATGSYWRPVWNLLEMEGFEQTLANPQHMKAVPGRKTDKKDARWSADLFQHGLIAPSFVPTQQMRHLRDLTRIRTKVMQDHTRVVNRIEAVLEDTNIKLSSVVSDIMGVSAQAMLQGLLNGERNTAKLAELAQGRMRPKVPQLKEALEGNLQPHHEFVLKRLFMQSRFLQQQQRAVDREIEHRLDDEMRQAIALWDTIPGVDENIATTMAAEMGIRTEQFADGPHLASWTAMCPGNHESAGKRKSGKTRKGNRWLRGALTQAAWAASHTKGTYLSGLFRRISARRGAKRAIVAVGHSILISAFYMWKNKQPYKELGDAYLDKIKPEKTANRLLKRLAKLGYVVTVTQVPIPQAE

SEQ ID NO: 452934 - protein, 368 aa, unidentified
MEVQHERCAGLDLAKDSLVACARIQSRRKVTRHIETFGTSTRELLRLSEWLQQHRCTHALMEATGVYWDAVWQILHGAVETVVANAAHVKAVPGRKTDVCDSQWLADLLAHGLVRASFVPPPPIQQLRDLTRTRAQRVREKRRHVQRIHKTLERANIKLAAVLTDIMGQSGRAILEAMIAGESDPKVLVGLVNYRVHADRQKILDALQGRLTDHHRFLLRMHLAHVNQLDADIELLDLKTDQQLEPLRTQLQLLKTIPGVDTVAAHVLLAEIGADMSRFPSAGHLVSWAGLCPRNEKSAGKSFNTRICIGNPWLKSTLVQSARAGARTRSSYLRAQYHRLSARRGKNKATVAVAASTTRACQAPRIRG

SEQ ID NO: 452935 - protein, 415 aa, unidentified
MTSNPLIAGVDIHRKTNTYCLMTQDGREVVPRFTLGNNRPGTQALIEKVRQIMETDGFTELRLAAEATGWYWFHLFESLRNDPDLQAWPNELFLLNPRLTANFKKSYVDLDKSDPIDAYVIADRLRWGRDITTPFDYDEKLLALRFLTRYRYHVVHQLASEKAYCTAILYLKASEYSNDDKQAFCNLFGAASRAVLQEFVSMEEVAAMPFDELVAWLDDQGKHRFPNPAENAKRLQRIASDSYPLSEALQPAVHLVVSLSLKNISNLEALSKRLETAIAEQMETIPNTLETIPGFGPILAAGIIAEIGGVERFDCNQAKVAKFAGFKWRKSGSAEFQSEESHLTRTGNPYLRYYFCEAAFSVQRCDSEYGAFFQRKFKEARTHRHKRATVLTARKLVRLVVRLLATNQPYQPRRL

SEQ ID NO: 452936 - protein, 330 aa, unidentified
MNSICLSTDSVAAALRVLGLDVAKASVQAELRTTGKRVRFGFANNAKGFAQLARILNQHNVPKVWAGLEATGPYSHAFALWLHGQGHRVSLLNPRRVKQYARSAGNRNKTDLLDAGLIADFICAIQPAPWQPPLLEVAQLQALVRRREELSLMLQAEKNRLEGVAPNVRSSLERIITTLSAEKTRLEKLITQQIRSHQQLSRDHQLLCTIKGIGSLTAAILLAEMARPGQVERARQAAAHAGLAPRREQSGTSVRRNRGLGKEGNRHLRKALYMPALVAIKYNAPLRYFASRLRAAGKPKMSVICAVMRKLIHIAFGVLKHQKPFNPSLA

SEQ ID NO: 452937 - protein, 437 aa, unidentified
MINPHAAGVDLGAREHWVAVPADRDPQPVRRFGTFTEDLEALAQWLKDCGITSVAMEATGVYWIPLFQLLERQGLAVLLVNARQIKNVSGRKSDVLDCQWIQRLHTYGLLGGSFRPADPYCVLRSYLRYRDELVAGRSTQTQHMQKALQQMNLQLTQVLSDIAGVSGQAIITAILAGERSPLKLAGLIDRRVKASQKEVAKALVGDYRAEHLFQLKIAFDLYQTYERHIATCEAVLTEELARLPDQGKAPAQPLPPQSGHKGVPEPLRLALRQKLGVDLTAVEGFGPQVALTVLSEVGPDLSRFKTEKHFTSWLGLCPDNRISGGKVLSCRTRRVVNRLTDVLRMAATTLERSQTALGAYHRRMKAKLGGAAGITATAHKLARILYALLSHGEAYVRQGMDDYEQKHRQRKLKHLQSTAKSFGFQLIEIQTVPESVS

SEQ ID NO: 452938 - protein, 410 aa, unidentified
MNVIYERCCGMDVHKNTIVACVLTGKKMEIRSFSTMTPSLLSLVDWLKSVNCQCVAMEATGSYWKPIYNLLEMEGIPALVVNAQHIKAVPGRKTDVKDSEWICDLLRHGLLNGSFIPKREQRELKELVRYRRSMVQERARELNRIQKVLEGANIKLASVISEINGKSSRQMLDMLVAGCNDVQAIADKACRQMRKKIPQIEEALQGFMGEHQRVMLRLMLKHIDILDAQILSLDQEIQKKMIPVNEQVCLVDSIPGVGERSAQVIIAEIGINMNQFPSAAHLASWAGLCPGNNESAGKRKSGKTRKGSDILKATLIECAKVSGHLKNTYFSAQYSRIAARRGKNRATVAVAHTILTIAYQMLKANVPYQELGPNFFEQRRKNEIVKKSVKRLEALGYTVAIEQQIKASTA

SEQ ID NO: 452939 - protein, 341 aa, unidentified
MQKNKEYVGVDVSKESLDMVVYSTGETRSFGNDDAGIAKATTWLKQVNSAIIVMEATGGMEVSLYIALQEANLPVAVINPRQIRDFAKSMGILAKTDKVDAKVLARYAATIQPEARPLPDEEARQVNTLVTRRCQLVEMITAESNRATIIRNKTMKQRIHAHIDWLKQELAGIDKDISQMIKENPVWHAKDELLQSVPGVGPVLSATLIAELSELGILNRKKIAALVGVAPFNRDSGKHRGERSIWGGRCRVRQHLYMATLSAVRFNPTIRIFYERLLANGKEKKVALTACMHKLLIILNVMLKHNSYWSCNYAIFNNTCIPDAKTVAFSYTSCNKLLPCP

SEQ ID NO: 452940 - protein, 325 aa, unidentified
MAYIGIDVSKQKLDCLWVRDLSKGKVKTKVFPNRHQDYPGLLDWLVRQTGEDISNLHVYLEATSIYHEPLAYWLHDVGVTVYVLNPAQVRHHAKGMGVRSKTDRKDSMMLARYGIERNPQPWQPDPTEVRELKRLINRLEAVEDDLQRERNRLEKAEFNTDTQASESISYMLVALEREVQRLQQAIADHFEAHPPLKQDRKLLESIPGIGNVLSARLVATLRSRDFRSARQAAAFLGLVPILKESGSSVKLRSHLSKTGAPGIRRKLYMAAVVSTRCNPDISEQFARLKARGKPTLSALGAAMRKLVHIAFGVLKSQSEYRPQGT

SEQ ID NO: 452941 - protein, 311 aa, unidentified
MQSSVYVGIDVSQEYLDVAVSGKKLVQRVRNDEKALELLGQQLLGLHPERVVMEASGGFERVPQTALLSAGLPVAVVNPRQVRDFARSLGRLAKTDAIDARVLAYFAEVLRPEPSHLSGEVEQQLRALELRRRQLVEMIVAERNRLRSAPRTAGRIEEHLRWLEEEVKRIEKELQELIESDPEMQAKAVILQSVPGIGPVLAVTFLSGLPELGLLNRKQIAALVGVAPFNWDSGKLRGKRAIWGGRAHIRRTLYMAALVATRCNSVIRLLYQRLCAAGKPKKVALVAAMRKLLITLNSMIKNKSKWLITTP

SEQ ID NO: 452942 - protein, 316 aa, unidentified
MTITTVGIDLAKNVFAVHCVDQNGKAVLVKPKVSRAALSELIAGLPPCVIGMEACSGAHYWARLFRQYGHDVRLMAPKFVSPYRMAGKTGKNDAADAIAICEAVQRPHMRFVPVKDESQQAMQCLHRTRQGFIQERTATYNRLRGLVSEFGVIAPQSTDALRHAVSDQKETLPVQVRLCIDDLLAHVTNIEEKIAEYDRVLSRVAKTDHRSQQLMELKGIGPTTASALVASIGNAHDFKNGRQLAAWLGLTPSQYSSGGKSKLGRITKAGDAYLRTLLVQGARSVMVGAENRTDSFSRWVCSLIGRRGYWRALLQS

SEQ ID NO: 452943 - protein, 342 aa, unidentified
MQVTTIGLDIAKNVFQVHGIDAAEKVVVRKQLRRRQVLEFFKALPPCLVGMEACATAHYWARELTKLGHQVRLMPAKDVKAYVKRNKNDAADAEAICEAVRRPTMRFVQIKSTEQQGRLMLHRARDLLMRQRTQVINAMRAHLAELGIVAAQGRDGIKELLKIIASEADARLPVDAHTSLVVLAAELQAMQTLIGSIEKRIMVQHRLSEASKRLKSIPGIGLIGATAIAATVPDPKVFGSGRDFAAWIGLVPREDSTGGKQKLGPISKRGDRYLRRILVVGACAVLRYARHKPEKYPWLTQLLARKPFKVVAVALANKMARIAWALLAKGGTYRVPALAAAA

SEQ ID NO: 452944 - protein, 472 aa, unidentified
MKSKSSRKRNPVDPVAEEIPDAEHELVIERVAAIDVAKASGKVCVRLPGQTGRRFSRVWDVPARTGAVSELAEQLIESGVEKVTVESTSDYWRIWYYLLEAAGLDVQLVNARDVKNVPGRPKTDKLDAVWLAKLTEKGLLRPSFVPPAPIRQLRDYTRLRVDLTRERTRYWQRLEKLLEDALIKISAVASTLDTLSTRDMIEALIAGERDPGRLADLARGKMKAKRSELIAALDGRFDDHHRELARMLLDQIDTLTAQIAALTSRIEQLLAAMPDTRSRGDGGTGGDPDRPSTGHGVEPETAARFTDATLLTPVERLDEITGIGELNAQVVLAEVGLDMTRFPTPAHLVSWAKLCPRTIQSGPVTRGGKTGRGNPYLKGALGEAAAAAARTDTFLGERYRRIVKRRGKLKALVAVARAILVVIWHLLANPEARFRDLGPDYHTQRIHTERKLRNHIAQLTAMGYRVTLEPAA

SEQ ID NO: 452945 - protein, 340 aa, unidentified
MEITTLGIDLAKSVFQLHGVDACDAVVLQKKLRRGAVLDFLDKIEPCLIGMEACPSSHFWAREIAALGHEVRLIPPAYVKPYVKRQKNDAADAEAICEAVTRPNMRFVPAKTEEQQSVLVLHRSRDLLMRQRTMILNAIRAQLAELGIIAAQGARKVTELLRRLNGPDSFGLPALARSALLALGAQLEHIAEAIRNMERQLMTWHRQNAASQRLETIPGVGILTATALAASVPDPSVFKSGRQFAAWLGLVPRQHSSGGKERLGRVSKMGNGYLRRLLVVGATSVTRRAETNHTRTGAWVRAMLERKPTRLVTVAIANKTARTAWALLAKGETYTALPVS

SEQ ID NO: 452946 - protein, 423 aa, unidentified
MENTAARKRKQVPEGYLIIGVDPHKNRHAAVAITQDFTTRDKFKFDNTREGLETMLHRARIEMVKSACRGVMFAIETGGHYWRNVAYFLDEQGIPFRFINQFTLKRRREGKDLNHRKNDYRDSEVAAQLLCTGEFTESTIPQGVYAELRAAHNAYRRLVKERTRITNLIKGLLDGLFPEFTHVFKDPCGLTALSVLSTCPIPSVIAGMTEDEFVAAVEVRHHGRLMRRKLRALHYKAKASIGIVAGARPVSSEISFLVEKLELIRRHIRIIEGTLVRLVDETEEGKYLLSIRGLHYIAVGGLLAELGCFKSYHSAKQMIKMAGSNPTESESAGKRGTHTPMSKQGRPVLRYCAWTSVIPMLRLNPDFRAWAKRLRERPAHANPLGGREIVGAALNRLLRLAFALVKNQTYYQVSKPELTLVAV

SEQ ID NO: 452947 - protein, 369 aa, unidentified
MNTVKFIGMDVHKNSITIAIAEEGSRYSARVYGTINNDLDALNKFCRKMVSTANELYFVYEAGPCGYGIYRHLTGKGFNCIVAAPSMIPKKSGERIKNDTRDAKTLARLHRAGELTAVYVPNTQDEAMRDLSRAREDAVIAGRKAKQRLSAFLLRHGMIYSGKTKWSKAHFKWISDIGMPHPAQQIAFQEYIDAVHENLDRVKRLTEQIRQILPEWRLAPIVDALQAARGVSLIVAVTILSELGDLNRFEHPGQLMAYLGLVPSEHSSGDNIKRGGITKTGNGHARKVLIEAAWTYRMQPRVSRALLKRQENLPEPVRQIAWEAQLRLCARYRRLMAKGKPKQVVVTAIARELSAFLWAIAKQIGPAVA

SEQ ID NO: 452948 - protein, 344 aa, unidentified
MGEVSTIGLDIAKSVFQVHGVDSSGAVVIRKRVTRLKLLEYFAALPPCLVGIEACPSAHYWGRELQALGHTVRLMPPSYVKAYLKRSKNDANDAAAICEAVTRPSMRFVPIKTKEQQTALMLHRTRQLLVRQRTMLSNALRGHLAELGIVSAKGRHGIGELLRIIADGADKRIAPATRAILDVMARQYSAIGAEIRSIDKSILAWHRSCEASRRLEEIPGIGPIVATALVAEVGDWQAFRSGRNLAAWIGLVPKQHTSGGKDRLGSITKQGNRYLRWLLVAGAMAVIRYAQKHGTERRPWLARLMERRPTMIAAVALANKIARMAWAVMVRGERYKEPTLLMAA

SEQ ID NO: 452949 - protein, 403 aa, unidentified
MKPNTEVRLLPQVSKACGLDMHKDKIVCFISNQDGTEQHMEEFGTFSNDLFKIRDTLRRHQVTHALMESTGIYWVSLYGILCDAQINTTVANPQHIKQIPKRKTDRKDAKWLCTLILHGLARHSFVPGPTQQALRDLCRNRLFYKQGQTKIKNRIIKILERANIKIRSVVSDISLKTSMEIIRLLAAGTTDIDQLAACCRGRLKAKKEQMKQALVGTLGINERMMLKMLLADIDHYESQVQQIEKQIAGLVSQQYKEVADCLVTISGIGPQSAQVIISEIGDNMDFFPTADHLTSWCGLAPGNNESAGKHRSTSVKKGNKYLRVAMVTVAWGAVRTKDSYWKALFEQLRKRMKAQKAIIAVARRLLKIIYKTIKTKTTYNEKGFNHFLDLRQRNLERQKAKLA

SEQ ID NO: 452950 - protein, 389 aa, unidentified
MKIYVGIDIAKLNHFAAAISSDGEIILEPFKFTNDADGFQLLVSKLESFDKNSIIIGLESTAHYGDNLVRYLVAEFYQVCVLNPIKTCQMRKNNIRKTKTDKVDTFVIAKTLMMQDDLRFVSFYDLDMMDLKALGRFRQKTIKQRTRLKIQLTTYVDQVFPEIQYFFKSGLHQNAVYALLKEAPSPKEIASMHMTHLANLLKVNSHGHFTKELAKELRVLAQKSVGANDSSISIQITQTIQQIELLDSQLEKIEAEMTDIMRFNDSVIMTIPGIGYINGGMILGEIGDIHRFSNPNKLLAFAGLDPSVYQSGNFQAKTTRMSKRGSRVLRYALVNAAWNVVRNNATFKAYYDAKRAEGRSHYNALGHCAGKLVRVIWKMLTDEVEFNLE

SEQ ID NO: 452951 - protein, 428 aa, unidentified
MNSQKATRRQQFCQIQSEITGSDQYQVVGIDVAKDKHHAFMGTATGKTLLKKLVFENDIDGFRKLLQRCEAARVQNGLAKIVLGLEPTGNYHKPLANHLIANGYHVVLTTGKAVKDNRRLLDGRWDKNDTKDAANVADLVSRGRCLYYDAGCAQINQLRDLLSLRRRLKKEEHSVKMRIRNSLLAKYFPELDRFYSACESESLAIVRWCLDPATLAGLDFDRFFAMVTRSRRGIAQKLRLQKIHQLAAQSVGCPMGPAAEFEAALLVQKLKQVREQIKQVENLMQQVARDFDQYQILLSIPGFGPYVAAVVLAAIADPLRFESSNQVIKLAGYDLCANRSGKSSDDALPVISKNGNAQLRYALYQAAFIASVHNPHFSAYFTHVLRGRQRERGIKTKMRVKLAAKMLIIAWTLMKKKEPFNPDYLHIE

SEQ ID NO: 452952 - protein, 449 aa, unidentified
MSYRIAGIDVHKKMLAVVVSDVEIDSEYQFERRKFSSNPEQLRLLAAWLLEQEAEEVVMESTAQYWRPVWEVLERYWKPICEKREGTRRKSGTLHLAQALSNRGRRGRKRDFPDAERLVKRLVAQELTLSFVPDAEQRLWRTVTRKKYQLRCDRIRLQNQLESLLEEAHIKLSSLVSDLLGLSAQRMLKAIADGETNLATLAALADKRLRATPEQLCDALGACTQLNPVYRRLLKMALEELRLIDEQIGRLDQEMASLLSKHQDAVQRLAEVPGLGVDSAQQIIAEVGPTAATFPSEKCLSSWVGACPGDDETAGVNYSHRSPKGNRHMRRLLNQAANAAARTKGSIFEIVYRRSVPRLGHNQAIGAIAHRQCRLIWLILHQGVRYEERGPAVTKRSKQLRTWKMIRQLRSLGYRIEPPNPPPASSYVDGSQAHLLVTQNLSDAEHHSC

SEQ ID NO: 452953 - protein, 354 aa, unidentified
MKFYRTTTEYNCGIDLHSRQMYMCVMDKEGNKLVHTNVTGNDFDYFLSRVQPYRGDLTVCCECTFNWYWLADACAAAEIEFVLAHALYVKAIHGGKNKNDRIDSEKLAHLLRSNLIPPAYVYPAAKRSVRDLMRRRTTFVWKRTELLHHLTCMPLVQGQQPVKKCQHRVRERWFEQLRPRFDEPMRKISAEADMYLIKEYDKIIDRLERVITKETKKEQGRDFAVLKTIPGIGDILALTILYEMDTVDRFPRVQDFCSYCRLVKGSVASAGKIKGLRGAKLGNPYLRWAFGEAAVIGKRSNPDLNRYGKKLEAHSPKPVVNAILANKLARSVYFMLKHGKGFDPKLFSKGLSRG

SEQ ID NO: 452954 - protein, 421 aa, unidentified
MRKADTRKVKAVGDDTLIVAVDIGMEMNRGYCTTPDGRSSKTFKFDNTRAGMDTLWDMITINKNRFKCNEVIVGYESTGPYGEPMLHYLMKKPVRIVQVNPMHTKKVKEINDNSPLKTDDKDPRVIADIIRWGRALSIVIPEGDAAYLRRLNNSRERHVRERMALVNQLQQLVFLLFPEFRTVIKDIKCKTPLYLLRKYPTPETLSVLDKDVLGEEMRKRSRGKLKEHHADMLINLARNTVGIREGAAGLSMDMRHILIQLEMLTNLIAELESEMEIALGRIPYSPKLLSIKGLGVVSVAGLIGEIGDFKKFKTQSEIMKLAGLDLYEISSGKMKGQRRISKRGRSLIRKILYYTAIQTIRKDGILHDYYTRLTDGGMKRMKALIAVSRKLLGIIYAIVRDDSEYSANFESMKRQVIKKAA

SEQ ID NO: 452955 - protein, 367 aa, unidentified
MLYLGIDQHKRQLTVNLRSEDGTVILKRQVSTQWEKVRAFFADLAEKARPDGGFLAILEVCGMNPWLLGMLKEYGCREIVVTQPTERSKQKTDRRDAGVLSHLLWVHRQQFLDGKHPLGLRRVQPPTPQEADDRQITALRARLTKKRTAVLNGIHKILRKHNLEQDCPTKVFQTQKVRRWLSEIALPALDRLEMNLLLPQWEMFDRQLEVVEARIAERAAADEQAKLLQSMPGMGHYSALAIASRIGDIGRFKRPDSLANYFGLTPGCRNSGEATQRLGSITKQGSKIVRYLLGQAVIKVLRFDGAMRAWFKRIKKRRGSKIARVAVMRRMVTIIWHMLKRKQKYHYDSPIKKHREFEAFDGKSPVA

SEQ ID NO: 452956 - protein, 338 aa, unidentified
MNYVGIDHHRQYSHMTMMDQEGQVLRSGRVPNLRSEIERFLEGGEAMEAILETGRSSYTMVDVLEEMGVAVKIAHPHEVKAIARAKIKTDKRDSEVLAHLLRMNMVPEVYRRSKENRQAQRVLRQRSYYVSAMTALKNRVYAFLAQQREELREAVARESNLFSTKGQKALLELDLASGEKRLLEALLKTYRHLETRIGESTELVEKLYEKSREAQLVQTIPGFGKFLSVLVTVEIADLTRFADAAHLHAYAGVIPSTHSSGDRTHHGKIIKAGNRWLRWAAVEAVWPAIRADFDLRLFYQRLARGKGANKAKVATARRLLTIIYKVLKEGRNYIAYQR

SEQ ID NO: 452957 - protein, 340 aa, unidentified
MNTTTYGLDVAKHVFHLYWVEAESGEIVSRRFGKQALIEFLCKRKPGQVALEACGSAHWWARRIASMGHQVKLLHAKFVRPFVQTNKTDAADAKAIWTAAQQPAMRTVEPKTEDQQAILSLHRMRALLVKMRTMQVNQLRGLLYEYGTCFKTGRRAGLAEIRQHLDQVEQALPGCLFGPIRDQLSRIDDLDKQIADLERQLTGCQKRQADCQAIAAIPGIGMLTATALVATVGDAKAFRSGRELAAFLGLVPRQTGTGGKVQLGGISKRGDVYLRTLLIHGARTVLFRSKEKGVWCDRLRQRRPTNVAAVAIANKMVRTAWALLVHRTAFERNHVSVKPA

SEQ ID NO: 452958 - protein, 358 aa, unidentified
MHLANQVDFVVGVDTHKNSHTLGLINRSGVEIADITLTTDAFGYRKMAAWVRDQTTAADRRCWAIEGTGSFGAGLTTFLLEHGEWVVEIDRPSRPSRRNGAKSDTLDAYRAAREALTREHLAQPRRRGTREAIRVLLTTREGAVRARSRALCHLHALIVNAPAQLRDQLRRDLVEIQVERCARLRIMAEHSVEHRATVRALRATARRIQTLTAEADDLEAELELLVADTAPELLAEPGVGSISAAQILNAWSHPGRIRSEAAFAMLSGTAPIPASSGQTVRYRLNRGGDRQLNRALHTIVLSRMRFHPETKAYVARRLAEGRTPREIRRCLKRYVARGLFRILEANNGLKLATAPKVA

SEQ ID NO: 452959 - protein, 411 aa, unidentified
MHNRQNYLYVGVDLHKEHHTAVIINCWQEKLGEIQFENKPSAFSKFLLEVETYVSDGLSVVFGLEDVGGYGRALAKYLVDHEQVVKEVNPALSFLERKSQVMIQKNDSWDAECVARILINKLNQLPDAKPNDLFWSIQQLVSRRNALVKAQSALKNQLHIQLNHHYPSYKKFFSELDGKTALAFWQQYPSPSCLEGANIKQLTAFLLDVSNNTCSVKKASDILKLVKEDGHTMKEYQETRDFLVRSIVREIEFKKKEMKYIERELKQLVNLLDYQLETMPGIELVTASALIAEIGDVRRFSNANKLARFAGIAPVYFGSGGKGKTHKSKQGNRALHALFYNLAVQQVQVAKGSKMPRNPVFHAYYQKKLKEGKTKGQALVCIMRRLVNIVYGMMKYKTAYELPVVEEKEVV

SEQ ID NO: 452960 - protein, 378 aa, unidentified
MDQTTREVEYTTEPSLYLAFELGKAKWKLALSTGLGQNPRLRTVDAGDLTALEEEIRQAKRRFHLPELVVVRSCYEAGRDGFWLHRYLVQKRVQNLVVDSSSIEVNRRARRAKTDRLDATKLLTMLIRYHSGEEKVWSVVQVPTVEAEDMRHLHRQLSSLQVARTRHICRIGGLLASQGVNVPIHADFLSTLPSVRLWDGSPLPPGVRARVEREHAALQYVRQQIKELVVERDKLIETSDEPSVQKVRQLMKLVALGPNSPWLFVMEFFAWRQFRNRREVGGLAGLTPTPYQSGGESREQGISKAGNRPVRAMAIEIAWCWLRYQPDSELARWYYEHFGQGGKRMRKVGIVALARKLLVALWRYLETGEIPAGAQLKP

SEQ ID NO: 452961 - protein, 359 aa, unidentified
MLHTLTTALPKLYIGLDIHKKSWAVHFRTDIFDHRGFNMPALPEKLVEYVSTHFPGHQVYITYESGCCGFSAARFFEQQAWDVTVVNAADIPRIQKQQFQKTDRIDCRLLCKSLQQQQLKAIHIPTEEQDQLRSLVRHRNSTVKQIRQVKLHIKSMLLYQGIQIPELFDNPNWSKAFLQWLNDIPWQYTPASYSMRSKLRILLALHTEYLNAANELRSYCRRHHNKDYYLLKSIPGIGGYLASALIGELGNMRRFQNEDQFSAYIGMIPAMRNSGSTESTLGITPRSKSLIRSYLIEAAWVAIRRDPEMQAYYRKHFGKNIKNVIVKVAHKLVKRILSVIKNERPYQVSFKNLSALKLN

SEQ ID NO: 452962 - protein, 360 aa, unidentified
MQTQITAVPKLYIGMDIHKKSWSVHFRTDLFDHRGYTMPPEPKQLAEYVEGNFPNHEVYITYESGCCGFSAARYFKNLDWHTVVVNAADIPKMNKQNYQKTDRIDCRNLSKQLQAGQLRAIHIPEESQDHLRSLVRHRNSIVRQLRQVKLQIKGMLLYLGIKIPVQYDNPNWSKEFQQWLKNIEWKNITATYSMHSKLRILEVLHTEYLNAANQLRSYCRKYYKKDYYLLKSIPGIGGYLAAALLGELGDIRRFENEKQFSSYIGMIPAMRNSGSSESTLGVTPRSKSLVRSYLIEAAWVTIRRDTEMQAYYRKHFGKNVKNVIVKVAHKLVKRIRSVIKNERPYTVNYTHQTQASLKLV

SEQ ID NO: 452963 - protein, 363 aa, unidentified
MMTTTTIPTTILAIDLAKANSLFCWHDVVKGTHRLRNIASTPKAFHDALLQQQVERVIIEVCDMAGWIKDLCEGLAIPLQIANGNTEGWRWRNVKRKTDKDDCLKLISLSLTNQLPTVTLPDRPTRQWKSLILYRQKLIERRTRIKNKIHAILVSEGRAMSGGRAAWSESSLAAVSKLAKPLGDCAQDELWRGQLHMELSGLDDLDHAVGQLDQRLDALGQADARVIRLQTIPGVGPRLSELVVAVIDDPGRFKNVRQVSAYAGLVPRRYQSGTMDRSGRISKAGCGKLRKLLMEIAWGMLRHNDHGKGVFKRISKGQKTRRKQAAVALARRVLGWCWAMLRDGTDWRDPAAAGGAAPSPILT

SEQ ID NO: 452964 - protein, 346 aa, unidentified
MSETALHWVGMDVAAETFDAALARPGLRADAETIRRLPAKTFARTPEGVQACVAWLREGLGKADPLPARAVMEATGRYSIELTAMLCKACPELRPAIANPQQTASHRDSLGLRNKTDRLDARAMAFYGLERRPEPHEPLSPQQAELRGLSRSRDGLMTSQTAHANQLAQTPPSAVARKSLKRVIAHLEREIAKIEKEMRAVIQKNPDLKRDYDLLTTIPGVGFITAAVILAEVGDLRRFGTSRQVAAFAGVTPGRKESGKCKRPGRMSKKGNGRIRQALYMASLSACVHNPQLHLVYARITGRGKKAMMALGAIMRKLIVLMRAIIVSGKPFNPCGKPCGETPAHG

SEQ ID NO: 452965 - protein, 422 aa, unidentified
MSYCPVAGIDVSKRFSDMCILSPDNKIFAQEKIYHDETSINRANALLQKAERLFFSKPVIVMESTSHYHLILFQFFSEHGYDVIVVNPLQSNSMKDFSIRKRKTDRVDAFKLAMMYRTKTLRPSQIPQTATRALRQLCRHRAELLNDVSSYKNRLTALLDQTFPGYDKVFSDVGGVTSCAVLVRFPTPTILLVEEESELVEVIAATSKSGYGFAKKKAGLLISAAQKAQTLGIHSCADETLIVCTIQMLRTLSESVLQIETAIDNLLAQIKEMRNNVSLLQSIPGIGSHSAALLLGEIGDISLFKKPKQLAAYFGLDPTERQSGSFRGTKNKLSKRGSPYARAALHMGVVNSICKRGKDSAVNPVLLSYYEKKCKNKPAKVAQAASMHKLVFIIFAVLRDQKPFELKTPEQHAVEQGFVKAA

SEQ ID NO: 452966 - protein, 404 aa, unidentified
MAKYHVGVDVGKNRHHVCVRDLSRDAYHKAFSVSCDRKGFLEFVSALEKLSTDKDDFLIGVEACGPYGATFSYFLLSLGYKLVEINPFRAGQFRKAQGKKAKTDWIDARSLAAILSLDSHKPLSIPDPILDNLKELTRFRADLVKERASMLNRLRETLTTLFPEFSKVFRRLDSASSLALLIAFPGPEHIIHAGEEKIAQSLSNASPGRMGKGMAKTIIEAARSTVGVLQRQPALGIKVSTLGERLLALQSAIDRVEREITNLFSKLPYEPKDFPIGHIPSLATIVSEIGDIHRFPTLKQFLSHFGWCPQSFQTGNYRLEHPRMSHAGNKYVRRLIWMLSIAAIRNVPRYRVYFERRGREGKAKMHILVAVGRKLLSVFYAILKRGIPYDPNWEENRYLALAKH

SEQ ID NO: 452967 - protein, 352 aa, unidentified
MTAKLRFLGLDVHAETIAVAIADPDGEVRSLGTIANREDSIRKLIRRLDSPEQLRACYEAGPTGFVLYWQLAQLGVECAVVAPSLVPKKPGDRVKTDRRDALKLARCHRSGDLTAVWVPDEDSEALRDLVRQREAAKQDQLRARHRLTKFLLRTGRRPPLGLKAWTERYLAWLKQVRYTQPAQEATLVDCLNEVEHMSARVKRLEEAILEVVKLAPQPMQAVIQGLQALRGVAHISAVTIASELGNISSRFESARKLMGYCGVFPSEDSSGKRKRQGSITKAGNAHLRRGSRISLVLSTPAQRRGQAAWATGRGSGRDHRNCMEGAKPPAQALHEVGHGGEGSQKGHDRDRT

SEQ ID NO: 452968 - protein, 312 aa, unidentified
MDASIVGIDVGKDRLDVLVRPSGESFVTARTGAGIEDLAERLKKIAPRIVAIEATGGFETVVAAGLASAELPVIVVNPAQVRAFAQALGKRAKTDPIDAAVIAHFAEATKAVPRPLPDEMTRLLADLIARRRQIVEMMAAEGQRARRVTDQRLKKSIARLRKALEKELAELDREIDDHVRGSPVWVEKEDLLASVPGVGPVVARTLIAELPELGSLDRRKVAALVGLAPWTRQSGKWRGKSFIGGGRKTVRNALFMAAMVAARHNPILKSFRDKLVAAGKPKRVALIAVARKLLIILNAIVRDRRRWQPEIA

SEQ ID NO: 452969 - protein, 400 aa, unidentified
MRAVFGIDVSKASSEVAILVNGEKVHGYTMSNDALGFARLLGDLRTVHKPEIIFEATGVYSRRLQAFLDEHGYAYIRLNPLEAKKQLDSLRVRKTDQIDAEKLAQSQFVLNRKPTYVQEEVYQNLRDLSRFYQNLTEDIVRAKNRLHKVLQVTFPELETILSTPTGEQYWNLVTAFPCKDLVLELSKDELSKSIRLSTSKRISDKRVASLAEKLTALANQSYCAVKKNSPIMEEVRYYAKELLRLSEQRQAVLDEMVELAQPLPEYDILLSIPGIAETTATSIIGELGDIRRFQSANQINAFIGIDLRHYESGNFLAKKYITKRGNPYARKILFKCIHNIASASHTNPCHIADFYEKRKRQSQMTSTKSHTIASIHRLIRTMYYLITHNKLYDYTLTQNQ

SEQ ID NO: 452970 - protein, 349 aa, unidentified
MLIIGCDYHPGFQQIACVDTDTGELSEHRLAHREQAERFYRELKQENLSARVGMESSGHSRWFERLLQELGFELWIGDPAEIRTKRVRKQKTDRQDAQLILQLMLENRFPRIWVPDAENRDLRQLLWHRHRLVQMRTRVMNQLHVVPLNEGLQRKKALWRPAGRKELESIALAPWASRRRQDLLDLLDQLTPKIQELTRALEEEVEKRPVTRLLMTHPGVGPLTALAYELVIGTPERFHCGKQLASYIGLVPTEESSGDRRRLGHISKQGNVLLRFLLVEAAQVTVRSQQEWRSQFFHLAMRRGRKIAKVAMARKLAVHLYWMWRQGCDYGQTQKLGSHAGEPGHRDGE

SEQ ID NO: 452971 - protein, 313 aa, unidentified
MKEEKTFIGIDVSKEKLDVGVRPRVDFMTFANTEDGISLMTGFVKSKQPELIVLEATGGLEMAALRSLVVAKLPAVCVNPRQVRDFAKAMGVLAKTDKIDAHVIARFADSVRPEIRPLKTEETEILDAFNTRRSQIIIMLTAEKNRLTTASKWTKKDIERSIKGLEKALAKINREVENLIKKSPHWRHMDKILQSVPGVGPVMSLTILADLPEIGTMNRRQIAALVGVAPLNRDSGKYKGRRAIWGGRARIRSVLYMCVISGICHNPKIKAFYNRLINSGKKHKVAITACMRKLMIILNTMIKNGTCWNESGC

SEQ ID NO: 452972 - protein, 403 aa, unidentified
MKKVCGLDVHKDSIFCAIYNGDKYSEVKEYETTTVSIYSMGEYLQCENVTEVAMESTGIYWVAVWDLLLEMGFELTLVNPFLIKQMPGRKSDAKDAQWIAELLHKGMIRSSFVPPPLIQELRVYSRKYSKLQQQITRVLVGMDNILIMCGIRASSCLSRITTKSYMLIVDALIKGYTEPGYLVSLVYGNTKNKQSGKLKESLTGNVKEHHRKQLEWSKEEYDMYQKQIADCLKEMERICDANFELAVKLLKTLPGISKIAAMTIIAETGGDMSVFENSGKITGWAGLRPRNDESAGKYKSTATTKGNKYLRSILVQCAWAASRMKGSYFKEKFARLAMRKPRKKALIGIARKLLVVIWNVLTSSVEYNPKLVPVYDPVKMKARMAYHKKEYEKTANLLNINIK

SEQ ID NO: 452973 - protein, 408 aa, unidentified
MNTLYVGIDVSSKSNVVYLMLPNGDKHSNFSVANSHEGSTLLVKKIYSALTSHSLDTVLIGLEATSVYGDNLVYFLREDATLAPFNRKIHVLNPKQVKKFHDTYNDLPKNDYVDSFVIADCLRFGRINKEVYMGDYRYKALQNLTRARFFAVQNLVKEKQRFMNVLFKKYSTMTQEKVFSDAFSTTALAVYDEFESAEALANMDLHELTDFIIEKGKNRFPDPDAVAKAIQKAARSSYRLPKTVNDSVNQVLSISITSMKALESQIKEFDKAIKALMELLPNVLISIPGIGPVYSAGIMAEIGDINRFDNQASLAKYAGLAWKQHQSGGFEAEVTRLIPSGNRFLKYYLCEAAFSLVRCDKEYSDFYHLKYKEVNRCQHKRALALTARKFVRLVFRLLKDNRLYCPVK

SEQ ID NO: 452974 - protein, 391 aa, unidentified
MIYVGIDVAKDKHDCFITNSDGEVLFKAFTITNNLDGFNDLYQKIETVMKDITKVKVGLEATGHYSYNLLGYLIDKGLPTYVINPLHTNLYRKSLSLRQTKTDKVDARTIASILMSYVNLKSYSDISYHNEELKSLTRYRFDKVKERAKLKSSVSRLICILFPELEKLVPTLHMASVYALLSEFPGAKQVANAHLTRLTNLLSEASKGRYSKDTAITFRDAARTSIGSNMPAKSLELKHTIKLIKELDSEIDEIENEIKIIMDEINSPILSIPGINYRMGAMIIAEIGDFSRFDSPDKILAYAGFSPSTYQSGHLYGAYAHMEKRGSRYLRYALYNATKYVCHWDPTFAAYLAKKRAEGKHYNVAISHAVKKLVRVIYHLEKTKQQYIKVA

SEQ ID NO: 452975 - protein, 360 aa, unidentified
MTQPDREVIGGVDTHSRTHHAAVIDAQLGRHLADREFPATAAGYRELATWMTTHGQVLAVGVEGTGSYGAQLAQHLAATGLHVVEVDRPDRKTRRTKGKSDPIDAYAAATAVASGRATGSPKTRTGAVEAIRVLRIARTSAVKARTQTINQIRTLLVTAPTALRERLAGTTRTTLIRTLATTRPGPDLSDPVNATKTALRHLARRHQDLDREIAELDTAIGPLVDHANPTLLAIYGLGPETAGQLLTTAGENPERLTSEAAFAHLCGVAPKPASSGRTQRHRLNRGGDRQANAALYHVVIVRMRHHQPTRDYIARRTREGLSKPEIIRCLKRYIAREVYHALTTGLPAQTSQTTTLIPAT

SEQ ID NO: 452976 - protein, 471 aa, unidentified
MSGKCSIRNKSKQYRKRSGRKLPKNLSVLNPDAAGIDIGGAVHYVSVPEDRDDEPVRHFGCYTPDLHQMGQWLVDCGVKTVVMESTGVYWMPVFRVLESYKLQVLLVNPKHVKYVPGRKTDVADCQWLRQLHTFGLLKGAFVPPHEIAELRNLWRHRRNLVEDASKAILQMQKALTQMNVQLHVVLSDISGVSGMKIIRSIIAGERNPEVLARLVNKQVKATHEELVEALSGHYSSAHLFVLAQVVEKYDSLQKLILETDQEVHRNLKGFESKADCDALGKHPKRSARSIYRRKNEPHFDLRSELWRITGVDFSQIDGIDCNTAFSVLSEIGFNVDAFATEKHFASWLGLCPDNQLTGGRVKRRSTRQVVNRAATALRVAAQSLCRSKSYLGALYRKFAARLGPSKAITACAHKLALIIYRCLKYGFEYVDKGQEHLEQQHKERAIKALKKQATRFGFLLMDPETGELINA

SEQ ID NO: 452977 - protein, 346 aa, unidentified
MIVIGCDYHPSWQQICFLDTLTGESIEKKLEHASGEAEKYYRGLPGPALIGMESTGNCQWFVEMATTAGHDVWVGDAARIRASEVRQQKTDRRDAALILKLLMEGRFPRIWTPSGQEKDLRQLLIHRYKLVRIRTQVKNELQHLAMNQGVTKKRKLWSKAGEKVLRELPLKPWASRRREDLFQLREMLTGQIDLLDRSVVEVAEKSEKARLLMTQPGVGPITSMAFVLTMGDVNRFQRGKQVASYLGLIPREYSSGGHQRYGSISKQGNRFMRMLLVEAAQSAVRCDPGFRNEYLQRCHRKAKGIAKVAAARKLAVRLYWMLRTNRGYPEVVRVESSPRVPLVSAS

SEQ ID NO: 452978 - protein, 357 aa, unidentified
MVEGSWVGLDVHARSTVASVLDGASGELSTRRVPTRCEETLAWLQTLAAPVRVAYEAGPTGYGLARACAAAGIACTVAAPSKIPRASGDRVKTDRRDAERLARLLRLGELVPVRVPDPYFEAARDLLRARADARAELMRARHRLSKLLLRHGLVYERNAWTQAHDRWLRQQRFDSRLLGLAFEDCHGAMLQAKLRRDSLDRLIVELAAEPPFANTVARLCCLRGISTLTALALTVELGDWQRFRPESLGPFLGLTPSESSTGERRRLGAISKTGNTHARWLLVEAAWHQRRPPRPSPALERRRAGQPAAVCARADASARRLHRRWQALERRGKPRTVVAVAVARELAAHCWALATMS

SEQ ID NO: 452979 - protein, 341 aa, unidentified
MEEYIGLDVSMKETAISIRRDGKRIWRGKCASDPAVIANLLRKHAASAKRVIFETGPLSVWFYHALCAEGLPAICIDARHAKAALDMAANKTDANDADGLAHLAEVGFYREVRVKGFDSMLTRTLVSARTRLVRITTELSNQIRGLMKTFGLVVPAGKGSKFDEHVRALLVDQKDLAAIVLPVLEAWRSMRLRAAELGRQLIADARKSEACQLLMSIPGVGTVTAICFTTAIEDPNNFRKSRSVGAWLGLTTRRYQSGQVDYDGHISRRGDRHVRSLLYEAATVILTRSSAESGLRTWGLALKERLGFKRAAVAVARKLAVTMHAMLRSGEMFDRTAGATA

SEQ ID NO: 452980 - protein, 457 aa, unidentified
MSHKRKVKRSGQPGRLETIPILNPNAAGMDIGADEIYVAVPADRDRQPIQSFGTFTSELGRLSEWLQQCRIETVAIEATGVYWIPVYQILESCGFEVCLVNARYFQNVPGRKTDVSDCQWLQRLHSAGLLRGSFRPAQEICVLRSITRHRDKLIRLASTHILHMQKALDQMNIQLHHVLSDITGLSGLAILDAILAGERDPKVLVQLRDGRVKASEETLILALTGDYRAEHLFTLKQSLAAYRHYQKLIAACDLEIEQQLKLFDDKLDGKREPLTPLKVRRKKPFSNEPNFDLRNHLYRIFGVDLTAVPGISVLTAHTILSEIGPDLSKFRNSSAFASWLGLCPHNDISGGKVLNVKTRRVNNRVSHALRMAANALFRSQSSLGDFFRRMRAKLGAPAAITAAAHKLARIVFHMLTTREGYDESSFTKNERRFRARAEARLRAQAKALGYSIVAATA

SEQ ID NO: 452981 - protein, 323 aa, unidentified
MKKISTVAAKQTRNFREQKLTIGLDLGDRSSWYCVLDEAGEVVLEQRLGTTPKAMKEVFGKMPRSRIALETGMHSPWVSRGLSELGHEVIVAHARNVRLIGESRKKDDRLDARTLARLARIDPQLLAPVQHRSAQAQAHLMVIRARAGLVRARTSLINTARGLTKSYGERLRGCSPRNLNAEKAKSLSPELQAALEPLLAAIESLSERIYEYNQQIEKIATKSYPQVARLKQVKGVGTLIALTYLLTLEDAQRFRKSRDVGCYVGLQPGRRNSGQSEPQLHISKEGDPYLRTLLVQGAHHILGPSGRDLAGASYEEEFLPISC

SEQ ID NO: 452982 - protein, 405 aa, unidentified
MSVHHAAPVTSSTIVVAVDVGKCSAVLSATNGERCRLLGPIGFELTCSGVSAVVKRIGLAIGPCAQVKVAVEAAGHYHRPVLDYGWPPGWEVLELNPAHVAEQRRVAGRRRVKTDAIDLEAITELVLAGRGQPVAAAQTLFGEISAWASHRSRRVAVRTATKNQLLGQLDRAFPGLTAALPDVLGTKIGRLIAAEFADPARLTALGASRLIRFAAARDVQLRRPVAERLVTAAHEALSTADAAVARRVLAADVALLADLDTQISAAEAELAVLVPRSPFSTLTSVPGWGVVRVANYAAALGDPQRWPGPRQIYRASGLSPMQYESAGKRRDGTISREGSVALRRALIDLGMGLWLSDPAAKTYAASLKARGKHGGIIACALAHRATRIAHALVRDHASYDPTRWT

SEQ ID NO: 452983 - protein, 435 aa, unidentified
MRRSETALKGEVYMSYCPVAGIDVSKRFSDMCILSPDNKIFAQEKIYHDETSINRANALLQKAERLFFSKPVIVMESTSHYHLILFQFFSEHGYDVIVVNPLQSNSMKDFSIRKRKTDRVDAFKLAMMYRTKTLRPSQIPQTATRALRQLCRHRAELLNDVSSYKNRLTALLDQTFPGYDKVFSDVGGVTSCAVLVRFPTLTILLVEEESELVEVIAAASKSGYSFAKKKAGLLISAAQKAQTLGIHSCADETLIVCTIQMLRTLSENVLQIETAIDNLLAQIKEMRNNVSLLQSIPGVGSHSAALLLGEIGDISLFKKPKQLAAYWVLDPTERQSGSFRGTKNKLSKRGFPYARAALHMGVVNSICKRGKDSAANPVLLSYYEKKCKNKPAKVAQAASMHKLVFIVFAVLRDQMPFELKTPEQHAVEQGFVKAA

SEQ ID NO: 452984 - protein, 366 aa, unidentified
MKILALDLGKFNTMCCFFDTKTRKAEFLTAATDRHYLATIFKKRKVDLVVMEACGPSGWINDLAVSHGLKTLVCSTNEDAWKWSNVKRKTDKDDALKLARMAAMNELQAVHMPSEAHREFRSLVKYRKTLDYRINKMKNTIRAWFVNHGISIDKGDKAWHTGRAHINSFRKPLDQCGPTELWKAELDIELTQLDALSAQLELVVKKLEVIGKNDPRIQRVRSIPGVGPRTAEILVACIDDPHRFKNGRQVSAYFGLVPRQYQSGETDRNGRITKRGNPLARTILVECAWASLRYNPWAKGVYERISGKQKTRKKKAAVALARKIAVIVWAMLRDEKDWEPKRMIEVSESFGRMPTSLKESLRVSLR

SEQ ID NO: 452985 - protein, 340 aa, unidentified
MNVTTIGIDLAKSVFQLHGVDAQGGIIFRKKLRRSAVLDFLRDLPPCLVGLEACATAHFWGREIGALGHEVRLIPPAYVKPYVKRQKNDAADAEAICEAVTRPTMRFVPIKSAERQGVLMLHRTRDLLMRQRTMILNAVRGHLAEFGIITAQGPHKIVNLIRVIEAGDGPDLPPMARAALNSLTTQLNTLTGEVRKLERQLRVWHRADETSRRLETIPGIGIITATALAASVPDPAVFKSGRQFSAFLGLVPRQNSSGGKDRLGRISKMGDGYLRRLLVVGATSVVRRAGSNTTIVGNWVRGLLERKPTRLVTVAVANKTARIAWAILARGETYRAPMAA

SEQ ID NO: 452986 - protein, 377 aa, unidentified
MTPTSAVDCHVAIELSRRSWLVGALLPGTKKVTTTSVPGGDADGLIAVLAQFSEHGSATAGEPVRLRVCFEAGYDGFWLARFLIDRGIDTTVLDASSFLVSRRGRRAKTDRLDVEAMACMLKAYCLGDNSVCRPVRIPTPDEEDAKRLTRERTQLVKERTRHVNRIRALLNLQGIRDVKGLHGGKWREWLVPLRTGDGRPLGPFLVRELTRQFERLEFLTSQLKALEVERHDVCAQVSKVPSGRKIKALAQLSGVGDIGATVLVTEVFHRTFASRRHLASYLGLSPTPFASGGTARDQGISKAGNRPARVMLVELAWCWLRYQSQSRLARWYRERFSDRGARSGKVGIVALARKLAIALWHYVEDGIIPDGAKLKAM

SEQ ID NO: 452987 - protein, 370 aa, unidentified
MSVRRILAKTIDTDLEYEAIGIDLAKNCVSAALLTTDGEVVCIDRLDYSELEKSAQALSSTTFAMEPCTEMNYLVQKLEAWGHRCLVIGGKNVQNYVENHFSGQKTDLNDAQALPFLAQDTQLRTIKAKDMEQQKYASLTTLREQYIKQYRQTIVSLKGICQAWGLNISKGISGKARLKDLIENHAAFPEELKESLVDMVTHAQTAQKALNKITKTLEELAKSDKVCQLIQTIPGLGSICSCRLRATVGDIKRFKSPKDFPAYYGLVPRSIATGHNEKKGKITHRGDRTMRSLMVQAAGSLVNMATKGKLKSKQLTKWILKKQKEKMPWGKLVCAVAAKLLRIVRAVLISNKPYNSKIAGVAKCSLPKGS

SEQ ID NO: 452988 - protein, 365 aa, unidentified
MGEVTRGGAGMTIGLDLGDRYSHLCVLDEHGEVCEEGRIATTAPALRKRFEGMARCLVVIEVGTHSPWVQRLLEDLGHEVITAHTQSVRLIYGGKNKNDRLDAERLARLARVDRKLLHPIRHREGSAQADRTVLRSRDALVACRTKLINHTRGVVKSIGARLRSGSAESFHKRVFEELPEELKPALHAVIDTIAALTRDIHGYDTRIEALASKQYPETGLLRQVSGVGPVTALSFVLTVEDPKRFRKSRSLGAYIGLQPRRSQSGNEDPELRITKAGDDDLRRLLVGSAHYILGPFGPDTDLRRWGLALAARGRKNAKKRAIVAVARKLAVLLHRLWITAEVYEPLRNSQRRADRHDSVPQAMMG

SEQ ID NO: 452989 - protein, 414 aa, unidentified
MLYIGIDWATDSHTVTLLAASGEVLESLVIENRLVGFLALLDAIRKHLRKLEPAATSSAVSFAIEDQNQRLTDFLLAQGFEGYLIEPSRIKGYRLRYRSSGNKTDPDDSFILADVLCRDRDQLPRIAPDSDVVRTLKTLLRDRESFVHDQTRLTNRLTACLRQYYPEALDFFEDVAGKTALDFIAAFPDFAAASQLSRREVKRFLVEHHCHHETRLERILTVLGISPTPVPAVVVRTKRQQALAIIQQLRMVQVAVAEYDAEIERLGEENEEVKRFRGLPGGGPITGAGLSTLFGEDRTRFKSALAVQSLAGTAPKTIQSGQFRTACFRFGCNRFYRAMLQQMALGALRSSVWAKQYYRGKRKEGKTHQHALRCLANLLLKIAYAIWRDRTEYSEDHHLAQIMRHHLSPISDSA

SEQ ID NO: 452990 - protein, 340 aa, unidentified
MLYIGLDVHKEFCQACVIDEHGRVLSNEKFSSTREELDRFLAGFKDAKFVLESTGIWEFIYEGIERRGFEAVLAHPLKVRAIAEARVKTDKVDAETLAQLLRADLIPRSWIPPKDMRDLRQLVRQRAYLVRQAARFKNRIHAEILRRGVRRPENLRIPFAQRSIRWMRSLNIPTVTSCLNCLEGVQAQVEEMNIQLLEEYNRRSDARLISTIPGIGFYGALLILAEVDDVRRFHHPEKLCAYAGLVPTVSQSASSVKYGSISKDGSAYLRWILTESVHVHTRYEPGLQLLRFHARVAKRRGRRVATVATSRKLLRIIYWMLVRHEPFHSHGFNPVKRVHC

SEQ ID NO: 452991 - protein, 415 aa, unidentified
MQSFLFVGVDTHKNSHTAAVFSNYFDSLATITFANSFLGFSDFLTKLEKLSDGRAMIFGLEDSQGLGNFLAEFLIKKGFYVVDIDPVTTDRGRRRTAHKDKSDDRDACLITKTLIREKDNLHKVIINKTSLALRELVKSRELLIGESTRIKNRLHVLIFNQYMEVSAIFPDLFSKCALAFFARYPDPSKLEGESLPTLTAFLKSNSRGRHGNKKAIDILSLVNTDITPDILTNARSSIIKKHIKRLTSMQEELKEISNMLSQLVLKSPYSTLTSVPGIDIVTAAKIISQVIDIGRFSSSSKLAKFIGVAPVEKSSGRKRRYQKSKHGKRYLYSAIFFIALNHISRTRDGRDNNPISRSYYLKKISEGKTKKEAITCLARRLTDVIYAIMRDGSIYSFSKVKSSGDIKVLETVASL

SEQ ID NO: 452992 - protein, 315 aa, unidentified
MTRTQVFVGIDVSKKQLDLAFRPEGRFAAPNDEAGFAQVIERLSTVSPALVVLEATGGIEIPLAGALAAAGVPVVVVNPRQVRDFAQAAGKLAKTDVLDAHTLAHFAEVMRPEPRPLPDEQTQTLAAILPRRRQLVERLTAEKHRLGQARKPVRKSLRVHIAWLERELAQTDRDLAHAIHESPVWREKDDLLRSTPGVGPVLTTTLLAHLPELGTLTGKQIAALVGVAPLNRDRGTWRGKRTVWGGRAQIRATLYMAAVVAARFNPVIRAFDQRLCAAGKAQKVALTACMRTLLRILNAMLKHRTPWRTELVQCA

SEQ ID NO: 452993 - protein, 361 aa, unidentified
MFIERTSVGLDVHARSIVACGLDTVTGLVVRRRLVPSAESVLDWLRELPAPVAVAYEAGPTGFDLARQLAAAGVRCVVAAPSKLQRPAADRIKTDARDALLLARLLRMDEIVEVRVPSVEQEAARDLVRAREDARGDLMRCRHRVSKLLLRHGIVYSGGHPWNGVHEAWLRRQQFGQRGIQLAFDADLEAMLLTLDRRDRLDKAIIEMAGSGEHADVVRRLGCLRGVSTLTAFGLAVEVGDWHRFTGATIGAYLGLVPTESSSGQQRSQGSITKAGNAHARRLLVEAAWHHRRDYRNPGAAMRARWNLASPAAKARGNAGNHRLHHRWQTFVARKKKTVIANVAVARELAGWCWSLAILED

SEQ ID NO: 452994 - protein, 411 aa, unidentified
MNPVIGLDVAKGESQVQAFLEKKKPYKKSFKVAHTLDGLQELHAFIKEVEERSGSQPPIVLESTGHYHLPVVQYFEKRGYLLIIVNPLISYKAKSSSLRKVKTDIIDAHHLCELYYKEDLEPYKKRGIQLLNLRNLTRQHENLTGMFVQAKLQFQSVLDQVFPEYVGVFGELYSDVSLRTLSAFPTSKEVLAAGEETLTVKIHELCKSRSQKWASNQANKLIQAANRNPFQQTLYHSHLISLEMLIEILLEYKKHLSKLEEEIDALAKNIEEYKIIQSIPGIGEKIAATIISEIGEIDRFNHSKKLVAFAGIDPSVFESGTFKGTKNRITKRGSSRLRHALFTAVRCAIRDARKTRTTKELIPRNKRLREFYDKKRDEGKPYRVSIIACANKLLHWIYALLKTKTSFQDIA

SEQ ID NO: 452995 - protein, 316 aa, unidentified
MSDTTIGIDVSKDHLDAHALPAGTVLRVPNTARGIAQLLRWIGAEPVARIVYEPTNRYHRALEARLAAAGLPLAPVNPLKARRFAQALGLQAKTDKIDARMLAEMGLRLTPGLQVPNPKNLQHLKDLVAARRALVADRVADGNRTEGHSLALLRRLARRRRAAIEADIARIEAAIAALIAADPALTDKARILQSLPGIAALTAATLLAEAPELGQIEARQIAALAGLAPVTRESGTWRGKATIEGGRRHLRRALYMPTLTAIRRNRDLAALFTRLRAAGKPAKLALVAAMRKLLILANTLLRENREWQETRPVQTA

SEQ ID NO: 452996 - protein, 331 aa, unidentified
MMSLPNPINDAPLSVVVDVAKATLEVAVSDRAATLAPANDEAGHAALLAHLAGLRTQGATIGLVVLEATGGLEVEVAAALQLADYAVVVVNPRQARDFARSMGVLARTDRIDARVLAQLGQTLLRRDDLAKLVKPLADESQRLLQALVTRRRQVLAMRVAEQQRASGPERRMRRSLNIILKALDRELVRLDKELQACVGEHHPELAALLGEVKGVGKATISTLLAEVPELGKLSGREVSALVGVAPINRDSGTLRGKRTIFGGRPSVRKGLFMAALVASRYNPVIKAFYQRLVAAGKPKKLALTACARKLLTILNAMARSGKPFNAALHSA

SEQ ID NO: 452997 - protein, 363 aa, unidentified
MNATAALPVVGIDLAKSVFQLAVADASWRVVELHRLTRAQFERWFSNHAVGLVVMEACGSAHHWARWLNRLGIEVRLLPAAYIRAYVKRNKTDAADACALLEAARCAEITPVRVKSIEQQALQGLHRTRSLWMATRTSRINALRGFCREFGIVIAQGSRLGVEQIGRVLADPHAAVPMLIRRTMTLLVEEIRLLEVRIAQLERELTTLARQSPACTTLLSIPGVGLLTATAMVAATSGNVTHFHDARHFASWFGLTPKEHSSGCTRHLGRISKRGDRYLRMLLTHGARSVLRAASVAVRAGKTVDGLRQWALGVQGRSNHNKATCALANKLARICYATLRDGEPYGAARLNKKLARTAFALPA

SEQ ID NO: 452998 - protein, 346 aa, unidentified
MTLTIVETRAITGGVDTHADMHVAAALDPIGGLLGVGEFAATAAGYARLLDWLSGFGTVCLVGIEGTGSYGAGLARHLSAAGVRVVEVDRSDRQDRRRQGKSDPLDAVSAARAAQSGRARGASKGRDGSVEAIRALMVAKRSARAERTQTTSQARALIVTGPDDLRARFARHTAAALVAETAALRPRPGDVVGYATRIALRELGRRAEFLGDQLDRLDELIVPIVTAHAPGLLALYGIGPDTAALLLIPAGDHPERLRSESARAHLCATAPIPASSGKITRHRLNPGGDRQASHALWRIVITRMSSHPPTRRYVQRRSEEGKSKKEIIRCLKRYVAREVYPHLRHR

SEQ ID NO: 452999 - protein, 324 aa, unidentified
MSSHEIVGIDVAARKLVVIGERLALAEYENTAAGRGKLVKGLCRNQRPVRVVLEATGIYFLDLACELAAAGIAVMVVNPKATHHFAEAILQRRKNDPVDAAMLREYGRRMDFISWQPPRHDLFGFRALTREVQALSKTVAAARNRLHAITATQLAPTTLIGALERQIAHNQALIDELVAAAVAQTESDPELARLLARTDSMPGFAAKAAVLVIGELSVLPPMTARQWVAQAGLDVREETSGTSLARRPRLSKRGNKRLREALFYPALTAARCCPAAAAFVERLVAHGKTRLQAIVALKRKLLHGLHAMWRNDEDFDAEKLFAPA

SEQ ID NO: 453000 - protein, 396 aa, unidentified
MRFAGIDIGAERHMVAVVDEQGEVMCRSSPFGEDASGYARLFEILGTPEDCLVVLEATGHYWRNVFAALVARGYAVAVLNPLRTARFAEEELRRTKTDAIDALGIARFGQQKRPRRMHLPDSVTDDLRELERLRERIAEDFASRLRQLHRAVDLGFPEFTRHVRTLESQLATTILSRYPTAASFRGISVKQLARIVYDGSHKIGEDLARGLIDEAAKSVGAHHSEPYQLRIRYLCEDLEMLRRRLKELARDVGRKVDEHEVAKLIMTIEGVGPLTAACLIAELGDPARFDSAGAIASYVGVVPRIRQSGKRRFTKGPAIPLGNARLRKFLWMVVLQLVRRNPWLRYHYERLRAAGKPGKVAVIAAMRKLLAAVWSVATHRKPFVPILPSATTAQNA

SEQ ID NO: 453001 - protein, 421 aa, unidentified
MTVYLERGYNCKEYQWFYKQYQNIYSKEIFMIYAGIDVAKDKHDCFITNSVGEVLFKSFTIPNNREGFETLFQKIQSVSDDLTKVKVGLEATGHYSYNLLRFLLDKGLPTYVINPLHTNLYRKSLSLRKTKTDKVDAHTIASMIMSDVNLKSYSDTSYHNEELKSLTRYRFDKVKARAKLKSSVSRLVCILFPELEKLVPTLHMVSVYSLLSEFPSAHAIASAHLTRLTNLLSESSRGRYGKDTAICFRDAARSSIGSHIPAKSLELKHTIRLILELTSEIDEIEAEIKTIMDEINSPILTIPGISYKMGAMIIAEIGDFSRFDSPDKILAYAGMSPSIYQSGQLDNCYAHMEKRGSRYLRYALYNATKYVCHWDESFGTYLAKKRAEGKHYNVALSHATKKLVRTIYAMEKSGQAYTNAA

SEQ ID NO: 453002 - protein, 353 aa, unidentified
MKTYYVGMDVHRASIVIVVLNGAGKIVMQSVIETGAERVRGYLKQLRGQVYVTFEEGTQANWLYEVVRPLVTEVVVCDPRHNKLMQSGNKSDRVDAQKLAELLRLGSLKAVYHGENGVGALKELVRSYDCLVSDTTRVMNRLKAIYRGRAIGCAGHDIYRQDRRQQWLDKLTERGAKERASFLYRQLAALKPLRHEAKRAMVKEARRQRAYPWLMSVPQFGSVSVAQLLAIVSTPHRFRSKRQFWTYIGLAVVTRTTADHEVVNGVLRRSRRPVSTRGLNRNHNHLLKRVFKNAANGACHSGPFKAAYELRVKQGMAPSLARLTLARQLAAITLAVWKHGEQFNPERMKQQAA

SEQ ID NO: 453003 - protein, 353 aa, unidentified
MKKIVIGIDISKEKIDATAIDVRSGQLGVVKLDYQVFENKPMGYRRMLVWARNLIDGARLEDVLFCCETTGGYDRRLCDYIYAKGQSIWRESALQIKRSMGVRKGKDDKADSLMIAEYAMRHMDKAVIYESPNETVQELKALLLYRHKLIQERTEKKVRMAQLGTTAAKSKSLSFILRDARKGIKSIDKSIQECEQQIIELLKTNETLKKNYDHIVSVNGIGIVNATAFIAYSNNFKSITTANKLASYWGVASFREESGTSVDKKACVSCYSCSHLKSYLTQAAECTVRNHGIYYNYFLRMKAQGKPYRVIINNVRNKIIHLVFSLVTNDTDYEKDHEFLRTQRKISRTFEMN

SEQ ID NO: 453004 - protein, 388 aa, unidentified
MIYAGIDVAKDKHDCIIVDSNGNDLSKVFTIPNTRQGFDELFANLKTHSKDLSNLKVGLEATGHYSDNLLEFLIANDLPTTVINPLHTNLYRKGLSLRKTKTDKVDAHSIVTMLRTECLKPYSQSSYHVRELKSLTRYRFSLVQDCARLKSSFARLCVILFPELEKLVPSLHMASVYALLAELPNARAISECHLTKLTNLLSEASKGRYSKDKAIEIRNAAKVSIGSYSEVKSLELQHTLQLIQMMEKQIAQAEAKINPIVDSLHSPIMSIPGIGYRMAAIIIAETSNFANFDKAEKVLAFAGLEPSVYQSGQLTSTHAKMVKRGSKYLRYALFNAAKYVCHWDEGFRQYLVKKRAEGKPYNIAVSHAAKKLTRVIFHLVKTNQSFSR

SEQ ID NO: 453005 - protein, 338 aa, unidentified
MNYVGIDHHRQYSHITWLDEKGEVVKSGRVANRRRELEGFLQGARDVRAVIEAGRSSYTMVDVLTDLGIETTVAHPKDVKAIARAKIKTDERDSYKLAHLLRTGYIPEVHKRSRENRSSQRIIRQRAFYVGKQTSVKNRLRALLAQQGEEIRCEVERVENLFTDKGMKVLKGLVLPEREAKMVGALLRTYAHLEERINETNVIVKELYEKMSSARLIQTVPGFGIFLAVLVAVEIEDLGRFEDVSKLHAYAGVIPSTHSSGERSWHGKIIKEGNRWLRWAAVEAVWPALRADFDIRCFYDRLKKRKGANSAKVATARRLLTIIYRMLKENRPYIPHKR

SEQ ID NO: 453006 - protein, 416 aa, unidentified
MLGVGIDWAEDANQVALGRVGEGIIEEFSVAHRPESVARLIERISSLESDPAEVRVAIETKHGHLVEALVEAGYAVVPVNPDLVARRRGPARKKDDGEDARILCLLALDRHSVLRPLIPHGETAAELRAIARDDERASRDERRLLNRLRADLIATFPAALAFAGEDLGSPTFLKLLERHPTAEEAEAATDAELESLFRRAKHGWPERTVARLRQALGSSQFVAKPYLVRAKAATIRLTASQLLAIGAQRRAWERRMGEMLASLPATGGEDTGQAVPDGEIYLSFDGLGARLAARVAGEIGDHPEQFSSPNSLQCYGGKAPVTRRSGKSEFVVSCRLACNRHLANAVQQWAFCSLRRSAWAREFYDSQRARGKGHHAALRALGNRWLEVLWHCLRKGVRYDEAIHIENRRRATAAAA

SEQ ID NO: 453007 - protein, 385 aa, unidentified
MHDHLQDQTPIRTDLGAIFVSLELSRSTWLITSLSPGAGEKLSKHSIPAGDVGALLARFAQLQQKAAAKLDRDFRIIAIQEAGLDGFWIHRVLQGEGIESHVVDAASILTSRRRRQAKTDRIDGETLVRTLLAYKRGEPRVCSMVRPPTPDEEDRRRICRERKTLLAERIGHTNRIKGLLCAQGVFDYDPLLRNRRKRLDALRTGDGRPLPERLKAQIARELDRIELLMAQLKIVEAERDALLEPTDDAATTPAVMLAQLKGIGSQIAAILWSEALYRHFDNRRQVAAYAGLAPTPWKSGSIDHEQGVSKAGNPRLRTTMIQVAWLWTRHQPMSALSQWFFTRVQRNGGRMRKTTIVALARKLLVAFWKYVTAGVVIEGAVLQAA

SEQ ID NO: 453008 - protein, 307 aa, unidentified
MKKVLKQVLGVDVAQGELVVTLGRMFDDLRVDLYAHKVFRNTENDILKLLDWVKKLTDPSVNVRFVMEATGVYHQKFAFSLYAQDYEVSIVLPNKISNYMRTLENKTITDKSCSEAIAQFGLERNLDRWHKPKKTYRSLQQLTRERDQIVMERVMVKNQLHAEQAEAEPNERSVARLNERMRLLNKHEKEIKSDLTEIINSDLVLKNEITNICSIPGIGELTATIVLAETNGFELIRNKKQLTSYAGLDVKEKLSGTSVKGKPSISKKGNRHLRKAMHLPALSAVKYDENFRNLYVRIVSRQCIKMK

SEQ ID NO: 453009 - protein, 343 aa, unidentified
MQIRSVGIDLGKTTFHLVALGASGKVLVKKRFTQKQLLAFTANMQTSLIGLEACSGAHFLGRALKQQGHDVRLIAAQFVKPFVKSNKNDFVDAEAIAEAVERKNMRFVPIKTDDQLDLQAIHRVRDRLVCRRTAVINQIRAFLLERGMVFAQKPAKLKAAMPDVLENAENDLTPMMRTLMDKLWAEWKLVEEQLKELGDELERISAADAGCTRIRQIPGIGPVVATAIVAAIGNGAAFRKGREFSAWLGIVPRQYSTGGKAKLLGISKRGNVYLRKILIHGARAAVLRIKRDRVPIGAWLDRLDSRAPKNVVVVAMANKLARIAWAVLSSGEEYKPANVAIAA

SEQ ID NO: 453010 - protein, 350 aa, unidentified
MTRQSTATVATLGIDIGKNVFHLIGLNERGAIILRQKLSRRQLETRLTNIVPCLIGMEACVGSHHLGRQLKTHGHDVRLMPAKYVRPYSKGQKNDYRDAEAIAEAVQRPTMKFVAIKSIEQLDLQALHRVRERLVSQRTGIINQIRAFLLERGIAIRQGPRPLRSELPLILSSTDKLSPRMVHLIEALVIDWRWLDQRIEAVSSEIEALAEEDPGCQRLTTVPGIGPIISSATVAAIGMGDIFRKGRDFGAWLGLVPKQMSTGGRPVLGRISKRGNRYLRMLFVQAARVVLLRPKSWERYGLKRWIEAAATRMHYNKLAIALAHKLARIAWGVLHHGRDFEMTKLSQQPV

SEQ ID NO: 453011 - protein, 391 aa, unidentified
MIYIGIDVAKDKHDCFITNSDSEVLFKAFTIFNNLDGFNDLYQKIESVMDDVTKVKVGLEATGHYSYNLLGYLIDKGLPTYVINPLHTNLYRKSLSLRQTKTDKVDARTIASMLMSDVNLKSYSDTSYHNKELKSLTRYRFDKVKERAKLKTSVSRLVCILFPELEKLVPTLHMASVYALLSEFPSAKHVATAHLTRLTNLLSESSKGRYGKDTAITFRDSARASIGSNMPAKSLELKHTIKLIQELDSEIDEIENEIKIIMDEINSPILSIPGINYRMGAMIIAEIGDFNRFDSPDKILAYAGFSPSTYQSGQLDGAYAHMEKRGSRYLRYALYNATKYVCHWDPTFAAYLAKKRAEGKHYNVAISHAVKKLVRVIYHLEKTKQQYIKAA

SEQ ID NO: 453012 - protein, 466 aa, unidentified
MERKGGEGALAEAAGRRQRKGRGKRARKAGFELAHPDCAGIDVGSGSHFVAVPADRENPSVREFGSFSDDLHRLADWLSACGVRTVVMESTGVYWITLYELLEGRGFAVYLVNARHVKNVSGRKSDVLDCQWIRDLMSFGLLRGAFRPSQEVCALRAVMRQRDMLLAGQARHVQHMQKALAQMNIQLANVISDVVGETGQRIVRAIVAGERDRSRLAALRGPRIHASQEEVGRALEGTWRAEHLFALKQALALFDTYAQMLMECDGELERMLERLARYDGDPGKPKRRGRQKNAPRFDVRVHLFRACGVDLTRIDGIDTTTALKVLSETGPDLSRFPTPKHFTSWLNLCPNTRITGGKRLKGRERNRCNRAGQALRQAAVGLSTSKSALGAYFRRMAGRLSKAVAVKAVAHKLARLVYAALTKGMVYVDRGMAAEEERYRVRAFKHLAKRAAALGYSLSPTLQGAK

SEQ ID NO: 453013 - protein, 359 aa, unidentified
MTRKSRILDGEDTLEHFVGLDVSLESTSVCIVNCRGDIVREAKVASEPEVISAGLRSFNPTTTQVGLEAGPLSQWLYAGLARAGFQVVLLETRHVKAAVCAMAVKTDRRDAQGIAQLMRMGWYRPVHAKSLGAQEIRAALVARKQLLNRMMDLERSMRGILRGFGLRVGQVTRRSFEGRIRELIEGHSMLQTVMAAMLTARAALKLEVEKLHRAILNIVREDGICRRLMTVPGVGALTSITFKSAVDDPSRIARSRGIGPLFGLTPRKYQSGETDRTGAITRSGDAMVRTALYEAANSILCRGTRFSALKRWALGVAVRRGAKKAKVALARKIGVILHRMWVDGTSFRWTREMPLPSAA

SEQ ID NO: 453014 - protein, 356 aa, unidentified
MGKSIKTLSSVTLVGLDIAKNVFQVHAIDAEGAVVVARAVRRGQLLSFFASLPRCLVGIEACGSAHHWARSLSALGHQVKLMPPAYVKPYVLRGKNDAVDAAAICEAMLRPRIRFVPVRSVENQGQLMRHRVRELLIGDRTRMLNALRGHLAEVGVIAPQGTAHAYALKRLIVDGFDENGEVVADCVRAALAPLARQIETIDAEIGAIDEEIKALAKADEKARRLMTIPGVGPITASALVATVQDIGAFASGREFAAYLGLTPRQNSSGGKERLGRITKMGDRYLRKLLVVGSCATLIHSNGHNDALRAWASQMLARKTVAYKFKLTAVALANKVARIVFALLTSGGDYIERPMAA

SEQ ID NO: 453015 - protein, 433 aa, unidentified
MLKLNYMSTLFVGIDVSSKTNAVYAMDFEENKYISSSFGNNQPGADKLVNMIAECMHKHKNLDTILIVLESTSVYSVHISNFLSTSEVLMPYKPYVFCVNPKATSNYRKSYIGMEKTDPTDAYLIADFGRVGRTKKLEPWRGGQFISLKRLTRHRMHLSECITREKTYMVSNLYLKFSELQLLEGDDKPFGSLYGATSSAVLTEFLSPQEIIDMPEEELLTFLAGKSRNRISDLSKTSELLRKAARDSYRLDKCMYEPLNISLASSFNCIHAYQKEIKLIEQAIEKCINGMNPNALLILQSIPGIGPIWASGILSEIGDITVFHSSDALAKYAGLYWPKGDSGDFTSEDNKMSKAGNPYLRCYLGEAANSVRKHIPEYADFYARKYAEVTKHQHKRALALTSRKLVRLVFGLLVKNQLYTGEKLDTEYNIESN

SEQ ID NO: 453016 - protein, 354 aa, unidentified
MSQKLNAAIAVIGIDIGKNSFHIVGHDHRGAIVLRQKWSRGQVETRLANLPPCLIGMEACVGAHHLSRKLQMLGHDARLMPAKYVRPYSKGQKNDFRDAEAIAEAVQRPTMKFVATKTADQLDLQALHRVRDRLVGQRTGVINQIRAFLLERGIAVRQGLRSLRSELPGILATRTDVLSPRMLRIIEDLAGDWRRLDERIEGLSSEIEALARQDKACERLMTVPGIGPIISSAMVAAIGTGDVFSKGRDFGAWLGLVPKQISTGDRTILGNISRRGNRYLRALFVQAAWVVLVKVKCWERYGLKSWIEAAKKRLHHNVLAIALANKLARIAWAVLNKGRAFECVKTEETASQPA

SEQ ID NO: 453017 - protein, 345 aa, unidentified
MNKISVIGLDLAKNVFQLHGVDADGGIVVRKQLSRSQLRQFLARLEPCLIGMEACGGAHYWSRELTRLGHSARMMAPAFVKPYLKSNKNDRNDAEAICEAVQRPSMRFVAAKTLEQQSVLHLHHARRLLVRQRVALSNHMRGVLSEYGIVLPQGVKVISRRLPELLEDADNDLPMLTRHLLAELKAEHDQLMERIDRFEQQLKAWHASNPVSQRLASIPGIGVLTATALAATVGEGQDFKNGRQLAAYLGLVPRQASSGGKERLLGISKRGDGYLRSLLIHGARAVIHHIRRRLKAHQPGGNPWVEQLLQRCHVNEAAVALANKIARTAWVLLDRNETWSAARPV

SEQ ID NO: 453018 - protein, 340 aa, unidentified
MSSPAVIGLDIAKNVFQVHGADAEGRCILRRRLRRAEVVMFFARLPRALVGIEACPGGHHWARELRSLGHDVRLIPPQYVRPFVKTNKNDAADAEGICEAVVRPNMRFVPIKSVEQQAAMMLHRTRALLLRQRTQLINAVRGHLAEFGLVARRGARNIRELAELVRDTRPDSLPDAARAMLVLLLEQIREAQIRVRKTEYALEVWAKQSDACKRLMAIPGVGIMSATALVLTMDDPKRFRSGRHFAAWLGLVPRQSSSGDRQVLGGISKRGDAYVRTLLIHGARSLTRWRRKSWSWLAGLLMRRPTNVAAVAIANKTARTAWAILARGRQYQPTRVAEAA

SEQ ID NO: 453019 - protein, 432 aa, unidentified
MSKYFFNPVVGIDVSQGFHVVSILNLTGNLFNKTFKIPNSLDGFSYLLSQIEKVERECNMKTGIFMESTGVYHLSLFHFLKKHNLEVNLINPLITNSNKNKDIRKVKNDKKDSLSIARLAKFDEIKFSDYFDLDMFNLKSLCREYYKQVDMRSAYKHKLSADMHILFPNYNKVFVDITCGTSAAILKKYSSPSAFLAAPSEEVINLIKSIAKKGLNWATNIYNKLHQVASEAIIIGIPSYAVEFKVALNLNFIETLNLGISKILSKIKEVVNSDSFPKNITNCVKYIDSIPGIDFFSAVTIVAEIGDYRRFIKPKQLVAFLGLDPSVNESGKFKGNENSMSKRGSSAARRALYSAALTSIRRKRNGELFNPVLYKYFNENLANKKPKVALGAIMHKLVNYIFAALRDQKEYELRSPHLHNQMFLYNQERQSA

SEQ ID NO: 453020 - protein, 342 aa, unidentified
MDHYAGIDVSLECSSVCVVDASGKIVREGKVGSEPEALIAYFGSLRLSVVRIGLEAGPLSQWLYAAMKEAGLAVELLETRHVRTALETMPVKSDRNDARGIAQLIRLGWFRPVHCKSIGAQETRAVLTARKLVQSKLLDVENSVRGILRGFGLKVGKTTNRSFAGRVEGLVVHHASLHMIAAALLSVHAVLLRELKAFDKQVRSMARVDVKAKLLMSAPAVGPIVALTYASAIDDPGRFTSSRRVGAHFGLTPKKYQSGQTDYTGRISKIGDATVRTALYEAAHIMLIKPIKGCAPLKSWAMRIARRSGMKKAKVALARKLAVILHRMLANATPFNAAMAAA

SEQ ID NO: 453021 - protein, 312 aa, unidentified
MTSKPIVGVDVAKEWLDLAVSGEGRVERIANTGEAVAAWIERTAPQLVAFEPTGGYERILRDSLHDRGILFVRVHPNDLIAFRKSRGIKAKTDRIDAQLIAAFAAEELGRRGVTTAIAGDETLRELAARRRQLVDARHAERCRLDLARAPAVRSSLVLLIDALTTSLAAVDAELSAHVAARPDTAALATLLRTVTGVGPVVATTLIADLPELGHVSGKEIASLVGLAPHTRQSGKTKHRERTGHGRPGVRRVLFNAARCAIRHSPPIRAFYDRLVSHNKRPGKVALTAVMRKMLVTLNAIARDRSPWRLQTP

SEQ ID NO: 453022 - protein, 345 aa, unidentified
MNILKQTVGIDVSYKTFDARFGTTNIQQQITLSPSKSFKNSLPGFKLFLRWLKKYVLSDDIPLVFVMEATGVYYEHLAHFLFQHKYQVAVILPNKIRNYAKSLESKSKTDPIDAATITRFGLERRLSLWTPPSENIKVLRDLCREYHGLKANCTQIKNQLHALKSSFKPHRESFKRKTQLLKFLERQVALIKKELLALIKTEPDLAQRLKKIKTAKGLGDISILTVLSETRCFQLVTNQKQLASYAGFDVVFNDSGLKKGKTSISKKGNTFIRKALFMPALSACRANPQLKNLYLRLVAKGKNKKLAIIAVARKLLLLIYTLWKTNSPYIPDYKPLPLVSKTLST

SEQ ID NO: 453023 - protein, 342 aa, unidentified
MDHFAGLDVSVKETSVCIVDDTGKIVREVKVASEPEALLAVLKNPAYRFKRIGLEAGPLSQWLFSALAEAELPVICVETRHMQAVLKAQINKTDRNDARGIAQMMRVGLYRPVHVKTLRSQKLRMLLTHRKLLQSKAIAIENDLRATLRNFGLKVGMVGTVKFEARIKELVENQPDLASLVEPLLIVRRALREQIVILHRRLLAIVRDDEVCRRLMTIPGVGPVVSLTYRATVDVPARFRKSKAVGAVFGLTCSKYQSGEVDRSGSISRCGDEMMRVMLYEAAQSMLRSKKWSWLKAWAMQIARRRGMKKAIVALARRLAVIMHRIWVDGTEFRWTREAATA

SEQ ID NO: 453024 - protein, 346 aa, unidentified
MHSSKDTVLAVDYHAENTEVRWLNCSTGEERCLNIPTTRSGILRLVEKAVAEAAQVGGKVIWIMESTTGWARVKDLIGSRVEFVMANVLQMPLPPKAYRRKTDKIDTGRMLREFLNGSLPRSYQPDLRWREIRRLVDSRQDLVQRQTAVKNWISHFLHHETWEDRDGLWTQKGMKRLRALKLSVSDRMVLDLKLQELEQLAQRREQMEAAMQAVYDQWPEAQWVDEVRGIGMVTAVSILAHIGAIERFPTAEDLVSYAGLVPGHRQSDKTAHNGKIGGGGTDSHLRYLLIESMQWVCQIPRYSDAFDRAVARHGKNIARIIVARMLLRSIFKMLKDKVRFNQVRAA

SEQ ID NO: 453025 - protein, 457 aa, unidentified
MAGRAGFQRLVAEVSLAHVGIILGLEMSRLARSNRDWHHLLEVCALILIEAPSSAYRRGMLRAAKTLVTNKEETSRRFYTQQHPFYCGIDLHARTMYLCILDQAGETLLHRNMPATPEALLKAIAPYREQIVLAAACMFTWYWLADLCADHGIPFVLGHALSMKAIHGGKAKNDKIDAHKIAVLLRGGMLPQASVSPAEMRATRDLLRRRMHLARKRGALLAHVHNTNSQYHLPAIGTKIASKANRDGVAERFADPAVQKSIEVDLALSTYYDELLRDVERTIVTTAKHHDAQTLYLLQTVPGIGKILRLVLLYEIHDLARFPRVQDFASSCRLGKCARESAGKRSGTSGSKIGNAHRKWAFSEAAVLCLRDNPAAQKLLARFEKKHGKGKALTILAHQLARAVYDMWQRQTAFALDTCLHGEGRGVGALNAELDSHGMHLLRHARYGVHHCVAARS

SEQ ID NO: 453026 - protein, 461 aa, unidentified
MRRKTKRKAKAKTTLPEGLETINLNAAGIDIGSTEHYVAVPPGGSSEPVRSFGSYTAALYEMARWLKECGITSVAMESTGSYWIAPYQVLEASGFEVILVNSRHVKNLPGRKTDVLDCQWLQKLHTHGLLSGSFRPVNKVCVLRSYLRHRENLVHAASAHIQHMQKALTEMNLSLHHVLSDLTGLSAMMIIRAILAGERDPWKLAGMKDRRVKKSQEQIARCLEGDYRDEHLFALTQALELYEFYQAKIAQCDLQIEKQLHTFKAQVDPKKNPLPENPKKKSLKAQSNFELKTHLYAICGTDLTRIDGIDVMSAQSLISEIGLDMSRWKSEKHFTSWLNLCPSNRISGGKPLTRQPRKGHNRAADILRLCAQSAIKSSSAIGAFGRRLKARLDAPTAVKAVAHKLARIVYRMLKYGKQYRDAGERYYEEKYRDHLLRRLQKQAAAFGFQLTPQQPIMDPVS

SEQ ID NO: 453027 - protein, 518 aa, unidentified
MARLRRCKKSRGFLVQKPRGQFTERVQAVGPEHFGVVSVDCAKARSKFCLCDFYGRVLIEPAVVEHTRSDFANACGRVRSAMRAHGLQDVVVAIERTGSYHRPVQDAFRRAAFETRLVHPFASKQFRQPADAENKTDDTDLAGIFRAAVNGFGLLQPAWPDDYLELQQLSRQRRDLVRKSSILRCQIKETLHQLMPGYAAVFSADFFASPAPLALARATGSAQEMLDAGITGLPQRLPNGIHYRLSTLARVLDWARTAVPPQKPWQLFREQLDQLAEDFLQKSKEIRILEQRTAHLLVRTPYIQLLALPGICVVSAADLAGELGPIQHYANANHITGRAGLCPSRYHSDQVDVHGPLRRRANRRLRAVLLRIADNLIRHNHHYQAQAERWRRASKDARWIRVKVNKSFSRLAFVMLAGRCVYPHAACQPRHSICDKLMAFHCEHKTDLQRALEDIDQVSAQLSGRTRQGEIQMLQDQLDNPRCRRRRGPQALAKIIPLVLARLGIRLLQSQVEGEDSN

SEQ ID NO: 453028 - protein, 390 aa, unidentified
MRYFIGIDVAKFKHTACVIDTYGTVLVESFDFTNDIIGFQSLLKNIKPFLKKKHLVSMEDTGHYGDNLRNFLLEKQYKVVMLNPIVTSHIRKASNKAKNDRIDCFVIANTMMNPNFYRDQHAQSIDYATVCQLTRMHHTHTEEINRYKCQLQKSIDIVFPEFNSLLNTKYSKTYLEILDTYHSAYTIANTNIRLLRNTLKNVGVGRSVSISAEQLKKAAKESIGQHNLAIEMDIPFLISLIRRLTSILGEIDKKIEEFSHQLNSPILDISGISHFSAMSIISELGDITYFSNEKKLIKFAGVNPCVYESGTYSMTHTRLEKKGSKYLRKTLYQIIDVVIRFNPVFQAFYQKKISQGKSYRCAQGHCIRKLLRVIYKILSTGERFDPEKLK

SEQ ID NO: 453029 - protein, 386 aa, unidentified
METAVGKLAERSVASFPTAAGDRSFNPRSNKTVEKLDRRRFHEISPNSRKSRRGAGRRASSHSQGRDIVMDVAFTSFVGIDIAKRTLDVHVLPERRSLQHSNDSKGRRQLREQLPPPGLCLIVVEATGGYERALVAELIDAGYHVAVVNPRQARDFAKACGHLAKTDRIDAAVLARFGEAVELRIQAKIPEKQLELQDLVARRRQLVELRAGEMNRKEKVTSKLVRKSLQETIDLLTKQIRRFEKQIAALVQSDDEWKQKTQIVQSVPGVGSQVSACLLADVPELGQLNRQQIAALVGIAPFNCDSGPFRGRRTIRGGRISVRCALYMAALTARRANPIIRAFADRLAALGKKPKVILTACMRKLLVILNTMVKNKTLWNPEISIT

SEQ ID NO: 453030 - protein, 342 aa, unidentified
MKKYFIGIDVSKETVDVSFVESDFQRQPEYLAQYPNGKKGYRSIIRDLRLALRGTSSGQWLFCCETTGAYDRQMCHWLTEHGMHVWRESALQIRQSMGIRRGKNDKADSMAIADYARRHPDKVNLFEVPGKALAALKDLYLYRQTLVDKLKGVKNRQKALKSQGDAASPAAKFIRRDSNNEIRRLERSIAECENAMMEVIRSDEQLRTNFEHVKSIKGVGLVVTVALIVFSGNFQAIPTANKMATYCGVASFRNRSGTTLDSRQDVRNLSNLRLKGVLTMAARTAIRHDEAMKRYYQRKIAQGKQHGVAINNVKNKLLHIAYALVRNGQDYQSGHVVNGKAA

SEQ ID NO: 453031 - protein, 425 aa, unidentified
MKATKLPVVAQLDQVLDICVDVGKSTLNVYFEVGDQGIDDECPNTTRQIERKLGEYHRLANEHGLKSLRVVCEPTGGYQDKLMRTARRLGHLTAYVSGEAVAKFRVVETNDSGKTDLKDPHIINTLARLNKTLRHRELPEEYQLLRKCGILYDQADCALVGVRCRLHRALVELFCDYSFKGDFLYTTSGRALMDQYGCNPYRIVRAGRSRFERAMRKRAPRIRQRSLDRLWDNANTSAHHQLTAEYAALLEFQTRQLWDEFLLHEQRKTTFGDRLTALLQRLRQTEPGIPEPTPGVISAKNLARLIGETGPLSDFTHWRMLLRYAGLNIRMRQSGQYKGQDRISKKGRPLLRKILGQIVLPLVKREALYGEFFHRKRVAMPGQKAMVVVMRLFLRKLLGWYRSGQAFDAERHFHATATATERQAA

SEQ ID NO: 453032 - protein, 346 aa, unidentified
MSYSTTVGVDLAKNIIQVSVLSGAGKEVLNRSFSRRKFAEFLGKQKPSLVAFESCASAHYWARAATRHGHEARIIPAKAVAPFRQGHKTDSNDALAVAEAARRPNIKEAPMKTAEQQGLQAIQRSRELLIGECTALSNHLRGILLEFGVAIPQGFASLLRALPEILEDGDNELPDLYRPTLHRMYTRLIELREDIEAMTKEVDNLVKHHPVCKRLTAIEGIGPIGALSLYAVMGSGKAFTKSREFSAYLGLTPRQYSSGGKTNIVGISKKVGNRRLRSILIQGARAYVYRMKEPKSLKDHWLKDLIERAGPNRAAVALANKNVRTAWAMVTQGTDYQRRLQLEMAA

SEQ ID NO: 453033 - protein, 392 aa, unidentified
MSQQHCHFDASRSLTALEQDSTIIAVIEMSQSKWLVAALVPGVERQPLKKLDAQEEELLKLLHRWRNEAGQAGREIKRIVVAYEAGRDGFWLARWLQARDVEVYVIHPTSIAVSREHRRPKTDRLDTELLTRAFLGWLRGEKRRCSMVAIPSIEEEDARRPNRERQNLVTEQTRIVNQMKAIFARLGIRTFRPTLRKAEEKLKGLRTAERTPLPENTRAELRRHLARLHVVREQIRAVEQERLRKLAAAPAAENGSHAMVRLIARVLGIGVETADMLVNEVLSRHWRDRKAVARYAGLTGSPDESGRRRRERGLARAGNARVRCGMIQFAWRFLRFQKDSALAQWFAARTADRRGSTRKTMIVALARKLLIALWRLATTGEASDGIVLRPAS

SEQ ID NO: 453034 - protein, 532 aa, unidentified
MWGATTSSAGQNNEAPQRPLHVLCAGWTCRNRGFALMRVQEPNAPGQRGGDEATATPALVTTSDRATPARHERIYVGLDIGYREHVAAASPLAVFNVGRNPDAWKRVKPIHFASDAIGLGRFQRYLDRHSPHPGDFLILLEPTGSYGLTALLYLLGKGYRVLQVDNRAVKDYREKIFGSETKTDDTDARLMARMGFLHELVGEEFSIQPVLLMNSDASALRGMVHDLAKLQKEITRRRNQLQQLAAVTFPELKTFFKGSTAAPAARALLEHFASPQHLAAAPTEHVADVLRSAHAYSHAARAAELQAMARTTSGVPTLTHHQWRQGWLIKQLELLENARQDLVDQVAHATATHPYARIIESLPVKSPIWTATLIGAIGDIGRFTTASQLKAYLGWYPQLSRSGSSTDSSELAKRGVRPARNVLGQMTVIMLSSTIRSNPFRDVYQRLTTRGMRPAAALGHVAGKLSVVLYGMLKTMTPYDERKHREQLGLLTAAEQPSSTPVEVALELVDLVDQQTDLAEEPTNTDDLRRVL

SEQ ID NO: 453035 - protein, 387 aa, unidentified
MSKPADLNRCLAPLDQDHTIIAVIEMSQSNWLVAGVVPGIARHPLKKLAPDQDALLKLLHRSREEAGQAGRAITRIAVAFEAGRDGFWLARWLRAHGVEAHVIHPTSVAVSREHRRAKTDRLDTALLKRVFLGWLRGEPEHCHMAAIPTLADEDARRPTRERECLVGERTRIVNRIKAALARLGVRGFKPTLRKALEHLDALRTPEGTALPPNTRAELHRDMARLHVVTEQIQQIEAARGERLEQAGAKGPNAMVRLLAQVVGVGIETADMLVHEVLSRNLRDRRAVARYAGLTGAPDESGRRRREKGLAKAGNARVRRGMIQLAWRFLLHQKESALAQWYRARTADARGSTRKTLIVALARKLLIALWRMVTTGEAPHGVVLRPAG

SEQ ID NO: 453036 - protein, 343 aa, unidentified
MQNDTRIAVDIAKAVFEVAVSHTPGKVSKVARQRRAQFLEFFAQQPAATVVMEACGSAHYWARRIEQLGHRVVLLPPHLVRPYVKRNKTDRNDAKGILEASRNDDIHPVPIKTPAQQVLTSLHRLRQGWMAERTARLNALRGLLRELGIFIPVGAEKVVPALWLLIEDAESDLPQAMREPFAAACWEIRDIEARVKMVERQLEAMAEQIPSVVDLLTIPGIGLLTATALVAFIGDARRFPSGRHLASYLGLTPREFSSGLKRYLGRISKRGDGYLRMLLIHGARSVIHHAKCQQQDRLREWAHELSKTHVHNKVAVAVANGVARIVWAVWTRQQPYQEQRRAA

SEQ ID NO: 453037 - protein, 344 aa, unidentified
MNVTTIGLDLAKKVFQIHGVDGESKAVIRKSLKRAQMVPFFANLPPCLVGMEACGSAHYWARKLEQLGHTVKLMAPQFVKPYVKTNKHDAADAEAICEAVSRPSMRFVPVKTGDQQAVLSLHRARQGFVKARTAQANQIRGLLAEFGLVIPQGIGSIVRRLPEILEDGENDLPGTFRHLLQRLGEHLKELDRQVAELDLQIQRWHQETAASRKLAEIPGIGPITASALVASIGDATSFENGRQLAAWLGLVPRQYSTGGRHHLLGISKRGDGYLRMLLIHGARAVIRVAERKLDPTDSWLKRLVGRRHKNVAAVALANKNARIVWALLAHNRAFRPDYVSAAVG

SEQ ID NO: 453038 - protein, 357 aa, unidentified
MEQITRGQIVRLGVDLAKRVIQVHGVDGDGRTVVAKALGRDRFLAWCAQLGPQCVIAMETCSGAHHWARRLTALGLQPRLIAGHFVAPYRMQGRQGKNDANDAVAVCEAASRPSMRFVPVKTAEQQGQLAVHRLREGFKEERTACINRMRGLLAEFGLVFAQSPQALRQALPDLLEDASNELPAVARFALQRAQLQWSELDAHMAWCDERIAAHVRSDAQAQSAMQLCGVGPVTASALAASVGDLRQFKSGAQFGSWLGLVPSQNSSGGKASLGRITKRGDDYLRTLLIQGAKSAVMTAHRRRDKISQWLVQLLARVGWQKATVALANKNARVLWAVLSKGLAFNADHISTKASAAA

SEQ ID NO: 453039 - protein, 388 aa, unidentified
MPQSNDLSRSLAAFDQDRTLIAVIEMSQSNWLVAGLVPGLERRPLKKLSPDEDALLKLVQRWRNEAAQAGREIKRIVVAYEAGRDGFWLARWLRRRGIEAYVIHPSSVAVSREHRRAKTDRLDTELLMRAVLGWLRGEKRHCSMAAIPTIEDEDAKRPSREHEKLVGDRTRLVNRMKAMLARFGIRTFKPTLRKAEERLDRLRTAEGTPLPENTRAELRRDMMRLRMVREQIKEIEQERLRKLTAAPAEKGPPTMVRFIARIIGIGIETADMLVSEILSRGLRDSKAVARYAGLTGAPDESGRRRREKGLAKAGNARVRRGMIQLAWRLLIFQKDSALAQWYRARTANARGATRKRMIVALARKLLIALWRMATTGEIPEGISLRAAT

SEQ ID NO: 453040 - protein, 426 aa, unidentified
MTNAHSIPDNAVLVAIDIAKARNDVLIEITGQKRRRRMVVQNTRAEHDRFIDLLRSFERPVVAGFEATGNYHRAVAWRLLDAGFETRLISSMALARTREAIHNGWDKNDPKDAQVILHMLRTGLSQYYQDPLAAGISDIQELSKTHEMVSKAKTETLHRILTHYLPLYFPEIERFRQNSRSEWFFAFLEQFPTPASIVALDKEAFVSAAWDVVGRKVSKARLIADIYETARESIALPIPIDSQAVAMFRMVLAEIRSLIRQRDAIEAKAEDLLGGQRDYEALKQVPGIGPINALTILAEAGDLRRFGHHRQFLKFCGLDLSTHQSGTFRGQTKLSKFGNARLRRTLWMAAQVAIRQKENSFREKYERYVAKDRNNADLKRKAFTAVTAKMARVVHAVIKSGNQYRPFFEGSAPSGRTPLCQGRGGA

SEQ ID NO: 453041 - protein, 420 aa, unidentified
MTDEIEWFVGFDWASEKHRACLLDRHGGVIGERDAPHGGAGLTELCDWLVDSAGAEAGAIAVAIEMPHGPVVEMLMERGFQLFAINPKQLDRFRDRFTVAGAKDDSRDARVLGASLRTDRHAFRRLAVDDPVIIELREWSRMAEDLQQERTRLANRVREQLWRYYPQALQLTDDLAADWFLALWHQAPTPAKAAKLRKTTIERVLHAHRIRRLGADAALQILRQKPLAVAPGATEAATAHIRTVAARIRLVNEQLKTAHRMLDELTARLEPSAESAPGQTSEQRDVAILRSLPGVGRINLATLLAEAWQPLRRRDYHALRALSGVAPVTRRSGKSCIVIRRLACNKRLERAVYHWARVATQHDPASRRRYADLRKRGHSHGRALRTVGDRLLAVACTLLQRQVVFDPDYNADPAQDDAAA

SEQ ID NO: 453042 - protein, 340 aa, unidentified
MPKYIRIGVDIAKNSFQVHALESEDCSATKRKLSRSGIVKFLAEVEPCAIGMEACGSAHYWARRFRAMGHEVKLTPPIYVKPYVKRGKNDAADAAAICEAMSRPNMRFVAVKSEDQQATLMAHKTRELLIKQRTMSVNALRGHLAEFGVIAAKGISHVEELVERAAAADLPAMVQATLGVLLAQLRSLDAATDELERAIVANHRRDPVSRLAASVPGVGALAASAILASAPDPQAFKSGRDFAAWLGATPKQNSTGGKEKFGSITKQGNRYIRRLLVLGAISVLRAAPKRKGALCDWLASLRARKPAKVVAVALANKLARMVWAIITTGEAFRTSIYAKA

SEQ ID NO: 453043 - protein, 344 aa, unidentified
MTYYAGLDVSLRTVNLCVINDDGELVAETKLASDVQDIVAYLDELELEIASVGLEAGTLTQYLTYGLQAAGFEVVCMEARQVKGALSAMRNKTDKHDARGIAQILRSGWYSRVHVKSMQSHHIRMLLSSRKAVLSKCVDLENEVRGLFKIFGIKLPPKLGHGAFDVAVRDIIEVDKTLSHALLPLLDARLVLYQTFRVLDNRTRKMAHADPVCVRLMSVPGVGFITALTFKAGVDDPHRFKRSRTVGAHFGLTPRRFQSGEMDIEGHISKCGDADVRCALYTAANAMLTRSRRWSPLKAWGMKLAKTRGHRKAVIAVARKLAVILHRVWIDDTQFRWGTEGVRS

SEQ ID NO: 453044 - protein, 468 aa, unidentified
MPGSSPHVPRRRSSSRSLRITHPHAAGIDIHSSVHWVAVPPGDAPPAPSGHSSQLPAHVRSFGTCTADLADLADWLGQCHIRTVAMESTGVYWIPLFELLEARGFEVYLVEPRQSRHAPGRPKSDVLDCQWLQRLHSYGLLSASFRPAEQVIVLRSYLRQRQMLIRYAGMHVQHMQKALEQMNVKLAEVVKDVIGVTGYAIIRAILSGQRDPHELAQFRHGLCKRTQAEIARALHGNWREEHLFALRQAVELHTFYREQLRRCDEQLQAYLASLQDRTEGRPQPPRTRRRYSKGVNEPAFDVAGALYRMAGVDVTVLEGMEASTALVVLAEVGPDVSRFPTVKHFTSWLGLAPQHQGSAGKIKSRRVRRGACRAGRALRLAAQGFHHARHALGAFYRRIQARVGAPKAIVATARKLAERVYRLLRYGAAYVCQGAEAYEAAYRAKLVKGLARRAAEFGYRLEPAPAGP

SEQ ID NO: 453045 - protein, 349 aa, unidentified
MNTTTIGLDIAKSCFQVHGVDAHGKTTLQRQLRRAQVVTFFANMPACLIGIEACGGAHHWARKLAELGHQVKLMPPQFVKAYVKTNKNDARDAEAICEAVTRPNMRFVAVKTVAQQELLMLHRVRQHLVVERTAKANQLRGLLAEFGIVLPQGLHRLRGVMPEILGDAENGLSCLLRERFSHLFSHLRELDATVIEWQRQIVLWHRENPLSRELEKIPGIGPLGASALVASIGDVRTFKSGRQLAAWLGLVPRQESSGGKTRLLGISKRGERYLRTLFILGARSVLRQSKRNPAQAASSWLGKLSARRHPHIAAVALANKNARIAWALLTHGREYRANYRSTRPAMAAG

SEQ ID NO: 453046 - protein, 389 aa, unidentified
MKRKIYVGMELISTKSRAFDNAPLSQAASLLMGVRHHKETIQVAYLTGKTKEIVKEQQIKHDEGQIKKFINKLKSEYNEIHCCYEAGVTGYPLYRYLKSLGAHCTLVAPGKIPRQSSDKIKTDKRDAIKLAKLIRSGDLESIHVPSEEDEAVRDYLRSGDSLRLDLGRNRQRLMKFLLRKGNVYSATKYWTVSHYKWLNNLHFENAILQETFNDYYSRVKVQEENLKAMDQKIKEIAESELYREEVGILRCFRGVDYLTAMFLLCEVCDFKRFKTAGSFMSFLGLVPGEYSSGSKRKQTGITKTGSPRLRRILTEAAWQHRFPGTGSKIVAARRTGQSALVVSLAEKASLRLHKKFRNLQLKGKTSQVMITAVSRELSGFLWAAMNLVA

SEQ ID NO: 453047 - protein, 391 aa, unidentified
MIFVGIDVAKDKHDCFILNSEGTVLADVFTIANNRIGFETLLSRIQSCSQGESKIKVGLEATGHYSYNLLGFLLDSGLATYVINPLHTNLYRKSLSLRRTKTDRIDARTIAMMLMSDVDLKSYSNTAYHNEELKSLTRYRFDKVKERAKLKSSVARLVNILFPELEKLVSSLHIAVVYALLSNYPGASYIANANTEELAETLCTASKGRYTKSKTAEIQVAAGVSIGSKMPAKSMELKHTIALIHELDKEISEVESAIDKITSQMDSPIFTIPGIGRHMGAMILAEVGDFSNFASADKLLAYAGLSPSTYQSGQLQNCYAHMEKRGSRYLRYALFNAAKYVCLWCPTFSAYLEKKRSEGKHYNVAISHAAKKLVRLIFAMQRSGKAFLADY

SEQ ID NO: 453048 - protein, 350 aa, unidentified
MQIIGVDLHTRQQTVAMLNVETGEIVEKTLPHEGDSVREFYSTLAGPTRVGIEATGSMQWFLELMEELGIDCEVGHPAKIRAAEPRKQKHDRRDAALVLQLLVENRFPSIWMPSSEQRDVRSLILYRHQWVRIRTRVQNALQAIALSHGLRRGSSLWSEEGQQTIASLSLTRYTAERRTALQSLYRHLEEQIEDLNRKVEELAWQRPQARRLMTHPGVGPITALATETFLGEPKRFVDGKAVASYVGLIPSEHSSGGRQRLGGLSKQGNPLLRFLWCEAVGHAVRKDAELQRFYQHKLVQKGLGKAKVAAARKLGIRLWILLRDQIDYQEFCRRGQLRQKHGGAHAGMPA

SEQ ID NO: 453049 - protein, 338 aa, unidentified
MAIVMGLDQHRAQITAEWIDTETGEVSRARVSPADRVGVRRFLARFAGVELEVALEATTGWRFVVEELERLGAGVHLAEPAETAGLRSPKSRAKGDRADARHLRELLMVRRLPESWIPPAHILDLRARVRLRHALSEHRREWQQRIQAVLYHHGCPQRTALMTADGRAWLDAQPLPVQAREQVTIALAMIDAVDRQMAPLEKELRAYARRQPGCKALMRHYGIGELIAVTILAELGDCRRFSSSRQAVRYAGMDITVHQSDQRRAPGHLSRQGPSALRWARYEAAQVARRRGSPDREYFEQAADRLGGNRACLSVARRLLKRSYHTLRELGDEALQPA

SEQ ID NO: 453050 - protein, 423 aa, unidentified
MEVMHERVAGLDVHKEAVVCCVRIVAGGKASRECRTFETTTAGLEALLSWLTQSGCTHVAMEATGVYWKPVWNILSDGKFELILANAAHIKNVPGRKTDVNDAMWIADLAAFGLIKASFVPEEKIQELRSLMRARKQLVREQTRHIQRIQKTLEAANIKLDSVISDIMGLSGRRMIEAMVAGVRSPQKLAQLADRRIKASPKALYDALHGRLTDHHRFMLQLHLGQYDALGSSIAQIDAQVDAAIARIDEEAAAGRGSFRDLTALLDGIPGIASLAATSILAEIGTDMSRFASDGHLVSWAGLSPGQNESAGKRKSSRLRKGAPWLKTLLVQCAWAAVKKKDSYYKAQFNRLKSRRGPKKAICAVAASMLTAIYHMLKNGVEHRDLGAGYFDRRPAAQKAKRLVAQLAKLGFKAELHPLAEAA

SEQ ID NO: 453051 - protein, 330 aa, unidentified
MKKYEVILGVDVSKLTLDISCADRHLHVKISNDSVGFNDLKKWCKLNKISLLSTFIVMEHTGGYEYRFIQFCESAAIDYCRLSPLEIKKSLGMARGKNDKVDSFRISQYGEEKIKRLKPDKPLNKNILLLRQLLSYRKRLVRESAGLAATIKERNHMYDVHSKDAIVRISKDKIKTNRKHILQLQEEIILLIRLDAAFLQNYRILTSIKGIGPINAWMTIAYTENFTSFTDARKYAVYVGVVPFENSSGTSIKGRMRVSVLANRELKQELNQAAKVAIAHDPEIRGYANRKLETKCWQLVLNNIKFKLILRMFSLIKRQEMYVENYQKAA

SEQ ID NO: 453052 - protein, 334 aa, unidentified
MIAVGVDTHKDCHVAAALDRLGELRGELTIDANERGYAELAAWARRFGDDVAVGIEGAGSWGAGLCEYLQGEGVVVFEVERPRRRERRVGKSDRLDALAAAKRVLAGEGLSTPRARGVRGAVQALLVAHRSCVGERTRLLNQLQALHTTAPLALRERIGEGNGKQLERRIAAIHAGACGPVEERVVFAVLRDLARRSRALGAETRRYKRELAAMIGVLDPTLLAEPGVGPISAAKLIACDPARFKHEAAFARCNGTAPLPASSGKTVRHRLSRGGDRQVNNAIHTIALSRSVHHAESRAYLARRVSEGKTEREAMRALKRHLSRRLYKRLTQCP

SEQ ID NO: 453053 - protein, 367 aa, unidentified
MKKGSTAAAKQSGNFAQQKLTIGLDLGDRNSWYCVLDESGNVQLEQRVSTTARALGEVFGTMPRSRIALETGMHSPWVSRLLQGLGHEVIVAHARNVRLIGESRRKDDRLDAQALARLARMDPQLLCPVKHRSAQAQADLSLIRARAGLVRARTALVNTARGLAKSYGQRLRGCDVRNMNPEKAEGLSPELRAALEPLLAAMASVSEHIAEYNEGIEKLAQENYPQVALLKQVKGVGTLIALTFLLTLEDPHRFRKSRDVGCYLGLQPGRRNSGQSQPQMHISKEGDPYLRTLLVQGAQHILGPFGPDCDLRRWGLKLAERGGKSGKKRAIVATARKLAVLLHHLWVSGEVYEPLHNSQQSALATAA

SEQ ID NO: 453054 - protein, 422 aa, unidentified
MLEQTQDEQEIIERVAALDIGKAELVCCVRVPDPKGGSRRVQEVKSYSTMTRSLQVMAERLLDLGVTRVVMEATSDYWKPPFYLLEAHGFEVWLVNARDVKNLPGRPKTDRLDAVWLCKVAERQMLRPSFIPPIPIRRLRDLTRYRIGLVSDQTREKNRVEKLLEDSQIKLSVVASDIFGVSGREMMAALIAGERNPQVLAQMARTAMRRKIPQLEEAFVGHFTDHHSFLLNKMLARIDALDADIADLDTKIEAHLAPFAEAVARLDEIPGIGVTAAAVIIAEVGVDMTRFPTPAHLSSWARFAPGVKESAGRKKGTGSTGHGDRYLARVLGEAAVGASKTNTFLGERYRRIARRRGKKKAIVAVGRSILVIVWHVLSEDTTRFHDLGPGYYDSRINPERKKRNHIRELEALGYKVTLEPAA

SEQ ID NO: 453055 - protein, 356 aa, unidentified
MLTTIRPQEYDLCVAIDTSKKSYSVTSMSHERSYQSCKMPADPKNLMHYTRKRFPAKRPLFVYEAGPGGYSLHDELTKNGFSCMIVHPASLAKAANERVKTNRLDSKKLAEQSLSGQLQSIRIPDMDYRQLRHLATTRQQYAQDIRRAKQRIKALILFENLPVPEEVNAFKHWSRRYRQGICRIECPNETVRFRLQILMDDLEHSQNRLLSVHRQLQQFYKDHQGLHKNVQLLRTLPGFGFVISMYLLSRVCDPSRLRHVRELGAFAGLVSSEYSTGEDHNRGSITHMGDRMLRTLLIEAAWVAIRKDPELHRFYCRMKAKHSPKAAANKAIVAVARKLTMRVYRVLKDQRPYEIR

SEQ ID NO: 453056 - protein, 341 aa, unidentified
MSQLLYAGIDVAAAELVLAVCDADEAFSAELRFPNTTAGIARLKRCLLKLGELKLCLEPTSRYHLAVLQALCAVPQLYVGVANPYAARQFAKASGQRGKTDRTDARVLARFALHCAPARYLPPRPVAVELRAITRRQGALIAARSAEKNRLHAAVRGGDPRCVRRSIERQIAQLGREIAVLEQTALAVARGDAQLAECFTELVSAKGIGQRSALALLGELSVLPAGLGKRQWVAQAGLDPQPQESGSSLHAPRHISRRGSRTLRRALYMPALTMSQRSGPGRAYYLDLLARGKRPLQAIVALMRKLLLAIWGMFESHTTFDPARFYHSSARPRREYLQDGG

SEQ ID NO: 453057 - protein, 390 aa, unidentified
MIYVGIDVASNKHDCFLMTDQGEVYSSSSFTVSNNEEGYKKLHNSINDFVKRVNDSNVRIGLESTGHYSNNILNYFFKVGFQITLINPILTNMDRKATTVRKTKTDKVDSRGICMFLDRNKYDFKSYTPLSYHKNALKSLSRERFSLVKDYTKQKIKLQRLINIVFPEYLSLFSTLFASSSLNLLYNYPTPNLITRANVSSISKLLHGRCSTTAEKIQSLAVSSIGQSDHFYEFEIRLVIDTLRFYENQIELYNNQIKLIMDDVGKSIMSIPGIGYTNGAMILGEIGDINTFKSADKLLAYAGLDPSVYQSGKYDASHNTISKRGSKYLRYALHLSSNVICQHDRTFREYYLKKVKEGKHHYVILGHIDKKLVRVIFSILKNNTAFIPQN

SEQ ID NO: 453058 - protein, 343 aa, unidentified
MKLSRVGIDLAKNVYQLHGVDRSGKTVWKRRLKRHQWFKVLLDKTEPGCVIGMEACASAHHWGRQLQSRGYTVRLIPPQFVKPYVKSNKSDAKDAEAICEAMSRPNMRFVTVKTVEQQDIQATHRIRAELITQRTAKANQIRGLVAEYGLVAPKHMSSLRAAIPCWLEDAENGLTGDFRQLLQGVWDDLLMLDDRVGEMDKAIKRLAENHEECVRLQQLRGVGPMISTAIIASVGDARQYRSSRQMAAAIGITPKQHSSGDRDRLLGISKRGDVYLRTLMIHGARAVVATAKHKDDRLSRWVTGIATKRHPNVAAVALANKTARMAWAMLRNETDYDPDFAIR

SEQ ID NO: 453059 - protein, 340 aa, unidentified
MGKRYIGIDLHRNQFTCCVRLHNGRSYLSQWRLENLPRFVKKLRPSDELAVEITGNTRLFVDAVASQVGRIAVVDTNQFRVISRSVKKTDANDARLLALYLSKDLLPEVRMKDKQHGQLASLTQTRETLVKLRTALKNKVNNILSARGINLPKEALSSEKKLNEILALPFDELVQIELRIIVEQIRSLNKSIVELEKTIAEEASKLEGHKNLISIKGIGKITSAILLSVIGDISDFPDESRLASYFGIVPRVANSNETERSGHIHKRGTKLGRTALIQSALIAANYSPYLKNFYVRVKVRRGAGKAIIALARKFLGIIYRTLKNKWVFEDFTNFTLAEAA

SEQ ID NO: 453060 - protein, 349 aa, unidentified
MTVYCGVDFHARMQTVSWMNNEDGEIKQKELNHCADDIRGFYRQFTGEVIVGIEAGGYSSWFEDMLERMGCVVWVGESSEIRRLAGRRQKNDKRDAAHILELMVSGKFPRVHRQSPESREVLGQLRYRHRLVKIRTMSTNCLKAIAIGAGLSEKKQLTTRKGRSKLENAGLSEVLSEQSKKWLELIDDVTKKIETVEGWLEQRAEGDQRVERLRTHPGIGLLTGLALVHMLEPVERFATTRKVAAYVGLDPMEDSSAEKKRFGKVSKAGSRLLRFLLVEAGQTAAKRDPQLKSFYRRVRDRRKSGKAKVAVARKLAVRSFIMLRDQIDYTEFLRRGVEARSSRKCTSTD

SEQ ID NO: 453061 - protein, 418 aa, unidentified
MKKHSKSSQRSEPSLKRTKARGPVQRDAKEVLAEVLGKLTGKLDAPAVSTSAKGNRRGNTVGPNRDRLTVGVDLGDRWSQYCILGLEGETLAEGQMRTTQEDVREFFQALTVARVVIEVGTHSAWVQDVISERGHEVLVANPRLMEGSKRRKRKSDRIDANKLARLGRVDPQSLYPIRHRSREVRQDLVVLRARDALVSVRTELINTARGLVKSMGTRLPRCSSPSFAEKVKDAIPVEVQEALLPLVQLVETVNDCIARYDQKIEELGREKYGHTTLLRQVKGVGPITSLAYVLTLEDPQRFSSSREVGPYLGLVPKQEDSGDSQPQLGISKTGDRMLRRLLVGSSQYMLGAFGPDTDLRRYGLRLCERGGKNAKKRAVVAVARKLAVLLHHLWVTGDVYEPLHHTGAEIRTAQATAA

SEQ ID NO: 453062 - protein, 352 aa, unidentified
MKKYNQVIPEGKTVFIGIDIHRNSWHLTAIVENEVIFSGALPAAPEALLKFLKRYDNSSIESVYEAGYSGYWLYEMLNHSGIKCTVTPPTLLPMEYGNHVKTDRRDSRKLAFLLSKGILKKVWVPSPQLCAHRQVLRRRQKLIGDRMRVQHRIKSELYFYGVTIAMPRGTWPAYFVTQLKEIEFAEPFQQQSFWVLVEEYEYLNQSVEQQTRLLKELAASEHYAEQVRLLRTIPGIGPISAISLLLELGDISRFARAEQLAAYVGLTPAQYSSGDNIRMGRISRCGKNSLRAVLTEAAWSAIKKDSELRSFYENLKFRRGAKKAIVAVARRLLLRCRRILLDRRPYCLKKAA

SEQ ID NO: 453063 - protein, 338 aa, unidentified
MKLFAGIDLHSNNSVIAIIDNDNKRIFKKKIKNDLQAVLDSLAPFKEQIHGIVVESTYNWYWLVDGLMDQGYRAHLANPSAIKQYEGLKHSDDISDAFHLANLLRLGILPEGYIYPKEQRSVRDLLRRRMHLVQQRTAQILSFQNLVAKNLGRSMHVHEVNRLSDEDVEGLFEQQHVMLSGKACIATIRFLAGQIKAVEKAVHKAVRLSKQYQLLKTVPGIWETLAKTIMLETGPIERFSRVGNYASYCRCVKSSRLSNSKQKGAGNSKNGNRYLSWAYVEAANYALWNYDYVKKYYQRKQAKTNSVVAIKAIAHKLSRACYFIMRDQVAFDPQKAFS

SEQ ID NO: 453064 - protein, 379 aa, unidentified
MEIITQNEKILYIGIDVHKDTYSLCCFDFHKNELSDEMTIKATTKAVIKYLEAIKKKHKEEILFACGYEAGPTGYGLCRGLQKAGYGCVVMAPTTMSNPDGKRRVKTDRIDARAIARILAYKSYSQVHLPSEEMEALKEYTRARDAKKRMFKKAKQELLSFLLRNGKSYPESGNYWTEKFFKWIKTVQFSEKWMQEAFNEYLAEVYSLKAKIELMDMKIREIAELEIIKDKVDKLVCFSGIDVITAVETVVEIHDFTRFATAAQFVSYFGLCPGEDSSGKTKNMLPLTKAGNKRVRALFCESAKAIKRTNPYGQKSKRILERQKNASPEIVAYADKATKRIRTKMKHLEERGKNYNVSSAAGARELACFVWGMMNGKIA

SEQ ID NO: 453065 - protein, 310 aa, unidentified
MPQTKKGVPPHDTLHRTGRSWQGKVYVAQDESGNMTAQGKVAATAEGFCHLVETLEAPKGTNIGLDTGAQAMWVARLLSGLGMQSVVIDAHEVRRKARRIGQKCERRDAFEICDGIRRGLYTSMVHVPDAQLLGLRQILSRRRHFVKVCTMQINAAKFLLRSVGLGREAASLGTLQAWQKLLGRPAVESVREHLAMHADLWRVAQEKVILLEKELGEALAPFKATVRRLQTVPGVGMITAATYIAVLATAERFPDSSRVVSYIGLAPSTPDTGDHRRRGHITKRGSGALRAMLCECGHHAARRHHPLNPY

SEQ ID NO: 453066 - protein, 354 aa, unidentified
MKRTTKYVALDVHQATTSASVREEGGRVIARTILPTAAPALLEFFQGMRGAIHVAFEEGTQAQWLHDVLAPLVDRVIVADRRGTAQQGNKGDQTDADQLSELLRRGALRAVYHSRSHRETIRELARAYTNLVEDSTRVMLRLKALFRARGIRTPGKHVYHPSHRAEWLARLSGQGVHFRATALYAELEVLRELRPKAKAALLTEARRDPAWHVLRTIPFLGPVRVALLLATMQTPWRFRTKRNLWAYSGLAVVSRSSADYLLVQGRPVRRGRAPMTRGLNRNHNRVLKNVFKSAATAATARPGALQAFYRGMVARGMREDLARVTLTRKLAALTLRLWKTGDHYDPAQLTVQAQ

SEQ ID NO: 453067 - protein, 515 aa, unidentified
MWDIWLNEESNNHDILDMKTTPRDLKSDRVSPATPAAPAKRSRRSRPPAQSPATDGLEQINLHAAGIDVGSAENFVCVPASAVKAGEASVRAFKVFTADQDALVEWLQACQVKTVAMEATGVYWMSLFDKIEAAGLEVLLVDPHSVRQVPGRKSDVMDCQWLQQLHTYGLLRGAFRPAAAVRKLRVLCRHRADLVCEGASHLQQAQKALVQMNVQLHLVVSDINGETGLRIIEAILAGQRDPAELAKLRDPRIKKSTVAEMTAALTGHYPEEQLFALRQNIDAWKFFQGQLAACDVQIEAALKAMASAAKAGAPPAPPKPVPTAAPGSAGAKKKRSRPLHGNNALTVDLSEQVRRICGVDLMNVCGLNLLSVLMIVAEIGVDMSRWRSAKAFSSWLGLCPGTKISGGKKLSRRTRHVVNRAAILLRLAALAAGQTDTWIGRFYRRKRAHLGAPKAITATAHKLACVIYHLLKYQEEFLPLDVAIYDIKAQEQRTRRLRKQAEELGFELVARKEAA

SEQ ID NO: 453068 - protein, 339 aa, unidentified
MTTVKVSVGIDVSKDSLDVCLGLLSSDQHQKFPGRAKFPNTRAGYRKLAALAARQLPSKKSPLWFVMEATGVYYEELAFYLSEHGFQLAVILPNKLKHYAKTLDVKSKTDALDARAIAQFGLERPLSTWTPPSPQMRRLKELTREHTTIQDHATQIKNQLHAKHHSHAPGEATLTRLEAQLGLFKQQLREIEREIRSIVASDPDLKARVANVTTANGIGLMTTVKVVGETAGFALIRSLKQLSSYAGLDVALRESGQRRGKPAISKKGNRHLRRAVFMPALSAIRCNKQLKRLFLRLVETKGNKMVALMAVARKLLGLIYTLWHSNKPYDPNYVSAHAA

SEQ ID NO: 453069 - protein, 352 aa, unidentified
MRILAIDLGKFKSVSCFFDTEANTTEYWTLTTDRQYLLTLLKQYRPDLVVFEACSVAAWVHDVCVEHGCRVLVCNPHQEAWKWKNVKRKTDKDDALKLAKLAALHQLVPVHIPAVQTREHRWLVKYRKTIVGRINRVQNNVRAIFVQHALPLAGGFRCWTAEGLEHLEQQRKPLAGCAMEELWRGQLDLELKEYQHLQQELKVIEEKLKQIAQDDERVQLLESIPGVGRVTAEVIVTHLDRPERFKNARQVSSYAGLVPRQFQSGQMDRQGGITHRGSRLLRSALVECAWVMLRYNPWAKELYERLCHGQKNRKKKAIVAVARKLLVRCWAMLRDKQRWQAPTPETTMSTRP

SEQ ID NO: 453070 - protein, 514 aa, unidentified
MSEGTAVPPFSRLSPRLLRKHSAWHIRHIPLTQNFHPQPLAPARKADWVHAHCARFRSPYAAQDKPFASGFTNPDPNGGDIMLKINYMSTLFVGIDVSSKTNAVYAMDFEENKYISSSFGNNQPGADKLVNMIAECMQKHKNLDTLLIVLESTSVYSVHISNFLSASEVLMPYRPYVFCVNPKATSNYRKSYIGMEKTDPTDAYLIADFGRVGRTKKLEPWRGGQFIALKRLTRHRMHLSECITREKTYMVSNLYLKFSELQLLEGDDRPFGSLYGATSSAVLTEFLSPQEIIDMPEEDLLAFLAEKSRNRISDISKTSELLRKAARDSYRLDKCMYEPLNISLASSFNCIHAYQKEIRLIEQAIEKCINGMNPNALIILRSIPGIGPVWASGILSEIGDITAFHSSDALAKYAGLYWPKGDSGDFTSEDNQMSKAGNPYLRYYLGEAANSVRKHIPEYADFYARKYAEVTKHQHKRALALTSRKFVRLVFGLLVKNQLYTGEKLDTEYNTESN

SEQ ID NO: 453071 - protein, 375 aa, unidentified
MEHDSTLYVGLDVHKDSITVAYALAMAEVELLGKIGTSKADIDRLCKRLQSKARRIRIVYEAGPCGYGLYRQLAGKGFECMVCAPSLIPKKPGERVKTDRRDAVKLVRLLRAGDLSAVYVPSVEDEAFRDLSRAWVSAKDDLKRARQRLKAFLLSHGVRYTGRADWGPAHRHWISEFAFDSAWQQLAFDEYRRAIEDRLAQCSRLEAALREAVVNWRFYPAVLGLQAMRGVQFTTAIGILAELGDLSRFIHPRQLMAWLGVTPAEHSSGEKRRQGSITKNGNSYARKLLIEAAWSYRHPARVSPEIQRRHEGIPKAIVDRSWDARFDCAGAIGDLPHVARTRTLRWSRWPRLSGFIWDISQLAMSLAVPNEARAT

SEQ ID NO: 453072 - protein, 428 aa, unidentified
MADHFNNKPYGAWIAIDIAKDFNAVLTETRDGKRQLFRMANSAQDHDRLISHLRALPVPCIIGFEATGNYHRTLGHRLVAEGFETCFISSVASARYREVMFNSWDKNDPKDAAVLLELLKQEITQRYVDPLIAGHHDLQELSKTYYQVTLSRTRLQHSLLTHYLPLYFPEMGKWWNSTRTAWWINYLLRFPVPSAITKYTQDEFCQIASPVVGRKVNKAAKLIELYETAQHSIGLLVAEDSLACKTFQVQLRRYQEINDCRTQLEATAQAVLANNPDSAILQSVPGIGPINALTILAEGGDLRRFDHHRQFLKYCGFDLAKNQSGNYRGQEQISKRGNARLRLALWMAVNAAIGQSENSFQQKYSRYIQSAPKDKDLQRKARTAVAAKMARVVYGLVKSQKMYQSYYEKALPSGSIPLCGAVEAARTS

SEQ ID NO: 453073 - protein, 312 aa, unidentified
MYYCGIDLHSDNNVLGVIDAAGNRLSIKRNANDLEAVKKALIPFAANLEGIVIESTYNWYWLVDGLQEAGYKVHLSNPAATEQYSGLKHGDDETDTWWLAELLRLKLLKEGYVYPRAERAVRDLLRKRGQLVRMRTQNILSIQNLTCRNTGGQLNARQVKQLKPVEIKELYKEETERGLAVICSINVIKALEKQVETIEKRVKSKIKLSQPFQLLKTISGIGEILSMVIMLEAGDMSRFPSVGNFSSYCRCVKSIRLSNNKKKGAGNHKNGTNIWHGLSWKQRILPYGMSPSYRSFISANLQRKDLLWHVRQ

SEQ ID NO: 453074 - protein, 386 aa, unidentified
MRIALGLDLADKKCAAYAVPVGKAKKAQREFLDGFNKDFRRVPTTKEDLQRMVDVLKDESDGIHVLIENSTITHKVYWLLVGMGCEVLVAQSADLLRITESVTKNDDNDAMELAAYMRRRLNGEDEFRTVVMTPPEIMAKKMFIRAIYVDKTYLSECKKRLRFRLKVMGADLRREYKDISCERSLTQLRETGDPYLCYEVAVIRATKSRIQDGERYISTLFKDDPYFDLLMTIPGFGLEISAYISTIIIDIDRFDDKKQLEAYSGLVPRQRSSADSDPNCRTTHHGDEWAREFLGYAVKAHVMWAKDSVVTIMYNRLRARGMPYKKVITACSRKMVDVVWSVLKNGRSFTSDQNVLRQARGAAAEIERMDSELSEQELDAKYAEAA

SEQ ID NO: 453075 - protein, 341 aa, unidentified
MPNSTGFQSIVGIDIAKSVFQVYSCDTDTGVITNEKIKRDKLLERFTNVPPCLIGMEACGSSQYWARKLIALGHTVKLMDAKLVKPYVAHNKSDKADAEGIYHALMNGTRCVPVKNATERDIDTLLTMRTRLVKLQTGDINHVRGLLAEYGQIMPCSRKQFLEKVDKCINSLEGDAVQPIIDEMRTAVSGIRDREMRISKISSTIGDLAQKTKHAAHLLTVPGVGIITMAYMCVLLADPTVYSSGRQFAAFLGLVPMHTGSGGKTITTHIPRRCNQQLRALLIECAHAVARAKYKTPWVKAILAKKPAKVALVAIANRIARQCWAVAAKGEAWKDLSVTAA

SEQ ID NO: 453076 - protein, 323 aa, unidentified
MSPVIGIDVAKRSFDVAIDLTNGKHRTKAKLSNDAKGFQALQAWLQTHAQPDSWIAMEATGTYHQALAEFLHARGYRVCVLNPAQTAAYARSQLSRVKTDRSDAKLIASYALRHREQLRRWSPDPPALKQLKALVRRRQDLQQMLQMERNRLDVAPAQVKDSIQVHLADLQHHIAQIEQAINDHIDQDPTLRGQRELLVSIQGIADTSAALMLAELGDVRRFADASAVTAFAGLNPCLQESGERKGHVCISRTGSPRLRAGLFMPALVAMTHNPIIRALKQRLSERGKTGKQIVCAAMRKLLHLAYGVLKSGTAFDPKRGLAC

SEQ ID NO: 453077 - protein, 343 aa, unidentified
MGEVVTIGLDIAKSVFQIHGVDGDGAVVIRKRVSRGKVLEFFADLSPCLVGIEACPTAHHWSRELQSLGHTVKLMPPSYVKAYLKRAKNDANDAAAICEAVTRPSMRFVATKSKEQQGALMLHRTRQLFVRQRTMLSNAIRGQLAEFGIIAPVGRLGFARLLEMMDGPEELGVPKTAWVCLMGLAEQYQRIQGEIGKLEQCIQAWHRSSELSRRLEEIPGVGPIVATALVGTITDPHAFASGRHMAAWIGLVPQQKSTGGKDRLGGITKQGNRYLRWLLVAGAMAVIRYAQKHGTAKRPWLARLIERKPTKVAAVALANKIARIAWVIMARGERYRGPAPLAA

SEQ ID NO: 453078 - protein, 411 aa, unidentified
MSAVYSVGIDVALRSHRVAVLGPDGEAVGKSFTIESTADGFTMLVDTLRARGATPATTVIGLEATGHLWENLEAHLTGAGYRVVVLNPLQTRRYRDVLRKKAKTDDLDAYVIAGLLRSGQAAASYVPDETIQSLRELARLRARLLRDRQNYLRQLGAQMGVVFPEHAAALGDLLTARARGILRACPTARHLAAATAPTIHHAAHSAGARGFTLADATRVRDLARGSTYSGKAATARGQVVRMLVTQLERLTAAIDELDTAMAAELPPPAADGAPSDGEVLQSLPGVGAHTAATLLGELGTLSRFTSGKALVAYVGFYPRLAQSGERAAAPHLVDLGSRIVRRTVYLMAVNAIRGSAEFRTVYLRKKAQGKKPKQALIVVAVKLLHTLYAMARDRRLYSPSRLLVAPAATGS

SEQ ID NO: 453079 - protein, 353 aa, unidentified
MITIGVDAHKGVHVALALDEAGQELSEWQGLNNAAGWKAISEWAASLESSRQWGIEGAWGYGRNLAQHLVAAEETVYEVNPRWTAMGRRSARKPGKTDRLDARAVALLVRQEASALPRVHAEDDTAVLDLLTSEREAAIAESTRLRNQIHALLSQTDPEYRTYLPTLKSQAALGTLETYRVAGSNPLQAQRAAAIRRLTQRLRLALSQAEELAWQIRDLAGRRFSPLTNLCGVNLITAGTLAGILGPGDRFATDAQLAAYAGVAPLEASSAGLVRHRLNRGGNRRLNSVLYRIVLTQAHHLPAAKAYIDRRVSEGKTRREAHRALRRFVIRAIWRLWQECQPAQIAASAEMAA

SEQ ID NO: 453080 - protein, 345 aa, unidentified
MHYIGLDVHSKVTAICILDENGNKKERMLDGSLRTLVAAMQKVKKELGGPVKVCFEASGGSGWLFDQFTAMGFKVQVAHPGKLRLIFRSRHKNDRVDAAKLALLLKLDEVPLAHMPPAEIRQWRALIEFRSRLVGQRAACKNRIRALLRSVAINPPRGLWSKKGLTWLAAQEELSSLQRVQREMLVHELADVAKRIGLVEKELKTFADKMPSVALLMSMPGVGIRTAEAVVAYIDNADRFRRNKSVGCYFGLTPSEDTSVKIRLGHITKDGPGLVRRLVTEAAWQATRRDATVRAFFERVMRGEANRKKIALVATAHHLLRVMHAILRTGQPWRTTTTDADVAAA

SEQ ID NO: 453081 - protein, 344 aa, unidentified
MKITTIGLDLAKNVFQVHGIDAAGEVVVRRALRRGQVFAFFSKLEPCLVGMEACGTSHYWARELGSLGHEVKLMPPAYVKPYVKRGKTDAGDAEAICEAVTRPTMRFVAVKSADQQSVVMLHRTRELLVRQRTQLVNIIRGQLAEFGVTLAKGIQHALKFVRQLLDGQVLDIPDLGVKVVMVLAEQLRQLQIRIGELEKELKRWFRADRVAQDLATIPGIGFITASALSSTVTDPNQFTSGRQFAAWLGLTPRANSSGGKERQGRISKMGDQHIRRLLVSGMTSQLRWARRHPDAHPWVASLLARKPAKLVAVAMANKAARIAWVVMTRGEVYRTRQSSTQLTA

SEQ ID NO: 453082 - protein, 371 aa, unidentified
MEHTRFVGMDIHKEKISIAVAESGRGGVVEYLGEIANDPGAIRKLCERLGRPGKPLAFCYEAGPCGYGAHRELTSLGHRCEVVAPSLIPKKSGDRVKTNRRDATMLARLHRAGELTPVWVPDADHEAMRDLIRLRSAVRQIVTRARQHLQGFLLRHGRKHGLGTARRMAYRRWLSTLAFEHPAQQIAFQDYVDAVTDGERRLQRVEEQISSLLPEWNRRPVVDALQSMRGISLINAVVLVGEVGDFTRFSNPRQLMAYFGLVPGEQSSGETARRGGITKTGNSHVRRALIEGAWAYRMRARIGRHKVDRIEALPKAVRDIGWKAQVRLCARYRRLTARGKTANVVNVAIAREMVGFIWSIACTIQSASKAA

SEQ ID NO: 453083 - protein, 349 aa, unidentified
MKDTITIGMDLGDRNHIAVVFDAKGHELAIAKVVNTSQAISAYFSAYPRATVAIEAGTHSAWISHLLTRLGCQVYVGNPRKLRFIWDSIDKSDERDARMLGMVCRLEPKLLWPVRHRSSQAHQDLAMIKSREMLVKTRTALINHTRGVVKTNGGRLPVCSTSSFVSRCTSHVPDQLWPALQPIFDTISQLSQQIKEQEQQIKRISRQRYPEAERLQQVPGVGPITALAFVLTLEDPDRFGKSRQVGPFLGLTPRRDQSGKMDRQLHISKAGNRYLRKLLVGCGHYIMGPFGPDSRLRRHGLGIAQRGGKNAKKRAVVAVARKLAVLLHRLWISEQSYEPFYANGDKLAA

SEQ ID NO: 453084 - protein, 351 aa, unidentified
MNNAAARNKREITIGLDLGDRRHTYCVLDKAGKMTKEGSLRNTREQLATVARSYPGATAVMEAGTHSPWVSRFLQELGLRVIVANPRKTRAIYQNERKSDRRDAMMLARLARMDLTLLHPLEHGSQEAQQDMLQLKLRDSLVRARVALINAVRFSLKSLGYPVSNPSGASFHKFVLKEVPESIGEMIAHNVAAIAELTHRIKALDASISRLAAERYPETIYLQQVSGVGPITSLYFVLKVGNPARFQRTRDIGAFLGLCPKRDQSGETDKELRISKCGDQYLRRLLVGAAQHILGPFGADSALREQGLRLAQEGTAKAKKRAVVAVARKLAVLLLTLWKSREPYEFFPTMA

SEQ ID NO: 453085 - protein, 349 aa, unidentified
MRFYNGTHRHWCGIDLHVKTMYLCILDENGQVVLHENLPATPEALLSAVAPYRSGLVVAAECIFTWYWLADLCAREGIAFVLGHALFMKAIHGGKAKNDRIDALKIATLLRGGMLPQAYVYPAGMRATRDLLRRRLHLVRKRGQLLAHIQMTSQQYNLPALGKRIAYPSNRKAVAEHFPDRVVSKSIAVDLALLDRYDGLITDLELYLVRQAKQHDPQAFQRLRSIPGVGKVLALTILYEIHDVLRFDRVQEFASYARLVKCAKESAGKKLGTSGAKMGNVHLKWAFSEAAVLFVRHSGEGKKLLAKLERRFGKGKALSILAHKLGRAVYFMLVRGTAFDAKRFASTLS

SEQ ID NO: 453086 - protein, 353 aa, unidentified
MEKIKSKIFFKGKKIFVGVDVHKKRWVITIRTYDLELKTFSMIPSAEELERFLVDNYEGAIFYIVYECCFSGFWIYDYFHQRGYNIIVTPTNRIYRDGSIVKTDKIDSRKLAFQHSRDLLREVKVPEMKIREYRSLFRIYDKEKMRQGQILRQIRSILEVRNHPLKWERFNKEMVRKLKSVKFQEEIFNKKFASLLMEYEYVQEQIKDTEERIKEIAKDKELSEKVRRIEKINGVGIISAVRLVVYLFDMKERFESGEKLVHYLGLTPGEHSTGEQIIRSRTGLIGNKQLRSIIIQLAWIAVRKDGNLLDKFDRVYKSSGCKQKAIVAVARKLMMKVHSVIEKEEDYEINKAA

SEQ ID NO: 453087 - protein, 378 aa, unidentified
MKKGRSNSDKVVVSSSTNPKSLKERPMNQIKYIGMDVHKATTVIVVLNTAGKAIAEAVIETTSSSIVDFLKSQRGTLHVTLEEGTQAAWLYDLIRPHVANVVVCDPRKIPKQGTKADKIDAKRLAELLRTHALTPVYHGEQSTKDLKERIQSYTSVVEDGTRIKNRLKALFRGRGIDCSGSSIYNPEERKQWLLKLDTAAVRARANRLWEELECVERLCEEAEQELMAEARKHAAFKILRSIPGIGPVRAAVILGVAGTPHRFRSKRQFWTYCGLSVVTETSSEYTVVNGRVGRSKKRPLVRGLNRNYSRTLKGTFKSAAKTTASGPWKSHFEFMVANGKRESLALLTLARKIASITLALWKRGERYDQKKLKILHAA

SEQ ID NO: 453088 - protein, 339 aa, unidentified
MSEIATIGIDLAKNVFQIHGVDTSGAVVVRRAVRRVQVLRFFEALPRCLVGMEACATSHYWARAIAALGHEVRLMPPQYVKAYVKRNKNDAADAEAICEAVRRPSMRFVAVKSVEQQAVLTMHRARDLLIRQRTMLVNALRAHLAEFGIVGALGIHRVGELVAIVADEADERVPSTARGVLRIIADQIAVLQTAIAGIDGRILAWHRSSEVSLRLAGMPGVGPNVASAIAASVPDASVFRSGREFAAWLGLVPKQSGTGGKTWLGRISKRGDGYVRRLLVTGALTALTRSTAVKATPWIIGMKAREKRPMVIAVALANKMARVAWAMMVRATPYRASAA

SEQ ID NO: 453089 - protein, 333 aa, unidentified
MQDLSTKQHFVGCDVSKDTLDLALYQPKTDYRKFEHVQISNDTEGFKQLLQWLKARKIKKNEVAIAFEHTGAYSIALAEWLHKKKITFNMLHPLDVKNACSRGRNKTDEVDAKFIADYAYTMREKLAPSGPEPKNIKHLRELRNERDLCVRCRASYLCQIKVQTEAQTIARMHKMVDFMTVQIHQIEEEIKKIIAADETIATNYHLLISIPGIGMVNAVNTIVATGNFTRFQTSRQYAKFCSVSPMAVQSGTSVHSGNHVCKKGHNELKATLSEAARSAIIHDPQLRHYYQRKRSQGKSHGCVMNAVKFKLICRMFAVIKRQQPYVNTECYRG

SEQ ID NO: 453090 - protein, 344 aa, unidentified
MGEVITIGLDIAKSVFQVHGVDGLGVVVIRKRVSRAKMLEFFAGLPRYLIGIEACPAAHHWARELQAIGHTVRLMPPSYVKAYLKRSKNDANDAAAICEAVTRPSMRFVAVKTKEQQAALMLHRARQLLVRQRTMLSNAIRGHLSELGIVSAKGRNGTDELLEIIGKDADSRIPLAARSVLKVLASQYVAIGVEIASISKSILAWHRACEPSRRLEEIPGIGPIVATALVAEISDWMAFSSGRGLAAWIGLVPKQHTTGGKDKLGSITKQGNRYLRWLLVNGAMAVIRYAQKHGTKKHPWLGQLMARRPTKVAAVALANKIARIAWAIMVRGDRYREPALMPAA

SEQ ID NO: 453091 - protein, 402 aa, unidentified
MNQPVLSIDIAKGKSVAAAFTSYGVQVKKPFSFSHSPDHVSSLLSVLVQLEESTTLRPTVVMEATGNYSKPIASFFFSLGYPVFLLNPLTTHELKKRSTRKVKTDPIDAIRIANAFYLGEGTPIMPMDEKVTELRFLCRQHAQWKALLGEVQLQFRSILDLAFPGYDKAFQNIFNPSSIQLLTKFPSPSALLTADKEDVLTILMLNRRGRTWNEDKYAQLLEIARSSLPDPCGSQAHIFAMQNFIGLFKAYQEGITALEKQMESLVQESSAYHLLRSIPGVGPITAAMIHAEIGDIKRFPSVKQLTAFAGLDSSVYESGTFKANQNRISKRGSAYLRTALYQATVGGISKQIHGPRNPILWQYYQQKRLEGKPAKVAIVATSNKLLRMIYGILSNGSPFQSK

SEQ ID NO: 453092 - protein, 424 aa, unidentified
MSFGSNRFDHIEQGGELTLFVGDDWAEDHHDIHLMDADGTKLASRRLPEGLAGIRGFHELVAGYAEEPAQVVIGIETDRGLWVEALAAAGYEVFAVNPLAVARYRDRHHVSGAKSDAGDAKLLADLVRTDRHNHRSIAGDTPSVEAIKVLARAHQNLIWSRNRNTNALRSALREYYPGALEAFDSLADRDALAILGRAPTPVQAAHLSLSKIRSALKAAGRQRNLDTRALQIQEALRTEQLAAPAAVTAAFGATTRAAVAIIAELNRQIGELEGELATHFDAHPDADIYLSLPGLGVILGARVLGEFGDDPNRYTNAKSRKNYAGTSPLTVASGKKRAVLARHVRNRRLYDAIDQWAFCALTTSPGARTFYDQHRAAGDLHHQALRALGNRLVGILHGCLRHHSPYDEHKAWAHRQTTPKTDAA

SEQ ID NO: 453093 - protein, 426 aa, unidentified
MRAIGIDVHRDFCEVAISEGGRLRSAGRVPSTPEQLELLGVSLAPGDEVALETTGNALAIARILAPHVARVVVASARELHAIAGAKAKTDRLDARTLAKLLAAGMLEGTWLPGEETRALRRRLSRRAQLVRQRTRLKNEVHATLYRNLKGAAPVSDLFGAAGRRWLAGLELPADERETVDGCLRVLDFLGGEVAGLERAVARHALHSAEIRRLVTIPGVNLISAATLVAVIGDVGRFPSARKLVGYLGLDPRVRQSGSTPARTGRISKEGAASARHVLCEAAQAAMRTPGPLRAFGQRVGARRGRQVAVVAVARKLASLAWRLLTSGEDYAYASPSRVRLKLRRIELLAGEAPQRGRQLGATPSSKQEQERELALAAERAYQRLVSDWQTGRSAKKGAGAAAGRASGGSSQDPAARQTGQPLTPAL

SEQ ID NO: 453094 - protein, 356 aa, unidentified
MAMNKRLDFSGQSIFIGIDVHNKSWAVSIRTEQFEHKAFNQPPDPEVLAKYLKRNFPRATYHAAYEAGHTGFWIYDKLVSLGVECSVIHPADIPITDKDKRHKSDPRDCRRIASALKNGELNPIYVPALKAREDRALIRERMRLIQERTRIKNRVKSLLRFHGIAIPTQFTMRCWSQDFLEWLYSSNLMHSSSGKNALLSLVEQIRFYNDQNLQITRKIRKLARGPRYKKDVDNLVTIPGIGIISAMVWLTELVDINRFKSFDKLACYIGLIPRERSSGEKQAVLGLDTRGNRILKTMLIENSWAALRNDPGMINAYQHLTQRMNGNRAIIRIARKLLRRIRYVLINEKTYQVGLA

SEQ ID NO: 453095 - protein, 341 aa, unidentified
MENCGIDVHQKSSQVTVVDQEGEVLERATIPTTRAGLERWFGRRERMRILVEASGSSPWVVRVLAELGHEVEVIDPRRVRLIAQSTLKTDRIDADTLAELARLRIKLRTLVWQRSEASQRQRGHLRVRRALVEARARFIVTIRGLLRSFGVRVASCRSDRFVARCQASAIPPELSEVITPLLFAIRDLDTRIAAMDEVVEQVGHLYPAVESFQDIPGVGPVVALAYLLSVEDPSRFRRSRDVPGYLGLRPNLRASADVVRRGRITKEGDSDVRRLLVQAAHAHLRSHADTAFKRWAESLIPRIGKRKAIVALARKLAVLMHRLWITGEVYQPFPNNTAMAA

SEQ ID NO: 453096 - protein, 359 aa, unidentified
MTANVQRNKIDFKGKTVSIGIDMHKAFWSITALVEGEIVVAITLARPTYDSFKKILTQFEGNYVRIVYEAGPGGFHLYDKLTDDGIECIVTPPSLIPTESGNKVKTDKKDSYKLAKLLESNMLKKVWVLSPEQRAHRQLVRTRRQIVNHRSDVMRQIKSMLLFHGIEVPFPSRQQWSVRFIQWLHELDCGDEYLTTSLKALVQLFDYLSREKKRLTHEVLELARKDSYASRVKLLKTIPGIGALSALEILVEIQDISRFKTADELAAYLGLTPSQHSSGEHIRMGHITHMGNSRARTTLIECSWILIHKDPRMRQKYENISYRQGGKKAIVGVARSLSACIRRILLDQVAYKIDFRKAA

SEQ ID NO: 453097 - protein, 316 aa, unidentified
MKTNTNQNINVGVDTGKFQLDIYIRPLDIYFTVKNDEKGIAEAIKKIKVHSPNRIIIEATGRLEMPFIIACAKANLPFVIANPIHIKRFAGALGQRAKTDKLDAQLIAHYGEAIKPTLSTLKPDIMQTMSDLVARRNQLLVMQTMEKNRLQILPKELASTIKPILTAFKNQIEKIENKILKLIESCPEYSAKNTILQSMKGIGKIAAASIISNLPELGYMSNKEAGALVGVAPMNRESGRYKGLRKIQGGRHQVRTVLYMAMMSAIQSNPVFKSTYQRLVAAGKPKKVALIACVRKMIVILNSMLRDGVMWEAPKV

SEQ ID NO: 453098 - protein, 456 aa, unidentified
MAAKKKRCEKPSGQLSTINEHAAGLDVGSTFHVVAVRSDQDDEPVRTFRSFSGDLHAMAAWLKSVGIETVAMESTGVYWIPVFEILEAHGFEVLLVNARDVKNVPGRKTDVNDAQWLQRLHQHGLLRASFRPRDEVVGLRAYLRHRQGVVEYAASHVQHMQKALMQMNVQLHHVVADITGVTGLKIVRAIVAGKRAPEELAKHRDARCAASEETIREALTGNYRPEHVFALKQALELWDVYQAKIAECDVEIETTLKSLNDNRPPPETTLPGRRQPKVKHEPNFDVRAALHKMLGTDLSQIHGFSPYTVLRLVAECGDDMTKWPTEKHFTSWLTLAPGNKISGGRVLSSRTRRSSNRTAALLRLVAVAVGKTQTALGAFYRRLGARIGKAKAVTATARKLAILFYRALRFGMTYADPGAKYYEERYRCRVIENLTRRARSLGFQLVQNDVAVERVS

SEQ ID NO: 453099 - protein, 344 aa, unidentified
MDHFAGLDVSVKETSICIVDDAGRIVREVKVVSEPEALLKVLGNPGYRFKRIGLEAGPLSQWLFSGLAEAGLPVVCVETRHMQAVLKAQINKTDRNDARGIAQMMRVGLYRPVHVKTLRSQKLRMLLTHRKLLQSKAIAIENDLRGTLRNFGLKVGMVGTVKFEARIQELVENIPDLATLVEPLLIVRQALREQIVILHRRLLAIVRDDEVCRRLMTTPGVGPVVALTYRATVDVPARFRKSKSVGAVFGLTCARYQSGEIDWSGRISRCGDQMMRVMLYEAAQSMLRSKKWSWLKAWAMQIARRRGMKKAIVALARRLAVIMHRIWVDGTEFRWTREQAATAA

SEQ ID NO: 453100 - protein, 425 aa, unidentified
MDVMHERCAGLDVHKATVVACVRTVTGGKVNRECRTFDTTTAGLLALLAWLTESGCTHVAMEATGVYWKPVWNILSDGDFELMLANAAHIKNVPGRKTDVNDAMWIADLTACGLIKASFVPGEATWELRSLLRARKQQTREQTRDIQRIQKTLEEANIKLDSVISDILGLSGRRMIKAMIAGVTDPSKLADLADRRIKATREELRDALHGRLTDHHRFLLGIYLKQYDALDALIMEIDRRVDASVARLDEETKAQPGQCPFRSLIELLCTIPGVSTLGAMIILSEIGRDMSRFPTAGHLVAWAGLCPGQNESAGKRRSSRLRKGAPWLKTLLVQCAWSASKKKDSYYKAQFHRLKAKRGPKTAICAVAAAMLTAIYHMLKDGTEHQDLGARHFDHRSTKLKANRLVAQLSKLGFKVEIQPIAEAA

SEQ ID NO: 453101 - protein, 338 aa, unidentified
MAMYCGIDLHSNNNYVAIQDGERRDIACRRLRNNLETVLSFLEPYREELETIAVESTFNWYWLVDGLINAGYDVRLVNTTKASKYSDMKFTDDRHDARWIAHLLALGILPEGYIMPPEERGLRDLLRRRSFLVNKRSALYLSIKTIFTRSTGKRVSIQDIQHWDSEMVLGFFDDPHVAESIIVMLPVVRVITAQIKKIEKITLTEGKLRDEFQILHTVPGIGDILALTIMCETGDISRFAKVGNYGSYCRCVKSEHTSNFKRKRKGNRKNGNKYLSWAYSEAAHHATRYEPGAKRYFERKKSRCHQMVAARALANKMARACYYVMRDQVPFDASRTFH

SEQ ID NO: 453102 - protein, 373 aa, unidentified
MAGNSQTLNEGELSLYSMFISQGNIPVGVDLAARVFQVCYLTEKQKIKNKALSREAFLDFLKNPPFTQPLIVGFEACGGCNYWARFIESLGHKYKIMPASSIRAFLGLQKTDKIDALGIFKGTICPSVRTIRARDEENQTLMNLLAAREQLLKQQTQSLNAQRAMLYELGEICGEGAAKIDAATDKLKESLEKSQSEALSNFRMIAEPFKANRDSLEAQIKQIDVYLKQYAKNNRTVQNLMTIPGIGVLSAVTLHAVLGNPDDFPNSRHFASFAGFAPRVSGSGGSVQVGMIPHTGNRQLKKILYMCAIARFSMQSRKASTETEASKLTQLIENPEISNKKIVCSIANRLARVAWTIAKSGEPFDPKKCRLLG

SEQ ID NO: 453103 - protein, 418 aa, unidentified
MKPWNELTHFAALDWADDHHDLVVVDAKGQIALELTFPHTAEGWQQAQEALAAWPGLPVAIETSAGPAVDQLLQRGYAVYPVMPQAAARYRERKRPSGSKDDRHDAWSLAEALRTDGQGWRALSPLDPLTAELRALCRDEIALIEQRTALVNQLLAALKEYYPAALQAFEDWTAPYTWAFVLAFPTPEALAQAGQRKWEKFLHTHKLWRPQTAPERLKTFAQARAFKGSPAITAAKSLLVRSLARLLQTLEQQLAAYRARIADLFAQHPDCALFGSLPGAGTKLAPRLLAELAGSNWAEVSQVQARAGTAPVNYQSGTLQRVRIRRACTLPLRATLPLWADLSRRYSSWAAAYYQAHRDKGQSHACALRCLAHRWLEIVSAMCRTRTRYDAEQHLREIQKHGSWVLRLLPAQARTQPL

SEQ ID NO: 453104 - protein, 347 aa, unidentified
MNSVGIDLHRNRSHIAVIDEHGELTLSKRIVNDRATFLELLGGLEGESSIAVEATYGWEWLAELLEDNGYDIHLAHPLRTRAIAAARVKTDAVDAKTLAHLLRADLLPEAYVAPRDLRDLRELLRHRIALTGMRSAIKNRVHAILAKHGITRQHTDLFGKGGREFLAQLQLRDAPRRRLDSLISLIEDFDREITETTKEIEQRAKADDRVDVLCQIRGVGRYTAMLIIAEVGDITRFPDARHLCAWAGLTPTVRSSDGKARLGHISRQGSPALRWALVEAAQKCTTGGGPLREQFERITKRRGRKVAKVAVARQILTLSYYGLRDGEIRCLARRSRASAKEKLAVAA

SEQ ID NO: 453105 - protein, 350 aa, unidentified
MAIIGCDLHSRYQQIAMLEFSDGEMVTCRLEHENGETQKFYARLPKPSLIGIEATGYTQWFERLLGRLGHELWVGDPAEIRARALRRQKTDTRDAEHLLDLLLTKRFPRLWVPTPEERDLRQLLRHRDQLVRMRTSVKNQLHFLAMSQGVCRGRKLWSPAGRQELVELGLDTWANRRREELLQLLDQLEPKIAELDRAAEAEACRRPGVLQLMTQKGVGPVVGLAFVLTVGPVERFASSRKLVSYLGLNPREDSSGGRQRLGHISKQGNSLLRWLLVEAAQTAARLDPELRRKYLRLKFRRGANVAKVAIARRLAVGLYWRLRQARAEASPVRTPGSPTHSMVGATPSTL

SEQ ID NO: 453106 - protein, 446 aa, unidentified
MRTIGLDVHREFCEVAILEGGVARAGGQIATTPEALRLFAQSLAKTDEVAIEATGNTFAIARLLEQHVARVVISNPLRTRAIAEAKVKTDKVDARVLAELLAAGYLPGIWWPDEELQSLRRLVARRTGIVRERTRLKNQVQAILHRNLLPRCPAADLFGKKGRAWLAGQPLPVDEEIAVASALRRLDVAGEELALVDRELAKVGLASTSVKRLLTIPGVDRTVALSLVAAIGEVERFASPRRLVSYLGLDPRVRQSGNQPARHGSDLQAGAGAGARDAGRGRLGLREDAGAAARLLPPPPRPPRRAGRCGRDRAQAGRALLAPARPRRGLRLRAALARRAEAARARARGRRTVTPRPARLDLRLQPEGGPRPRARAQRAGRARLREADRPLAKATANGRGCRHWGAALRPSSGKPARRGLHPHAPLFGRGSPAPEPILRPDAPLAT

SEQ ID NO: 453107 - protein, 408 aa, unidentified
MSENVHLIVDIYIIYFRKKELFMIYVGIDVAKQKHQIAILDDGGEIYRDNLVIQNNYLGFQKLHEILSHIQTETAQECQLALEDTGHYSLPLLQFLRKNRYLTYCYNPILIKEFSKVHTLRKTKTDKIDALMIAKKLMVDWEKREKKQNQTSMELKELTRHRRRMGKHQSFLKTQYTRILEKGFPELATYGQVRHSAYMIKILKKYPSPKKIAAAHLKTLSSLLGANNSQLSASKLQQLANESIGYHSEVAELELIQTIEQLYLYEKQIKKVDKRIQEIMDILDSPIVTIPGISYQLGSIILAEIGDIHNFKTSSQLLAFAGMEPSIYESGEGKGKGKMVKRGSPYLRWAMYHAARLVAIYSPTFKRYYKKKQAEGKHYNVVISHLAKKLIRVIFHLLRKEEPYKEAL

SEQ ID NO: 453108 - protein, 356 aa, unidentified
MSTIVSHQYAYVIGVDTHAATHTYAVVTNSGVHVDTQTFPTTKPGLRRALSWAGRRTDGDLDSLWVIEGIGSYGAELAKAVDTAGYEVVEAPRMSNKTRRGIGKTDPIDAFRIASAVLPLATDRLRKPRGHDDIQSALQILLTARDELARERTRAINALTALLRTIDLGIDARHALGMKIISQIASWRSRKEPISLAIARSEAIRLAQRVRQAHTEILQNDKQLSNLIAQSPAADLTNETGIGPVTAATMLVAWAYPGRLRNEAAFAALAGASPLPASSGNTVRYRLNRGGDRQLNRALNVIAMHRTIHDPETQAYVEKRRIEGKTDREIRRCLKRYLARRIYRHLNQAAHSAKRY

SEQ ID NO: 453109 - protein, 412 aa, unidentified
MQQDNEIEPMVFVGLDWSEEHHDVHIEDVEGRRLAAARLTDGLGGLARFHELVADHVQDPSQVLVACETDRGLFIGALIAAGYQVLAVNPLSTSRYRERHGTSGAKSDPGDAKVLADLARTDRHNHRPAAGDTDLAAAVKVLARAHQSLVWTRQRQTNQLRSTLREYYPAALNAFDDLKHGDAVEVLRIAPTPEQGRRLSRSKITSALARGGRQRNIDRWAEQIQTALRTDNLTAPPVVADSMGHVVTSLVNVIRQLNSQIDELEQHLTEGFESHPDAVIIRSLPGLGMILGARVLAEFGDDPNRFADAKSRRNYAGTSPITRTSGKHRVVLARHARNKRLADACYQWAFGAISSSPGARAFYDERRAKGDTHHRALRALGNRLVGILHGCLRHRTPYDEHTAWAHRYDLAA

SEQ ID NO: 453110 - protein, 489 aa, unidentified
MNFTALTATVQPNLDVNYIGMDVHSDNVVVCVRRNTINSSGQLVGKTIKTKKVVIKSSQEPLVELLSKYADGQQHIMTAESTFNWYWLADIAEDRGWNFRLADPCTVSQANIKAANDETDAEYLADRLRTGSLKSTSVLPRKLRGVRDLMRHRLRVMQEVSDKKVRLSNLYHNHCAHPMHGKLLTALQDAYDEISVDAVLESGICNNGSELIIGDLLTGLREAEARLAKIEAAVYERIDEVDEYKAERLLLKTSMKGCGDVLSAIIVTEIGDISRFRTMGDFVSYCRLAPTSKLSNGKSKGQGNAKNGNAYLSWALTELATLMARFNEPIRRYLERKQNKTGLRVVAVRALAAKLARCVYQVLRKNESFDLALAFGGKPTRAPTALAEKPAAEVVQSPQEPEVPPITTAPEPHLQAPLSEAPIVVKEPSPVKAKRGARKKAVSPASSAPAVTAEGRQTARKADRVKARCALTATPPSCAGTSCVKSRRE

SEQ ID NO: 453111 - protein, 410 aa, unidentified
MEVLYPHCAGLDVHKDTVVACVRHMVNGSVRREVRSFKTTTKELLALSDWLAGEGCTHVAMEATGVYWKPVWHVLSDGDFTLVLANAAHVKNVPGRKTDVNDATWLADLLAHGLIRSSFVPDGQTQEMRTLLRTRKQLVRECSRHVQRLQKTLEDANIKLDSVISDIVGLSGRRMIEALIAGETEPGALAAMAHRRIKATPDELEAALRGRVTRHHRFLLQLHLQQIDAVNAAIDQIDQEVDAYVEPFRATVRLLTTIPGIDELSACVILAEIGRDMSRFPTAGHLISWAGLCPKNDESAGKRRSTRMRKGAPWLKTTLVQCAAAAARKKASYLQAQFHRLRARRGAKKALGALAASILTSVYHRLISGELYRDLGPHHFDQRAKAVNTRRLVVRLQNLGYAVQITPLAA

SEQ ID NO: 453112 - protein, 341 aa, unidentified
MEYGAIDLHTRRSQVRIVAEEGTVVLDRRIDTTRSAFASLFGDGAPMRILLEASTEAEWVAQHLEALGHSVIVGDPNYTLMYGQRTRRIKTDKQDAAALAEACRLGIYRAAHRVSPGQWRERQQQTVRQQIVRQRTALINVCRALLRQEGYRLPAGEAENVVARLDRVELSAPLTAVLEPVRALLHQLTATLRELDAAARVRAQADPIVRRLMTAPGVGPVVALTFRAVLDTPARFGGDAQRVAAFVGLVPREASSAERHRKGHITKAGPPIVRSLLVQSAWMLWRSRRPEVQAIRAWADALAARRGRRIAVVGVARRLCRMLYAMWRDGTVFHPRVAAAA

SEQ ID NO: 453113 - protein, 319 aa, unidentified
MSVSSVVGIDVAKAHVDVFVLGAEFKAQRFVNEAEGHSDLATALAPLGVRLVVMEATGGYEAALACALQAAGFAVAVVNPKQARDFAKGMGYLAKTDAIDARALAAFADALSRQPDLASYIRPLTDEAQRDLAGLVTRRRQLLAMMLSERQRLQLAVAKVRPSIEAMIEHIKAQLDEVDGEMVGHVQEHFGQLDTLLRSTKGIGPVASATLIAELPELGKLNRRQIAALVGVAPMANDSGNSKGRRRVSGGRFEIRRTLYMATLTATRHNPAIAAFYARLLAAGKLPKVALIACMRKLLTTLNAMAKSGMPWDPEFKTA

SEQ ID NO: 453114 - protein, 374 aa, unidentified
MAPSAEETAVNTGKDIILVVDYHAENIEFRWFDQASGEERTGHYPTGKAGILRQVEQAAQEVAPGGQVVWIMESTTGWARVKELIGPRTRFLLSNVLQMPLPPKAKRRKTDKIDTGRLLREYLCDHLPTSFQPPAWWRQVRRVVDCRQELVERQTAVKNWIASLLHHETWEDREGLWTGKGRRRLKAMSLSESDRAMLEMKLEQLDALADQQAKVEARMQALYDAWPEAQWVDEVRGIGMVTAVSVLAHIGPIERFPTAEDLISYAGLSPGTWQSDATCRHGRIGGGGTDRHLRYLLIEASMWLRQIPRYRPAYERVTAKRGKKVARIVVARMLLRSLYKMLRDRVRFHPEARAGRPVKVVSKEETTATAGCSK

SEQ ID NO: 453115 - protein, 420 aa, unidentified
MAPLSDQQFTAYVGIDWADTKHDICLQAAGDIRREFDCIPHQVARIDEWAKSLQRRFGGPIAVALELAKGPIVAALQKYDFFTLFPINPSTLAKYREAFKPSRAKDDPTDAELALDLLLRHPERFAPLRPQSAAMRSLVSLVERRRDLVGDQNRLTNRLCDTLKQYYPQALEWFDDRGTVLFCDFLTRWPTFLAARRARSTTLEVFFHAHNCRHANLIEARLESIRAATPLTEDPGIVAPCRLYVLALVEQLRTVLTAIDRFDREIATVAGTLPDYTLFQGLPGAGPQLAPRLLAAFGEQRDRFHGTDELQKYSGIAPVTERSGKKSWVHWRWQCPKFLRQTFVEWAAQTINKSFWAGAYYRQQRAKGSTHQAAVRALAFKWIRILYRCWQTSTPYDETTYLNALSKRGSPLIRNLGLAG

SEQ ID NO: 453116 - protein, 410 aa, unidentified
MELIVERPAALDVHKAQGMACVRTPDEGERTEHVEEFSTTVSGLLVLRDWLKAHKVTQVTMEATGVYWKPVWHVLEDDFELILVNARHVKQVPGRKTDVQDAQWLCRLAEAGLLRASFVPPKPIRELRQLTRYRKAQVSERQREANRLHKALEDTGIKLDCVATDILGVSGRAMLDALVCGTTDPEVLAELAKGRMRAKIPALREALEGRFEAHHALLVGAILAHLDFLDEQVELLSEAIEVKLAPFGAAAVELLLTIPGIGERTAENVIAEIGTDMAQFPSAGHLASWAGQCPGNHESAGKRRSGKTRKGSKWLNQALKEAAMAAIRTNGSYLQALYRRKKAQGGHNKALGAVKHSIVCACWHMLSTGELYRDLGPDDFARRNPERQTQRLVAQLERLGHSVTLTEVAA

SEQ ID NO: 453117 - protein, 481 aa, unidentified
MVLPPDDSGRKKSPRRRKRKAGKRKPQAKKSAGLAPNNVPAALEKLEQVNINAAGIDVGAGVHFVAVPEGRDPEASVRCFRGFTSDLEALADWLESCGVTTVAMESTGVYWIALYELLQRRGFEVLLAEASQVKKIRRKTDVLDCQWIQTLHMFGLLSGSFRPDDKILELRGFMRQRDMLIKYASDHVRHMQKALQQMNVKLTEVVSDITGLTGMSIVKAILAGERNPPTLAALRHENCKNDEATIALALQGNWRTEHLLALRQAVELFEFYQRQLGDLDKQVEAHLQSHPDISSGNTLPPRAKRRRDNREPSFDMRNLLYRMTGVDLTDVDGIGGHSALQIISEIGTDMSAWETEKHFVSWLCLCPEVNFSGGSRKSRKSKTHASRNRVATCLRVCAQSLLRSKSALGAFARRLRSKKGPAQAITATARKLAIIVYNMLKHGRPYRDQGADYYEERYRQRVIKNIRRRAEEFGFELTPVA

SEQ ID NO: 453118 - protein, 419 aa, unidentified
MNTSSNGSFSAFVGIDWADSKHDICLQASGSEMREFDCIAHQVESIETWAHELHQRFGGVIAVALELSRGPIVYALQKYDFFVLFPINPTTLAKYREAFQPSGAKDDPTDAELALDLVIRHPERFKPLNPQSALMRELLYLVEQRRRLVADKVRFVNRLISVLKQYYPQILEWFEKRDSMLFCDFLSRWPTLLQAKRARRNTLQAFFKAHHSSRSTIMEKRILAIKAARPLTEDKAVINAHCLLALVLVDQLRVTLRAIDQYDQAIAELAPQHPDYTLFSTLPGAGAAMAPRLMVAFGEQRERFGSAAEVQMCNGIAPVTERSGQKSWVHWRRQCPTFVRQTFVEWAGHTITRSYWAGIYYRQQRENGKSHQTAIRSLAFKWIRILYRCWKKKVPYDESIYLNALKRRGSPLLKKKDAA

SEQ ID NO: 453119 - protein, 329 aa, unidentified
MTKSYIIGVDVSKEKLDVHCHSHYESFVITNEHRGFLKLVKWISKKVCDDFSSVMVVMEYTGMYTYRFEKFLFEHGIDYVKCSALDIKRSAGIKRGKTDKADCRMISRYGWQRREELRSMKPVSESHRNLQQLMVHRDKLVTDRASYQVRIKELQGQMQADVNECIIASTSQVIQLLSEQIKTITSQIEKLIESEEELLTTYQLLRSVTGIGFASAVHLIIITENFHRFTNPRKLACYSGVAPFENSSGKSIRGKTKTSHLANKKLKSLLTMAAISAIQHDADLRAKYRQKLEEGKAKMCVLNIIRFKLIERTFAVMKRKTPYQLSAAA

SEQ ID NO: 453120 - protein, 377 aa, unidentified
MKKNSTAAEQGKKRTPGGKPEGKRGKREQITIGLDLGDKSSRYCAIDANGEVLLERSVATSQKGMAQAFGALARCRVALEVGTHSPWVSRQLSRLGHEVIVANARQVKLISESSRKDDKLDAQTLARLARLDPGLLRPIRHRSERAQGHLLTIRVRAALLEARTSLINTARGLAKSYGERLPACGAGQMGVEKARELPAVLQEALQPLLVQVATLTAQIQGCDRKVEQIARSEYPETARLKQVSGVGDLIATTYVLTVEDPRRFARSRDAGCYVGLRPRRSESGQSRPQLRITKEGDAYLRKLLVQGAHYILGWRGPDTDLRRWGLKLAERGGKNAKKRAIVAVARKLAVLLHRLWVSGEGYEPLRQSRRKEAAHAA

SEQ ID NO: 453121 - protein, 467 aa, unidentified
MEELFEDCHDVEVVYQRCCGLDVHKKMIVACLIIVAADGKRRKQIRTFGTTTAALLELLDWLKAAGCTHVGMEATGVYWKPIYNLLEGHFELVVANARHIKAVPGHKTDVKDAQWIASLLQHGLLKASFVPSTEQRELRELTRYRTTLVEERARIVNRLQKTLEDTNLKLGDVVSDITGKSAQAILRGLLAGETDPKVLADLARGRLKAKRAELEKALVGTIKPHHQFLLREHLDHIHQLDQSIGRVGAEIEARMGPLLPPEPEEASGKQPEAEQAPSDEQTQAEQTSSEKQTQPANQEPLSLAQAVVLLCSIPGISQRAAEGILAEIGVNMDRFASAKHLASWAGMCPGNHESAGKRTSGRTNKGSPWLRKLLVQVALAAGRTKNTYLSAQYGRLAARRGKKRATIALGHTILVIIFHVLRDQKPYEELGSNFFDQRERLAVEKRLVQRLEKLGYDVSLQPAAHAA

SEQ ID NO: 453122 - protein, 321 aa, unidentified
MDFLGIDVGKSELHACLLQGDRSTAKSVSNSSTGVQQLQTWLKNRKAQQVHACLEATGGWSEDVALALSDSGHVVSLVNPARIKAFAQSEMLRTKTDKIDAATIARFCRMHEPEPWTAPDPEIRALQGLVRRYQNLVHMRTEEQNRLQAPILTPSVKESIEAILTDLDREIKRVDREIAELFNKHPPLRRKRDLLISIPGIGNTTAARILGEMPNIAEFRNVKAVAAYAGLSPRHYESGSIRRPSSIARTGNSDLRSALYFPAITAMRYNPPLQRFADRLRQRGKPNKSIITAVMRKLLTLAYGVLKSGRSFDPAYATILT

SEQ ID NO: 453123 - protein, 355 aa, unidentified
MTSTKYIGLDVHKESISIAVLNSAGKVVMECVIETKASTILQFIHGLRGDLQVTFEEGTWAGWLYDLLKPHVTELVVCNPRKNALLKEGSKSDRIDAHKLAELLYMSKLSSVYHGEHGLRMLKELSRSYLTITKDLGRVMNRLKALYRGWAIPCAGTQVYAPHYRSEWLAKIHEAGVRRRAELYYQQLDALRLVRQQARKELLAEARKHRATKLLRQIPGIGPLRAAHLVALMQTPHRFRTKRQLWNYSGLGLETHDSAQYRVVEGQLQRSKKPVTLRGLNDNHNHDLKDIFKGAAMRASTAAGPLRDFYEALLAKGRKPTMARLTLARKIAAITLIVWKKEVRFDANYLKQQAA

SEQ ID NO: 453124 - protein, 344 aa, unidentified
MEHFAGIDVSLEQSSVCVVDGAGRSVRETKVASEPEALVRFFRELGIGMTRIGLEAGPLSQWLHAGLVAAEFEVGLLETRHVKAALSAMVIKTDRKDARGIAQLLRMGWFRPVHAKSPGAQEVRALLVARKLLQTKLLDVECSIRGILRGFGLKMGEVSKGRFVARVRELAAGHPMLERITEPMLRAREALRTEYARLHGEMLAIAKPDPVCRRLMTAPGVGALVAITFKSAVDDPGRFTRSRALGAYFGLTPKKYQSGESDVTGAISKVGDPMVRVTLYEAANIMLSRVTRFSSLKRWALDVAKRRGLKRAKVALARKLATVLYRMWIDGTTFRWGKQADAAV

SEQ ID NO: 453125 - protein, 367 aa, unidentified
MSKAETGRLCVGVDLHKTQFTICALNEDGEYLLEKQYPTKEEGYREFAREMHRFEEQGCSIELAVETTGNARFFKNRMESEYFAVKVVNTNRFKVITMSTKKTDANDAATLAYYLMKDLLPEAHLCSQTSEEIRRLLKTRSVLVQSMVKIKNQIHGMMLGYGIETKAAQLQSKRKRQELINDLEDHNFSAYTAPSLKVMLKILDDLSAEIKGIEKLLEEMVASNEDVALLMTVPGIGINTATVIAAYTAELERFDGNYKKFASYVGIIPSVHNSNETTHYGRITKHGPQELRTAFVQAALGMIRLTNVSSEWRIIKEYQRRKGDKGSGRAIIALARKITRIVFVMLSKREGFKPELMRCEEAIQQTA

SEQ ID NO: 453126 - protein, 391 aa, unidentified
MDQAGRVLARAKLPEGVAGIARLHAMIGEHLGEDEDEPTVVVGIETERGPWVQALIAAGYQVHAVNPLQAARYRERHSVSGAKSDTGDAHVLADMVRTDRHQLRPVAGDSAEAEAVKVLSRAHKTLIWERTRHLLRLRHALREFFPAALLAFDDLTAVDALELLAVAPEPTAAAALSLDTISAALTMARRHNRAAKAEAIAAVLRAEHLGQPPVVAAAYAVTVRAQVAILSVLNTQIAELEEQVEANFSEHPDADIYLSQPGLGAVLSARVLGEFGDDKNRYADAKARRNYAGTSPITRQSGKKKVVMARYVHNDRLLDALGRQAFSALRTSPGARAYYDRIRARGTGHQAALRQLGNRLVGILHGCLKTGTKYDEAKAWAPTQQDQQLAA

SEQ ID NO: 453127 - protein, 354 aa, unidentified
MTSVKYIGMDVHTESISIAVRNSTGKIVIESVIETKASTLVQFLDGLRGDLRVTFEEGTWAAWLYDLIKPHVTEVLVCNTRKNTSTGGSKSDRIDARKLSEQLYMNNIKSVYHGEHGLRTLKELARSYLTISKDLTRVMNRLKALYRSWGIPCAGKEVYAPRHRAAWLAKISEAGVRRRAEQYYQQLDALRPLRQEARRDLLLEAKKHKPWKLLRLIPGIGPIRAAIVIAVMQTPHRFRTKRHLWTYSGLALETHDSAQYRVAEGQLQRCKKPATVRGLNKDHNHDLKDIFKGAAMRASTAAGPMRDFYEALLAKGRKPTMARLTLARKIAAITLIVWKKEVRFDANYLKSQAA

SEQ ID NO: 453128 - protein, 385 aa, unidentified
MTATTRHFDPTALENMLCLSFELGEGNWTLSFTSGFGAPVHRRRVPARDRDAVLRQIEAMKERLGLAASCRVVSCYEAGRDGFWLHRFLEAHEIENLVVDSSSIEVSRRSRRAKTDRLDGESLLDLLLRHRAGSQKKVFRVVRVPTVEQEDRRHLHRELQGAKRDRTRVTNRMKGLLANQGLTLDLRKGVPAQLAALRQWDGLALPAGLQARLAREWDRVAFFTALIERLEADRRELLRAGDDPTLGKIRQLNLLRGIGTNSAWLYGMELFGWREFRNRKQVGAIVGLAPTPHASGTQERERGMSKAGNRHVRAMAIEIAWGWLRFQPRSALSQWYQRRFGGGSTRLRKIGIVALARKLLIELWRYLETGVVPEGAELKTDVRVR

SEQ ID NO: 453129 - protein, 385 aa, unidentified
MTIQVPGAKFVPREYDVFAGLDVDKKSMAVVFTDHAGAMRSLRMAHSSGLLLNYVRKHFAEQRVAFAYEAGPTGFGLHDELVTQAYTCVVAAPSKVPRARGERVKTNRLDGRKLSESLRGGQLHSIHVPTRPYRDLRHLVQLRDTHVRQLTASKLRIKSLLLYEGIAFPDPQEKWTAQAMRELQTLSCSETVRFKLDDLLNTLHFHFQAAASAIKQIRRYCLNDPELQQSINLLQSLPGIGWIVASHLVARLGDPQQITNGRQIAGFLGIVSSEHSTGEKENRGEITRSGDSRLRNKLIQSAWTAIKKDPELRTFYQRIYHRHPQKVAARKAIVAVARKLTTRIYVVLKEQRPYVMRPDSSIAPLTAEETVGPRERLVGAQNDQP

SEQ ID NO: 453130 - protein, 410 aa, unidentified
MNVIYERCCGMDVHKNTIVACVFSGNKKEIRSFSTMTASLLSLVDWLKSVNCQCVAMEATGSYWKPIYNLLEMEEIPALVVNAQHIKAVPGRKTDVKDSEWIADLLRHGLLNGSFIPKREQREIKELVRYRRSMVQERARELNRIQKVLEGANIKLASVISEIDGKSSRQMLDMLVAGCNDVQAMADKACRQMRKKIPQIEEALHGFMGEHQRLILRLMLKHIDILDEQILALDQEILNNMKPVYEQVCLVDSIPGIGERSAQVIIAEIGINMSQFPSAAHLASWAGLCPGNNESAGKRKSGKTRKGSDILKSTLIECAKVAGHLKDTYFSAQYSRLAARRGKNRATVAVAHTILTIVYHMLNDNVPYQELGPDFFDQRRKTEIVKKSIQRLEALGYTVNIEQQAEISTA

SEQ ID NO: 453131 - protein, 366 aa, unidentified
MVWTLLFLCYGGILAMTTLHQQEGLMQQNITTIGLDLSKNVFQVHGMDDDGEAVLRKKLRRSQVLKFFATLSPCLIGMEACGSAHYWARELSAQGHQVRLLPPQYVRPFVKTNKHDAADAEAISEALVRPTMRFTPIKSADQQAVLMLHRSRELLVKQRTMLINAVRGHCSELGLIASQGAARVTDLIVMIEDPADLRLPAFAREALGILITQLQAVKEAIRTLERKLQAWHRSQQASQRLTTIPGVGVITATALVATIGDGSQFKSGRHLSAWLGLVPRQHSSGGKSRLGRISKRGDGYIRRLLVHGSRTVLRWQRAATKNPVPWIGELLTRRPTNVVLVAMANKTARTIWAMMRDQQAFNPVGR

SEQ ID NO: 453132 - protein, 392 aa, unidentified
MIYVGIDVAKDKHDCFAMNSDGEILIERMSIQNNLDGFNSLFNSISQFNESFENIKVGLEATGHYSNNILNFLTSKGFNVYVINPLQTNLYRKGQSLRKTKTDKLDARFIATMLITENLKPYSNLSYHISELKSLVRHRFRLVHERSKFKVSLSRLVTLVFPELEKIVWSISQNSVLYLLNELPSVKEISECNLKHLTAVLEKYSKGKYSRDKAIEIRELARKSIGTNSRSLSFELKQVIQTVLFLQSQIDDIDKELKILVDELNSPIMSIPGISYVSAAFILAEIGDINNFDSPAKLQAFAGLDPSTYQSGKYTATHSAMVKRGSKYLRWALLNATRLVCMRDKTFNDYKNSKLAEGKHYFVALSHTTKKLIRVIYYLLKTNNSYQLPKVA

SEQ ID NO: 453133 - protein, 367 aa, unidentified
MKDSNTVVGLDVHKNSIQIVTADTDGAMEVRGFGRIGGTMDALDRAVRKLVSGGSTLRFVYEAGPCGYEIYRHLTGKGFSCKVVAPSKTPKKSGDRIKNDRRDAETLARLERAGELTGIYVPREEDEAMRDLTRAREDAVKSLRTARHQLNAFLLRYGKRYPGKGSWTPAHMRWLSDIAFPHPSQQIVLQEYITTVMVCTERTARLTDQITKLLPEWRLNPVVKALQALRGVAPIVAATTVAEIGDLSRFENPRQLMAYLGLVPSENSSGESTHRGSITKTGNGHVRRVLVEAAHAYGFPARVSRHLLKRQEGLPEPVLAIAWKAQVRLCGRFRRLMARGKLKNKIVTAIARELSGFMWAIAREVEV

SEQ ID NO: 453134 - protein, 380 aa, unidentified
MEKACGLDVHKDSVFACILDEKGEKIFEKRFGTLTPDLDELRDTLVKHSCCKVGMESTSIYWIPIWHILESDFDLTLANPYFIRQLPGRKSDAKDAQWIAECLQKKLIKKSFVAGEVFQQMRQYTRQHRRLTKSRVRQEQQLDNQLQRCNIRFSNYVSNQGKNKSARKIINSIIAGERDQAKLCKLVHGRTLNKHGKDVITNSLSGFIQQVDVEMLKQCMNQIDLIEKQQASCLTHLEELANTHFAEEISLLCSIPGIQKFSALCILAEIGNDMSFFQKANHLIAWAGLRPRNDETAEKIKSRKILHGNKYLRQILVEISWSVARSNKSFLGKKFKILAKRMKSQKALIAITRKILVVVYNVLNTKKPFDPKKNIQADKA

SEQ ID NO: 453135 - protein, 362 aa, unidentified
MGTSSKVSRFGVDVHGKFSVATARDASGQVLSRHRLDHTDREALRQTLRQWPSGAPVILEASFGWGWMCDELMAAGLQPHLASSVKVAAWRKARGLAKSNRIDADLLAELWDQQPRWWEVWLAPQEVRDQRELLRHRMGLVATQTQVKNRIHALLHRHGIVHGYSDLFGVSGRRFLSLLVEDHQRLRETARRTLKDMLILLEALRRLIARATRQFRAVIRRSEGAQRLTTLPGVSTVLAYTLMAEIGQIERFANARKLVRYSLLAPMADDSGETREGKPIGRCLSRAGRATLQWAWIEAAHGAIRKDAHLRELFNRRTDNGKQDRNRGYIMIANRLCRIAYAILKHKTDYQMTPPPRRGSQG

SEQ ID NO: 453136 - protein, 426 aa, unidentified
MNYTQNQKISQVTETTLIVGVDIGSETNFARAFNWRGQELSKKVFRFNNSQEGFQSFLAYINTYTTIASAQQIIVGCEPTGHYWFNLARYLEENNIKLALVNPYHVKQIKELDDNSPKKTDLKDPKTIAKLVVDGRYSYPYLPEGIYADLREAVSSRERIVKELNAITNRIKRWLKIYFPEYLVVYKNFSAESGLTVLETVPLPQDIVQLGPEGVNQLWRDKKLRAVGMKRALTLVEAAHNSIGLPGGNCARMEIQLLLEDFRTKQSQLEMITEVLEEETLSVPYADKLLAIKGVGLITVAGFLAEVGDIRRFDSPKQIQKLAGLEVKENSSGKHRGRSSISKRGRKRLRKILFQVMLPMIQNNAEFGEIYQYFTTRQKNPLKGKQAIIAAGCKLIRVFYAILKHGVDYDPGKLRADMIHPELEAA

SEQ ID NO: 453137 - protein, 317 aa, unidentified
MAQILPTVGIDVSKDKLDAAAFPEGQRLSVANNEAGWRELIGWLRSIAPRAIGIEASGGYERGVIGALSRASLPVRSVNAWKLRQFAKAAGRLAKNDHIDAVMIGWFVSTMPTREIKRDPAREHLAELVSARRQLVDLQQELGNQLEHLRDAELRRIRRRRIGQLAVDQARLDRRIVEAIEAVPSFLHRYKLMCSMPGVGPVLAATLLASLPELGAATNRQIGALVGVVPYDFDSGKLKGLRCIFGGRAAVRRVLYMAAQAAAQHNSVLKAMKQRLVAAGKEPKVAIVAVMRKMITTLNAMVRADREWDPTRQAAAT

SEQ ID NO: 453138 - protein, 402 aa, unidentified
MKVFIGVDPHKLSATIEVVDDRETVLATGRFGTDKAGYTAMRKVVARWPDRTWAVEGSNGAGRPLAQRLLADGERVVDVPAKLSARARQFDTGHNRKTDAHDAHAVAAVAVRTAGLRVLSYDVQLETLRMLVDRRQELTRTRIQTVNRLQRLLAELTPGKAKKDITTLQAKAILGSVRPRDLAGRTRRRLAAEQLAELVVVDKTIKALTKELKIMVLARGSTLMDLRGVGPVVAARTLADVGDVARFADRNRFASWTGTAPIEASSGEIVRHRLSRAGNRRMNHMIHIAAACQIRLDTPGRAYYRRKLAAGKTRAEAMRCLKRRISDALYRRLLIDARALMSGGADAGPGGHCGASLESSAAGSHPYTSTSDQPLPGPARTTLPAPTSTQKSSISRPLQPAS

SEQ ID NO: 453139 - protein, 342 aa, unidentified
MCSVTTKAVFVGLDYHAASVQVCAMDREGQVVVNRSCANDWRAVMGAVQRHCGEANVQAAIESCCGAAGLADELIARGWSVNLAHPGYVSRMKQSPDKTDYTDARMLADLQRVGYLPRVWLAPEEVRELRRLVHYRQSLTKERKNLKLRIGATLREARQKPPANTNPWTKAWVAWLENSAMLSPNARHIMTHRLRRLAAVYHELRQLDKLLERQTRHDPLVQKLLTAKGIGLVTAVTFRAEIGRFDRFRTGKQLGRFCGVSPRNVSSGQKQADAGLIKAGNSELRFLIVEAAHRLIRCEERWTALAARLSSRGKPACVVIAAVANRWIRWLFHQMQPSCPAA

SEQ ID NO: 453140 - protein, 402 aa, unidentified
MNCVGIDVSKGKSMIAVMRPFGEVVVSPFEVRHTASELSELARRLKSLNGETRVVMEATGNYHAPVAKQLHDAGLYVSVVNAKLVHGYGNNDLRRVKTDRKDAIKLANYGLDRWLTLPRYIPEENTRLLLKNCYRQYRQYSKVQTVLKNNLISLLDMTFPNANRLFNSPARADGSEKWVDFVAEFWHCECVSERPLKSFVNKYWRWCRKHGYNFSEEKAHAIYDEASGHIGVMPKSETTKLLVEQAVSQLSATSAALAVLKQEMQSLSSQLPEYPVVMDMFGVGPTLGPQLIAEIGDVRRFYSKKALVAYAGIDAPPNDSGDVIGRHKSMSKVGASSLRRTLFLVMSVYLQNSPPNEPIYQFMNRKRAEGKPYRVYMMASANKFLRIYYATVKAYLEILEQI

SEQ ID NO: 453141 - protein, 427 aa, unidentified
MFTAAFASLTKMNFNKLLSGNITKYQKEGFIMISVGIDVSKGKSTVCIMKPCGEILESPFDIGHTADELDSLISLIKSFDEETRVVMEDTGHYHLPVATYLSSHNIFVCCVNALRMKKFCSQSIRRAKTDKIDSIKIASFGITYWNELVKAYPSNVIYDELKFLARQYYQVTGMLVKSKVNFSNLLDQVMPKINDVLSNQGENHKLTEFVSRYIHFQNILDMGEMKFTSDYCKWAKKKGYRLNERKAAEILALAQNGIPTLPNSQSHKIAVSKAVKLIHSIEESRNTILAQMQDLCNTLPEYSVVKEMDCIGDTLAPRIIAEIGDVRRFKNKHSLIAYAGIDAPPYQSGAFHASERHISKRGNSYLRKTGYEIMQSLIKHKPADNAVYDFIQKKRSEGKCGKEAMIAGLNKFLRVYYGKVMEFYSEH

SEQ ID NO: 453142 - protein, 402 aa, unidentified
MKESIAKAIDKQTKAAQVNTADAGSYAAYIGLDVHKDTIAVAIALPGREEPVYRGEIAHEGRKVEKWLNRLSVEFDGQVLQFCYEAGPCGYGLYRRLVGAGHDCQVVAPSLIPRKAGERIKTDRRDALKLARLLRAGELTAVWVPDAEQEAMRDLTRARDDMKSQERKARQQLNAFVLRHGHHWPRGKKRWTQAHFNWLESIQFEQPWLQIVLQEYIDAVKAATRRVTDLTEQLMQALPGWSLAPVVDALVALRGVDKLAATVLLAELGDISRFDSPKQLMAYLGLVPSEHSSGGRRRQGAITLTGNGHARRMLVECAWSYRFPARQTMHLKRKAKAAPERAKAIAWRAQKRLCGRYRQLTQAGKNVKLVCVAIARELVGFIWDIVRQEMPRLMVKSGSAAG

SEQ ID NO: 453143 - protein, 384 aa, unidentified
MQRATNTATVSANTLHCALELSKKTWLLAIQFPDREQPSVYPVKGGDAGALMTKLIAARDRWAKVSGSPPSIVLCYEAGYDAFWLARFLKGHGIECLVLDPGSLEVNRRSRRVKTDRIDLKKLLRTLTAWCRGERHVCSVVRIPTIDEEDLRRSHRERSRLICERTAHINRIKGLLFAQGIRVGNISSKTLTLDKLVTGDGHRLPPRLAAEVEREIERLALVQKQIDKVECQRDTAPAACKETEKKRHLLLQLKSIGPTNAALLSREVYYRHFDNQRQLGSFIGLTPSPFKSGDEEHCQGISRTGSGHVRAAMIEAAWLWVQHQPKSALTRWFNQRTAGQSKRVRKIMIVALARKLAIALWRFVELGLVPEGAILSPRVIAKAR

SEQ ID NO: 453144 - protein, 352 aa, unidentified
MRKECSTVSFRDQVIYVGIDVHKSSWQVSIRHCRHHLANFSMNPDALKLAEHLRRNYPEAEYRSVYEAGFCGFEIHRSLCGLGILNIVINPADVPTSGKERANKNDCLDSRKLARELENGSLEGIYIPQEDNLVLRNLTRRETQLTGNITRAKNRIKSHLYFNGLKFRSWSGSSLKIMESDAVKRHDFALCSLLRELRFLRLEKLQVVRDEKECLKFLNREKTQENLQSIPGIGFRTAVVLQSELWDLKRFPDKDHFKSYVGLAPRLVGSGEHEEVKSAGNRKKKQLHYLLIESAWRAARFNLEYRARYGLLIAKGTNPQRAITIIAKKLLMSIHAVWTQDRNFKVLLPGTK

SEQ ID NO: 453145 - protein, 403 aa, unidentified
MIFVGNDWAEDHHDVHVMDEAGRRLDARRLPEGLAGIRELHELIAAHAEEPDQVVIGIETDRGLWVDALSAAGYQLFAINPLAVSRYRDRHHVSGAKSDASDAKLLADLVRTDRHNHRRAAGDSVQSEAIKVLARAHQTLIWARSRHTLALRSALREYYPAALKAFEDLDDRDALAVLGRAPTPEQGARLTLPAIQSALKRGGRQRNIAARAREIQARLRTEQLAAPAALSAAFAATTRATVAILVELNRQIGDLETSLANHFETHPDADIYLSLPGLGVILGARVLGEFGDNPNRYTDAKSRKNYAGTSPLTIASGRKRAVLARHVRNNRLYDAIDHWAFCALLASPGARTYYDQHRAAGNTHHQALRTLGNRLVGILHGCLRHHSRYNEHTAWAHRNPAAA

SEQ ID NO: 453146 - protein, 425 aa, unidentified
MKALKSHVAGIDVHKEMLAITVLIGELDGEPKEYQFESSTFTDDLMALGLKLKEMGVTDVAMESSGIYWKPVFNVFNPLGLKVVVANAAHIKNVPGRKTDMNDSRWIAELHRFGLIRASFIPDGEFQRMRLLSRHRTNLTEDLARVKNRIQKVLEDGNIKLSIVVSDIFGVSGLKVLKQIAGGYTHPNILITEVTTKIKRMEEMKKALTNCLTTEHCFVINVLMKQYEELKNRIEEVENELCKKVEPYAHLVEELDKIPGIDAILAMGIIAEASANMSSFKDERAFAAWSGVASGNNESAGKKKRAKCRKGNPALRKMLIQAAQGAIHCKKSFYRSKYNKLSFRLGSKNKAKVAIANKIARVVYKVLAGDQYKDLGYMRGDPREERIKKLLFELKSLGVEIQNHTHQNIYSKRDVKVEASGIVYS

SEQ ID NO: 453147 - protein, 376 aa, unidentified
MVKVAKFVGLDVHKDSICMAVTQGGPVQSIPDPVTLPHDVPKLVKRLLALAPAEHLRVVYEAGPTGFGLCRELLKRGIHCIIVAPNRVPQTRGPRVKTDKRDARNLAHQLRMGGLSPITLPDLELEALRDLLRAREDALVHRRRSRQQLKGFFLRHDVRCEGTGTWTTAYMQWARHAPLRAEALRLARDSYCDRIEWCDLELQRITEQVEEIAAKLAGLHAKLYRAYQALRGVKSIVSATLVSELGDLTRFPGPTKLMGFLGMVPREESTGNRVWRGSITKAGNPHVRRVLVEAAWSGRLRPACGKLLKKRQENLSEPVIDIASRAQKRLYKRHCSMRARGKPQNIAVVAMARELLGFIWAIGIQTANEHAEQAPA

SEQ ID NO: 453148 - protein, 435 aa, unidentified
MAMLAETIDGVIGVDTHRDTLTAAAVTAIGGLLDHATVTTDAASYQQLLAFAADQVPGRRCWAIEGAGSFGAGLAAFLLDHSERVIEVPRRRRSTRRTAAKSDPLDAVHIARDALITQHPAIVRRRGDREALRVLLTTRRNAVTAWTQTVSQLKALIVSAPEELRAELRGRGTKAQITYCAAFRERPTRSLEHQMTARALHATARRCQLLRAEINQHQHDLHTLVVAIAPWLLELPGVGPITAAQILISWSHAGRWRSEAAFAAQAGTSPIPASSGQTRRYRLNRRGDRQLNHALHTIAIVRMRDDPLTRAYVQRRTTQGKSQREIRPCLIGGVFGARSAQESGRARGAGQGTAPLSCHPTMASLSSAAPAPCRAHDRLQDIAQRGPSIRHRRCGLTPPRATDSPRAGAPIDGCWLGLGQHHPRRDRRRRCRCRG

SEQ ID NO: 453149 - protein, 387 aa, unidentified
MSKKVVAPAYVAAMARAEADPAAARFWVGLDIGFKSTAVCVVDVDGAVVHQVSMKSHATEIGRYLRRNFKSHVTLIGMETGGLSPHLAGKLREQGFQVAVLDALQVHRVLSVKRNKTDTNDARGIAEITRSGRDYLTEVYVKSNLCFEVRASLIMRDRLVKQRRETEAMIRGLVRVYGGRIEPGSDSPATFRERAIDQLCLIADTESVDLRPRVIPLLDLCERFYIEAGRIERELDLLAASNPVCKRFMEIPGIGTITALSFYSAIEDPTRFRHVDDVAAYLGLTPRVYQSGESLTHGGISKMGNQLTRTHLVGAATVMLANTKSFSTLKDWGMKLSKRVGFNKAKVALARKLAIVMFSLWRDGTHFMAKAADVGPHRDLMQARATA

SEQ ID NO: 453150 - protein, 384 aa, unidentified
MRRAKKRGPGPSHLLITPDSAGNVVGIDPHKQTLTATIVDPRGGILASEHFRVSGDGHRALEAWALAFGPIARWGVEGASSWGRHTAMFLCGRGYDVRDVCANRTPRHDRARQRGKSDVLDSERIARETLAHPLLPKAFKRAGQDQGPDEHHQLLALWHNRRRSILTSRQHLLNEAEHLLCELSLQLRDELPDSTAVRPRLTALADRNRRRRYDAPTRLRLALLDRYTAQIAALDREEKTVVSELRALVHTSGSTLAELCGLETRSVAELLVEVGDPRRFTEGGFARFNGAAPLPASTAEGPGEPVRHRYNPGGNRRINAVLHRMAVTQLRCEPRAQAIFANARARGHTKKEARRILKRHLSDVIYRRMIRDQAAQLAQPLLAA

SEQ ID NO: 453151 - protein, 344 aa, unidentified
MKEEVDGMSRYLGVDLHRNCFTVCSIVEGGRSYLRGWKLKDLGRFVSKLRSTDEVAVEVTGNTRLFYEAVVEKVSRVVVVNPSEFKVISQSVNKTDVNDARRLAIFLSKGLLPEVRMKEKGHAQLASITQTRDKLVKLRTALKNKINNIVSAHGINLKKEELSSEKGLEKVLGMMFDPLVDLEVEVLVNQIRSLNKSISELEKVIKEEGSKLKGHKNLKSIKGIGDLGSGILLSVIGNVEDFANEGKLACYFGIVPRVSNSNETLRSGRITKRGSKLGRTTLVQCCLIAKRYSSYLNRYYERIKARRGGGKAIIALARKFLGIIYKTLKNDWVWADFPNGVLAG

SEQ ID NO: 453152 - protein, 364 aa, unidentified
MNKTITGHSISQASLVNDVNRVLNLGLDVHYRQVTVAMQEDGGRIKAAGKMGYVDFLNWVGKKLAEGWEIHSCYEAGASGYWLHRELVKLGVKNLVVVPKAMGQGGKKQKTDKRDAGELCDCLDRYLRGQDKALSVVRVPTEDQEQKRALIRFHRQIMADRGRCEARGKSLLCAQGIQVHGRWWQVKAWLEVQSDPRLKDWMKEQLSAWRNKILSTDEEQGALRERIAALAPAILPKGVGAYSAAVLHYEMRGFERFSNRRQVGSMTGLCPGIHQSDGRGKEGSINRCGIGIVRWTLVEMVWRLRIWQPQYPPVRRLASGLVKGKRARKRLVVQAARRLAIDLWRLSTGQTTPEKLGLIMHRAK

SEQ ID NO: 453153 - protein, 356 aa, unidentified
MLIIGCDLHTRTQQIAMLDTETGELVEKRLEHESGEAKRFYEELQEPALVGMESTGYALWFAALLAELGHELVVGDAAKIRAMEPRKQKHDRRDAAHLLNLLVRGDFPRLWLPSVEERDVRVLLEHRHQLVELRTRAKNGLQAIALNYGLARRTRLWTERGQAELQKLPLREGMARRREDLLRLLAQLDSWIHELDQRLKREAEEREAARRLMTHPGVGPLTALGTVLVLGPVERFPDARHVTSYVGLIPQEESSGGRQRFGHLTKQGNRLLRFLLVEAAQSASRLDPGLRRGYRRLAFRKGHALAKVAVARKLLIRLYIMLREQIDYAEFCRRGPVPSGAGRGSHAGMLGEVALA

SEQ ID NO: 453154 - protein, 353 aa, unidentified
MTIVGGLDIHRKQITFDYVDTVTGRVQRGRIAPADREHLAGWLAQRFGGRTDVDFALEGCTGWRYVAEELAAAGVVAHVGEPADTAALRGGRRHAKTDKADSRHLRELLADGRLPECWIPPAHVLECRALLELYRDLRVAHTAWVQRIHAVLFHQGAGALTESVMRSEAGLAELAERAAGLSPAGKTQVVTALEMLAVLDEQLTGVHRQLLDAARQLTGARVLTGRLYGVGPITALALCCWLAGAGRFSSARKAVRFTGLDVTVHSSDGKRSPGRLSRQGPAVLRWCVYEAGKTHARGRAPDHAYYAQVKDRIDGKRAALSEGRKIVRQACHVLSELGDDALARCDRRGVPRG

SEQ ID NO: 453155 - protein, 419 aa, unidentified
MDLTDLTSTDTEPASPAPPPGLVAGVDTHQDTHTLAVLTAQGAVIATSSFPADQQGYDDLTAHLDRLGPLMAVGVEGTSSYGAGLTRTLRQAGYDTVEVLRPSRRVRRHHGKPDPIDTIAAARTVLSGDGVSQAKDTTGPAEQLRLLLAARTRLISAATAITNSIHSLLTTAPEPLRERYRRLDTPALITRLARTRPTRTITTPQQAATSALHHMARTHQDLHHRAERLNQQMHHILTTHYPGLLAVYGAGTTVAAQLTVTAGGNPGRIHNEAAFAHLCATAPIPASSGKTTRHRLNPGGDRRANAALHRIALVRLRHDPTTKNYANRRTQEGKTTKEIIRCLKRAIAREVYRALTQPPPTDTTSTLAAHRKRHHLTQTDVAHALNTYPARISDIENHRRPLPQLTHRYHQYLTTLDTQ

SEQ ID NO: 453156 - protein, 389 aa, unidentified
MKIYVGIDIAKLNHFAAAISSDGEIIIEPFKFTNDADGFQLLVSKLESFDKNSLIIGLESTAHYGDNLVRYLVTELYQVCVLNPIKTCQMRKNNVRKTKTDKVDTYVIAKTLMIQDNLRFVSFFDLDMMDLKALGRFRQKTIKQRTRLKIQLTTYVDQVFPEIQYFFKSGLHQHAVYALLKEAPSPKEIASMHMTHLANLLKVNSHGHFTKEQAKELRVLAQKSVGANDSAISIQITQTIQQIELLDSQLEKIEAEMTDIMKFNDSVIMTIPGIGYINGGMILDEIGDIHRFSNPNKLLAFAGLDPSVYQSGNFQAKTTRMSKRGSRVLRYALVNAAWNVVRNNATFKAYYDAKRAEGRSHYNALGHCAGKLVRVIWKMLTDEVEFNLE

SEQ ID NO: 453157 - protein, 341 aa, unidentified
MNKTWYCGIDLHCNNAVYVIPDERDRPLFQKRLPNELPTVLAALGPYREQLEVVAVESTYNWYWLVDRLQDNGYPVCLANPAQREQYHGIKEANDLTDAAFLAHLARLHILPTGYLYPREDRPVRDLRRRRMLLVRYRTGLKLSLQNMVMRQTGQAGGWRAVQQLDEDGRAELLGESDCLPFVATHQVELIEQLDERIRQFEAKVLQRVQLRSAYTCLLTLPGVGVILALTILLETGDIGRFETVGDYTSYCRCVRATHSSNGKKKGSNNRRNGNAYLSWAFVEAVHHAIRCCPAAKRFYDKKVAQRNGALATKALAAQWSKAAYYMMKRQENFDLTRVFG

SEQ ID NO: 453158 - protein, 360 aa, unidentified
MKPQRTSVGLDVHARSVVACALDGDTGEVFQRRLTPDHGEIVAWLGDLPSPVAVTYEAGPTGFGLARALTTAGIHCEVAAPSKLIRPAGDRVKTDARDAAHLARLLHLGQITAVTVPTATQEAARDLVRARDDCRAELMTARHRVSKLLLRQGIVYSGGKPWTGRHELWLRAQRFDNPALQLSYEAGFDAMLACLDRRTRLDDAITTMAADSEFTPVVHRLGCIRGVATLTAFGLAVEIGDWNRLTGRSIGAYVGLVPCEYSSGEARTQGGVTKTGNGHVRRLLVEAAWHHRTRYRPGAELRRRWDLASPAARARGQAANRRLHTRWAGFDARKKRPVVANVAIARELAGWCWSLAMLPD

SEQ ID NO: 453159 - protein, 347 aa, unidentified
MDHIGIDVHKKESQICILAEGGELIERRIPTQPRRFAEELGARPHARILLESSTESEWVARCLEGLDHEVVVADPNFAPMYATRTRKVKTDRRDARALAEACLLGAYRAAHRLSDAQRHVRARLTVRDTLVRTRTRYISLTRALLRQHGWLVPSGSAEGFPRRVMALLLPGRLRSEVAPLLAMMRHLQQQLAYSDERITAVTQTDERVRRLQSVPNVGPVTAAAFVAALDDAARFRRAHEVEAYLGLVPRELSSGETQRRGRITKAGSSRVRWLLIQAAVSMLRLHDPRTAALREWAERIAARRGKGIAVVALARRLAGVLFALLRDGTVYEQARREPRDMHAAVPA

SEQ ID NO: 453160 - protein, 429 aa, unidentified
MRRKAYRAMRVKDVEVERLTQGKAGEPISVGIDMGKCNFFAVCRWADGAFERPWKIDNPGDILGFVGLLERLGLGRKRIVAMESSGTYGDALRQALADAGIALQRVSGKAAHDYAEVFDGVPSQHDGKDAAVVAELAALGKSVEWRYRPAADWDQELAYWVDWMIGQRQILGLWQGRLEALLARHWPEATRVLSVRSVTLLKALRHYGSPQALAADAEAAGRLARWGGTFLEARKIERLVAEARHSRGVRAGSWERRRLQDFAGQALQARQQGQGGQRRLRALAKGHEVLQAQGQAVGVPTACVLWVKTGDPRQYYAAAAYRKALGLNLVERSSGEHQGALHISKRGSAVSRQWLYFAVLRLVQQAGVRPWYEAQKARDPDAAQRVLVALMRKLALALYQVGAQQGAFDPQRLFAQVAGRRRASAGAPA

SEQ ID NO: 453161 - protein, 326 aa, unidentified
MQFIGIDVSKKRLHGAWLRDPRQGSVRAKATDNSGEGHEQLLAWAQRASGAPAGGLCFVLEATGVYHEAVALFLHQAGGLVAVTNPLHVKRFAESHGIKIKNDAHDGRVLALYGHERNPKPWQPPPAQVRDLRALLRRLDALEEDRQREANRLEKTQIEGAPGSVLDSLQAMLATLGEQIKRLRLQLDEHIDHHPELKKQRGHLETIPGVGSKLSAEFLALFGSKHFRNAKQAAAFLGLVPVEHQSGTRILKRPRLAKNGDSRWRARLFLPALTAARYNPDVCALYQRLIAAGKCKMSATGAAMRKLVQIAFGVFKHQRPYQPQSV

SEQ ID NO: 453162 - protein, 530 aa, unidentified
MVDEIVEGLEDPVREPVIAHELPDVLLRVQFRAFGRQRDQRDIGRDDQAGGEMPSGLIDEKRGVRARCDLRGDLGQVEVHRFGVAPGQDERRTLAIPRTDRPEDIGGGGSLVLRRARARAALGPTSGDLVLLADAGLVRKPDFYGVGLDAFFAPDLRQAFGEVFMGWPAPPSGDVGSPAVQKEERIMRIAVLGVDLGKNVCSFVGLDEAGAVVVRRRARRDTLIDFVGKLPACIVAMEACCGAHHLGRLFAACGHDVRLMSPEYVRPYVKAQKNDDRDAEGIAEAATRPTMRFVEVKTQAQLDMQTLHRSRDRLVGERTALINQARAILLERGIVVPQGKRKLECYLVALMEEPEGGALTARMRMLIADMQAQWQDLDRRIAAFEAEFVAFAKGDEDARRLTTIPGVGVMIASALIAAIGKAETFEHGRDLAAWLGLVPRQWTTGGKPRLMGISKRGNKYLRKLLIHGARAALPHVAERDTSLGRWAKGLLARVHPNVAVVALANKLARICWAVLRSRQNFSAKGALMAA

SEQ ID NO: 453163 - protein, 406 aa, unidentified
MLFVGDDWAEDHHDVEVQDETGRRLAKARLPEGIAGIARLHALVGRFLPEDVDPAEVKIGIETDRGPWVAALIASGYQVYAVNPLQSARARQGQDVSGAKSDAGDAHVLADLVRTHSHQLRTVAGDSKQAGAVKVLTRMHQSLIWDRTRQVLRLRSSLREFFPAALEAYDDLDSPDVLELLTKAPEPSRAARLTRAQISAALKRARRHDRDTKTTAIMAALRTEHLTQPPVIAAAYGVTVRALAALITTSNEQITALEGPVEACFGQHPDAEIYLSQPGLGPILGARVLAEFGDDPTRYDGARARKNYAGTSPITRASGKKKVVLARYVRNKRLTNALHQQAFSALSGSPGARAYYDALRDRDIGYNAALRQLGNRLVGILHGCLKTRTCYDEATAWDQHTQRVAA

SEQ ID NO: 453164 - protein, 420 aa, unidentified
MLAESHDEEQIIARVAALDIGKAELVCCVRVPGPGSRRLQEVSTHSTMTRSLTELANHLVELAVERVVMEATSDYWKPVFYLLEAHGLQPWLVNARDVKHLPGRPKTDVLDAVWLCKVAERQMLRPSFVPPRPIRRLRDLTRYRIDLVAARTAEKNRAEKLLEDACIKLSVVASDIFGVSGRAMMAALIAGERDPKVLAQLARSRMRTKIGRLEEAFNGHFDEHHRFLLQRMLDRVDGIDADIAAIDEQIEAYLAPFAAAAARLDEIPGVGPVAAAVIIAEVGVDMSRFPTAGHLCSWAKFSPGISSSAGKTKGNGSTGHGNRYLAWILGEAAAGAARTDSFLGERYRRIARRRGTKRAVVAVGRSILVIVWHLLADEDTRFTDLGADHFTKHVNPDAKKRNHIRQLEALGYTVTLTPAA

SEQ ID NO: 453165 - protein, 381 aa, unidentified
MPRISSKHERTTFQKKILKELETDPNTKIDIGVDLHKKSIHAAIFRGGATLTDWRTTANYGDFADQILPFLPYTKTVAYEAGPTGFSLARILQGHDFNVVVCAPAHTPRPSARQNKSDRIDSIKLAQLSAAGMLKAVTIPTEQEEQDRLVLRHRNALVDKSRRVKQQIKAEFLFIGTGEVGSWSQKEIKRLAELKCSENQRFTLDSMLRELGMLDDEVKTTTARVDLIMRERHADAKAILESHPGVGSITAATFALELFRGPQRFRNGRHVASFLGLAPGKDQTGESDRPQPLLKRGQTRLRSILIEAAWRWIRLDPKAREAFGRIASKKKGNGKKAIAAMARRLAVRLWTMWTRGEMYNPEKEIQRQRQRVTRKAEAAAS

SEQ ID NO: 453166 - protein, 339 aa, unidentified
MRIVGGLDVHRAQITYDYVDLRTGEEVRGQIRPATRGEVRAFLATFGRKTAAFALEGTTGWRFIVEELRRAGMEAHLAEPAETRARRGPKRRAKTDRADSRLLRDLLLAGNLPESWIPPDHLADLRTTVRLRRALIAEKGMWLRRMHAQLFHHGLPVPPDLQSKAGREYLEKATLPPAARQVLDVGCLLLDRLDEQLDTIDAELLPLARRLYGCQVLCRQWGIGPVLAATILAELGDTRRFSSSRQSVRFAGIDVTVEESDGKRSRGHLSRQGSPTLRWALYEAAGGAWRVASPDHNYYLETKRRLGTKRARLSVARRILRRVHHELAEAGDAAFVDAA

SEQ ID NO: 453167 - protein, 326 aa, unidentified
MSRIQGKTSSPQLAISQVYVGIDVSKSHLDVYIHPTGATRRVTNDKSGLASLVKFLRPHTPKTVVLEATGRYHRLCHRHLHDAGFNVAVMNPYRTRKFSDVLGQLAKTDEIDARMLAQFGAMIQPEKSTPPAPVIAMLSELLTARRQAGAEKTTLQNQQGEATNSLVKQQIRARLKMCERHQAALEKKIRATIQQHEELKGRFDILTSIPGIALITAATLIAELDELGAANSSQIAALVGVAPMNCDSGVWRGQRRIRGGRQNVRNALYMAALAASRASADMARFYNRLRNNGKPFKVAITAVMRKLAILANTLITENRKWELNHA

SEQ ID NO: 453168 - protein, 437 aa, unidentified
MKVMHERVAGIDVHKKMIKVAVRSPGAKPWTRKTEILTFSTYYGVLRQMARDLRSRGVTHVVMEASGIYTEPVYYALAEEDFTEVLVVNPAHVKAVKGHKTDAKDSARLAELLECGLLQGSYIPPPELKEVRDLTRLRTKKVQARTSDVQRLGKTLESAGIKLGSVASDITGKGPAAMIEALIDGERRGSVMADLAIGRARAKMADLSMALEGRFTDHHAMMCRLHLGAIALHDAGIADLGARIAAMAAPWRRETELLKTIPGFGDQVAWTWIAEIGPAPHEWFASDAKLASWAGLAPGNYVSAGKRGYGRTSEAGTYIKPALVQAAWAAIRTPGRLQARYNHLVRRMGGQKNPAAKKKAIVAIAHTLLKIAYSVLRTGTPYQDLGADFYARRQQPAHRQAWLEKQLRSLHPGCTVTVTIGPPAEGPPAPGHVPEAV

SEQ ID NO: 453169 - protein, 403 aa, unidentified
MNSVGIDISKGRSTVAVMRPFGEVVISPFEVHHTDSELSALARRLKSLNGETRVVMEATGNYHAPVAKLLHDAGLYVSVVNAKLVHGYGNNDLRRVKTDKKDAVKLANYGLDRWLTLPRYVPEEGARLLLKNCYRQYRQYSKVQTVLKNNLISLLDTVFPNVNRLFSSPIRGDGSEKWVDFVAEFWHCRCVSEKSEKAFANKYQRWCKKHGYNFSVAKAHTIHAEASGHIGVMPKSETTKLLVEQAVAQLRATSVALTALKREMLTLAAQLPEYPVVMGMFGVGPTLGPQLIAEIGDVRRFYSKKALVAYAGLDAPPNDSGDVTGKHKSMSKIGASSLRRTLFLVMSVYLRSAPLDEPVYQFMDRKRAEGKPYHVYMMASANKFLRIYYATVKAYLESLEHTA

SEQ ID NO: 453170 - protein, 352 aa, unidentified
MNKYFGCDAHKRYSIFTSVDDTGSVGPYVRVENNRLLFRGYLEEIPPRSQIAVETVGNWYWMVDEMEKAGHIPLLTNAGKAKAMMGRINKTDKLDAKGLALLLRNGTLPSIWIPPGELRDQRELPRMRMTLVRIRTMIKNRIHATLSKYAIEIDEVKSVFGVAGRKLLEDRLWELPPQTRHSVEKQLELLDDVQDQIKESELQIKAVVQETPAMQLLTTLPGVGMILAVVIAMEVGDVTRFSGPDRLASYAGTVPRVKASGGRIFLGRVRPDVNRYLKWAYVEAANTIVLNHKRWMGRHVVSLYMRLREKRGHAKAVVAVGRHLAEATYWVLKKKESYKERNVKRPVSSTRE

SEQ ID NO: 453171 - protein, 410 aa, unidentified
MEQQVDNVAGLDVHRDTIVACARLGRGQHPKVLKKSFKTTTAGVDELARWLADLEVTRVVMESTGVYWKSTYYGLEGLFAEVWLVNPYHVKNVPGRKTDMADAEWLADVAAHGMVRPSLVPAPAARELRELTRYRKTQVAMRAQEVQRLDKVLQDAGIKISSVASTVLGKSTRAMFEALVAGERDPAVLADKALRKMRPKIPALTEALAGRFGAHHAVVVRAILAHVDFLDANITALDEEVAARLGPFRTAVELLKTIPGVGQTTAEVFVAETGGDMSRFPSAQHLAAWAGLAPANAESAGKHRPAGTRKGANWLRRAFIEAAKAASRSHGTYLSAQYRNIAARRGPNKATVAVAHSIITASWHMLSDGTQYHDLGADWFSSRRDPEREARRLIARLQALGHNVTIAPAA

SEQ ID NO: 453172 - protein, 319 aa, unidentified
MTDSPATIWIGIDVAKESLDAASCPEGSPHRATVANSPQGIRSLLAQLPPADQARVVIEATGGYERQLVASLIEAGFAVAVVNPRHVRNFARALGVLAKTDRIDAVVLAQFGQRVQPRPQAEIPAHQAELAQLVGRRRQLVELRTMESNRLELTTAKVAHKSIRTLLTTLDKQIARLDAEIARLIDADDDWRAKAEILTSAVGIGPVASSTLLAELPELGKLNRQQISSLAGLAPFNRDSGKLRGQRSIYGGRASVRTALYMATLSAKRHNPVLRAFAHRLTAAGKPPKVVLVACMRKLLVILNTMLKQNTPWKPVHAH

SEQ ID NO: 453173 - protein, 340 aa, unidentified
MLHITTIGLDLAKNVFQVHGMDHEGGAVLRKKVRRGQVLKFFGTLPPCLVGMEACGSAHHWARELRAQGHEVRLIPPQYVRPFLKTNKHDAADAEAIAEALVRPTMRFAPIKSADQQAVLMVHRSRELLVKQRTMLINAVRGHCSELGMIASQGASKVNDLMVMIEDPDDVRLPAFAREALGVLITQLRAVKEAIRKLESKLQAWHRSQQASQRLTTIPGVGVITATALITTIGDGSQFNSGRHLSAWLGLVPRQHSSSGKSRLGRISKRGDGYLRRLLVHGSRAVLRWQRGAPKKPSPWIGELLTRRPTNVVLVAMANKTARTVWAMMRDQQTFTAVVR

SEQ ID NO: 453174 - protein, 294 aa, unidentified
MVHSHTLYLGLDVHKETTDVAYSSTGDGSIHFHGTIPTNVRSVNKLIKKFGSKASDLVVVYEAGPCGYWLQRHLVKYGVQCWVVAPALIPKAPSDKVKTDRRDAMALARLAQAGLIESIHIPDADDEAIRDLIRCREDAMIDLRQARQRLKSFLLRNGHPCSGRTNWSDAYKRHLADIHFLEPAKKLTFQHYIAITEERYQRLQHLERELQEVADKWRWYPLVQFLCALRGIRFLSAMTIVAELGDMRRFTNPRALMNFVGLTPSEHSSGQRQRQGGITKCGNTHARRILIEAA

SEQ ID NO: 453175 - protein, 330 aa, unidentified
MNFYTNTHPYYCGIDLHTRLLYVCIIDNENNILVHEKIDDSPDKLLALLKPYLGNIVVGVECMHCWYWVSDFCEEHNIDFILGHALYMKAIHAGKTKNDKIDALKIAKLMRGGNFPLAHAYSKEHRSIRDALRRRTHIMRMSAQLKAHVASTVSQYNLPALETRLDLRNSPDREKMRHFFPDEAVQKSMDLNLNIIETMVSELYKIEHYVKTQAQTHCATDLHILKSFPGIGKILALTILYEVGDIERFPTVQKFASYSRLVKCKAESAGKTHGTQGNKIGNAHLKWAFSEAAVLYLKGNDNAKRYLAKLQKRMSKAKALSALALSLIHI

SEQ ID NO: 453176 - protein, 435 aa, unidentified
MLLFPFIRVVIPMMKLKYSICCGLDVHKNVIVATIVTTNKDGISEYIQKSFSTINSDIQRFHDWLIENNCYHVCMESTGKYWIPIFNYLENDIDVCLTHPKYVKAIKGKKTDKKDSKWIADLYKFDLVRCSFIPPKNFRQLREIARYRFKLVCMKSSEKNRIQNCMTISNVGIASVLSDPFGKTATEIISYLLEHTADSMDEKAVRKLIKKGAKSKSDEIIEAIKGYTIETDQAKKLELARGHLEYLNDMITQTEVELYVRIKPYYEFVEFVSTMPGMTELSSTIVLAETGVDMNIFDDAKHLCSWCGLAPANNESAGKKKSVRIAKAGDYLKPMMVQCALAAIKSKKQPYFAIKYGRIKKRRGHKKAIIAIARMMMVCIYHMVSEKKPFTPTDYEELMNPQNHIERVVLNENNVFAYLESLGYDSSKLVKRNDN

SEQ ID NO: 453177 - protein, 342 aa, unidentified
MKQYVGLDVSQKETSVCVVNEAGQISFEGKVKSDPGALTALLRERAPHAERIGFETGAMASWLWHELRRVDLPVVCIDARHAHAALSVRMNKSDQNDARGLAELVRVGWYREVKVKSEDSQKIRAILVARSRLVAIRRDIENQVRSLIKEYGLLFPRAIGKQFRNQVSELLGEDHQLLGVIAPLLSIHEHICEQQSKFDDEVRRLAKSDETTRRLMTVPGVGVVTALTFRHTIDDPSRFRSASTVGAYLGLTPRRNQSGETDTSGKISRWGDRLLRSYLFEAATVLLYRTKKWSSLKAWGMKLAKRIGVKKAKVAIARKIAVILHCIWVDGTSFDWGQAKPA

SEQ ID NO: 453178 - protein, 367 aa, unidentified
MKKVSTAAVKASRNFSQSQLTVGLDLGDRSSCYCVLDESGRIVMEQRVSTTAKGLQAAFGEMPRSRIALETGTHSPWISRFLSELGHEVIVAHARKVRLIGESRKKDDRLDAQTLARLARIDPQLLCPVKHRSAQAQADLTVIRARAGLVRARTALVDTARSLAKSYGQRLRGCKVRNMNPEKAQGLSPELQSALEPLLACLESVSEQIREYNERIEKLAQDSYPQVALLKQIKGVGTLIALTFLLTLEDPHRFRKSRDVGCYLGLQPGRRNSGQSEPQMHISKEGDPYLRTLLVQGAQHILGPFGVDCDLRRWGLKLAERGGKSGKKRAIIATARKLAVLLHHLWVSGEVYEPLHNSNRRATPAAA

SEQ ID NO: 453179 - protein, 399 aa, unidentified
MEGPIVSIDVSNGNSHYMCFIKNNKRFGKVKKIDHDIEGFKRLLEDIQKLEAETNEKVCAVFEATGVYTKPLERFLSKNSIKTYMINPLESARKRKEEIHNKKTDKLDPISISKVYYDKEEMMELKKKDETYNWLRKKNRLYEDQLNHLRKYKVTFQNQLSICFPGYLDLFKDGYSDIPMTILKKYPHPDLLKNKKAETVARYLEKNTCHTHKVSLEYALKIIEFAKKTYPGCEKDDVEVEIFKILLDKVIETQRECEKTLNEMITVASTLEEYRYISSIDGIGPNLAARIIAEIGDIEEFKSREALVAYAGLDPHIYQSGDQDGKHLKISKKGNKYLRCLLFLAVGCSIRGAKDNPVNRFYQKKKQQSNPLNSKADQNRMYRQTVKNNIRYMQKQDYI

SEQ ID NO: 453180 - protein, 424 aa, unidentified
MFGTAGRARKRWKLQRKFELFVGVDWGSEQHRVCIVSPTGEILDQRWVEHSGQSLAELVTWLRSKTTASPDNVAVAIELPRGSVVETLMEQGFAVFSINPKQLDRFRDRYSPAGAKDDRRDAFVLADSLRTDMRCFHTVRLDEPATIRLRELSRLDDDLRLEQNRVHNQLREQWHRFFPQLLQLSPAADEPWVWDLFQTVPLPGKAVKLPATRVQRILAKHRIRRIDVPQVQAILAATPLSVAPGAAEAASEHALLLLPRLRLLQQQRTAISKRIDTLLEELAKPDQTDSETIEHRDAEVLLSLPGVGRQIAATMLSEASQAIAERDYHGLRCYTGAAPVTRQSGKKKVVLMRQGCNERLRNALYHWSRVSVVYDPKSKIEYAAMRAKGHSHGRALRGIADHWLTVLLSMLRHHTLYDPQRRPA

SEQ ID NO: 453181 - protein, 339 aa, unidentified
MYRVGLDVGQRHSSLCVLDCNGKMVRQEQVTGTWSELIQRIAQLPGPFEVCFEASCGYGYLNDRLSPLAHRVVVAHPGQLRLIFRTKRKNNRLDAQKLAKLLYLDAVPQVHVPSVNVREWRSLIEFRQKLLGRRVAVKNQVRALLRGLGMRPIKGLWSKKGSAWLKGLELSSLNGLRREIMLDELQQVQVKIKQVEKELKKIADGHAGMTLLMSIPGVGIRTAEAFVAYIDNPARFGRIQQVGSYVGLVPCQDATGEANRLGHITKDGPATLRKLLCEAAWQAVRRDAGMKRYFERIMKEDPDRKKIAIVATAHRLARMMLAMLRNGEVYRKEQCKGVG

SEQ ID NO: 453182 - protein, 378 aa, unidentified
MLYVGIDVAKNKHDVTALNVPGKTVLKPLTFSNNKAGFELLDLSFRQLNQDCLIALEDTGHYAFNLLNFLHEQGYKVYTYTPLLIKEFAKSLSLRKTKTDKKDAHGIALKLLSDPNREQFQHDNRQVELKILARHIHRLKKKQSDWKVQYTRCLDIIFPELDKIVGKHSEYTYQLLTCYPNPQKRLEAGFDKLIEIKRLTASKIQDILSVAPRSIGTTSPAREFEIIEIIKHYKRLIDKAETCVNDLMAEFNSVITTVTGIGGRLGAVILAEIRNIHAFDNPAQLQAFAGLDSSIYQSGQIDLAGRMIKRGSPHLRWALIQAAKACARFSPAFKAYLKTKLEQGKHYNVAIIHLAKKTYPNPVLYPKKELPFDEQKVM

SEQ ID NO: 453183 - protein, 330 aa, unidentified
MTNVTSRKSTPPALHLVGVDMAQPVFEWALHDMPGTHRTANDEAGFKTLLEALKERRIGLIVIEATGGLERALAGFLLHHGLPVAVVNPRAARDFARSMGHLAKTDSIDAVALAHFAHTLSAKADQAGVRFTPPSAEVELLQAMVGRRLQLVGMRTTEKNRLGGEVRVLHKSIAAVIKTLDKEIAKLDRDIDAHLAQHFKEQARRFDNITGVGPITCAVVLAFMPELGTIKAARAAKLAGLARLNNDSGKERGKRHIWGGRSIVRSTLHMATLSAVQFNPVIKVFYERLIAAGKPKKVALTACSHKLLRILNAMARSGQPWNEKFHAVTP

SEQ ID NO: 453184 - protein, 304 aa, unidentified
MFGIGIDVSGENLDVAVHEQAFRQFKNNKRGWASLIRWLQRWPAKQVVLEASGGYEQKALDALHEAGLPMVRINPGRGRSFASATGKQAKTDRIDAMVLAHMADVLKLTRYVPPAAWQRRLGELCQRRRHLVQMRVSEHQRMRAFSEPSLISMLNQHLREIQKTIKQLDTTIAALLAEQEGWRDFAKLKGAGPVLMATLACELPELGRLSGKAIAALVGVAPMNRESGNWKGRRSITGGRAVVREALYMAALTAKRYEPRLKEFFESLVNQGKPGKVALVAVMPKMLVILNARKRDAEAQMASA

SEQ ID NO: 453185 - protein, 427 aa, unidentified
MTRMHQAATEPAPPPAVSTSRVVFGGIDTHKELHVAAVVDSGEVVLGTASFSTTRAGYRALIRWLRSFGDVRRVGVEGTGSYGAGLTRHLTEAGVEVLEVDRPDRSDRRRKGKDDDLDAISAARAALHQRRTSIPKSKDGAVEALRVLRVTRQTAIRARRNALQLLRMSIVSAPEELRDQVRNLTRMRLIRTCAAWRPDVTDAADPVSATRIALKSLARRILELGDEIAMLDELIEPIVTALAPQLLARVGIGVEVAGQLLVTAGDNRARMRSEAGFAMLCGVAPLPASSGMTQRHRLNRGGDRQANSALHLAVISRLRMDEKTKAYVAKRTVEGHSKLEIIRCLKRYLAREVYYLLNPGTPPTKGGGSGARRAGSTPARNHLPEGAAGTRSQGSAGRPTASAAQALIPGGDALTPPKPPPDRVHAT

SEQ ID NO: 453186 - protein, 389 aa, unidentified
MFYLGIDIGKNTHVASLVDDKKKVIFKAFSFSNSIDGAESLILKLEAFKNELEVAMEATGHYWLSLYSYLVEKNFTVRVINPIQTDGWRQGIEIRKRKTDIIDSLLIADLLRYGDFVETSLSNEDYLSLRNLSRFRSYLISSIGDLKRKTIALLDQVFPEYASSFSNIFGKTSKEILSNFSTPSDFEDINSDDLNTFLESVSKKNYASKKIDELSKKASSSFGINFCLDSFSLQIKMLIEQISFIQNQVSDVENEIELLLEKLNSPITTIPGIGSVNAATILGEIGDIKRFSNPSKLVAYAGLDASISQSGEYESTYNHMSKRGSPYLRRALFQSALRAEFCDPVFSAYYQKKISEGKHHLVATNAVARKLCHTIFAVLTKDEPYQVQN

SEQ ID NO: 453187 - protein, 319 aa, unidentified
MTKTICIGIDVAKASLEIALGAQGTVMTYPNTPEGHDELTVTLANYAIDLVVLEATGGYEVPVACVLQTLGLAVAIVNPRQARDFAKAMGNLAKTDKIDAQVLAQLALVLSQRTDRDKIVRILPSAQQRVLQAMIARRRQLVVLSISERQRLGNCHPDIRESITLMISFIQEQLKVIESALSKHIKTYHRSKLDLLSTVKGVGPATTIATLIADVPELGKLTRREISALIGVAPFNRDSGFFRGKRTIFGGRAMVRRMLYMATLTAIRFNPVLCAFYKRLTEAGKPNKVAIVACMRKLLVILNAMIKTNKPWDESFHTV

SEQ ID NO: 453188 - protein, 359 aa, unidentified
MQTQRKELNFEGQNIFVGIDVHLKSWNVSIFTEDLFHRTFKQPANAATLSSYLKLNFPDAIYHSVYEAGFSGLHAHYELTNLGIHNIVINPADVPTTDKEKRRKTDKVDSNKLARSLRSKDLKGIYTPSQDILEDRSFVRVRSSIVKDQSRLKNRLKSMLYFYGIDFPVEFQKSTTHWSKRFMVWVKTVQLKSHSGNMALAMLIKEAEQLRALLLEVNQELKLMSLSVKYAKNMEFIRSVPGIGLVMGMHFMSEIGTINRFENNDKFAGMIGIVPDCHSSGDNDQIGEITPRGNVYLRSALIESSWIAVRIDPALSKAFSDYCKRMEPNKAIIRIARKLSNRIYYVLKNEKKYETRVVK

SEQ ID NO: 453189 - protein, 347 aa, unidentified
MNSMHYVGLDIHKKSISSCVRQADGSIVQESTIAASHQALDRWMDQLPQPWLAGMEATLFTGWIYDHLNSRGAMVKVGHPAMLEAIVAGKKKNDRLDARKISNLLRCDYFPECHMAPREIRDRRRVLRYRNFLVRQAVRMKNKVSGLLMETGIPYNQQKVHSKKYFAELLREQRKEMPQSLPQLLQLSRSTIETISGMERQLLQALEQDELLAARVERLATIPGVGRVVALTWALEMGDIGRFSSVKKAVSYCGLCGAEKSSGGKSERTPISKQRNKHLQSMLIEAAKLAPRWNAELALVYEREKQKGNCNQATLAVARKLVAYLMAVDRRESAFKPRVAEVAAQPA

SEQ ID NO: 453190 - protein, 316 aa, unidentified
MTHTPNFVGIDVSKAQLDMALRPSGERDTLVYDAAGIDTLVARLRHVAPTLIVLEATGGWERPLVRALVAAALPVIVANPRHVRDFAKATGQLAKTDRLDAGVLARFAEAVRPTRRPHPDAATDALAALLARRRQLLDRLTAEKNRLSTAPTRVQRRIRAHVTWLTAELARFNEELDEAIRQSPVWCEQEDLLQSTPGVGPVMSRTLLADLPELGTLNSKQIAALVGVAPLNRDSGTLRGKRQVWGGRAPVRAVLYMATLVAPKCNPVIRSFYLRLRGVGKAPKVALVACMRKLLTILNAMMKHRTPWRALVVQGA

SEQ ID NO: 453191 - protein, 458 aa, unidentified
METRIIGIDLSVRAAHKAAILDQASNTFISPVVSFHTDPAEMDRLLSIARSGATDDVRLIAVLEATGMAWYPVSVYLSDRGVEVYRVSGQQVADQRRVYQRRAKSDRIDARILARLPLTLSERIYPLILPTNPQMALQRACRELLRLRRQSTSIKLRLQAMDRLVWLELSDILPPDDPRMYWVREHWYDPWQVLEAGDAAIAQSWLQASEEPSADLAWVSALLRQAERATIVYGSRSRIMGDSLLASVLREQSRLEELESQAHWLCLNTIHPLYRQLHPQRYLETIPGIGQNSAAVYIAFIGDIRRFPSLSEFRGWTGMIPYSKQSGDARVSGLHITQAGPDPIKATAFLNAQVARRWDPQIAAVYHNQMTALGKHYLQAICACATHLLDRVYVILRDNRPYELRDVDGTPVDKDVAHRICQKRYLVPDSVRRHTAHRVRQARREMRLEHLYERRSQK

SEQ ID NO: 453192 - protein, 359 aa, unidentified
MQRKQISFEGQRIFIGIDVHKRNWSVAVSTETGCVRTHSQKASAQTLLDFLKGNYPGADYLAVYEAGFTGFSTYYALTGLGINCLVIHAADVPTSQYESVMKTDKIDAVKLVKALRAGMLKGIYVRPKQSLDDIGIIRARQCILKDQNRYKVRIKHKLMSNGVEIPERFEGPNGTRWSNVFINWLKHDVVLMSETRASLDLLTSQLERMRGAQLEATRELRRLSQTERYKEGHDLLCTIPGIGTVVAMNLLTEICDITRFGNEKRFTSWLGLVPTCHSSGEKVSHGEKTFRGNKQLGPALIEASWVAIRNDPGLSASFVRLCRRMKKQEAIVRIARKLANIIFAVLKNKTGYAPYVYNA

SEQ ID NO: 453193 - protein, 458 aa, unidentified
MPTSRNRKKDQKIKVTHWDHLEQINFNAAGLDIGAAEIWGCVPADRDEQPVRCFKTFTVDLQALADWLEACGIETVAMESTGVYWIPIYEMLEARGFAVSLVNARHIKNVPGKKTDVLDCQWLQKLHTYGLLQASFRPEEEMVTLRSYLRHRDNLISYRSAHIQQMQKALHQMNLQLTNVISDITGQTGLQILRAIVAGEHDPVKLAQYRNPRCHSSQDELAKSLEGHYKAEHLFALHQALESYDFYTQQLQACDLEIEQKYKAFKPQVDLQAHPLPPAHKKSRRQATHPDYDLRTYLYQMSGVDLTQIDGIDALTAQSIISEIGLDMTKWPTVKHFTSWLGLAPHNDISGGKVLKRKTKKTSNRANTALRLAAQSAGRSQSALGGFYRRMRAKHGSPKAITATAHKIARMVYHLLKYQEQYIDPGQDYYEQQYRDRVIKNLQRKAQELGMQLVPAAA

SEQ ID NO: 453194 - protein, 343 aa, unidentified
MKITTAGIDLAKNLMQVHGVDELGRIVLSKQLKRNQEPPFFANVAPCLIGMEACGGAHHWARKLQKLGHTVKLMAPQFVKPYVKTNKNDEADAEAICEAVSRPNMRFVPIKNGEQQAVLALHRARQGFVRARTAQANQIRGLLAEYGIVIPQGICHITKRLAGILEDGESDLPGMFRQLLQRLGEHLKELDRQVGELELQIQLWHREHDASRKLAQIPGIGPITASALVASIGDAKSFVNGRQLAAWLGLVPRQHSSGGKSTLLGISKRGDTYLRMLLIHGARSVIRVAEGKVGYAESWLARLIGRRHPNVAAVALANKNARIVWALLKHERDYQPDYQPSAA

SEQ ID NO: 453195 - protein, 430 aa, unidentified
MKFNTQNAKIEAITEKTLVLGIDVGSEMHYARAFDYRGIEYTKKPFKFSNTEAGFMSLQAWILDLKEKHEKDKVVPGMEPTGHYWFNLGKFLQDNEMKPVLVNPHHVKKSKELDDNNPTKNDCKDPKVIAGLVREGRYMIPYLPDGVYADLRTASNIRFQLLVELTRIQNRISRWFNIYFPEYKTVYGKPDAKSGILILKTAPLPEDILTLGIDGVNQIWRDAKLRAVGKARAKTLIEAAEHSVGSKEGTVSARMEIRILLEDYESRNIRLQEVMALIEELVAQIPMAEKLLEIKGVGIRTVSGFLAEVGDISRFNSPKELQKLAGLALVENSSGKHKGETTISRRGRKRLRYLLFEVAMSLVAKNPEFRELHVYYTTRRLNSLKKMQSLMAVAAKLLRIFYAMLTKGVDYDPKKMVSDIKRPAAYLQAE

SEQ ID NO: 453196 - protein, 366 aa, unidentified
MFHRQSQSGRTFVGLDVHKNSITSAVLRPGDEVAVVDRFFPDEPSVRRFVAALGDPAQLQVCYEAGPTGYALARLLERLGVSCEVIAPSLVPVAAGARVKTDRRDAIRLAELYRVGQLTPVRVPTEAEEAIRDLCRTRSDLVTDRTRARHRLLKFLLRHGVVFRDGAHWTLRHEAWLAKVRFEDEALTRTYIRYRSVLSGTEAELEAVESDLKRYLAEGPFAEAVARLSAYRGVTELGALALAAEVGDFRRFPRATSFMGFCGLTPAEYSSGERTRRGRITKTGNVHLRTALVESAWSYQHRPAVGAEIKRRQSRASAETVARAWAAQVHLTAKFRRLAAVKSSHNVVVTAVARELAGFLWAEMVA

SEQ ID NO: 453197 - protein, 362 aa, unidentified
MEFFAGLDVGMDETAICVVDDKGAVALQVTVATDPATIKLALKPYLGRLRRVGHEAGALSPWLHPELLRLGLPAVCLETRHVRAAMSAQRNKTDKADALGLAHLMRTGWFRKAHIKSEACYRLRLLLTHRRNLKRKFLDLENAIRHSLKSFGIRITGTGRGGFAQAVRDAAAGDALVAELIDAMLNARAALWKQYCRLHDLLVKFVAGHELCRRFMQIPGVGPVAALSFMTAIDDPSRFKRSRDVAAYFGLTSRRWQSGSSIDVQGRISKAGDGDVRRALYEAASALLTRFKRTDKVKSWGLAIARRASHRKAVVAVARKLAVIMHAMWVDGTFYCGDPTAAPADVRAHAAVKESKLLRRYA

SEQ ID NO: 453198 - protein, 373 aa, unidentified
MPDVISTAPADVRLWISLDVHKLSIVAATLPPVGGQPEVEQIETTRVAIRRFIERRGGPEGLAVCYEAGPGGFDLLRVLTELGVACDVVAPSLIPVRAGDRVKTDRRDAKKLVRLYRGGQLSFVQPPTPETEGLRDLMRCRDDLRCARTAARHRVSKQLLRHGRIYRDGKSQWTKMHRAWIARQRLDDDLAHAALGQMLIHLDGLDRQLDALDRDLVQIAQHQRWVQIVEILTRFRGISTRTALGLIAEIGDFARFSHPRELCAWLGIVPSEYSSGQQRHRGHITKTGNHHARRLLIEAAWAYRHRPRQPDRGPQPDARAWQAQIRLHRRYHHLTTERGKRSTVATVAVARELTGFLWAAATDQPLAQEAATT

SEQ ID NO: 453199 - protein, 407 aa, unidentified
MGRAARTRHHRRWIQPTGCPMPQPNDLSRSLAALDQDSTLVAVIEISQSSWLVGGIAPGVNRQPLKKLAADETALLQLLSRWRGEATKAGRTISRIAVAYEAGRDGFWLARWLRGRGIEAHVIHPTSVAVSREHRRAKTDRLDTELLKRAFLGWLRGEQRHCSMAMIPTLEEEDAKRPNRERENLVSERTRFVNRMKSALARLGIRGFKPHLRKAPERLDTLRTAEGMALPPNTLAELRRDMARLRFVMDQIREIEAARLARLEQHPEQANHAMVRLLARVVGVGIETADMLVHEILSRHLRDRKAAARCAGLTGSPDESGARRREKGLSRAGNARVRRGMIQLAWRFLMFQKDSALAQWYRRQTTDGRGATRKTMIVALARKLLVALWQLVTTGEVPEGVVLRRAA

SEQ ID NO: 453200 - protein, 357 aa, unidentified
MSTIADDDRRVIAGVDTHKDFHVVVVLDEHGRRLDQATFSTTTRGYRDLTGWVTGFGEVLALGVEGTASWGAGLSRHLRARGLNVVEVNQPDRHRRRRRGKSDPIDAEMAARAVLAGDATAIPKAGDGPVEALRQLRLARTGAMKARTAAANQLHSVCDTAPDQIRAQLRGLTTRRKVAVASRYRAGDLLTPTGGAKRALVAIARRWSSLDTEVRELDQAIKAILDAIAAPLLARHGVGYDTAGALLCTAGDNPDRLATEASFASLCGAAPVPISSGNTQRRRLNRAGDRTANSALWTIVMVRLRSRHAPTLAYLERRVAEGHSKRDAIRCLKRFLAREIYLDIQHITTTAALDIAA

SEQ ID NO: 453201 - protein, 412 aa, unidentified
MKVVHEICGGIDVHAKMLVACLILANGEKEIRTFSTMTDDLLHLRDWLVAAGCTHVAIESTGVYWKPVFNILEDALTVILINPEHAHALRGRKTDVKDAEWLADLLRHGLLKASFIPPPEIRELRELTRYRESLVRERSAVANRVQKVIESGNIKLGQVASDALGASGRAMLRALAHGETDPDKLASLAQRQLKEKVPQLRRALQGRLTVNQRFVLGELLQRWEELERADRRVTSEIDKYLQARPKLARAREIVDSIPGIGPRVAEVVVAEIGVEMEAVFESDAHLASWAGICPGNKATGGKRLSGRTRKGNTYLRSALVQAAWGATMKKNCYLSSQYFRLVKRLGRKKALVAVAHSLLVIIYHVLQSDQTYTELGGDYFDRYHVEQQRDYYLRRLHMLGLKVTVEDLSKAA

SEQ ID NO: 453202 - protein, 396 aa, unidentified
MAVVVGIDVAKEFHWVAIVIAETGKVLVSQWINNDPDSIDGLIGRLCGIGADHGEITVAIDLMGGIASLLTAMLIEADIRLVHVPGLVVNRARRATKGGETKSDPRDAKTIADQLRLRDDWREVTAEDETTVDLRILVGRRRDLVVDQTRRLQRLRETMTSIFPGLERAVDVTNLGDLHLLARYATPDEIRRAGRRRITEYLLRVGVRRSYAEPLVTKAITAAQVQRTVVPGQARMAEFAREIAAEAVSARRRIGELESQIREDLDRHPDAALITSMPGMGAILTAEFLAEAGDLARFAGADQLASAVGLEPVLQQSGKMHYLRRATTGSKTLKFVFYQSAFAAIRSDPASKAFYARKRAEGKRHHQALIALARRRINVLHALLHTRQPYRAATAA

SEQ ID NO: 453203 - protein, 349 aa, unidentified
MKILALDLGQSTSVACTYEATTAKAVFQRVSTTPVALQQLLEEIQPDRVVVEIGSVTGWVSDLVQAAEIPLQVANTAAPAWRWSNTKRKTDRDDALRLAQLSALNQLPQVHVPPRDVRQWRSLIRYRHHLVVRRTQIKNRIRALLVAQGCPMKPGRSSWNAEMFAQLRGWARPLEDVSAAELWRGELGLELEALVHVEQLIDRAEKKLDQMVAESPPCQLLRTIPGVGPRLAEIAVAIIDDPHRFRSGKHVASYVGLTPRQHQSGNTDRQGRVSRMGNNLLRALLVEIGWVGLRYNPWMREVYERVRRGSPVRKKQAIIAVARRLIVRCWAILRDGTAWKVPSAAPVRG

SEQ ID NO: 453204 - protein, 338 aa, unidentified
MNIVFLGIDLAKNVFQLCGLNQAGKPVYTKRTGRKELLQTLANIPACLIGIEASTGAFYWQREFEKLGHKVKVISPQYVKPFVRGQKNDGNDAQAIAVALMQPTMQFVPLKSPEQQDIQALHRARQRIVNHRTATVCQIRGLLLDRGIPIGSAVSRARRAIPLILEDAENGLSSRMRRTIAELYDLFNDLERRIHFFDKEIETVFRQSEACQRIAKVKGIGPKTATAVVAAIGKGTEFKNGRHFAAWLGLVPRQHSSGDRQVLMNMTKKGDKHLRTLFIHGARAVVRVATNNNDGHMNQWVNQLKERRGFNKTTVAVANKNARIIWSMLRNETEYQVV

SEQ ID NO: 453205 - protein, 421 aa, unidentified
MMCGSVRVKAFRLGEALDWAAGQARAKGFTSVTVACEPTGPRWLQVQRLCAERGLRLVCVQPLVSHIARQQQDYTAHKTDEADCVMIARLAAELHCYIPEELDEVWADLRHLGRRRAALITSETASVQRIRDFLSVAWPTVTEACAKPFESMTWLAALQAVTSRCGGQPGKLAGIGLEAFTALVRDALPSWGGQRICGPICKTVFAALTSTEGVVWAHRRGLLRRVAAELGDLQRARAQRQETEAAMTAALGDLGLARLGDIPGLTATGAAAILAETGDPKRYDTSSSVVKHAGLSPSENASGAFDGEAHISRRGRPGLRLTVWRAVWAVLIHNPVMAAKYAAMTQAADQAADQARAGGSGHATSAAEAARRRRAKARVACAAALLRWIYSMVVHGTCWDPGVAAGRKDTLAAPSCQPEAA

SEQ ID NO: 453206 - protein, 405 aa, unidentified
MNAVGIDVSKGKSTVTIRRPGDVVVMSPRDIPHTQSAINDLIGLIRGLDGETKACMEHTGRYYEPVATWLSDAGIFVSAVNPVLIKDFGDDSLRTPKTDKADSQKIARYTLDRWAKLKQYGIMDKARNQLKTMNRQFGFYMNQKTAMKNNLIALLDQTYPGANDFFDSPARSDGSQKWVDFIAAYWHVDCVRSKSLKAFTEHYQNWCRRKGYNFSADKAEKIYRLSSDLIAVFPKDNNTKMLIRQAVTMLDTASETVESLRLKMDEIAATLPEYPVVMAMNGVGPTLGPQLIAEIGDVTRFTHRGALTAFAGVDPGRDESGQRVRKSVPTTKKGSPYLRKTLFQIMDGLIKRSPADDAVYAFMDKKRAQGKPYYVYMTAGANKFLRIYYGRVKEYFATLADSEET

SEQ ID NO: 453207 - protein, 356 aa, unidentified
MTSNAKYIGMDVHKESISIAVRNSAGKIVMEGVIETKASMILQFIDGLRGDLQVTFEEGTSAAWLYDLLKPHVTKLVVCDPRKNKSMREGNQNDKIDARRLAELLRLNHLTPVYHGEHGLRTLKELVRSYLTVTKDLGRVMSRVKAIYRSWAIPCTGKQVYAPRHRAEWLGKITEPGVRRRAEFYYQQLDALRVLRQQVRRDLLAESKKHKAWKRLCQIPAIGPIRAAVLLGILQTPHRFRTKRPLWNYGGLAIEMHSSADHRSVDGHLQRSRKNVLVRGLNRNCNHDLKNLFKGAAVIASSKPGPFQEFYAALLTKGMRPEMARLTLARKIATIVLIVWKKGVCCDANHLKPQTA

SEQ ID NO: 453208 - protein, 430 aa, unidentified
MLSERKKVCGIDPHKNMCAAVVIKGNPIETLGKIKFENNRRGLDKLLHLLSETDCNTVVIETTNTFWQGISSTLMHMGYTVVPVAPQTVPKKREKDDFHDASWLAITYMDNRVTQAYFATPKIQKLRSLLRTRYTLIKIRTMLKNRLNAELSRAGLNLKGVVSDIFGKEGKKILQTLAEEGIEGIKELANSEDGTSHKKNKYAMLLDVLSVAFMENFDAQVITILLLGTDNFEKLIERIEGLVNELIHSDMELLSLVNLLMTIPGVGFITAATIVAEVGDFTRFTSGKKIAKRAGLTPRMRESGGKRYYGRITRRGSPFVRWILYEAATTIAKLKKPQKLYTFYKGIAIRRGTKIAAVALARKLLVVMHAMVMQGRKYDESDAYRGTYERKMYLMELNYKKYREGLNQIKNELSKLRDTELTLIDERQKT

SEQ ID NO: 453209 - protein, 391 aa, unidentified
MGSYYMGIDISKGYADFVIFDGQKNVVEPNFQLDDTFGSHCKLFEILNLFFERHPESVLYAAVESTGGYENNWLYTLSGFQGVLNIKSARLNPLGVRANSRASLRRVITDKISARDVAEYMIAHPEKVTYQQDDSMAGLRRQWGFVRLLVKQKTQILNQFESMLYNVNPELIAYCKSGVPSWLLKLLRQYPTAAKLAKARVSSIAKIPYVTAERAKELIEQAKNSVASATDEASGKLIAVMAEQITNMDETIRIQTQQMNRQCTIPEVALLKTIPGIGDDSAIGLMLEIQSINRFSSAKKLAAFFGLHPVFKASGDGTSDPHEQTGPEGTSKNSLYGCPCCSDRQPAYPKNLRRTYGEGYEEDGGNRAVHAQNTENHLRHAEKQPGIRFTD

SEQ ID NO: 453210 - protein, 355 aa, unidentified
MDSVKYIGMDVHKEAISIAVLKSSGKLVMECVIETKASTILQFLQGLRGSLHVTFEEGTSAAWLYDLLKPQVTKIVVCNPRRNALLKEGSKSDRIDARKLAELLRSNLLRPVYHGEHGVRTLKELARSYLTISKDLGRVMSRLKAIYRSWGIPCAGKQVYAPRYRSEWLGKIQEAGVRRRAEFYYQQLDALRPLRQQVRQELLAEAKKHSAWKLLRGIPSIGPIRAALIIAILQTPHRFRTKRQLWTYSGFGIETHSSADHRCVNGELERAKKQISIRGLNRNHHHDLKNLFKSAATIAAVKAGPFQEFYDALVAKGIKPEMARLTLARKIAAITLVVWKKGVRFDAEHLKPQTA

SEQ ID NO: 453211 - protein, 438 aa, unidentified
MSMTFARLLDPCLEDDDDPFRHYDYRGEPLEDRLYLPCGIDPHKKVCHAAFVHPLPHRQDILSHRQVQNQHLPDALWLVEEGQRLAEPFQATPLYIFEASGPYWRPYRLFFHQLGWPTATVSGRQTRRAGGTGTRKKRNDLQAAFLVAKVFKQGESHASRIPPEPLATLREYTRLHLFFVEQSVALQNRMFDLRYQIHPGFDDLFSKSIMPTTLALAQEELVHPVKLLQADPQTLTEVISQASHGKLGALRAEAILRSAQHAFYMPYAPEAQSFNLKLMAQAHEYIVHHLLPPLRARIEECLGQLPFPQCLNEIPYFGPVVTATFLAELGSPFWYQTVDSVVAWFGLDPSVSESADHTTGISHLTKRGTKYGRRILWLVARNWSRYVSQGQRMYRKERDENKLSYDGAICVIAAKLVRIAFAMARDGSHFDMDKAFPS

SEQ ID NO: 453212 - protein, 401 aa, unidentified
MKRLSRGIDIGSESHHIIILDEEDNVLYNQKVSHKLSEFTKNIKLFKQIEKQEGGKLSFALEGKNGYSAPLDRILLDQGFILYNVDNLKLKRFREAFAGEWRDDYRDSLMLSKMLKLKDYINSEREKVFIKIEKPSPLTESLKLLSRHQQTLIDERVRLINRLGKKLLEVCPQVLRLAKLKNKKIIAILAKYPDFSKYKRITLKSLLKIKGIGKKGAFFLLKRLNNIEYMPGLTDIYKTIILSYAQRILELQKEIKDIDKSLDEIGEKNKEVKHLKTIPGVATKLASRLIGEIGDINRFPSEKQLAIYCGVACVDNNSGKVTKARAVYKANKICKKTLITMAGGSIRFSFQCKAYYLKKRAEGKSHNHALRCMARQLIKVIYKMLTEDRDYIVRKELKKVA

SEQ ID NO: 453213 - protein, 335 aa, unidentified
MEITTIGLDLAKHVFQVHGVGSDGSVMLKRRLRRGQVHAFFASLKPCRVGMEACATAHFWGRQLRQLGHDVRLMPAQYVKAYLKRGKNDAADAAAICEAVTRPSMRLVPIKSEDQQAALMLHRARDLLVRQRTQLINAIRGHLAEFGVIEAQGPWNVPRLLAGMAEAGLPDPVPGLVQLLAGQLKEVELRIGEIDTKILAWHKASPVCQRLAAVPGIGPLVATAIVATMPDPTVFRSGREFAAWLGLVPRQNSTGGKTRLGRTSRQGNAYIRRLLVIGAQSALFCSKAIKADPWVQTLLAKRPRLVVAVALANKTARIAWALMARQTTYQAAAAA

SEQ ID NO: 453214 - protein, 327 aa, unidentified
MTQPVLGIDISKATFDVVLLVGEKKIHHQFSNDLEGFKQLDVWLRRNEASKVHACMEATGQYGDKLAAYLYHGGHDVSVVNPARIKAYAGSRLRRNKTDKADAELIAYYCLKENPALWSPPETDFRDLQAMERHLEDQQAMLRQEQNRLESGVETPWVVQDLEDHIRYLKERISETKKAMQELINANARLKRQRDLLVTIPGIGVLTAAKILGEIRDATQFESARQLAAYAGVTPRHFVSGSSVHKKSRITKTGNINIRRILYMSAISAKHCNQIIAPFCSRLLQKGLTPMQVVCAAIHKLLHLIFGILKSGMPFDPNYLQVSAFTP

SEQ ID NO: 453215 - protein, 343 aa, unidentified
MLYIGLDVHKEFCQACVMNKSGKVISNGRFLSTQEALDGFLDRFEDAKFVLESTGIWEFIYEGVEKRGFEVVLAHPLKVRAIAEAKVKTDKVDAEMLAHLLRADLIPRSHVPPRDIRNLRQLVRHRAYLVRQCTSIKNRIHAELLRRGIRRPDDLKKTFTFKHVEWMRSLGILTITSSLNCLEGIQEQIREVESFLLVEYNSRKDAQLIATIPGIGFYGALLILAEIDDIHRFSHPEKLCAYAGLVPTVHQSGSRGHNGSITKSGSPHLRWILIEAVHVHTNYCPGSKLSKFHAKVAHRRGKQRATVATARKLLHTIYWMLLTKEKFHCQGFNLVEKAATLIA

SEQ ID NO: 453216 - protein, 313 aa, unidentified
MTEITIGVDISKSHLDVFRLQDEAARRFENSAAGFRALVKWLGKAAVARIVFEPTGPYHRAFETALSGKFPLVKINPLQARRFAEACGTRTKTDAVDARMLARMGAALALEPDAPVNEKLNELRDLQVARTGLIKERTRLHNRGHVQANPVLKRQTKARLTLVERQIAELDAEIARQIAEDQPTARKRQILCSIPGLGPIAAALILTFLPEIGTLDRKQAGSLAGLAPHSRESGQWKGKSFISGGRKPLRDALYMPALVAMRFNPDLKTKYTALRAAGKPAKVAIVAIMRKLLETANALVKADHLWAKKSSCS

SEQ ID NO: 453217 - protein, 425 aa, unidentified
MNLLILKGVPMALKIVYKICCGIDVHKTFVVACIASTNDKGVTSYESHRFSTYTSGLKTLLQWLLKRNCKDVCMESTGKYWIPIYNILENDCSIVLAHPKYVKAIRGKKTDKKDAKWIADLFKHDLVAGSFMPPADIRQLRDLMRYRFKLTCFQSSEKNRLQNCLTVSNIQLGNVVSDTFGKSAQAILDKLLENPADTSFDLEPLVYKSLKKKLPELRDAIDGYITPEQVGKLKVIKAHYESLESRKAELEELILALAAPYQQELAILQTAPGIRSDFTAIGIISEIGTNMEAFPSAKHLCSWAGLTPTNNESAGKKKSVRVSKAGCYIKPLLVQCANAVVTSKKHPEIRNRYLRLKKRRGHKKAIIAIARMLLTALYHMLKNGENYNAKLYRKSDLPPANWEITVEQAIIIARNQGYKIKSATA

SEQ ID NO: 453218 - protein, 465 aa, unidentified
MSTDKRLQANRRERKELARRLRSEDPGLEVMHPDAAGIDVGNGAHYVAVRPDRDADPVRRFECFPADLYRMANWLRSCGVKTVAMQSTGVYWIPLYDILEERGLAVFLVNARHTKNLPGRKSDVQESQWLLKLHTYGLLNNSFQPTSDIRVLRTYWRQRAEHAVGMATCIQRMQKALTQMNIQLANVISDLSGRTGQAIVRAILAGERDPKKLAELSDCRIRATREEVAKSLEGNWRPELLFVVEQQLEMYDIDQHRIAECDQKLQQHLSSFIDTAFPVAKERLSQANKSKPSRYMPQFALSGELLRITGVDLTQIDGINVMTAQTLLSEVGLDMSRWKTEAHFASWLGLCPDNRIRGDKVLSRGTRRVVNRAATALRIAATTLLKSRTYLGAQYRRLRTKLGAPKAITAMAHRLARLVYRMLKYGQQYIDKGAEYYEQRNRQQQIDFVKKRAAQLGLMVTAACP

SEQ ID NO: 453219 - protein, 436 aa, unidentified
MTKSTALPQNLSIIGIDIGRHSIDVCYPDANDPQRWPVVKFTYKSNPDWWLELIAALAPGAAICAEPTGWHYLHPIYNLLHQNIPGVILLLANHTASAHIRAAHISTAKTDQMDARALAFIAQAYQASVDFRGVRAFDADLLGEVLALRTLLNEHQRIKKQSVRFQNQLRQYAHSMFPALADHVETYKFFIERGAAAPIEMKELVLEKPGDLDGRRFRHMQRLADKIPPLKVPEVLKNNVIDHLHRLKANEQDLENIHESITQALLSPTFERIYARLSTIPGAFPIAIAAFLVATNGLIEQFDANTFKAVCGVNPQTKSSGKKDGTKMSKTGYRPAMNALWTWTMYLVSAPAPSNAIATYYKEKQKTSSRAFYAARSKLARMVNAVAKSPAGYRPAGNSNQILCPICEEANMRLTKDAEGNPILECPNCESIEELN

SEQ ID NO: 453220 - protein, 414 aa, unidentified
MRRLIERVCGLDVHKDSVTACVRVPGPGGESLQEIRTFQATTRGLLALRDWLAAHKVTHVAMESTGVYWKRPFFLLEDEFTCWLINAQHIKRVPGRKTDVADAEWICDLAQHGLVRPSFVPPREIRDLRDLTRYRKALVQERTREVQRLEKVLQDAGIKLSSVASKVLGVSGRAMIEALCRGGTDPEALAELAKGRLRAKLPALCEALEGSFRAHHALMASRILAHIDYLEESIEDISGEIERAMDPFARQIELLDSIPGVGRKAAQIILAEIGVDMSGVFPSAGHLASWAGMCPGNDESGGKRRSGRSRKGDRHLRDILTQVAWAAVRTEDSYYRAQYNRLARHLGKKKAIKAVGHSILVAIYHILSEGVPHQDLGADYFTRRDNPAAHTRRLVRQLEGLGHKVTLEPLAESA

SEQ ID NO: 453221 - protein, 325 aa, unidentified
MEVVGLDMHLKKTQGTIMSMNGDIVKQERFDTDKEHIMRFLKKLPQGTRVTLESVGFCWPWIDFIESLGHRVLLANPVKVKSRAEDIKTDKVDSELLAHLTRMDWLPTCYVPSKELRLLRSMLRHRAFRRRMTTAIKNRTYSEFRKRVIDVEDLGTHIGREGMMSSNIYEVNQNIEILNAVENQIKLIELRLKRQYQDVKPIRLLQKIKGIGFLTAITLYAEICDIERFSSPDKLAKYAGLVPRVRQSGEVTRMGRETKGNKWLKWILIEAAWSHIKFCRGGRLSRIFKNAYQRKKDKKKAIKIVARKLVNIIWAVWKYEREFHA

SEQ ID NO: 453222 - protein, 350 aa, unidentified
MDRYIALDVHMESCTMAVVGPSGRRLKSQVVETNGRALVDAIQGIPGRRHVCLEEGTQSAWLYELLKPHAVEVVVTLPAKRKGSKDDLRDAWALAEELRTGALRTVVYKAPRRLSGLRDAVRGYTMLTGDLVRVKNRIKALYRSRGVVTDARIYRAELRESWERKLPESQRRLAAMLGGQLDAVEQAQGEAERWLREEAKQQVVVKLLATAPGMGWIRTAQVVAIVVTPERFRTVRQFWSYSGLGIVTRSSADWVREGNRWVRAQTLQTRGLNRNRHGLLKAVFKGAATTVIQQLVDHPLHHDYQRMLQAGVKPNLAKLTLARRIAAAVLSMWKHQEGYDPKKHCRKQTA

SEQ ID NO: 453223 - protein, 342 aa, unidentified
MAIVGAFDIHRRQLTYEYVSLESGELKRGKIAPADRDHLRRWLTRFADERNVAFALEGCTGWRYVVEELERAGVEAHLAEPADTAALRGKKRHAKTDRADTTHLRSHLQAGDLPESWVPPGHVLEARARIRLYKDLLDERGDWHQRVHATCYHQGTPVIPGLYTAEGRGALDKVQLSAAGRQAVEVGLRQIERLTEEMAGLRRDLACFSRRQPGCRALQQAHYGVGPLTSVAIWAEMGDCRRFANSDNAVRHTGLDVTVWSSDGHRSKGHLARQGPPVLRWALYEAAMCAARPSSPDLAYYRSVRDRRNAQLAVLSVARKLARRCYHTLRELGDLALDQPAA

SEQ ID NO: 453224 - protein, 319 aa, unidentified
MHRIFLGVDVSQDHLDVHVRPTSARKRFANTAAGIAELVDWVRPLGAERILFESTGPYQKAAVGALLTEKLPAVVVNARQVRDFAKAMNYLAKTDTIDAGVIAHFAEVATTTVRPLESQEIRDLRDLYDRRGQLVRMLAMEKNQRHSATVAQASSKVLKSIDKHIDYLEGQIKDLEERMDKLIESSEAFKARDEILQTITGIGPQVSRTLIAHLPELGRYNRQRIAALVGLAPFNDDSGDHTGQRHIRGGRSKVRVGLYQAAVAAIRHCQHTKAFYADLKARGKASRVALIAIARKILVLANAMIRDMAPYKAPANSVC

SEQ ID NO: 453225 - protein, 406 aa, unidentified
MNYLGIDVSKATSRYVFLDNDGEKLVKPFTLDNGHNDFNKLLDRLKELALLPDNLLIGIEATGIWWENLYSLLTEHKFKVIVLNPHQTNKFREALRIKAKTDDIDAYVIAGLLRSQEYSSSYIPEESIQCLREITKLRFELVKDRQNYERQTNALLGLLFPELAQTAIKNPFAVSSVAILKAYPTAKHLAEAKPKNIEKIVRSIKGNNFNINEIQSLIECAQKSIYSGRAKHDRGLNLIILLTQVETLQNAIAQLDERTNNILSPSDSNDANSFPGANLLTIPGVGPKTLAAILSAVGSDGQAFPDGKHLIGHIGFFPKIYESGETRHDNTMSNRGPKYLRAALYMSAVACLKHNPEFKALYDRKVSQGKSAKQSLVYVAKKLAHLCLSMLKSGEDYNPSRVFMPV

SEQ ID NO: 453226 - protein, 337 aa, unidentified
MEYFAGLDVSMEETHVCVVDRNGAVVYETKAISSARLIAEALEGAPPCTRVVFETGRMAPMLFHGLTELGVPIVCIESRQAYQALKTLTTHKTDRNDARGLAQLARTGFYKAVHVKSLPAHAVRALIIARKKLVGQRVTLENQIRGLAVVFGVRLPRGLSPAFVDEVVRMSDGITGLAGAMRGLVAARDAVLGAVAAIDADMKRLVRASEACRRLMTIPGVGQITALAFTAAVDDPARFRRSRDLGAYLGLVPRRYQSGEIDYVGSISKVGDKRMRSLLYEAANVMLTRYKGALKLKDWALAIARRSTMRKARIALARRLAIIMHAMLRHGTEFRPA

SEQ ID NO: 453227 - protein, 336 aa, unidentified
MFIIGCDYHPRFQMIAMLEKATGEVKVLRLEHESGEAKRFYASLPKGVLVGIEATGSTQWFERMVGECGHELWVGDPAEIRARRVRKQKTDERDALHLLDLLITNRFPRVWVPSPEDRDARQLLQHRQKLVGMRTSVKNQLHGLAMGQGLCRKQKLWSASGRKQLEALELGPWASRRRQELLTLLDELDPKIAELDKAVEAEAARRPDVVRLRAQKGVGPIVGLAFVLTLGTVSRFRRSRQLVSYLGLNPREDSSGSHQYLGHISKQGNSMMRWLLVEAGQTAARLDPELGRVYKRLKFRRGANVAKVAIARRLAVKMYWILRQAPETAPAASHVR

SEQ ID NO: 453228 - protein, 347 aa, unidentified
MLAELVQHVIGVDPDRDWITLAVVDARSSGVVAEGRFAATGDGYDDAVDFVDGHSGETDRAWVIEGSGGYGRGLTAALGRRGEWVIEFDRPTRKTKDGAKSDALDAIRAARETLGRERLSVPRAHDGLREAIRVHAVTRAAAVRARTGAINELKAMIVTADEALRAQLRGQRTCAQVAMCAKFRDHHYRSVEQRCTRTAMRAVARRIEHLDSEVDDHDRSLKQLLDEAAPQLLAERGIGYITAAEFYVAWSHNGRCHSEAAFARLGGTAPVEATSGQNQTRHRLSRGGDRQLNRALYHVAITKRRCDPATRAYIARRVAEGKTEREAIRCIKRYIARRVWRLLEHAT

SEQ ID NO: 453229 - protein, 371 aa, unidentified
MKDYSEVFIGIDTSKLRNAIAIAEVGRGGEVRYLGEIDTTDAATRKLVAKLAGKYRSLTFCYEAGPTGYGLYRLIRGLGHECQVVAPSLIPKKAGVRVKTNRRDAVELAKLLRAGELTAVWVPDERHEAMRDLSRGRQAAQKDLKGKRQQISSMMLRLGRHYPGKKTWGPAHMNWLMQQKIEHREQRIVLEELLEGMRQETERVERLEQSIREAVPEWSLAEIVTALQAMRGIDLVAAVTVLAEIGDLSRFQNPRELMGYLGLVPSESSTGDKITRGGITKAGNGRARRVLVEAAWTYRFPPRVSREKQQKVAAAPRHVREIAWKAQTRLCARYRSLMRKGKRPTVVTTAIARELSAFIWAINREVMVRQG

SEQ ID NO: 453230 - protein, 323 aa, unidentified
MNKNIKFFGIDISHLVFDVADSNGNFYQFKNTLSGFKKFAKILDIDSHCVMEATGYYHYQLAYYLLESGIRVSVENPLAVKRFIQMKLSKIKTDKSDAKQICEYAKQVDLKLWKGNSKHQTECLQITRLLAVYTKQSTMIKNKLHGESVLGNPSKAVVSSLKRSLKQVQKEIKMLENKLLILVKQEHQEVLTRLKSIPGIGNKTALMLVVLTDGFERFTSGSELCSYAGLTPVIKRSGSSVTGRSKICKMGNQKLRNLLFMCSFNACKYNKACKDIYERLVAKGKSKKLALIAVCNKLLKQAFAIAKSGLIYEDSYRSTMVKN

SEQ ID NO: 453231 - protein, 598 aa, unidentified
MLAPSSVLAPPADTAVAARIGVGIDTSRYGHYAAFLRDDLQPAADELAFAESADGYDLFRQRLVRIAAAHPAVTSVVRLDAAGQYADNLLHFLPRLDRASGQPVPCIANAQVVLSCGDPQRNKNYRAALFGSKKSDPVEARAAARFALTERPAPAAAVAPPLRIPRQIAGRLQSVVRQRTRLINQLHHLLASTFPELALPVEDVSQGWVLELVHRYPTAGPLGAACAADLDAIAYLPGKQIEPLLRHARASIASLDGPVVEGLVRDQVRQLRDCNARQKRLEGLLVTAYRAPPEPNHLDTIPGIGAVTAAVPTAFVGDVDRFENPGKLAAYFGVPPIEVSSGVERDGTPRASRRYVMSRRGNDLVRRYLWMAALSASQCNPAVRALYLRVAAKHPEHKSIAVGHAVRKLLHLAFALWKTDRPFDPDHRAGAKKAGSGSDSQASIEGRGQADAGKDQAAGHTPETEPAEGVVTAACAGTVARAAEVVEGTFIDFGHLKSQLPMSRVLNHLGLSERLRGGGAQRRGACPIHRGDGRGRTFSVNLDEGVFCCFDSRCGKRGDVIELWAALRQMSPREAAVDLVRTFDLEPARAKGTEKRHG

SEQ ID NO: 453232 - protein, 430 aa, unidentified
MKSNTQNAKIEAITEKTLVLGIDVGSEMHYARAFDYRGIEYSKKPFKFSNTEAGFVTFKEWILDLKERHEKDKVIPGMEPTGHYWFNLGKFLQDNEMKPVLVNPHHVKKSKELDDNNPTKNDRKDPKVIAGLVREGRYMIPYLPDGVYADLRTASNIRFQLQAELTRIQNRISRWFNIYFPEYKTVYGKSDAKSGMLILKTAPLPEDILTLGIDGVNQIWRDAKLRAVGKARAKTLIEAAEHSVGSKEGAVSGKMEIRMLLEDYESRNTRLQEVMVLIEELVRKIPMTEKLLEIKGVGIRTVSGFLAEVGDISRFNNPKELQKLAGLALVENSLGKHKGETTISRRGRKRLIYLLFEVAMSLVSKNQEFRELHNYYTTRRLNPLKKMQSLMAIAAKLIRVFYAILTKGVDYDPKKMVSDIKRPAVYLQAA

SEQ ID NO: 453233 - protein, 332 aa, unidentified
MSVYVGIDVHRKRSQVAVIDQDGKVLANRNVNNGIEAILSVIGGLPAGTKAAFEAAYGWGWLAGLLEDYGFEPHLVHPLQCKAIASARLKNDKVDAAILAQLLRADLLPEAWIAPPAVRQLRALLRHRAQLVRLRTLLQNRIHAVLADHGHDRPAGCWSGPGREWLASLDLPAVSAEVISDALALIDALESVIGRLDLEVRQRARSDPRVKVLTQLPGVGPFTALVLLAEIGDITRFASARKLASWAGLTPTVRGSDRTVRHGHISKQGSVWIRWILCEAAQKAKHSPQFAASYQTIARRRGIKIATTAIARKLLTRACHLLTDAASAGAPH

SEQ ID NO: 453234 - protein, 371 aa, unidentified
MEESSKTLYVGLDVHKDSIAVAYAPEDRGAEVVSLGSIGTRQCDVDKLIRKLQAKGATLVFVYEAGPCGYWLYRYLTRKGFGCHVVAPSLIPRKAGDRVKTDRRDAVMLARLMRSGDLSSIYVPGIEDEAIRDLSRGREDAMRDLKATKYRLKAFLLRQDIRYEGRATWNAAHLRWLSEVVCPTRAQQIVFQEYVRAVTEQHERLQRLENELHEEVKGWRLYPVVTAIQALRGVELTGAIILMAELGDLTRFDTPRQLMSYLGLTPSEYSSGERRRQGGITKAGNTHARRALVEGAWAYRYPAKVSRHLQLRLEKLPAEVQAIGWKAQVRLCKRYRQLIARGKHANQVVVAIAREMAAFAWAIARTVPLAP

SEQ ID NO: 453235 - protein, 349 aa, unidentified
MSQNLNSAVAVIGIDIGKNSFHVVGLDDRGAIVLRQKWSRGQIEARLANLPPCLIGMEACVGAHHLSRKLKALGHDARLMPAKYVRPYSKGQKNDFRDAEAIAEAVQRPTMKFVATKTVDQLDLQALHRVRERLVSQRTGIINQIRAFLLERGVAIRQGLRFLRAELPRILATSPDVLSARMVRVIRDLAEDWRRLDERIDQLSSEIAVLARQDAGCERLMSVPGIGPIISSAMVAAIGTGEAFSKGRDFAAWLGLIPKQISTGDRTILGKISKRGNRYLRVLFVQAAWVVLIKPMSWERHGLRSWIEAAKKRLHRNVLAIALANKLARIAWGVLAGGRIFEASKLQAA

SEQ ID NO: 453236 - protein, 340 aa, unidentified
MRLIGCDLHASQQSIAMLDCDSGAVNEKTLKHEGEAVREFYASIPPPVVVGIEATGSMGWFLRLMEELAIECRVGHPTAIRKAETRRQKHDRRDAALLLQLLAEDRFPTIWMPSTEYRDLRSLLLHRHQWIRMRTRVQNALHAIVLAHGVRRGHTLWNRDGQALLASLPLPPHTADRRSELQALYQHLQAHIDRLDDRVEHVANERARATLLMTHPGVGPVTALATEVFVGDPARFLDRKALASYVGMIPREYSSGKRQRLGALSKQGNPFLRFLWCEAAAHAVRRDPDLQRFYRRKVVQKGFAKARVAAARKLGIRLWIMLRDQIDYTEFCRRGLARQS

SEQ ID NO: 453237 - protein, 407 aa, unidentified
MDVVIERACGMDVHKDNITACIMTPKGKAIQPFSTKTVFLLQLVDWIKQHNCTHVAMESTSVYWKPIVNLLEAEDIEFLVVNAQHMKAAPGRKTDVKDAEWIAKLLRHGLLKASYIPDRNQRELRELVPYRRSIIEERARQHNRIQKVLEGANIKLGSVVSDVLGVSARDMLDAIADGEEDPEKLANFARRTMKKKKEELELALKGYINSHQRLMLKTILKHIDFLTEQIEMLDQEVAKRVSSHQEDVERLDSIPGIATRMAEQILSEIGTDVKKQFPTAAHMCSWAGLVPGQNESAGKRKSAKTKKGNKYLRSALTEAAHSVRGSKNYLGALYRRTASRKGKKRAGIVVAHAMLRISYYLLTRKEMYVDLGEDYFEKQRQQSIVRHSLRRLESLGYTVTLEEPKAS

SEQ ID NO: 453238 - protein, 415 aa, unidentified
MEVVHPRCAGIDISKKDAKVCVRVQGSGGRRTSSTVTTWGAMTNEILALKDFLVEQRVTVVVMESTSDYWRPFYYVLETDVEVLLVNARDVKSVPGRKTDVSDAAWLADLGAHGLLRASFVPPEPIRQLRDLTRARTHITQGRTREIQRLEKLLESSGIKLSSVASDITGVSGRLMLQALIDSQGTADPAVMADLAQRRMRSKIPVLTEALNGRFTAHHAFMTRLFLDRIDGHTKDIATLSERIDGLMKPFLPARELLESIPGFSQIIAEIFIAETGGDMTQFPTAGHLASWAGVSPGSNESAGRVKSTKTRPGNRYLKGALGIAALNQARTKKTYFSAKYHRLASTRGPIKALVAVEHAMLIAAWNMLTNSEFYRDPGPDYYTRNDPAKTKARAVKLLEALGYDVTLQQVAQAG

SEQ ID NO: 453239 - protein, 315 aa, unidentified
MPNDKEHFVGIDVSKDWFDVAVLGEKTIVRLTNTKSGIARLVKRMKVLNPTLIVVEATGGYEENLVLALFEVGLPVALVSPQRVRQYARAKGRLAKTDQIDAQILAEYGKNIQPRLFVGKSEERKQLSALVGRRNQLKAMLQAEKNRLRRQSGATRSSLQQVIACLQTQLKQMEKEIRTLLQQHTDLQAQEKLLRTAKSVGLVTAATLLADLPELGQLDRQEIAALVGVAPINADTGRKRGYRKTTGGRPDVRRTLYMATLTGIRYNPALKPHYDQLVKRGKLKKVAITACMRKFLTILNAMMRDQQPFRCASLT

SEQ ID NO: 453240 - protein, 347 aa, unidentified
MKHYAGIDVSLNSSSVCVVDESGKIVREVKVPSEPVALIHCIKSLGMRVERIGLEAGPLSQWLYGALRESGLPVELLETRHVKAALSAMPVKTDRNDARGLAQLMRLGWFRPVHCKSMAAQEVRALLTARKLVQSKLYDIEMSLRGILRGFGLKVGPTTSRSFAARINHLAAGHPSLEMVAEALLSTHAAALCAFKNLEKNVRQISRADARVRLLMSTPGVGPVVALTYISAIDDPKRFTSSKRVGAHFGLTPKKYQSGETDISGRISKIGDSTVRAVLYEAAHIILTRPIHGGALKSWAMRLAKRAGMKKAKVALARKLAVVLHRMWVSASTFDFEKANGCMRAAA

SEQ ID NO: 453241 - protein, 408 aa, unidentified
MNPLFVGIDVSSKNNVAYLMKPDGSKHSSFSVQNNLGGAKLLSERIVSALGSMQLERVVIGLEATSIYGDSLVYALREDGRLGRFQRKIHVLNPKQVRKFKEAYSDLPKNDWVDAFVIADHLRFGRINREVYMDDYRYKALQTLTRARFDVIQNLTREKQRFANYLFLKCSGMAQDKDIQNTSATTIALMEHFETVDDLANADLEELTAFITETGRGKFADPDATAKAVRAAAKGSYRLPKTVNDTVNQAMAVSIASMRALKGQVKVLDKAIEQQFEIIPNTLTSIPGIGKVYSAGIIAEIGDIHRFDSQASVAKYAGLVWNRSQSGDFEAEHSRMIKSGNRYLRYYLLEAANSVRRCDSEFRRYYDLKFKEVNKYQHKRALALTARKLVRLVFLLLKDNRLYIPPEG

SEQ ID NO: 453242 - protein, 403 aa, unidentified
MQAIVQRCAGLDVHKKIIVVTMLLEQSDGSAKEETKEYGTTYKACEELANWLLSHDVQLSVMESTGIYWKNIYAALEKVGLPVSVVNARHVKQVPGRKTDVKDSQWLARLARYGLVRASFIPTKDLRELRLIARYRTKLVGILASQKNRLHKILDDAGVRLGNVVTDINGVSAREIIAGLVEGKPVQELVGCLRGKLKKKKEEMQAELEGELSERHLYLLKRLQAHMVYLENELKELDEYIFAGMQLYKEQWEILQTIPGLDAIGAALLIIEIGVDMQRFGSREQFCSWAGMCPGNNESAGKRKSGRTGKGSKQLRYILCEAANAAARTNCQFQHKYKSLMIRRGHKKAIVAVGHKMLRVVYSRLKVGDVYHDPTVNYEELVVKKNASRWIKMLKKYPVVKTT

SEQ ID NO: 453243 - protein, 370 aa, unidentified
MNTLCERKKTLFVGIDVHKDTHTAVGISPFGEKLFEITVGNYEKDFRLLSDKTREIAQATALSPYLGLEDCQGYGERLALFLTQEGYSVVHVPAVFVDHARKRNTHPEKNDSLDACGVAQVMIQRIDTLPLYTLTEEAKIAKDIKDISLDREYLVKERTRIKNQLHTLLYRIFNTAYQEKFKDPFSVKALRHWIKTNPKNSSPFLVRSMKRKVKRLQQIRDDIKELEQELETLIKESGHTVATASGCGIVIAAEIIGEVGDINKFHAPASLAKYAGCAPREYSSGKTTRWRKTRSGNRRLNRAFHRMALSQISRMGNAAAQAYFKRKISEGKSKSQALVCLRRQMVNIIWMMMKHKTEYKIPSYPQEKLT

SEQ ID NO: 453244 - protein, 386 aa, unidentified
MPKPNDLSRSITAFEQNSTLIAVIEMSLSSWLVSGIVPGIKRHPLKKLDTEKEALLKLLHRWRDEAVKAGCKITRITVAFEAGRDGFWLARWLRTQGIEAYVIHPNSVAVSREHRRAKTDRLDTELLKRAFLGWLRGEPDHCSMAAIPTLAEEDARRPNRERENLVGQRTRIINRMKACLVRFGIRNFKPTLRKASEQLEALNTPEGTPLPPNTLAEMRRDMARLRFVIDQIKEIEAARLKQLKQAPKEGSQAMVLLLARVIGVGIETADMLVHEILSRNLRDQRAVARYAGLTGAPDESGKKRKEKGLAKAGNARVRRGMIQLAWRFLQFQKDSALAQWYRTVTKDARGAIRKTMIVALARKLLIALWRMVTTGQMPENVALRAA

SEQ ID NO: 453245 - protein, 322 aa, unidentified
MEKGKVYAGIDVSKATLDIAIYDSPKKWQFANDDAGIGKVVEFLSEAAPALVVMEATGGYETPVAYALKVAGIPCAVVNPREVRDFAKATKKLAKTDSLDAQVLAHFAAALEPEPRPIPGKEAEELEALLARRRQVIEMLTAEKNRLHTARKPVREAITAHINYLEKELAEIESNLQGRIQESPVHRMKNDLLRSVPGVGPILATTLLVELPELGSLNRRQIAALVGVAPLNRDSGTLRGKRIVWGGRGQVRAVLYMATLVATRFNPVISNFYNRLLALGKAKKVAFTACMRKLLVILNAMLKHRTPWRCVTPNTLVNVTSH

SEQ ID NO: 453246 - protein, 338 aa, unidentified
MKLYAGVDLHSNNNYLGIMDKKEKKVYKKKLPNDLSEVLKALNPYRKDLEGIVVESTFNWYWLVDGLMENGYRVHLANPSAIKQYEGLKHSDDARDAFHLAHLLKLGILPEGYIYPKEGRPVRDLLRKRLQLVHHKTAHILSFKNLVSRNLGFQMPSNDIKKLSEEDVEGMFKEEHLVMAGQANIATMHFLKERITEIEKAVLKRAKLKEEYHNLLTVPGIGKILALTIMLETGEIIRFPEVGNYVSYCRCVGSTRISNGKSKGEGNRKNGNKYLSWAYVEAANYAIRLYPYVRRYYQKKTAKTNNIVAIKAISHKLARASYYVVKDQEVFNPKKAFG

SEQ ID NO: 453247 - protein, 402 aa, unidentified
MNFSIGLDWASQAHAVCVLEATGQVGWQGTVEHSAAGLAELLRRLARFGPPAALPVALERPSGLLVDTLLAAGHPVVPIHPNALKASRPRYSAAGSKSDPGDAFILADLLRTDGHRFRRLQPLADETRALRALVRGRDDLVAERTALANQLRALLERVWPGAAALFADVESPISLAFLTRYPTAQSAERLGEKRLARFLGQHSYCGRRSAAELLARLRSAPACEVSDLEAEASRDLVHALVAVLTPLGVQIQQLSAAIVAALAQHPDGPLLQSFPRSGGVNAAQILAELGEDRTRFPTDEQLAAEGGVAPVTRESGKHRQVAFRWACNKRLRQALTTFADHSRHASPWAASIYTAARRRGCDHPHAVRILARAWVRVLWRCWQDRRPYDVTLHRAAQRVAAA

SEQ ID NO: 453248 - protein, 409 aa, unidentified
MQQLLERVAGLDVHRKTIAVCVRVPGAGGERAQHVRTFGTAAPDLLALRDWLEAHQVTQVAMESTGVYWKPVFYVLEESLTCLLVNAAHVQKVPGRKTDVQDCVWLAQLLEHGLLRGSFVPPPPLRELRDLTRYRKVLIQERTREANRLHKVLEDAGIKLAAVASDILGVSGRDMLHALVAGTTDPAILADLARGTLRKKLPALRHALTGRFRAHHAFMVSQHFGHLDYLDEAIASLSTRIEEALRPFAAEQQRLDSIPGVAQRTAEVLIAEIGVDMRQFPTAQHLASWAGLCPGQNESAGKHKSGRIRPGNRWLRMTLIEAASLAARSRTTAFGARYRRIARHRGHKKAVVAVAHAMLVTAYHLLDRHLEYREPGIDYFERRHAERTTRRAVRALERQGYRVMLEPAA

SEQ ID NO: 453249 - protein, 370 aa, unidentified
MGNRSMFVGLDVHKETIDVSIAEGDRHGEVRHYGMIASDLEPLDKVVRALRAPDRHLHFVYEAGPCGFGIHRHLTARGEDCVVVSPSMIPKRSGDRIKTDRRDSQMLARLHRAGELRAIYIPDATDEAMRDLVRAREDAVVVGTQAKYRLKAFLLRQGRRYPGREGWTLPYRRWLTDLSFPKAAQHIALQEYRDAIDETEKRIDRLTEQLRQLAPTWRWAPVVAALQALRGVSFITAVALVAELGDLTRFGHPRELMAYLGLVPSEYSSGPSVRRGGITKAGNPHVRRLLAEAAWAYQGMPRIGRQHAYRQEALPKVVCDIAWKAQLRLTTRFRRLVARGKAKPKVATAIARELTGFIWAIAREVSPAPQ

SEQ ID NO: 453250 - protein, 482 aa, unidentified
MKKHNIYQNQSQQLLGLFEQAANNAKVMCVPIDYAKKDHVVMFCNGYGDILRKPFSVKNSPEGVDYLTDQVMRSCRQRAISEKHVFFGGEQVGSFADNFVSTLRSQGWLVAGVNAHEAKIQRENLQASTDRLDLLGIAKSLLNRRADCSPAQSGIYLNMRTVVRHRRKLVGITTEVRNRIHTVVDRLFPGFLNESKSGITPFSKSSLWLMKERFSASQIRRRRRSTLIEALRRLGTKKPEDTADMLQQYASQVLKPPQDYVHMLQLSLAQHVKHFCCLQESIGQLETEIALNLAQTQGAFLTSVRGIGIVLAAGVSAEIGNPFEQKPLNNLVSYCGIIPRIKQTGGPQGNTKTGKVAKRCNRILKDYVVKSASHLGLHGPADLKSDYQRRDAAGQHADFGMARRYLRMAMCLMRTSQIYLPNRLRKSDSQIQDRADYYVMSWPLLRDKWQKSGALETAFNADQPLGQWRKIVQQFYGIKLTL

SEQ ID NO: 453251 - protein, 276 aa, unidentified
MSKEPCVGIDVSAKSLAVARRDRRGAIRASTVANTPAGHEKLGKSLGGRPTRVCLEATGIYHLDLALTLERTANVQVMVANPRAVHHFAGAMMARSKTDALDSEVLLAFAERMPLQRWRPPSRACFEVRTLSRHIVSLRQRLAAERSRMARAEASRSVSRWVHEDIAEGIQQLQARIDKLQSRALELVASDVVLAGQLRLLCSIPGIAATSGLQVLSELCVLPADMNVRQWVAHAGLDPRRQQSGSSIDKAARISKAGNRYLRRALYMPALVALPR

SEQ ID NO: 453252 - protein, 358 aa, unidentified
MSRYIGLDVHMQSSTLAIVGPSGKRLQCQVLETNGRALLQAIRAVPKPRYLCFEEGTQSSWLYELLRAEVEDLVVTIPARHSGIKSDAHDAWDLAEQFRVGGLKRRVFKGQAQFGALRAAVRGYEILTRDTVRTKNRMRALFRSRGMHELRQELWDPGDRSKWAKRLPPSQRALADILGRQMDVLETLRTEAEKRMLKEAAAHSIAKRLATVPGIGPIRAAQIVATVVTPDRFRTKRQFWSYCGLAVVTRSSADWQRSPQGRWIRADTTTTRGLNRNRNGMMKRAFKGAAHLLTTQMRSHPLAQDYQRMVNRGLQPEIARVTIARRIAAAVLSIWKHQEDYDPAKHRSQNAPTLAAND

SEQ ID NO: 453253 - protein, 427 aa, unidentified
MAYRIAGIDVHKKKLAVVVADVEVHDEYQFERRWFGSNPEQLQRLAEWLIEQRVEEVVMESTAQYWQGVWGALERYWRPTCQKREGAGAMSGKLHLAQALSNRGRRGRKRDFPDAERLVKRLVAQELVLSFVPDPEQRLWRTVTRRKLQMTRLHVRMQNQLESLLEEAHIKLSGFVTDLLGVSARRMLQALADGETDPAALAALADKHLRATPAQLCDALGACTELNPVYRRLLKMALQELQFLEQQMGQLDQEIANLLRPHEDAVKRLAEVPGLGVDSAQQIIAEVGPTVATFPSDKQLCSWVAVCPGDNESGGVNYSHRSPKGNRQMRRILNQAANAAARTKGSIFEIVYRRQVTRMGHNQAIGVIAHRLCQLIWILLHRKVRYEERGPAVTERSKRKRNARMIRELRALGYRVEPLNLQTAASM

SEQ ID NO: 453254 - protein, 345 aa, unidentified
MDHFAGLDVSVKETSVCIVDDAGKIVREVKVASEPEALLAVLKSPAYHFKRIGLEAGPLSQWLFSALAEAELPAVCVETRHMRAVLKAQINKTDRNDARGMAQMMRVGLYRPVHVKTLRSQKLRMLLTYRKLLQSKAIAIDNDLRGTLRNFGLKVGMVGTAKFEARIKELVENLPDLAMLVEPLLVVRRVLREQLGVLHRRLLTIVRDDEVCRRLMTVPGVGPVVALTYRATVDVPARFKNSKAVGAAFGLTPSRHQSGESDRPGSVSRCGDEMMRMMLYEAAQTMLVVSTKWSWLKAWAMKIARHRGMKKAIVALARRLAVIMHRIWVDGTEFRWTREQAPIAA

SEQ ID NO: 453255 - protein, 459 aa, unidentified
MGKAKACKGGKNQLQVIHPRAAGIDVGSKFHVVAVSAEYDPDPVRKFNSFTTDLHRLADWLKAVGVTTIAMESTGVYWIPVFEILESRGFDVILVNAREAKRVPGRKTDIKDAQWLQQLHQYGLLSASFRPGEKIASLRSYLRHRERLTEYAAAHIQHMQKALMQMNLQLQHVVSDITGDTGMRIIRAIIEGERSAAKLASYRDPHCKQSEKTISAALTGNYRPEHVFSLKQAVALYDFYQKQIKECDQEIEKALAALNSDKNPPSEPLPKARRTQKQKNEPGVPIREMLYTLTGVDSTQINGIGPYTTLRLVAECGTDMAKWPTSKHFTSWLTLSPGNKISGGKVLSSRTRRTKNRATTLLRIAAVNIGKTQTALGAFYRRLAARVGKAKAVTATARKLAVLFYTLMRYGKAYVEPGADYYERQYRERVLLALSRKAAALGYRLAQKQETSPVTGNVS

SEQ ID NO: 453256 - protein, 352 aa, unidentified
MNQELRRVIGGVDSHADNHQAAALDERGRLLGSKSFAVSAAGYRELQAWLASFGLIDRVGVESTGSYAAGLTRHLLAEGVRVLEVNQPHAHSRRRRGKTDAIDAELAARHALSLASAVTPKQSSGIVESIRQLRVARGSAVKSRSAAIVQLGDLVRTAPSELREQLAIRSTVKGKAALCRRLRPDSDRLSEPANAAKLALRSLAGRIAGLAEEIAELDRQLALVATAAPRTTALLGISTGHAGQLLITAGQNIDRLHSEAAFAALCGASPIPIASGKRGRYRLNPGGDRQANRALHMIAVCRLRHCPKTRAYAHRRSSEGKTKKEIIRCLKRYIARQTYATLRDDLRSLTIG

SEQ ID NO: 453257 - protein, 372 aa, unidentified
MRFYNQPHRFYCGIDLHARTMHVCILDHDGLVVFDKNLPCRPESFLRAVAPFRAGLVVGVECMFAWYWLADLCQAENIAFVLGHALYMKAIHGGKAKNDKIDAGKIARLLRGGNFPLAYAYPKGLRETRDLLRRRTYLVRKRAELFTHLQILNAQYNLAPFPKKLSFAANRTEMNITERFADSSVQQSAAVDLALVEALDERIGALELYLVRTAKVDDVQTYHRLQTIPGVGKVLALILLYELHDVQRFDTVGQFLSYARLVRPVHESAGKKLGSGGKKIGNAHLRWAFAEAACLFLRGSERAKKWKQKQAAQRGEGKALAVLAARLGRAVYHMLRKKEAFDEARFWNGAASRADTGSSSLSRPQEVAHAGD

SEQ ID NO: 453258 - protein, 352 aa, unidentified
MKPRHFIAMDTHCQFCELVAMTERGRVVQRNRCPTTIPALVDAIEQVPRPRFLTIEEGPLADWLYRNLVNHVDEMVMSEPRRNALIAKDSDKDDPIDAEKLANLYRGGHIKAVHHAESAERMLLKRHTALYYDRVRQCVREANRIMSEFRRTGIFVHEKDFVHEADRPALLRRLGTPILCEEIELLWRSYDVVNGQVAMMRSQLTCLGRKDPQVRRFTKVPGIAWIRAVTLFVYLDTPWRFHSKQALWRYIGIGLERRRSGNGPLRLGVGQNANHVLKSTILGAAKSAIAAGNNPFADQYERWIADGISLPNARRNVARSQATTLWGMWKYGSEYRPQWVGVAAAAQLARAS

SEQ ID NO: 453259 - protein, 321 aa, unidentified
MTYVGIDVSKVTFVVAYSSVKTNKTRTFKNTVNGVHEFVQTISASEHNCVLEATGNYSALLVYLLSEAGITISLENPLKIKNFARVMLTVTKTDEIDARLIALYGEKMQPAPYKLRSDAILVLKQKRTVLRQLKKQLVATRNLKGSMEVLPFFDPKCKKTIEKTITFLEKQIKEMEEELASLAQGEYKKQMDLLTSIKGIGVTLAAALIVATGRFSYFDNAKQLTRYLGLSPTYQQSGTSVNVKGHINRNGDSSLRSQLYVAAFSSFRCNTECKACFDRLRSNGKPGKVVVIAVANKLVRQAFAVVTQGKPYVDGFKSEKP

SEQ ID NO: 453260 - protein, 348 aa, unidentified
MRQYYTGQHQFYCGVDLHAKTMYLCVVNQADEIVLHQEIPTNATRFLKALAPYRADVVVCVECTFTWYWVADLCQAEGIPFVLGHALAMTAMQVGKTKNDRIDSRDIAKLLRAGMIPMSYVYPKAMRATRDLLRRRMQFVRQRAALLTHIQQTNAQYNLPPIGKKLRYKGNRVGVAERFEGGSVRTTVEVDLALIADYDTRIRQVEWHVLRSAKAHDATTLHLLRTIPGIGKILSLVILYEIQDIRRFPTSQKFCSYSRLIRPIKESAGKRVGVGNGKQGNAYLKWAFSEAVVLFLRETREATSYIQRLERKYGKAKAKGILAHRLGRTVYSMLTHQQVFDLKKFVNQ

SEQ ID NO: 453261 - protein, 456 aa, unidentified
MRTIGIDLAVTAAHKAVVMAENGQFVTPVISFHSRWAEIEELVARAREGVGAEHPLRAVMEPTGMAWLTVAVPLSRLGVTVYLVNGRRVKDLRRYYKRHASSDRISARVLAKLPLVDEESLYPLLLPTSAQLACQRGCKQDNHLQTMITATKNRLRDCDRWAWPGLEKKVFLDLYSPAARRFREDWYDPAAVVEAGIEGVRQALADVANEKEMGRLEILVELALEALKLYGLGTIDYARLQEEMCREQRLLAHLEREQDALNQETVEPLYLELHPSCHLETLKGVGPKGAAVYASFIGLPDRFPDNSHFRGWHGLVPDSRQSGHAESKGLRISRAGPGMVKKYAYLNADVARRHDPQIAAIYYDQMVNKGKHHNQAVCACATRLLDRVQAVLREDRPYDLRDVNGRPVTPEEARAIIAEHYKVPEEVRKRNTRRARKKRREERMERQQQKGSRPRR

SEQ ID NO: 453262 - protein, 350 aa, unidentified
MSILRQVLGVDVAQKELVVSLGRLNEDLSIELCAYRVFRNKETGFEALHKWLIKNTDDAVNCRIVMEATGVYHQKFAHFSLEKGCDVSLVLPNKISNYMRTLDTKTITDKTCSEAIARFGLERKLENWTKPDETYRNLQQLTRERDQIVNERTVVKNRLHAEETEMYPNKGSLKRMQELIKFFNKQEKAIKLEINQYLIKNKSVKDKVDQICTIPGMGALTAVIILAETNGFELIRSKKQLTSYAGMDIREKQSGTSIKGKPRLSKKGNRHLRKSLHLPSLSAVKYNPVHKEIYARLVEKHGIKMKALVAIQRKMLELAYILFKNNTNYDEDFETKKRAARMTNPLEANL

SEQ ID NO: 453263 - protein, 316 aa, unidentified
MIPPPLFVGIDVAKATLDVAVRPTAETWSAPNEAPGLDALVARLVPLAPTLIVLEATGGYQGPLVAALVAAALPVVVVNPRHIRAFAQAVGILAKTDRIDARVIAHFAEAVKPAPRPLPDAQTQELRALLVRRRQLVAMVSAERARLDTAPAGIQATIQAQIAWLATQIAGLDDALTQASQMHPAWQAKDDVLQSIPGVGPVLARTMLGHVPELGTLSPKPLAALIGVAPFNRDSGTLRGRRTVYGGRAEVRAVLYMGALVATRYNPVIKAFYERLLAAGKVKKVALTACMHKLLTIMNAMVRDLKPWQPQEAPIA

SEQ ID NO: 453264 - protein, 351 aa, unidentified
MTQDSTLTVGVDLGDEHSHLCVLDTGGQVVEEGRVRTTEGALRKRFSGPARMRIALETGTHSPWVSRLLEECGHEVLVAQSRKLRMISRSPSKNDRSDAEMLARLARVDPHLLSPIRHRGVEAQADLAVLRSRQALVRARTDLVNHVRGAVKSFGARLPKCSTDAFARKVREAIPEELHPALLPVLETIERLTADVRVFDRRVEKRCEEDYRATALLRQVAGVGPVTSLAYVLVLEDPARFAKSRAVGSYLGLRPKQSDSGEQEPQLRITKAGDKMLRALLVQAAHYILGPFGPDTDLRRWGLALAARGGKNAKKRAVVAVARKLAVLLHRLWVTGEVYEPLRQAKRSKPT

SEQ ID NO: 453265 - protein, 337 aa, unidentified
MKIVGCDLHAGQQSIAMMDSETGELTEKVLKHEGNAVREFYGWLEGPVVVGIEATGAMQWFLELLEELGIECRVGHPAKIRAAETRQQKHDRRDAEVILELLLMKNRFPDIWMPSTEQRDLRSLLRDRHQWVKMRARLQHTLQAIALNHALRKGKALWTATGRQALQDLALPDYTAQRRDELLRLYLQLERRIQQLDKQVEKEAQGRPQARRLLTHPGVGPVTALATEVFLGDPHRFRTAKEVASYIGMIPCEHSSGKRRRLGKLTKEGNSRLRYLWTEASPTEDSRYGVVIGPNHTQNEGTLPGTVCIPAVLHGVCRRATDAAFGAHVDRPRCRLC

SEQ ID NO: 453266 - protein, 345 aa, unidentified
MKITTVGIDLAKNVFAIHGVNEHGRTVLKKVLKRDQVAAFFANLPACLIGMEACASAHYWARKLQCMGHTVRLIAPQFVKPYVKSNKNDAADAEAICEAVARPNMRFVPIKNVEQQAVLAQHRARQGFIKARTAQANQIRGLLAEFGFIIPQGIANIAKRVPELLEDATNELPGSFRLLVQRLMEHLKELDHQADEVEAQIVTWHRDNELSRKLAEVPGIGPITASALVATVSDAKNFDNARQLAAWIGLVPRQNSSGGKNVLLGISKRGDTYLRTLLIHGARSVICAFQRKKNKVDGWLGALLARRNPNVVAVALANKNARIVWVLLAHGREFRPDYTSAKAAT

SEQ ID NO: 453267 - protein, 404 aa, unidentified
MERAEMDYDVYVGVDVGKTKHYAVALDGATGKRLFSRPFGQDEASIRELLEDASGYGKALVTVDQFGNIGRLVVAVGKDMGLDVAHITPKDFKDISTTYKEGKSDAKDAFIIADVSLSTPRLIRTVGTRDDAVAEIKVLNSRRVDIVKERTRYYNRLHDLLLQVSPPLEQLFEGDSLHSDLAIKIFERYGGPRGLKRAGKARVSKWAGSLKYQKTRGPKKVEEVFEALGTMTVELPATEVIEIQIKKLAKRILELDQEESELDAAIEERADAVPETAILKSVPGIGRVYGATIAAEIGDINRFPDANHLASYGGIAPVKEESGTSVKKNKKRKNGNRKLKNAFIESAQKAKRYDPRCKAYYDRKRAEGLQHKQALRALARRRVDLIYALLANGTFYEPSHRATA

SEQ ID NO: 453268 - protein, 342 aa, unidentified
MGVYCGVDLHSRSSQVCVIDAEGKGLFNRKVANRIEDILRVLEPFGSGIPVAVESTFNWYWLVDGLQDAGHEVHLGHPLKLAMITKAKVKTDRRDALTLARLLRSGDFPEAFIYPRETRPIRDLIRQRGKLVTWRAREYSALRLRLYRHGFLDHDRNSAKAMSDEEVESYFSDPRTRHLLQLERARIRLLSAQIAGLDAAIVEATNGETGMERLRRVPGMGLALAPVVFYESGDISRFASPRHYSSYARMVAGRAESDGTSKAPRGRKQGNAHLKSAFSQAAIHAARCDERVRRFRDRHLSHRRGKGAKPIANAIVAHKLAVAVYHVLRYGKEFKHELIFGN

SEQ ID NO: 453269 - protein, 427 aa, unidentified
MDYFAGLDVSVKDTSVCIVDGTGKIVREVKVASEPQALLVVLRNATYCFKRIGLEAGPLSQWLYGALAEAGLPVICVETRHMQAALKAQINKTDRNDARGMAQMMRVGLYRPVHVKTLRSQKLRMLLTHRKLVQSKAIALDNDLRGTLRNFGLKVGVVGTVKFEARVRELVENLPDVAELVEPLLIVRRVLREQLGILHRRLLAIVRDDDVCRRLMTIPGVGPVVALTYRATVDVPVRFRKSKSVGAVFGLTCAKYQSGEIDRTGAISRCGDEMVRTTLYEAAQILLVRTTKWSWLKAWAMQIARRRGMKRAIVALARRLAVIMHRIYGPAARCKGIRTEWSFWSALIYPASRGSSCSGPSWLSARTRSFYLAGLRGPSLHPGLRCAGETVVPSVSNHLADPGRRFSTAFEPRDALRDGLWLEVPRE

SEQ ID NO: 453270 - protein, 320 aa, unidentified
MTYIGIDVSKDSFVSAYPAKSGYTTKSFPNTTSGVRRFIQSLPEECHCVMEATGNYSMLLLYLLQEKGIPVSMENPQKIKHFARAMLSTTKTDDIDAKLIAMYGEKMNPMPYKIPSDSIILLKQKRTVLRQLKKQLTMMINLQESMSVLPKQDPTSKASIEQTIKFLRKQVSKMEEEITNLSNKEFKRQMDLLTSIKGISNTIASALIVATGGFTFFSSAKQISRFLGLCPTYQQSGTSVNVKGHINRNGDTHLRSQLYIAAVSSIACNAACRAAFLKMKERGKSGKVAIIAVANKLIRQAFAVVTNNRPYIDGYVSSLA

SEQ ID NO: 453271 - protein, 456 aa, unidentified
MARRSKAKGTRRHTKLHIIHTQAAGIDVGSTFHVVAVPPELSVEPVQTFQSFTGDLYRLANWLVEIGVTTVAMESTGISWIPVFDILEAHGLEVLLVNARHVKTVPGRKTDVNDAQWLQQLHTSGLLRGSFHPAQDWSALRVYLRHRECLVEYAAAHIQHMQKALMHMNLQLHHVLSDMTGMTGMKIMRAIVAGQHAPVVLATYRDARCKASEETIREALTGHYRREHVCALRQALELYDSYQARIEACDQEIKSTLEALQHDELSMDTLPAARHKKRQSHEPQFEVRETLFRVLGVDLSQIDGFSAYTALKLVGECGMDMSRWPTEKHFTSWLTLAPGNKISGGKVLNTKTRRSANRAAAIFRLSAMNVGQTNTALGAFYRRLASRSGKAKAVTATARKLAVLFYNTLRYGMAYEDPGAAYYEDRYRQRVLQGLHRRAKQFGYKLIEVGALEGVS

SEQ ID NO: 453272 - protein, 350 aa, unidentified
MRRPIDKLIAGIDLHSNNLVIGVINQDGKRIVHRTVDCDLKQVTEFLQPLKPQLQSMAVESTFNWYWLVDGLRAQGYPIDLANPAKIEQYSGIKHADDKHDAFHLAELQRLKILPKAHVYDAELRPMRDLLRRRTNLVHQRTALFLSFKSLYARTTGQPMPLKTLKSMEPKEAKVLYEHPANQLIAQVQLEHIEALDRSISRIEKVVLACARALPLYEKLVTLPGIGKILGMTITMEVGDIARFKTDGDFASYCRAVDSRRLSNGKQKGENNQKCGNKYLSWAFVEAANFAKRRDENCRRWYDRKKAKTSTVLATKALACKLAKAAWHVMAKQTDYDATRMFPELALKKK

SEQ ID NO: 453273 - protein, 373 aa, unidentified
MDRPCFRPASEHACAGQQQKERYAMPKSNTAVATIGIDPGKNTLHLVGLDARGGIVLREKVARARIVSRLANVPPCLIGIEAGMGTHYVTRELLALGHDVRQVPPVYAKPFRQTHKNDFRDALAVAEAVQRPTTRCVPPKTDEQLDLQALHRVRHRLVGQRTAIINQIRCFLLEHGLTVRQRLHWLRHALPDILAQRTDVLSPRMVRILEDLAQDWRHLDDRIETVSGEIEELSKNTEPCRHLMTIPGIGPIISSAVVAAIGNGAAFTRGRDFAAWLGLVPKQISTGDRTILGRITKRGNRYLRMLFMQAARVVLLRPRNWMKNGYGPWLAAAALRLHHNVLATALANKLARIAWSVLAQHRVYEARLSPAAV

SEQ ID NO: 453274 - protein, 466 aa, unidentified
MKDNRRRRPSGRVSPSVLERLNPDSAGIDCGATDLYVAVPPDRDPQPVHRFQTFTAELHRLADWLTACHIRAVALEATGVYWIPVYDVLEARGFEVLLVNPRHLKHVAARKSDVVDCEWLRDLQIVGLLRGSFRPTDAIRALRGYLRHRQTLIALISEATQRMQKALLQMNLQLPRVVSDITGVTGLRILRAIVAGHRDPAQLAQHRDGRCHATVAEITAALTGHYRDEHVFALQQHLTLFDVYQQQLTACDAAIAQHVHHLAGAVPAPPAPLPPPRGARRTPRQHEPAFDIRTPLYYVTGGVDLSQIDGLGAYSALQLVSEIGTDMRRWPTAQHFTSWLTLAPNNRISGGRVLSARTVPSANRAAAIFRMAAMTLGRTQTALGAFYRRLAARIGKPQAITATARKLAVLVYRVLAGELRYQDPGAHAYHQQQRTRRLRALRQHAAAFGFDLVSRDTGEVLDAVPT

SEQ ID NO: 453275 - protein, 337 aa, unidentified
MLFCGIDLHSNNSVVVILDESDKVIYSRRHPNNLEEICGALMPYQSQLVGVVVESTFNWYWLVDGLQAQGFQVHLANTTAIKQYDGLKHRGDESDARHLAHVFRLGLLPTGHIMPKEQRAVRDLARKRMQLVQQRSTHILSIETQMDQQRGAHLSSNLIKKLSCNDIDAMGLEAMASLAMKANVSLMQSTDQQIDLIEKALASHCRHHPGFPLLKSVAGIGDVLATVILLETGSIERFKDVGNYVSYCRCVGSIHTSNGKKKGEGNTKNGNRFLAWAYVEAANFAIRYSEAAKKFYQRKKAKRNGIVAIKAVAHKLARACFHMLKTGEVFSVERCFT

SEQ ID NO: 453276 - protein, 431 aa, unidentified
MKGGDLVNNNFMSTLFVGIDVSSKTNVLCALDFQGNKLLNLKALNNQPGAESILDSILGCLNSNSLEYVVIALESTSFYSTHIANFLSSSEELLPFKPLVYCLNPKSVANYRKSFVDIDKTDPLDAFVIADFARCGRITSEPWRGAQFLALQRLSRHRLHLVECITREKTYMVSNIYLKFSELAVLDKDEKPFSNTYGVTSAAVLTEFLSLDDITYSSIEDLVAFVSAKGKNRFSDPYETARLLQKAARDSYRLDKILYEPLNTSIASSFNLIKAFDAEIKIIDKAIEKTIKGVNPVEYQSLTSIPGIGPVLASGILAEIGTIASFGSHDSLAKYAGLTWRVNQSGDYSSDDTRMTKTGNKYLRYYLIEAANSVRNHVPEYRDFYNKKYGEVTTHCHKRALALTSRKLVRLIFGLLTKNQIYSSSKVGEIQ

SEQ ID NO: 453277 - protein, 341 aa, unidentified
MPIVTIGIDLAKNVFAVHGVDEVGKVLLIKPRVSRDQLVTLIAQLPPCVIGMEACSGAHYWARVFQQHGHTAKLMAPRLVAPYRMSGKRGKNDAADAAAICEAVTRPSMRFVPLKDEHQQATLCLHRTRQGFVEERTAAYNRMRGLLAEFGVVLPRSPERLRREITPHLDILPGWARRCISDLLEHAGNIEDRLDEYDRAISGIARDDERSKRLMRLRGIGPTTASALLASLGGGHDFRNGRQVAAWLGLTPGQHSSGGKARLGSITKAGDAYLHSLLVLGARAVIANLGEKRDRLSRWVRGLVERRGYWRAAVAIAAKNARMAWAVLKYGEDFKPEPVAA

SEQ ID NO: 453278 - protein, 458 aa, unidentified
MKTPSRAKRKRQNQPAPEFLQKLNLNAAGIDIGATEHYVCVPADRDPKPVRVFATFTADLHALAHWLKACRVDTVVMESTGVYWIPLFQILERAGLAVKLVNARHVKNLPGRKTDMRDCQWLQQLHTYGLLTASFRPSDDICVLRSYLRLRDNHSRAAARHVLHLQKALQQMNLPLHHVISDVTGVTGLAILQAILAGERDPHKLAALKQYQIKSSRDQIAKALVGDWRPEHLFGLRQALEGYEFYQSQIAACDQAIENVLAAFEPKIDPTQKPLAPAKPSQKKASDPLAQMRSPLYQMCGVDLTVVPGLGVLSAQVIVSEIGLDMSKWKSEKHFASWLGLCPEHRITGGAILKRHTRIVINRASIMLRRAAATLHRSPTALGAFFRRVSARRGAAKAVTATAHKLAKIIYRLLKFGQPYVETGQEQYEEKYRARLLKHLQKSADTLRLQLVPKQPST

SEQ ID NO: 453279 - protein, 337 aa, unidentified
MSLYCAIDLHSTNNVPVVIDDDDRILFQKRLPNDLSTVISALKPFRQDLHGVAVESTFNWYWLVDGLVDNDFNTLLVNPSAVKQYEGIKHTNDDTDAFHLAHLMRLGILPTGYIYPKTERAVRDLLRKRLQLVRHRVTHMLSAQNQIWRTTGLNVSSKPFKQADFSLLNLVNDNHIKMAIKSNLTIIQALNQLIDDLEDAVLQQIKLKPEFLSLLTIDGIGKILGMTIMLETGDIRRFASVGNFSSYARCVDSSRTSNGKKKGSNNRKNGNKYLSWAFVEAAHCIIRHNKTAHKFYQRKRSQKNGALATKALAHKLARAAYHVMRNQEPFQLERLFR

SEQ ID NO: 453280 - protein, 338 aa, unidentified
MKLYGGMDLHSTNVVTQLINEEDKVIYRKKQGCDLEQILQGLEPFKDRIEGLAVESTYNWYWLVDGLMAAGYRVHLVNTAAVKQYEGLKYTDDDSDAFWLAHLLRLGLLPTGYIYPKQSRAVRDLLRKRGQLVRQRTAHILSIENLYARNTGSRLSCNAIKRLTQEQIQQQFADPNVALAIESNRSLMNALDEQINVLEQAILKQAKLDPRYRCLLSISGIGEILALTIMLETGNIGRFRQVGNFTSYCRCVGSERLSNGKKKGRGNTKNGNKYLAWAFVEAANFAIRFNEQAKRFYQRKAAKGNRIVAIKAVAHKLARASFYVMRDQVPFDSAKLFV

SEQ ID NO: 453281 - protein, 367 aa, unidentified
MSKVLFVGLDVHAETIAVAVAEQGGEVRSLGVIPNRLESIRKMIHKLGPVQHLRVCYEAGPTGYVLYWQLTQLGVACEVIAPSLVPTKAGDRVKTDRRDAEKLARCHRAGELTAVWVPDAAHEALRDLVRAREAAKKDQLKARHRLGKFLLRHGQRRPDGVRAWTKKHREWIKSHVRFQEAALEATLADYVEEVDHVAARIVKLEKAIDDAVRQAPPALRGVAQTTAASIVAEVGSLSRFPTAPDLMGYSGLVSSEHTTGNRVQRGGITKTGNGHLRRVLVEAAWAYQHRPNVIGHLLRRQKDLAISEEAKGIAWKAQQRLHKRYKAMAGRGKNKNQIVVALGRELLGFIWAIGVKTEQQQKLGKAA

SEQ ID NO: 453282 - protein, 371 aa, unidentified
MKNTIKYVGLDVSKEKIAVAIADEGREPARYYGAIPHTPDAVARMIRKLKGSGITLEVCYEAGPTGYDLYRWLTKMGISCVVIAPSRIPQRPGDAIKTDRRDAEKLAQLHRAGELTAIYVPTPELEALRDLIRAREDAREDLHRARQRLIHFLLRHQIHTPEGMKKRWTKRYREWLSMLKFNYAAQERVFTEYLQQLREVEERIKRLESAMREEAEICPYAPVIQALQGLRGIALLTAMTLVVEIGNFERFRSPAQLMSYLGLVPREYSSGASTQRGCLTKVGNSGVRRALVESAWSYRHRPAVKGDLAVRLEGQSAHVHETSWKAQERLPSKYLKLVRRGKHRNLAMAAVGRELVGFIWSIAVDAEQRMA

SEQ ID NO: 453283 - protein, 362 aa, unidentified
MKTTNNSSTKLFIGMDVSEKSIEICALSSKSDMSKNIKIANTPKSVNKFIDGYTGDKSFLVFAIETGTHSPWLEELISMKGCKVYVCNARKLRMIWQSDQKSDTRDATMLANMLKFNPKLLYPIKHQKKETRIDLSVIKCRDALVRSRTSMMNCIRGQLRSFGVDTSSLKPYNFSSLAAKIIPNELRCTMDGILAQIKLLELEIRNYDKKIEELCKKYPVTEKFRNIKGVGPLVSLVFALIISNPERFKRGRHLSSYLGLAPRRYQSGATDRQLSITKAGNCLLRRLLVQSANYIMGPFGQECDLREFGMKIRARGNNIAKKKAKVAVARKLAILMLKLWLSEEEYIPQYKKFKKEKLKATG

SEQ ID NO: 453284 - protein, 331 aa, unidentified
MQKKEFFIGVDVSKLTLDVAVHGSKNHIRISNNSEGFKQLLAWLKSLKIALDDCWFVLEYTGGYEYRLVQFCNAKQITFTRVPGLQIKKSLGMQRGKNDKIDSKRIAEYGYEKREKLQQSKVCNPAITRLKQLLTQRSSFVNDKKAHEHRMKELLAMMEYKANDPIIKHYKQAVEFALKMIVKTEAEIKKIINKDEAMSRNFALVTSIPGIGKVNGWMTIAYTENFESFADGRTYGAYIGVVPYEHSSGTSIKGKSRVSHMANKPLKADLSMAAKASVQHDPEMKQYYERRSAMGKRHMGIMNEVKFKLVLRMFAVVNKGEVYVKNLKSAA

SEQ ID NO: 453285 - protein, 367 aa, unidentified
MRKSITVAEEQTRNFTEKKYIVGLDLGDRWSWYCVLDEHGEVVFEQKLSTTPKALREVFGAMPRSRVALETGTHSPWVSRLMKELGHEAIVAQASKVRLIGQSRKKDDRLDARTLARLARIDPELLGPIQHRSARAQADLIMIRARAGLVRARTALVNAARGLTKSYGERLRGCSARNMDAEKRKGLSAELQIALEPLLRAIESLSQQILDYNERIEQMAREGYPEVERLKQVKGVGTLIALAYVLTLEDARRFAKSREAGCYVGLQPGRRNSGSSTPQLHISKEGDCYLRTLLVQGAQHILGPFGEDSDLRRWGLKLAERGGKNGKKRAVVAVARKLAVLLHRLWVSGEAYEPLRNQRAVELSVAA

SEQ ID NO: 453286 - protein, 397 aa, unidentified
MIAVGIDISKAKSTVAVIDSDGTVLASPFTMAHTQPEMEAFVTYLKGLGEPTTILMEYTGHYHYPVLKKLQSEGFPVCIVNPYQMKKYGDVEIHKAKTDKKDALRIAAYALEKSYKLVPYSSMEQKYVDLKFLSRQYSQRITYVAKLKVQLIALLDQTMPGITRILPLNSRNPEKCALLLFIRRFKSFDEIHRIGKARFLASYDVLAKKTSERSASSKGLSIYELAVDSITTRGEDPYIWLSQNQCVDLLSATQNAADEIISQMRNIAETIPEYKVLRAMRGVGDRLGPIILAEIGDIRRFHSGKALNSYAGNDAPPYQSGQFESRNRHISKRGSAALRKACYEVMQALKLTKPQDDPVYLFMLKKEQEGKPFNVAKMAGVNKFLRIYYARAMELYK

SEQ ID NO: 453287 - protein, 373 aa, unidentified
MTISTKFIGLDVHRDTLSIAVADDGGDREIRFFGTVANDCEVLRKALASIGKDGVMLKVCYEAGPCGFVIYRFLKSLGIDCVVISPSSMPRRPNDRVKTDRRDVQTLARLLRAGELTAVWVPDEAHEAIRDVVRARRQAKQDLVSAKNTLKSFLLRHDRRYPGKAIWGRMHWRWLSDQRFAFAHQQFVYEEYKRRIHELEERCVRLEQVLEEAVLDWPLAPVVTALQALRGIRFIAAVTLVAEIGDLHRFDRPKQLMAWLGLVPAEHSSGARTRRGELTRTGNAAARAMLIESAWQYRYPAREGRALRERNAGLPDHIRAIAWKAQTRLCAKFRRLAGTGKHAAKIVAAVTRELAGFIWDIARHTSAPASRLA

SEQ ID NO: 453288 - protein, 481 aa, unidentified
MIDNHRRCCGIDVHKNSVTVCVLAPRGGRHSEIKKRKFRTFTRDLRQMRAWLKNCRVTEIAMESTGQYWRPLWNLLEGEFSRLVLVNPQHIKGLNGYKTDPKDAQWIADLLEGGKLKGSWVPQRPIRELRDLTRQRVNLLEDLNRAKNRIEQLCQAGNIKVSSVATDLFGVSGRQMLQALVEGKRDAGWMADYAHGALRNKRRELTLALEGTFTDEQRWLLAKELRQIEFLESQVEILEQEIERRVAPLEDSIRRLVTIPGVERKTAWTIIAEIGVDLSTFADAKHLASWAGLCPGNRESAGKRMSGRTRKANRYVKRAMCQAAWAASHTKNTYLTAFYRRMAIRKGAPKAVMALAHHMLVVVHQILSRGEEYVEFGGDYYDRRNKPKVVARMVARLTRLGYQVDLKPMAQTATAPPEALAGSLPEAASGTTVQPDPPTAGTKRKRGRPCKCIERGIICKHHTSVPANSLVQQPSSQGRFS

SEQ ID NO: 453289 - protein, 413 aa, unidentified
MRNLLEVCCGLDVHKEILVACMLKGGIEEEPEPIIKEFSTLLSGLDEFKSWLIEHNCHDVAMESTGVYWFPIYNVLESIFYEDGPMNIIVANPHHMKNVPGKKTDIKDSQWIATLLRAGLLAPSYIPPKEIRELRDWTRYRDVLIKELVGHKNRIEKHLQQCGFKLSSILSDIFGMSGYELIRKLCEKGKLTALDVKGCLHGTLRAKSDEVQQAVAGRLSAHDRLFLTNLVKVMEHCRKEIEEAEWHITVYAQKYEPALQLLETIPALQRRASTIIVSELGVDFSMFPTAGHLCKWAGLCPGDNESAKKKKTMRITKGNPRIKSVMVQCAWAATRCKNFFLRDWFYRLRARRGTKKALIAVARKLLAMVWHILTTGEIYEETRYEKTKKNQEDRRKQRLKTEAAKLGFKLVPA

SEQ ID NO: 453290 - protein, 457 aa, unidentified
MSKRSKKAKSQSFKVPNLPKHLQHINLNAAGIDIGSERHMVAVPEGRDTVSVREFGTFTADLEALATWLKQCGVTSVAMESTGVYWIPLFELLERHGFEVKLVDARHVKNVSGRKSDVLDCQWIQQLHTYGLLAGAFRPPDEVCVLRSFLRQREMLIQASSMHIQHMQKALQQMNLLLHNVVSDITGVTGMKIIKAILAGERDPRVLARNRDERCQNTTATIAKSLVGNYREEHLFALRQAVDLYETYQTKIADCNQAIIKQVEKQPDVSDDDPPTPEKQVQARDRIRDGVDVRDLLFKKSGVDLFAIPGLAADTLLTLASEVGFDMTPWKTEKHFASWLGLCPGTKISGGKVLARKTKRNPNRATQAFRMAAASLYRSQTALGAFYRRIKSRAGGKQAVIATAHKIARIYYAMLTQGTTYVELGQQAYEQRYKERRIDHLKVQAKSLGFQLVPCAT

SEQ ID NO: 453291 - protein, 356 aa, unidentified
MDKRSKLNFSGQPIYIGLDVHKKNWSVSIFTQFGEYKTFSQPARAETLIQYLEHHFPSAQYHSVYEAGYCGFWIHEQLTEKGIHNIVANPADIPTRDKERRNKRDRVDCRKLARGLRGKQIEGIYTPPRWRLEDRSLIRTRLSMGRKQARCKNQIKSMLLFYGVDIPERREMGHWSRRFIRWIEGIRMQRASGNMALQSHLEELCHLRQLIAKLNRAIVALARTEQYRSWISLLKTVPGISTLTAMIVLTELHEITRFGSIDPLCSYVGLIPDTQGSGEKEHVGGVTQRHHSQLRWLLIEASWIAVRKDPVMMEAFQEYCKRMRKTKAIIKIARKLLNRIRYVLKNQVEYVTGVIE

SEQ ID NO: 453292 - protein, 455 aa, unidentified
MAQGSGLTRGDRNRNRRIAAVREAVARDRAVLAVDLGEDKQVAVVMDHEGRALARKVVKAKAHQLSGLRGGAAGRAAKDGFAGLTVACEPTGHRWKALMGLADGAGHGFVCVQSLAVHKAREGDDYTRDKTDHRDAYLIGKLVIRLDCYLPERADEAWARLRHLGARRFAQVADVTSCMQQAGDLLGCAWPEPLSAAARPLQSVSWLAGMAVITGRCCGNPARLRKMGYEKFLAAVRRELPRWGGKYVRHSVVRGLWEALAGTGGVAAQRPGALERLHLLLEDWRVLRARLADTGARMTALLGELGLTELVEGIDGMSALSGAVILAETGDLNRFASGRAVVKHAGLNPSERTSATINGQARISRRGRPALRSAAWRAAWAALRHNRVLAAKHAHLTGRDANRLAGEQARTACAATLLRWLWAVITTRQPWDARVAAGEIPVPRRAPAVTCAAAA

SEQ ID NO: 453293 - protein, 340 aa, unidentified
MQKLCIGVDVSEKTLDVAYWDDQKQEAVFLGKYANTHTGFHTIKEKIEERRKATSAELVHVTMEPSGGYEQPFAHFVDQQDGWDGSLPNPAHPKRWAEAIGKRAKTDSQDARTLAHYCFVRNPPVWKPLPAEVEQLEHLLDRLDNLKDMLSREKNRLGSAQYHVKSHEAVYDDLRESISSLEDRIEKIQEIINDHLEKHPHLKEQRKILLSVPGVGVKSVLYILITMNRWGAFTHGEGDANGIVALLGLDPKTHESGTSIHKRGRISRQGDRSQRSRLYMCALGGVRGNNPLRAFYERLVGRGKPKKLALVAAARKIVVWCWAVFKSNIPFDAARFDHNQ

SEQ ID NO: 453294 - protein, 416 aa, unidentified
MKQTQNTRGYKRYFAIDTHREYHLVGGQNEDQEWVVNPRRVSIEKFAEWAQKNIRAEDIVVLETTTNVWDTYDIVSPLAGRVLVANAAAVGEIAVARVKTDTKDIERLLKLLFGGIVPEVWVPPMHVRELRAFISYRNRLVKMATMIRNRLNSLLHKHSLMLPEEGILNQAWWDAQASMSALEKMQIRQELVLLEEIKKLQAAVSEELEKQSTGELWGKQALQLMQLPGVGVIVAMTVLSAIGDISRFEDAKHLVGYAGLGAGVHDSGKTHKEKHITKKGRKELRWIMVEAAWRAVRMSPYWKEQYEKHLRRMRKPTQAIVAIARKLLVAIWHVLTKEETDIHASEDDLAYKMLLLSWSLKDNVRMGLTYKQFAKYALMKLGVENDITRFVRREVPRRLAPREEVLTRMVELGIAQ

SEQ ID NO: 453295 - protein, 387 aa, unidentified
MYFIGIDISKFKHDCAIIDEDGDTVTASWSFANNCEGFSLLKQLLDALDGQKKIGFESTGHYGHNLKLFLETNNFSFMEFNPLLVSKFVRSKSLRNTKTDSLDAVSIAQYLMTVEYKPYPPSFYHMDQLKSLTRFRDSLVRQHSRQLVELTNILDKVFPEFKPFFDGRFSATALYILTHYQSPEKIANMNAKSYEALRKKSRGKFSMVKFAQLKTLAKNTVGRSDAFLLKQMEITIDIENQLDAKIDEIESQILECIRALNPPILTIPGIGELTAAIILSEYGNINKFENPAQLLSFAGLEPGYYQSGLAEHQGHMVKHGSSHLRYALMNACLPLITYEPVFAEYYAKKRAEGKPHRVALTHVAKKLLRVIFTLQTKNISYDPTLIR

SEQ ID NO: 453296 - protein, 424 aa, unidentified
MRMKNYTRQIEKRQRIGVDTMVIGIDIGSEFNAVCLMDKEGHVLGRYPKIFNSRKGFDYFRTVVEQVKRNRRFSHVLIGMEPTGHYWRKIAFFALDQGYEVRFVRTTALKHQRELDESSSAKTDMRDAFTIANIVREGKYVDTVIEDGVFRDLRTLSHTRERIVRYNTGSKHALKAVLDDYFPELTGIFWSMKAKGLWALLDAYPFPEDIRRAGLPALQELLARSTRRKAHAYEKAEAVYRAAGESVGLKVIGSADRMRLTIYLGEVKRSEQRLKDIEQQLIDLLHQVPLAEHILSLPGIGAVTCGVFLGELGNPDYFKDPKGIVKYAGYDPKENDSGLHTGRKIISKKGRWLLRKYLYFMAMRVVHRTVFFKKYYENKQKGLLRPLAKKEALCAVVIKLIRVIFALMRDKRMFTEEMSCARAA

SEQ ID NO: 453297 - protein, 321 aa, unidentified
MLKKCAGLDVHQETIVACVLKGELDERPKSEIRTFGTYTKDLEELHEWLLQEEVEQVAMESTGVFWKCVWNIIEDEKYEIRLANAKEIKNMPGRKTDVKDAQWIAELLRCGLVKSSFVPDVEIRELRDLTRYRRKIIQQASSEKNRIHKILQDANIKITTDISDIFGDTGRKLIEKIIEGKEITEEELFEITSGRGKASLREKIPQIKEGLKGTTRDHHRKMIKLIYEHLKYLEKEQEEIDRMIDEACTEYKKEIELLDSIPGINEDSAKAIIAEIGVDMNQFPTVKHLTSWAGMSPGNNESAGVKKKENQQKEIEHFEQH

SEQ ID NO: 453298 - protein, 388 aa, unidentified
MIYVGIDIAKLNHFASAISSDGEELIKPFKFTNDNDGFQLLISKLNPLDKDSLIIGLESTAHYGDNLVRYLVAKNYKVCVLNPIKTSTMRKNNIRKTKTDKVDTYIICKTLMMQESLRFVTFYDLDLMDLKALGRFRQKTIKQRTRLKIQLTSYVDEIFPELQYFFKSGLHQKSVYALLKEAPTPEAIASMHMTHLAHLLKVNSHGRFDKEMAQQLRVLAQKSVGASDSSLSIQVTHTIQQIELLDSQLERVEAEITKIMKFNDSVIMTIPGIGYINGGMILGEIGDIHRFSSPNKLLAYAGLDPSVYQSGNFQAKKTRMSKRGSKVLRYALVNAAHNVVKNNTTFKAYYDAKMAEGRTHYNALGHCAGKLVRIIWKMMTDNLEFNLD

SEQ ID NO: 453299 - protein, 355 aa, unidentified
MNTQITATPKIFIGLDIHKKSWTVSIQTDLFFHKTYSLPSVSEDLYQYVERTFPNYEVHLVYEAGCCGFSVARYFLNLGWHVLVVNPADVKTGDKERYQKTDALDSKNLSNQLKAGVLKGIYIPTEEQEQFMTLARHRTQITKKLRQTKSHIKSMLLFHGIKVPDQFDNSNWSKDFIIWLEQIKFSTICGDLALQGKIRLYKFIKSEYLEIANQMRAYCRKNNKKDYYLLKSIPGIGGYLASVIIAECGDLRRFNTEGQFSSYIGLVPGIYNSGDSEKCLGITPRSRSQLRSYLIEAAWVAIRKDIEMQQYYRKHQGKNVKSIIVKVAHKMARRILSVIKTESPYQINRNLILTE

SEQ ID NO: 453300 - protein, 325 aa, unidentified
MSKLVNYVGIDVSKKTFDTAFDVNGKIKHEAFANNEKGFKLILSKLPAGSHCVMEVTGIYYLKLATYLYDHQIPVSVINPLVIKRFSQMQLNRTKTDKAGAKIIYNYAKMQQPDAWKPEAGHVLELKQNQAALENLISVKTSFLNQLEAFSNSTAKNPMLIKSINSIIKKTEKEIKNIETQMQKIVKEHYSEMFKQLKSIPGIGNKTAIMLIAITNGFENFSSSKKLSCYIGMCPRIFESGTSVKGKAKISKMGAGRIRALLFMCAMASLKSNKACKQLYNRITEKGKNGRLALIAVANKLIKQAFAIATKKLSYDENYLKKTWI

SEQ ID NO: 453301 - protein, 320 aa, unidentified
MTKNKNYIGIDISKLSFDVAIKENEKYSHFKFSNDNEGFIKFRELLNQDYAICVMEASGPYYLKLATFLFNRKISVCVINPLVIRRFSQMRMSRTKTDKKDAVMIAEYGKNQTPNLWKPEAEYVLEIKQMHAYVEQMNKSRTGLIRQREAFKYNAVESLALKESLEKMILLLETEIALIENKMIAIIKDQHNELFQQLKSIPGIGIKTAMLLIVISGGFTKFDNARQLSSYVGISPRIFESGTSVKGKSKICKMGMSRIRAMLYVCSWSAKKCNSACKDLYDRLVEKGKAKKIALIAVANKLLKQAFALASKNEYYLQNN

SEQ ID NO: 453302 - protein, 437 aa, unidentified
MAKKGKKNKPTPENMPMIHPHAAGIDVGAEEHWVCVPTDRDAQPVQKFSAFPCDVHRLADWLTTCRMTTVAMESTGVYWIPLFQILEARGFEVALVNARHVKNVPGRPKTDRFDCRWLQKLHTYGLLAPSFRPPEDICQLRSLLRHRDNLIRMTVKHIQHMHKSLDQMHLHLHHVMSDLTGVTGMRIIRAIVAGERDPRTLATYRDYRMQSSEDTIAKALEGEYRPEQVFTLTQSLALYDFTHQHIAACDQEIERVLSTFASLVDPDEHPLPPPTTAHRQPQRNEPAFDLRTHLYRITGVDLTQVPGLQAPTIHIVLAEVGLNRHKWPTDKHFASWLGRCPDNQIRGGKVLSTGSRRVQNRASRALRMAAQSLRTSPSSLGAFYRRMRSKLGPAKATTATAHKLAKIISHMLQEKTPYRERGAEHDMHKDQERKIRQ

SEQ ID NO: 453303 - protein, 344 aa, unidentified
MEITTIGLDLAKSIFQVHGVDAAGKAVVRKALRRSQVLPFFERTPRCLVGIEACGTSHHWARELIALGHEVRLMPPAYVKPYVKRGKTDAADAEAICEAVTRPTMRFVSVKSRDQQAALSMHRTRNLLVKQRTQVVNMMRGLLAEFGIDIPKGLERALMMAREIVDGAAPDVPPEAVKIIGTLSQQALDVHVRLREIDRDLLVWQRSSDVARRLMTIPGIGPVGATAFAATVGDANQFRSGRQFAAWLGLTPLQMSSGGKERLGRITKMGDKYLRKLLIVGMTSLVRRAKYKPDSVDPWLADLLARKPVRVATVAMANKAARVIWAIMTRGETYRSGHIPVLAA

SEQ ID NO: 453304 - protein, 369 aa, unidentified
MEDGKKSETRFVGIDLGKKTYQMAVVGPDGKVTMSNGRTFYAGRQGLYKRLRPGDKVALEACSMAFTIAKEIEETVGCKVYVLNPYKLAIIFASMKKTDKEDSLKLAHILEDCREERLPVIPIPGDKEVRRRKILASYRRVRKDRSRELNLLHGLFVSQGITTIVKKDLSDAERRKDAIKVLTGIDLEEAGYLLKRLELSEERIGVLEKQMADESAGDKEIECLQSIPGVGPKVSFGFVAHVAVERFENASQLSNYLGLVPRVYMSGQTVKYGGITKRGNSYLRALLVQAAWALIRSKKGGKLKELYEYMTKERSKSKKVAIVAVARQLAEMMYAMLRDKVWYAKRSLKKPEESKNAEIAKLAESAISA

SEQ ID NO: 453305 - protein, 338 aa, unidentified
MQIATIGLDIAKNVFQVHGIDAAENVVVRKQLRRGQVMAFFKTLAPCLVGMEACATSHFWARELTTLGHQVRLMPAKDVKAYRNKNDAADAEAICEAVRRPTMRLVAIKSAEQQGQLMQHRARDLLMQQRTQLINAMRSHLAELGIIAPQGREGVKELLTIIASDADTQLPSDARASLIVLAAQLQALQTTIGAIEKRIVAQHRANKENKRLQTIPGIGVIGASAIAATVTNPKVFRSGRDFAAWIGLVPRQMSTGGKPKLGPISKQGDRYLRRLLVVGAVSVLRRAKLHPEKFPWVTQMLARRPFKVVAVALANKMARVAWALMMSGKTCRAARFAT

SEQ ID NO: 453306 - protein, 410 aa, unidentified
MVKENFIYVGIDLHKETHTAVMIDCYNQKLGEITFPNRPAAFPKLVTKVKKCNTDGKEVVYGLENAYGYGRALAVWLIDKGYLVKDVNTAISHRQAKHRGAMYRKSDSDDAKAIALATLNMLDKLPDACPNDAYWSLGQLVHRRDNIMKQRTRLVNQLHEQLCIAYPSYKQFFNDISRPTALYFWEHYPSRKYLKGKSVEDLRAELVPVSHNKCSTKTCEKILDAVASDKVKNNAYQDARDMVTLSIVSDLQHYDSQLTEVDKMLEQMYKMLGCTLTTIPGVNVITAVKILAEIGDIKRFSNANKLAQFAGIAPLHLSSSGKGKDVATKQGNRRLQATSYFRAIQMVQISSKGTPRNPVVRAYYEKRKAEGKTSQQALICISRRLISVIYGMLKNGTEYRMPVVENAGEK

SEQ ID NO: 453307 - protein, 360 aa, unidentified
MAKAKTLVGLDVHATKIVAAVLDAETGQLQCFTMSGESEKAAAFCAGLPRPVRAAYEAGPTGYGLARELIKRGVGCVVAAPSKIPRASGDRVKTDRRDAEHLVRLLLAGKLHAVRVPGDEEEALRDLVRAREAVRVDLMRCRHRVSKLLLRHGIRFEDGRAWTDRHHQWLQTIILDWPAAQATLLDHRGAIDTLVHRRDQLEREIVGLLPTSPWTVQVGRLRCLRGVETLTAVGMCAEVGDFERFARAEQLMSYIGLVPSENTTGQQRRLGAITKTGSGHARRLLVEAAWHYRSRPSIGKALAERQQDQPPQAIAVACSAQRRLHRTWTRLEDRAKRRTIIAVAAARELAGFCWAITQIE

SEQ ID NO: 453308 - protein, 343 aa, unidentified
MNKHAQRTPAPAGVDVSQRTLDVAVRDQCGNERTAQFDNTATGHHQLIGWLTKGGKAARVVLEATGVYSLDLALALHAAKRIEVMVVNPRAARQFAQACLQRSSTDATMAVALREYAARMKFVPWVPPPESVCHLRAIARRIATLTKGRASEQNRAHAAAASAATPAVVVNDIAVNLRHLQRRLGELHRQAMALIENDPALTEAYHRLISIRGIAATSAIQLLGELLVLPADMTVRQWVAHSGLDVRHLTSGTSVHKAPRISKQGNAHLRRALYMPALVAAQHEPHVRAFYEQLLAAGKKPLQALVAVMRKLLHAIYGMLKTNTDFDGAKFRRLPQTAVAQGV

SEQ ID NO: 453309 - protein, 416 aa, unidentified
MNQTQNTRGYKRYLAFDIHREYLLVGGQDENQEWVLRPRRVSVEHFQAWAEKNLQKGDIVVLETTTNIWETYDVVAPLVSRVLVANAAAVGEIVGARVKTDKEDIKRLLRLLFGGIVPEVWVPPAHVRELRSFISYRNRLVKMSTMIRNRLNSLLHKHNLIVPKGGLLDQAWWDEQSSISSLEKLQVRQELSLLAEITEQKAAVDEELGRQSTGPVWRKQAILLLQLPGVGVIVAMTVLSAIGDVSRFEHAKKLVGYAGLGAGVHASGKTYKEKRITKKGRKELRWAMVEAAWRAVRMSSYWKGEYEKYLRRLRKKNQAIVVIARKMLVAVWHVLSKEETDIRASEEELAYKMLLLSWSLNENVRKGLSYKEFAKYALMKLGVENDITRFERRGVPRRLAPKAEVLARIAELELTF

SEQ ID NO: 453310 - protein, 396 aa, unidentified
MRCRHPLPRPCILSEGGYKAQTRQRRGRSNALEVNKPVGEQDRRAEAKPAGNPNSRRGRACEPELRKAGGRPGRKWVKVMGQYTELFVGIDVAKRTLEVALSSGESWTVNNDAAAVAGLVKELARRAAALVVLEASGGYEREVWLALLEAGVPVARVNPRDTHHFAQAHRQLAKTDRLDARGLVLFAAQIRPQPDALPDAADEQLKELVMRRQQLTAMLTAERNRHQQAHSAANRRGIQTVIGFLERQRKGIEDAIEKHLRSNATLHEISELLQTATGVRRVVAGTVLALLPELGRLSGRQAAALVGVAPYDRKSGDWDGRSHIFGGRTEVRCALYMATLSAVRWDPHLRAFYQRLIQRGKEKKVALTACMRKLVVMLNAMVKTRTPWSPPCPNLA

SEQ ID NO: 453311 - protein, 367 aa, unidentified
MKEVTTYVGVDAHKKDLFVAMLVGDGQTPATWTVPNEPNAVKRLVRKLERDAPGPVRMCYEAGPCGYALQRQVTTPRVSCQVIAPGLIPRKPGDRIKTNRRDARKLAELFRAGLLTEVRPPTPEDEAVRDLCRARDDAREDLQRSRHRLGKLLLRRGLHYSGGRNWSQGHRRWIDSLEWAQPAERVVVDDYLLAIDQLEARLIELDARLGEVADTEPYREHVGWLRCFRGIDTLTAILILAELHDFRRFPSAPALMAYVGLVPGEDSTGEKQRRGRITRTGNALVRRLLVETAWHYQHRPGIGMALTRRRKGQPSRVIALADKAQQRLCRRFRRLAEHHKPAPKIAVAIARELAGFLWAALQPVPAK

SEQ ID NO: 453312 - protein, 440 aa, unidentified
MTTRAFVGVDVSQADAHVCFLLADGSEPAPRWSIPNTQPGAEALSQTLAQLAQQHTITELRIGMEATGLLWWHLAQYLRSASVLLPFTPQVYVLNPHLVTTFRANYGALPKTDRADAFLIAERIRFGRQLPAPFHLDARYAPLQRLTRFRLHLVQNLAREKNYCLSFLFLTFSGFGQVSPFGDPFGITSSAVLEEFTTEELAQQPLEALTAYLQAKGHGRFADPTAVAITLQRAARDSYRLDQVLQEPLRVVLATTFASIRGLQAQLKTLDTTIARELAGMPQTLDTVPGLGPIWTAGLIGELGDIRRFDDEAAIAQYAGLTWDTYQSAEYQAEDTALTKRGNPYLRYYLVEAANSVRQHCPEYGQYYAAKAAQTPRHAHKRALVLTARKLVRLIDALLRSGTRYQTPVERQGRIGDTTTAPHAARPRPPRRYKRAAPVA

SEQ ID NO: 453313 - protein, 453 aa, unidentified
MEQPQDVVGDEEHERAWDRVAAIDVAKASGVVCTRVPDEGRPGRRRARVWTVAATMGEVTALGDHLRCQGIEVVTIESTSDYWRIWHAVLEAAGLKVQLVNARAVKNVPGRAKTDKKDAVWLAKLTERGMLQPSFIPDYDIRRLREFTRLRAELVAGRTRHWSRLEKLLERALIKVTSVASAIDTMSCRDMIEALIAGERNPRALADLARGKMRAKRKALTEALDGRFEDHHAVEARILLRHVDDLTRDIEDLTARAGELIAQIPAAWGIDADGATGPAAGREPDAIALPAVARLDEITGCGPVAAMAIIAEIGLDMTVFGTAGRLVSWAKLCPQTRQSGKKATAASPGKGDPWLKGPLGEIAATAARSGTFLGERYRRLARRRGKRKALVAIARSILVIIFHLLSDPAARFIDLGPGYYDDRATTERKVRNHVRQLEALGLTVTITPAEDAS

SEQ ID NO: 453314 - protein, 342 aa, unidentified
MSIVGGLDIHRRQVTFDVVDTVTGEAWRGQLGPADREHLRGWLAAFAGRDQVHLAMEGCTGWRYVAEEVAAAGFTAHVGDPAEIAAKRGRKRRAKTDRADARLQRDLLIRGDFPDCYLPPSPVLDWRQRLESYHDLREQHTAWVQRIHAVLFHQGAPACADLRTAAGRARLDQLCGQLTPAGQDQVATALAQLDLAEEQMRRARRALTAIASHVTGARILATDLYGVGPVTALAMTAWLGGAGRFSSARKAVRFAGLDITVHDSDRHRPPGKLSRQGPPVLRWCAYEAGMVQARRTAPGHDYYAAVAGRLDGKRAALSQARRLIRYATHILADLGDQAFAPC

SEQ ID NO: 453315 - protein, 353 aa, unidentified
MITIGVDAHKHVHMAVALDERGRVAGHWQGENSVAGWDEATQWARALGDERRWGIEGGGGYGRGLAQHLVGGGEVVYDINPRLTATERRRSRRTDKSDAFDAQAIAQVVQREEDTLPRVAAEDETVALDLLTAEREDAQAEATRLRNRLHHLLLQLDPQYHLHLPALTSVAGVQAAAGYTTTSSSLVQQEGAAVVHRLAGRLHLALEQVAELGRRIEALAQARYVPLTRLCGVSLLTAGSLAGILGPGHRFASEAQLAAYAGVAPLETSSAGRVRHRLNRGGNRRLNAIVYRIALVQARWSPEAKAYLARRMSDGKTKREAFRALKRYLVRAIWRLWHACLSPAGVEPAYHAT

SEQ ID NO: 453316 - protein, 345 aa, unidentified
MNKQICIPQATVFCGIDVSARSLAVALINGDGSLAQREFPNSAGGHRALLAWLAKCGGRVRVSLEATGVYSLDLALALDAAETVGLAVLNPKLVNRFAQTLRRSKTDAADAVVLAEYSQRMPFSRWQRPEASHLRLRTIGRYVESLVVEQAGLKNRLRTAEQTSTTPRVVLVDLRRALASVERRVAKMRREALKLVRAEAALRERFQLLVSVPGIAEISAIRILSELVLLAPTMGVRQWVASSGLDPAHQQSGTSLHKPSRISRAGNRHLRAALYMPALSAARNDPHLRAFYRALRSRHKTGLQALMAVARKLLHAIYGIFKTGRPYEGKLLFPNIQTEVESIAG

SEQ ID NO: 453317 - protein, 312 aa, unidentified
MAKPVEKITLGIDVAKDQLVICQWGCEQLLTLVNQPAAIQAWLETLCGPVRLAIEPTSHYHLAVVEAALACGHQVYLVNPRQLAHYRQAVNLRHKSDPHDAWLLARFLAHEAAQLRPFRPQDRRAQRLWALLTRRATVVQSRQQLQQSFAEVRLSIQALLSQFQQLLQRLDQQIQQLLRELGWWPDYLRCLSIPGIGPANAAALVAAHHRGAFANSDTFVAYLGLDIRLRESGHFKGQRKLTKQGEPELRRLLYCGSNAACHHPRFAAYRQRQLDKGLSKIAARVALARKLARIAFTLMKNQQSFTDQPKIA

SEQ ID NO: 453318 - protein, 366 aa, unidentified
MRVSVGVDLHKGQFTVYWRGQEGASGRFERYRTTELEYQCFEGKLKKLMDKDHEVRVAVESTGNTRYFKRRVEAVGVPVVVINTMKFKVVTESVKKTDRRDAATIAEFLEKDMLPEARLCSTESEELRRVLKTRSVLVRSVVAVKNQVHGFLLSLGIETKKGSLQSQKGRRRVLAVLAEHGLAGQAVEPLLETIDRLETEVKKLERILEQKVRQDRVVELLKTIPGAGIITASTIRAYVDDIGRFLNYKQFSAYAGLVPWVQNSNNTERYGSITKRGPCELRTALVQVVLGMVRNKRTTGSYRIMGRYAAMKREKGSGKAIIATARKLSKIVWYMLRKDAPFDPQRMTDPGLRKIAREMQAALPAA

SEQ ID NO: 453319 - protein, 296 aa, unidentified
MDFAPNREPLRLPNTPVGHRAIVERLSTMEIRVIVIEATGGYERAVVTQLMAAALPVAVVNPRQVRDFARAQGRLAKTDQLDAAVLADFGLAIQPPQRPLPDAEALQTREKLARRRQLVQMVTAESNHLEHTTNPAVRQSIQCVLKLLHKQLQHIEDDLDQTIRQSAALQEKAEVVQSAPGIGPQTTRTLLIQLPELGQCSRQQIAALVGAAPMNRDSGSLRGRRTIWGGRPEVRAALYMATLAATRFNPRIRQHYQRLLAAGKCKKLALTACMRKLLTILNAMVRDKTTWQTATL

SEQ ID NO: 453320 - protein, 359 aa, unidentified
MKIVGCDFHPRWQQIAIFDSETGEISEHKLVNGDGAAEQFYRALAPPALVGVEACGNSQWFVDLLQGLGHQVWVGDAAQIRASYVRKQKTDRRDAGHILKLLMENRFPKLWVPTAEQRDLRQLLIHRHKLVEIRTRVKNGLQHLALNRGMQKQRALWSVRGRACLEKLPLEGWGAQRRTDLLKLLSQLDAQIGELDEAVSCAADAHPQARLLMTQPGVGPITSLAFVLTIGEVSRFRHSGQVASYVGLIPREHSSGGKQRLGAITKQGNRFLRQLLVEAAQTANRLDEGFRKQYQARCHHKPKGVAKVAAARKLAVRLYWMLKQNVGYPEIAHIESSSRVPLTGKCQVETLNERSRIQH

SEQ ID NO: 453321 - protein, 349 aa, unidentified
MLHVGLDLSRRRLDVCVLSDDGELVEELAAPPDAEGLRYLVGKLARDRESVRAVIESMTGARFIHDTLEQLGWDVLIADAQRVKGLAPVACKTDRVDARVLAVLSHRNLVPAIWLPDPRVRREREQARFRLHLVKHKSMLKHRIHATLMTFGHPCPVTDLFGLEGRKLLDRLQIPDPWRETVDASLYLIDYLESEIAAIERELRSSGAEHPYVPLLLTVPGIGWVLAFTIAAEIGDITRFPSAKKLVGYTGLCPRVRQSGDSDRRGPLSKQGPRYLRWAMLEATMHALRHPTYRERYQRNKQRLGKQRGARVAQVDLARKLTEAIWHMLTTNHPFDPAAAGGATLRLTA

SEQ ID NO: 453322 - protein, 409 aa, unidentified
MEVVYARCCGLDVHKAKIVACLITPGSDGRVQKEIRTFGTMTDELLALGDWLAEAGCTHIAMESTGVYWKPIWNVLEGSFELLLANAQHIKAVPGRKTDVRDCEWIADLLRHGLLRASFVPDREQREVRELTRYRLALVRERSREVQRLQKTLEGANIKLGSVASDILGKSGREILAGLVGGQTDAAALADLAKGKLREKLPALERALVGRFGPHQRFLVARQLSHLDDLDGLIAELSAQIAERLRPFEEAIARLDGIPGVGRLTAEVIVAEIGTDMTRFPSDRHLASWAAVCPGNHESAGKQTTGKTRKGNRALRTALVEAAQAAGRSRSTYLGAQYHRLAARRGKKKATVAVAHSILVISYHLLKDGSSFTDLGADFFDRRNQDALERRLVSRLEALGNKVTVEKVA

SEQ ID NO: 453323 - protein, 412 aa, unidentified
MELLHRRCCGLDVHKETVVACLRLVSDGKVTTEVRTFQTTTADLLRLSEWLAANECTHVAMEATGVYWKPVWRILDDGEFALVLANAAHVKNVPGRKTDVNDAMWLAELLAHGLIRASFVPDAQTQEMRNLLRTRKQLVREQSSHVLRVQKTLEDANIKLDSVLTDLMGKSGRAIIEALIAGETNPVKLAGLADRRVKASFEEFREALRGRVTRHHRFLLRLHLNQIDALDAAMATLDAQVEANLGPFRTAVELIGSIPGIKNLGAHVIVSEIGIDMSRFPSAAHLISWACICPRNDESAGKRRSNRVRKGGTWLKTTLVQCAWAAVKKKDSYLQAQFYRIKARRGPKKAIMAVVASILTAIYHMLKDGTMYKDLGRNHFDRRSSDQQKNRLVKRLVDLGYVVEIKPLAATA

SEQ ID NO: 453324 - protein, 343 aa, unidentified
MQTVTTIGFDIAKSVFQVHGVDAGGEVVIRRQLKRRHVLAFFQKLPPCLVGIEACASSHYWSRELQALGHTVRLMPPAYVKPYVKRQKNDMADAEAICEAVTRANMRFVPTKTPEQQSCLMLHRTRHLFIRQQTAVINSIRAHLAEFGIVAPVGRKGVTELLHVVADPGDKRVPEVARACLAALGTQLLHLKQQILEFDRLIMAWHRSNQTSTRLHYIPGVGPMLATALVASVADPRAFRSGRNFSAWIGLVPKQHSSGGKDRLGSISKQGDRYLRSLFVAGALAVIRYAKIHGTKHRPWLAALLARRPTKVAAIALANKIARMAWAMMAKGERYKQPVALAA

SEQ ID NO: 453325 - protein, 321 aa, unidentified
MQESFYVGLDLGSSHCFQSIINSDGALCSARSFPTSEHHLRAAFAHLQGDVRVHLEAGELSNWVASIIQPLVAEVIVSHPRSLAWIGKDSNKDDKVDAKKLAELLRLGRVHQVFYQSDNSRQTFKYLVTHYEQLSREQARFKSKIKARLRTLGIIRKDARLFSMSGQTALLDEIKSVSIKQMLTQSFAVLNQMLASFEDAKQAMIEFSHQFREVQLLQTAPGVGIITACRFVAYLQTPHRFSNKRKLWRFCRLGVTRRESNGKRLAHPKLDSAGVGSLKDVSRKVFEAARRTKSANSFKQFYEQSLANTKNAVHARLSTRA

SEQ ID NO: 453326 - protein, 342 aa, unidentified
MPCYVGLDASKRTTNICVIDETRTILKEGVVESDPKAIVGFLRGEGRRYARVGMESWSLAPWLYAGLARAGLPIICIETRHSSAVLKAARSNKTDRNDARGIAEVMRARIYKTVHIKTVHAQQVRSLLTVRKLLRNQLVAVENAIGGTLLVFGYKQASGSRATFERRLRKLLSADAFLAGCVESLFSVWKLLVSEIESLEQRVKALANDDPVCRRLMTAPGVGPIIALTYRSALDEPLRFRRSSDVAAHLGLTPEAKQSGKRDRKGRISKRGDAAARTALVLAARTLLRRHTKASWLKQWAEQICARRGYMKALIATARRLAVILHKMWVTDSDFRWTREPA

SEQ ID NO: 453327 - protein, 369 aa, unidentified
MQKTLYVGLDVHKASLSVTVAEEGRGGSITFIGTIPNTLVAVTKLCKKLGKEGYRLEFCYEAGCCGYVIHRHLVGLGHGCTVVATSMIPRKPGERIKTDRRDSQKLAVLHRSGDLTRVWVPDEQHEAMRDLTRARVDASMQQMRARQQLLAFLLRHGRTYETGKHWTRRHRSWLAGQTFDQPAHQIVFQDYLEAVWTAQDRRDQLVGRITAMSAHWSMGPLVEALRSLRGMDFISAVTFVAAIGDLSRFETARQLMAYLGLVPSEQSSGDRVRRGGITKTGNGEARRMLVEAAWSYRYPPRVAKEKAEIIVRLPKPVRDIAWKAQLRLCRRFRTLSGNGKKATVVVAAIARELSGFIWAIGQEVKPAAP

SEQ ID NO: 453328 - protein, 368 aa, unidentified
MKSLAQYVGLDVHKDSISIAVAREGRDPSEPLARIPNDPSRLLKKLDRLGPRTDLHVCYEAGPTGYGLVRLLEKAGISCVVVAPSMIPRKSGDRVKTDKRDAAKLAHFLRSGDLTCVRVPDQSTEALRDLVRARDDAKTVERAARHRLSKFLLRHDRRYAGRTAWTGMHLDWIRKQAFEHEAQNRVLREYLHSVEDAGDQVRRLTQDLEELVADHELGPLVKTLQALKGFQLVTSAGVAIEIGDLHRFHNPRQLMAYLGLCPSEYSTGDGKRRGGITKTGNRHVRRLLVEAAWSYRYSPKKSHDLKKRWEGLPPEITSIAWKAQNRLHGKYRRLVGRGKSKQVVITALARELAGFVWAIGKQQQAVAV

SEQ ID NO: 453329 - protein, 423 aa, unidentified
MSQNQPEIEYAAFLAIDWADEKHVWSLQDANSSTCERGEVDHMPEAVEAWVVQISQRFAGRPIAVAVEQSRGALVFLLSKYEQLHIFPVPPAMTANLRKAFYSSGAKTDPADADLLLDLLQRHREKLRRLSPDTEATRLIQNLVEERRKLVDEKTAQSNRLEAHLKIYFPQIPRWFDDVGSPLVCALLERWATLEALQKARPETLRSFFRKHHSRKEELIESRIKAIGEAMPALKDRAVVEAKAAVVKVSVQMIQVLQEGIEGLNRQIQEAAEAHPDFFIFDSLPGAGAVMAPRLLAAFGSQRERYQNAAEVQTFAGIAPVTESSGKSTWVHFRFACSKFLRQSFHEWAALSILRSQWARAYYELQCRRGKKHHAAVRALAFKWIRIIYRCWKERVAYDENVYLAALAKHNSPLVAATKAVAL

SEQ ID NO: 453330 - protein, 345 aa, unidentified
MLYVGVDAHKATSQVTVMDSGGNILRRKRIVSSPIAVRQALAGYDEPLKAVLEASYCWAPMYDWLDEVADEVVLAHPLKVRAIAEARIKTDKIDSETLAHLLRSDLIPRAHASSQDVRARRRVLRQRMFLIRLQTMVKNRIRALLIQHISEQPKVSDLFGKCGRDWLRRVQLPDPDGRLLKEDLGLLEFLQQEISKTDRLIAELAQGDEAVQFLASVPGIGVFLSVLIRWEVDIIERFRQAKKFASYTGLVPSTYASGNRIVHGRLTKQGNKWLRWAFVEAVSPAVRSSAYLHSYYQRIKLRRGVKDARIATARKIAELAWTVWTERRGYQERLPKSLRTATEER

SEQ ID NO: 453331 - protein, 355 aa, unidentified
MAGLVPNLVRQPLKKLRSDPEALLGLLLRWRDQATKTGGRIKRIVLAFEAGRDGFWLARWLRARGIEVYVIHPASIPVSREHRRAKTDRLDAGLLMRAVLGWLRGEAKHCSMAAIPSIAEEDARRPTRERETLVREQTRAVNRIKSTLIRFGIRTFKVKLRQASKHLEGLRGPEGEPLPANTMAELRRDLARLQLIRGQIREIERARLERLKRAPGQGTHPMMRMLARIMGIGIETADVLVHEVLSRKLRDQRAVARYGALTGSPDESGSKRRERGLARAGNARVRRGMIQLAWRWLMFQKNSTLAKWYRARTTGATQGLRKAMIVALARKLLIALWRYVTIGEVPAGAVLRPVT

SEQ ID NO: 453332 - protein, 333 aa, unidentified
MDHCAIDLGGRKSQICIRASDGTVLFEGPQDTSSLPAYLQELPRKCRVIVETAAEAFRIADAAALAGHEVRVVPATLVRTLGVGARRTKTDRRDARVLSEVSCRIDLPSVHIPSAESREWKTICGMHDVLLSSRTKLINNLRGWLRGQGVRLRTGQASSCARRIRAAVQLPEYVRMQVETLETLDGKIQASEQQIEALAENSELCARLMTVPGIGPSTAVRFVAAIDDVRRFKSAHRLEAYLGLAPGESSSSERQQRLSITKAGPSTVRWVLVQAAWVLQVRCRRAEARRLQEWAAEVAHRRGRQAATVALARKLAGILYALWRDGTIYEQRG

SEQ ID NO: 453333 - protein, 403 aa, unidentified
MNMNAVGIDVSKGKSMVAILRSYGEIISKPFEVKHTVSGIRSLIEQIQSIEGESRIVMEHTGRYYEPLVRELSKADLFVSAINPKLIKDFGDNSLRKVKSDKADAVKIARYTLDSWTELRQYSLMDEIRNQLKTMNRQFDFYMKHKTAMKNNLISILDQTYPGANTYFDSPAREDGSQKWVDFSATYWHVDCVRKLSLNAFIDHYQKWCKRRKYNFSRSKAVEIYEASKELVSILPKDDLTKLIIKQAVEQLNTASQTVEQLRTMMNEAASKLPEYPVVMAMKGVGKSLGPQLMAEIGDVSRFTHKGAITAFAGVDPGVNESGSYEQKSVPASKRGSSTLRKTLFQVMDVLIKTKPQDDPVYLFMDKKRAQGKPYYVYMTAGANKFLRIYYGRVKEYLSSLPE

SEQ ID NO: 453334 - protein, 412 aa, unidentified
MDIVHERAAGLDISKRDAKLCLRVPGPRAGTYTSTVTTWGATTAQIFELREFLEREHVTTVVMEATSDYWKPFFYVFEETLPVMLVNAKSARNIPGRKTDVSDAAWLAQLGAHGLLRASFVPPEPIRDLRDLTRARATATRDRVREIQRLEKFLEGSGIKLSSVVSDLTGVSSRAMLDALIQGERDPEVLAALAKGRLRSKIPALVDALTGRFKPHHAFMTRLHLDQIDAQTRIIDSLTARIEEAMEPFRDAREALATIPGVSLNVADVIIAETGADMSVFETPGRLASWAGVCPGANESAGRIKSAHILPGNKYLKAALGIAAMSAARTNDTYLAAKYQRTAARRGRPKALVALEHNILNAVWHMLANGECYTDPGADHYTRINPIKAKNNAINKLISLGYDVTITPATAA

SEQ ID NO: 453335 - protein, 347 aa, unidentified
MRFYTQQHQFYCGIDLHARTMYVCILNHDGEILVHRDMKASPETFLKVMAPYREDMVVAVECLFTWYWLADLCAQEGLPFVLGHALYRKAIHGGKAKNDRIDARKVAVLLRGGMIPQAYLYPAAMRATRDLLRRRLHLTRKRAELLTHIQQTNWPYHRPEMGKKIAYKANRAGVAERFPDPAVHKSVEVDLALIDFYDQLLRDVELTIVQTAKQHDAQTVYVLQSVPGIGKILRLVLLYEIHDITRFPRVQDFVSYCRLVKCAKESAGKRYGTAGTKIGNAYLTWAFSEAAVLFLRNNPAGQKYLARLEKKHGKGQALTVLAHKLARAVYSMLKREVVFDLATFLQS

SEQ ID NO: 453336 - protein, 343 aa, unidentified
MQDTIYDHYIAIDWSINNMAIARMTKKSNKITAIDVPSDIEDLQAYLKNLRGTKVVAIEETTTSQWLYAELKEYVDRIVICDPNRNKLLNEGPKTDKIDATKLVSLLKAGLLKEVYHSTDKFLYLRRMVSGYEDLVTAGVRLQNQRYALLRACGKSGNEKIGSTLDSQGEQFVLNCLDRQIHAYEEEKQCYEKEFDSFARRNPEIRHQKSLPGIGTINAVKIVARVVTPHRFPDKGHYLSYAGLIKLEKTSGGRSYGKKKSRYSRQLKSVYKSGVLAAIGGNNPINDYYEYLIREAGYSVHNARQKACRRLAILSLGVFKSGKKYQPFRRNHVTISKESASGL

SEQ ID NO: 453337 - protein, 417 aa, unidentified
MKGTTPKEKYRRCCGMDVHKETVVVCVLAPDGEEGKPLKKVYGTFRNDLGRMRGWLKQLKVTEIAMESTGVYWRPLWNVLEGHGFHLILANPKQVKALHGRKSDKRDSQRIAEFLQDRRIDPSFVPPPELRRLRDLLRYRVSLLEQQNETHNKIRDLFETANIKLSSVASDLLGVTGQKIVEALIAGETSPDRLSWKVKGSLRKKEKEVRQSLAGCFDEFHRQMLELLWKQYKFLSGQIEQVETKTRREMEPHGELIELLDGVPGIDEMVAWTLIAEMGTDMGVFPTTGHVASWAGMCPGTNESAGKQMSTKTRKGNRYLRRALLQAAWAATRKQDSYLRAFFYRLMYRKGWGKAIVALGHKLLEIAYGILKTRTPYYELGADYYDQLNPEKTIQRLVRRLGKLGVEIVITPKEANA

SEQ ID NO: 453338 - protein, 425 aa, unidentified
MSRVVIGMDPHKRTATIEIMASDETVAGRGRYTTDAAGYRSMLAEARRWPERMWAIEGCQGIGRHIANRLLADGEQVVDVPPKLSARTRVFATGQGRKTDVTDAHSVALAATRMQGLRPVVDDAQLAVLRILADRRRSLGEDHTRMVCQLHQLLLELIPGGAKKALSAAQAKALLARVRPRDAAGKARRRVAAELISDLERIYQRKKDANKELNALLKATATTLTDLNGIGPSGAARLLVEVADVTRFPGKAHFVSWNGTAPIDASSGDQVRHRLSRAGNRQINRVLHIMAVVQLRNPTEGRAYYDRKVAAGKTPREAMRALKRRLSDIVYRQMITDAQAVVTGPGGHVGAATGSSAAGSNPSTGASEKSLPGPAIHEPMPASRPILQVAPGASGPRRTAAVVKRRLLDDGEDRRTLARREQPPS

SEQ ID NO: 453339 - protein, 377 aa, unidentified
MKRIKFVGLDVHAETIAVAVAEQEGEVRSLGVIPNREESIRKLVKKLGPVEELRFCYEAGPTGYVVYWQVSALGAKCEVIAPTLVPVKSGERVKTDRRDALKLARNYRAGELTAVWVPDAAHEALRDLVRAREAAKKDQLRAKHRLSKFLLRHGRRPASGVKPWTLNYMAWVKKEVHFEQAAQEATLLDYLHEVEHAETRITRLDQAIDEAVKSTTPKMRAVIEGLQALRGLAQVAAVTIVAELGEISRFSEPRQLMGYGGIVASEHSSGESTRRGGITKTGNAHLRRVVVEAAWAYRHRPNVGAALRKRQELVSEEVREIAWKAQHRLHARYRKLTARGKEKGKVVTAIGRELLGFIWAIGVKVEAAQKETERQAA

SEQ ID NO: 453340 - protein, 345 aa, unidentified
MEVTTVGIDLAKNVFQVHGVDGRGKVVLRRQLRREQMVEFFARLPQCLIGMEACGSAHHWARVLQGQGHTVRVIASQFVKPYVKSNKNDAADAEAICEAVARPSMRFVPVKSMEQQSILAVHRARQGFVKARTAQANQIRGLLAEFGLVVPQGLWNVCQRVPALLERAADALPLALRHLIERLLAHLRELDRQVAELEAQIQAWHRGSEVSRRLEKIPGIGPLTASALVASIADARSFDNGRQLSAWLGLVPRQSSSGGKPLLLGMSKRGDVYLRTLLIHGARSAILAAQRKATTADTWLGKLLHRRHPNVAAVALANKNARTVWALLAHDREFRPDYRPRLAAV

SEQ ID NO: 453341 - protein, 482 aa, unidentified
MSHNKKQGKTRLPRTQAQLGRRKKQKGMCLADRPCLEPNAAGIDIGAREIFVAVPPDRDECPVRVFDTFTEDLQAMARWLKACGITTVAMESTGVYWIPLYEILEAHGIRPCLTNARHMKNVPGRRTDWHECQWLQYLHSVGLLRAAFRPEAEVCAVRAVIRHRGELVQMAVQHVQHMQKALTQMNLQIQHVLSDLTGTTGLAIVDAILAGERDPAVLAQRRDPRIQATAETIQKSLVGNWQPEHLFVLRQSRLLYKTYQQQIADCDQEIEKLVGTFAPRVDPAQKPLPADRKRNRNASKKRNKRGLPANGFDLRTEAYKLFGVDVTQVPGVETSVLPLFSEVGRDLASRWPTAPHFVSWLNLCPDNDISGGRVLWRGTRKGQNRAGQIFRMAAYSLHRSPTPLGNYLRRMKAKLGPKAATTATAHKIAVIFYTIVTKQVEYDESIWAARDAQRQKRLEHKIRRQARQLGYQLVPMQEKPAA

SEQ ID NO: 453342 - protein, 345 aa, unidentified
MATWYIGADVDSKMTEVAAENGRQVKRFRVPTTIPALREVLASLPGRQYLTFEEGPMAQWLYRNLKACVTELIVCDPRRNRLITHDGDKSDAIDAGKLAELLRGRHLRSVYHSDDDGRVQLKEWVSLYHDRVHDAVRQVNKIRARCRMHGLRPGRGALRNEGIWERWLATLGAHPVVGQLRLLWMGLSVNRRQSRMARTVLTQLGGKEPVVQAWQALPGIGLVRAVTVLASLDTPWRFAQPKKLWKYCGVGLQRTASGSDRHGRPRPGRLRLAYQVNRRLKDAVVGGALSAIHQGRNVFAEYYQDRLGKGMHAGNARHAVARKLLTVMWGLWKNGSRFDEAWIRP

SEQ ID NO: 453343 - protein, 417 aa, unidentified
METRFGGRELQKRENLLYVGIDLHKESHTAVMVNCWNEKLEVVVIENKPSEFKKLAEKVNRKSRHLGLEPIYGLENAYGYGRSLAVWLIERGYVVKDINPALAYDQRKSAPMLRKNDEHDAYCVATVLINQLHTLPDAKPKDNEWTLSQLVNRRDLLVKDGIRFKNGLHEQISMAYPSYSKFFSEIDGKCAMYFWKAYPSPVHLQGKTAEELTIEFKEISRIAKKDKAELILDCVQNDGNTFREYQESRDFITTSLVRDLEHQKEELAGLDQEIEKILLSFDYKLTSMPGIGTSIASKLIAEIGDIRRFPSADKLARFAGVAPVKFSSAGKGKEQSSRQGNRQLHGLFYFLAVTMVSKPKNGIPNHPVFYEYYMRKIGEGKTKSQALVCIMRRLVNIVYGMMKNKTEYLEPIPKEEQ

SEQ ID NO: 453344 - protein, 348 aa, unidentified
MNYCGIDLGGVSSYAFVTDEKGNKLWSGPIATEKVAFERLVKKFAGGGLSIAVEAGNQTAWVHEELVKLGAEVTVVNPTKVKLIAESRRKTDKIDAKILCELLRLNALPHPVHMPGPAARELRGLLVARRQLVSARSKLANVARGMLRQTGVRLPAGGLSSLVGWKRLLAGGFEQEHLLLIVSAYFDSFVALTKSIRELDQQLAQREKNEPRVQRLKTMPKVGRIASLTFLAAVDDVKRFSSSRKLVGYSGLAPTVRQSGERTEYGAISREGRRELRAVWVQIAHLVARDKTKATQPLRTWFNRVARKRGKKTALVALARRLLVIAYQLLRTEQDFDVGRLKKKRRAA

SEQ ID NO: 453345 - protein, 355 aa, unidentified
MNKINSNFEGQTIFVGMDVHKSSWNLGIHLNDMFVRNVHQKPNPSIMANYLKKHYPDAHYKAAYEAGKFGFWIQRQLTSLGIECLVVNPADIPKSQKDSLQKTDPRDARNLGLRLQSGVLHGIHIPDEQQEADRVFFRHRKKILKDLNRCKNRIKGMLAFSGIDIPEQYDNASWSHNFINWLKALDCKQQSRRRALDYMISQMEYLRKELLQISIEIRKMMREQRYKKNYYLLRTIPGIGPLTAASILVEIGDIKRFETFCHLNSFVGLLPMEHSSGQSENKLSLTVRKHRQLRSDLVESAWTARRTDPAMTLYFQEQIKRKDSKIVIIKIARKLLNRIRYVLLNQRPYEMGIVK

SEQ ID NO: 453346 - protein, 332 aa, unidentified
MDNCIGIDISKASINVHISKNSLDMQVDNSLKGFKSLRSKLKKIYKKEIDNNIFIFEPTGSYSELLKKYCYEQKIKCFIINPKQFSNYAKALGIEIKNDLEDARVLSKALPLAKEGEVRVPVYDDDVERIKELMSYYKFTTKQTTQQKNHLEALEVKDGDAFTIKELKKSIKDFQAKEKRIIEQIQIIIDSNEVYKNDYENIKSIMGIGQIGAIALLHLFLKYPEANQRQITSLAGLNPVYKQSGTSIQSSYKISKTGSRLYRGSLFMGVMSAVRYDKNFAAFYERLKANGKHTTQAQIAVMRKLIITAHSLYKNNRKYDVDYCSNKLKSMA

SEQ ID NO: 453347 - protein, 319 aa, unidentified
MAKIVLGIDVSKLTLDVALIFDNRTLCKQFKNSLEGFKSLAAWLASLQITRVHACLEATGTYSEAVALFLHESGHLVSVVNPLRIKGYAGANMQRNKTDRLDARLIASFCQTQKPDQWQPPSEAVKHLQSLVRRVEVLEEMRQAEENRLANTVLEIKPSIERMVALIKEEILQFEQQIKQHIDRNSHLKEQSELLQTIPGIGRRTANLLLSEVEFDRYASARAIAAQAGVTPRKKQSGTSLKQTSLSKLGNARIRRALYFPAIVARQHNEIIKEFAKRLQKRGKTPMQIVCAAMRKLLHIAFGVLKHKRAFDASLAFSA

SEQ ID NO: 453348 - protein, 318 aa, unidentified
MNVIGLDVSKDTIDATLITTKGSKDYIKISNNTEGFENLINWIETKRIRKIAISMEATGIYYEQAAEYLSALYTVYVINPLKIKEYAKSQFSHTKTDKADSKLIAEFASRHLDKLTSFRPSENPILYKLINLLQQLKEQQKETQNRLHTAKDIYIKSTHEAIIELLEEKIDQTSKRIDGMIKQKESLNIEYQNLQTIPAIGKETAVILLRHLTDKNFETANKFVAFAGLSPKIEQSGTSVNKKGRLSRYGHRQLKRALFMPALVAYRMNAFPQLVSNLEAAKKPKMIIIVALMRKLAKIAFYIHKTKKPFDKARHQTV

SEQ ID NO: 453349 - protein, 336 aa, unidentified
MEILGLHVGLDYSDAFVRVCVLDQQGQQVANRDCANDWRAIQAFAERHGAVREAAIESCTGAANLAEELVSKAGWSVALAHPGYVARIKQSPDKSDFHDARLLADLVRVGYLPRVWMAPENVRELRRLVRYRHDLAKQRRNVKLQIRALLRDQRCTAPLLGKPWTKGWMTWLLHEAKVSEQSRYLIGKHVRRLGQLAEDIKEVEDRLAELTANDAVVKELMQQPGIGPVTAWTLRAEIGRFDRFRTGKQLARFVGLSPRNASSGQRQADAGLIQAANPELRALLIEAAHRLGRLHPQWRALRDRLSRKGKPGSVIAAAIANRWVRSLFHAMRRIAA

SEQ ID NO: 453350 - protein, 375 aa, unidentified
MNNNNTLYVGLDVHKESITVAYAINSEPVELMGKIGTSPTDIQNLCKRLRSKSSQVSIVYEAGPCGYGLYRRLVKSGFDCMVCAPSLIPKKPGERVKTDRGDAIRLVRSLRAGDLSAVYVPGVEDEAFRDLSRAWASARDDLRHTRQRLKSFLLVHGVHYVGRADWGPAHRRWLSKYSFESPWRQLAFDEHRRTIEDRQAQCERLESALKEAVTEWRLYPVVEALQAMRGIQFITAVGLISELGDLTRFEHPRQLMSWFGITPSEYSSGGSRHQGSITKAGNSYARKLLVEAAWSYRHPARISPAIQKRQENLPRPVIDRAWDAQLRLCKRYRKLQAKEKNVNITIVAVARELAGFIWDMGRIAMSVAQQPQCHK

SEQ ID NO: 453351 - protein, 402 aa, unidentified
MIYKTTLGSQIRDRMASLRQFDCFEFMTFQTNKITHCREAHPASKTYTAAIDLHSNNLMIAIVDEAGARIKHRKLNCDLQLVLQMLNPFKNHLSSIAVESTFNWYWLVDGLMEHGYPVVLANPAAIEQYNGIKHADDKNDAFFLAELLRLGILPTGNIYDAQLRPVRDLLRRRMNLVRQRTALLLSLKSLHHRTTGSALSHNKIKSNENAAVAELFDHPANQLIASLQKQHIDALTESITVIEKETIKSVRNIGYYQRLKTLPGIGVILGLTITLEVGVVSRFKTPGDFASYCRTVDSQQISNGKKKGSNNQKCGNKYLGWAFVEAANFAKRYDETCRRWADRKAAKSGKIVATKALACKLAKAAWHIMKTDTDYDETRMFPQLAGTKPSGEQSSARIGVGP

SEQ ID NO: 453352 - protein, 408 aa, unidentified
MLEAIVKRSAGLDVHKAMVVATILFEKEDGELEDVTREFKTFPKDLADLANWLDDQKVESTVMETTGVYWKSVHQALEAKELKVHVVNARHIKQIPGRKTDIADSKWLASLARFGLLKGSFIPPQDLRNLRLLTRYRIKLKCNIASEVNRLHKILDDGGTRLGVVISDLQGVSGQAIISGLIKGEHIDKLVSYLKGTTKKKREEVKACLSGNGLSRCHKSLLKKISDHINYLQKECQNLEEEIFTAMQPYKDQWQVLQTIPGIDALTAAVIIAEIGVDMQRFGTSEQFCSWAGMCPGNNESAGKRKSGKTRKGPPVLRSTLCEVANSAVKTRSQFKGYYQGLVIRRGHKRAVFAAGHKVLRVVFYLLTTNKGYTDPKINYEELAVKRNAPRWVKALTKYGYMPEVKAS

SEQ ID NO: 453353 - protein, 330 aa, unidentified
MYKCKETLGVDISKDFFDVYSTIHGHYQFANNFQGFRLFRKKLKKSSLVVMEATGYYHFQLAQYLYKRSILVAVVNPLSVKRFLQMKLSKIKTDKSDAKAICDYALVNKVTLYTAKNKTQAECLQLYSLMDSYIKKRTVTKNKLHAEKILGIPSMYVFRSLQRDLEHLSKEITEIENRLLIILQEAYPQQFCLLTSIPGIGIKTALFLIIITNGFSRFETSSQLSSYVGITPTIRESGKSIRGRSRISKVGNKKLRNLLFLCAFTASKNNKSCSDLYNRIIAKGKSKKLALIAVSNKLVKQAFAVVKSGFPYHENYQPSLHVKQFVNSEN

SEQ ID NO: 453354 - protein, 390 aa, unidentified
MQALHPRPDEHAAVRTDLKAIFVSLELSRSTWVITSLSPGGGEKMSKHAVPSGDIPALLARLSQLKEKARARTGQVFPIIVIQEAGLDGFWIHRVLQQEGIESHVVDPASIATSRRRRRAKTDKIDGEALVRALLAYKRGEPRVCAMVQAPTPHEEDRRRISRERETLTAERVQHVNRIKGLLFAQGISDYEPLHRNRRERLAELITGDGRPLPECLKAQISRELDRLELLIEQIKAVEAERDAVLAQAQASPGVPAPAAQLLALRGIGPEAAATLWSEGLFRTFNNRKQVAAYAGLAPTPWQSGSVHRDQGVSKAGNPRLRTIMIQIAWLWLRHQPQSALALWYRARIKRRGGRLGKTMIVALARRLLVALWKYATAGVLIEGAILKPA

SEQ ID NO: 453355 - protein, 421 aa, unidentified
MKKRTYRRIAVKEVDATVVAAEVGVGRVVFAIDVAKVDMVAAVVAGDGRVLRTVCWKNPLENGLVLALLEGLVAAGLSVEAVMEPSGTYGDVLREQLLEHGVPVFRVSGKRTHDAAEVYDGVPSLHDAKSAAIIAKLHLDGVSAPWGELSEEKRELKAAIATMDLYRAQHQRLIHSLESSLARHWPELTQHLELSSATLVALLARIGGPREVTAASEEARRLLHGMSHGLMSVETIEGVMQSAASSVGVRLVAQERVGLMTLAAEAHRALKEFKKAKGVVEGLSTSGAAQRLAGTTGKTTAAVLVADVGDPLDYPGTRAYLKAYGLNLKEKSSGRQKGQLSITKRGPSRARQYLWLAVVRWIQKDAVARAWYEHKIKRDGGRRARGVTALMRKYAQALFHVARGVALDSTKLFDVSRLRLT

SEQ ID NO: 453356 - protein, 345 aa, unidentified
MNATTVAVDLAKNVFEIAVADGSWKVVERARLTRAQFARWFDNKAVGLVVMEACGSAHHWARTLRSRGLEVRLLPAQYVRAYVKRNKTDAADAVALLEATRASDIKPVGVKSVEQQALQALHRLRSGWMATRTRRINTLRGFCREFGLEVPLGVARGLAQIARLIADDQSAIPAMLRTPMRLALEEIRLMEARIESLERELAQIARQSPACQALTSVPGIGLLTSTAMVAAVGDPRSFDSARRYASFLGLTPREYSSGGSRYLGRISKRGDRYIRMLLTHGARSVLRAATVARRAGRNVDRLRAWALAVQERTNHNKATCALANKLARIAWAVWVKHERYQAASA

SEQ ID NO: 453357 - protein, 483 aa, unidentified
MKSKPEEKNKRATNHPTQPHWDEMNRRQRREMTRKIQSEGLRLEVMHPDAAGIDIGNESHYASVPPSRDSQPVREFGCTTAELKAMADWLKQCRIRTVAMQSTGVYWIAVYDILEQAGLEVYLVNARDTKNLPGHKSDVQESQWLMKLHTYGLLRNSFRPTQEIRVMRTYWRQRNDLVQSASRHILRMQKALTQMNLQLANVLTDISGATGQAIIKAILAGERNPHKLAEFRDYRVKASEGQIAQSLEGNWQEDLLFVLKQEHEGYEFCHKQMAECDRQLQQYLQQREDRSHGAPLPEEKRKGRLQKKRANKPQFNLREGFFRMTGTDLTRIDSIDVMTATTVISEAGYDMSKWKTENHFVSWLRLCPDNRISGNKVIGKGRLPTNNPISIALKMAATTLRESKTYLGAQFRRLRTRLGAPIAIKAMAAKLARLVYRMLRYGMKYLDQGAAVYEIRHRELQIKRLKAKAEKLGYRVTSIPAAA

SEQ ID NO: 453358 - protein, 404 aa, unidentified
MQIVYERCCGLDVHKKSVVACAITPEGKEIKTFGTTTKEILALLDWITAKGCTHVAMESTGVYWKPIYNLLEQADITAFVVNARHIKVVPGRKTDVKDAEWIADLLRHGLLQGSYIPDRPQRELRELVRYRRSLLGERAREVQRIQKVLEGANIKLSSVATDILGVSGRSMLEAIVKGIEDPEILATMARGRMKKKHDQLVDSLQGLLNNHQRMMLDLQLRHIDSLDQAIARLDVEIEERMRPFERELALLDTIPGVGRQIAEQIIAEIGTDMSRFPSSAHLASWAGMAPGNNESAGKRKSGRTRKGNKSLRTTLTEAARAAAHTKDTYLSAQYQRLVSRRGANRAAIAVGHSILVIVYHILKTGMPYRELGANYFDQWRKNAVVNNMVKRFNSLGFKVTIEVA

SEQ ID NO: 453359 - protein, 481 aa, unidentified
MKAKPPEKIQKATDPSTRGHWKEMNRKQRREMMRKIQSEDLSLEVVHLHAAGIDIGNESHYVAVPPTRDSQPVRHFGCTTVELKAMAEWLKRCGIRTVAMQSTGVYWIAVYDILEAAGFDVYLVNARDTKNLPGRKSDVQESQWLMKLHTYGLLRNSFRPSQEIRTMRTYWRQRNDLIRTAVSHIQRIQKVLTQMNIQLANVLSDVSGVTGQAILKAILAGERDPHKLAALRDPRVKASEEQIARYLEGNWQEDLLFVLKQEHEGYEFCQQQMAECDRQLEQYLQQREDRSQGASLPKEMRKGRLVKRKGNKPAFALRAELFRITGADLTQVDGIDVVTATTILSEAGWDMSPWKDEDHFVSWLRLCPDNRISGNKVLGKGRLPTNNRASIALKMAASTLRVSNTYLGAQFRRFRTKLGAPVAIKAMAAKLARLVYRMLRYGMKYVDQGAKFYEAQHRQRQITQLKWKAAKLGFHVVEAAA

SEQ ID NO: 453360 - protein, 343 aa, unidentified
MQSISTIGLDIAKSVFQVHGVDAAGQVVLRRQLKRRHVLAFFQKLPPCLVGIEACASSHHWSRELQALGHTVRLMPPAYVKPYVKRQKNDTTDAEAICEAVSRPNMRFVPTKSPEQQSCLMLHRARHLFIRQQTAVINSIRAYLAEFGIVAPVGRKGVEQLLEVVADPADHRLPEVARACLTALGSQLRALKAQILEFDRRIIAWHRSHATSKRLDAIPGVGPALATALVASIADPKAFRSGRDFSAWVGLVPKQNSSGGKDKLGSISKQGDRYLRSLFTAGALAVIRYAKIHGTGHRPWLTGLLARRPTKVAAIALANKIARMAWAMMARGERYREPIALAA

SEQ ID NO: 453361 - protein, 362 aa, unidentified
MDDATTPICEGKVTVGLDLGDKYTQVCVLDSDGGVIEEARLRTTPVALRRRFAHVPTARLVLEAGTHSPWVSRLLEDCGHEVYVANPRKLRLIYQNDSKNDRVDAEYLARIGRLDPALLAPFRHRQADTQVDLALVRSRDVLVRARARLINHVRGAVKSGGGRLAKCSSVTFALKALPDLPPELEPALAPLLEVIATLDDQIHTYDRRIEELAKERYPETALLCQVSGVGALTALTYVLTLEDPARFTDPRAVGSYLGLRPRQADSGDLAPQLHITKAGDEMLRRLLVSSAHYILGPFGPDTDLRRWGLGLAERGGSRGKRLALVAVARKLAVLLLRLWSTGEVYEPLRNSARREDSLASPA

SEQ ID NO: 453362 - protein, 364 aa, unidentified
MKTQAQIVPIAKAKKKQSVARWTTIGMDLGDQWSHYCVLNEDGEIVEEGRFRTTPEALAKHFEALSPARIAMEAGTHSIWISEQLREFGHEVIVANVRELHAICRNDRKSDRVDAEKLARYARLDPSVLRPIAHRSVAMQEALTLIRARAVLVQTRVAVVNAVRGLAKPCGYRLPAVSTSSFAARCRAELPAGLLPALGPLVEQIDQISRQIREYDRLLLEMMQVGYPEAAALRKVHGVGALTALTFVLTLGEKDRFARSRDVGPYLGLRPRRKQSGEHDPQLGITKAGNRYLRMLLVECANFILGPFGQDSDLRRWGLRLMERGGKGARQRALTAVARKLAVLLHRLWVTQAEYQPFYASAAA

SEQ ID NO: 453363 - protein, 347 aa, unidentified
MKRIAVDLAKSVYQVAESVRSGQVVQRKRLNREAFRRYIQEQAEPVEWVMEACGTAHYWGRLAQSLGHQVKLLHPRYVRPYRRRNKTDRNDCDAMLEAARCNDIHPVPVKSHDQQQLQQLHGLRETWKKSRTQRINLLRGILREAGIEAPTSTVAFIRAADELVEQPEVAPLNRLLHVVLAEINLYEQCMAECEQQLKRWHADDDIVRKLDEVSGIGLLTASALTAAVGKPERFGSGRHLSAWLGMTPREFSSGNSRKLGHISRQGNVYVRTLLIHGSRAALLAAQRCHARTPEKLTQLQRWAVETAARIGHNKAAVALANKLVRICWAVWCHERRFNGNWQSVKPA

SEQ ID NO: 453364 - protein, 350 aa, unidentified
MLIIGCDFHPRFQQIAYVDKETGEYGERRLNHPEEATRFYRSLAGRPVQVGLEATGSFRWFQRLLTELGQELRLGDASAIHASNPRKQRTDKRDARHILTLLVEDRFPKVWQPPAENQELRQLLLHRSSLVRVRTRIQNRLDAVAKNEGLVSNRGWSERRRLQVEALSLSSWEAKRRQDLLALLDDLDQRIAPLDKAVSKAAAEDVEACRLMTHPGVGPITALAYVLTIGDWRRFERGKNVGSYLGLIPAEESSGEKRRLGKITKQGNELVRWLLVEAASIAQRYDPSWHRQYVRLSMQKHHGVAKVAIAHKLAVRLYWMLRSGEDYPQVRERGSHAGQSVCPIGASAGR

SEQ ID NO: 453365 - protein, 348 aa, unidentified
MKVLVGVDPHKASVALAVVDQAGGEFVECASFPQNRAGLRSLERWAKRFPERRWAVENAGGLGRHLAGWLAAAGESVVDVPPKLSARVRVLSTGNARKNDELDALATALAAWRNERLPAVDPEEAGSEVLRLLSERREDLVAERTRALNRLHGLLRDLVPGGVAGKLSTHRAARVLRGIRPQEGASARLRRRLASEILRDVRSLDRKIADLSGRIEAEVEASGTTLTEIFGVGPILAAKIIGTVGNVVRFPTKAHFASYSGTAPVETSSGEVMRHRLSLAGNRKLNNALHMVAICQARSDVRGGAYYRKKIEEGKSRKEALRCLKRRISDAVFRSLVADSRAPSRGVA

SEQ ID NO: 453366 - protein, 401 aa, unidentified
MECIFGIDISKHTANVAVLIDRQVIKEFKLSSNREGFERLEDELNSFREPKIIFESTGIYSRPWRAFFHRNGWLYTEINPLKAKKVMDSFRIVKTDSVDAVGLAEAMSRNNFAPSFQEKPEYTELRDLHRIYQEHNDDVVRNKNRLHHELQLTFPEIEHFLSRTEGALYWHIVQIFPHPYLVLQHSSTELTSIILKATSKNMGPKRAQHLAEHLLELAKSSGPAVDIDSYALKRVTELAYEVERIDRSKKSLIEEMAKIGTNLPEVAILMTIPGIALKSTLCIIAELGDIRRSHSANAINAYIGIDLTTYQSGDYTAEQRIRKRGNPLARKVLYRTVINIISASSYRPTRFNDFYQMKKQSSQSKGTKKIAVAVMSRLNRMIFHLVLHNEVYEPTVSQPRQ

SEQ ID NO: 453367 - protein, 408 aa, unidentified
MEVLYPRCAGLDVHQQSVAVCARVASGTAIQQEVRTFGTTTGELLALADWLTAHGCTHVAMESTGVYWKPVWHVLDGQFELILANALQIRSVPGRKTDVNEAMWIADLLAHGLIRSSFVPPAPIHELRDLTRTRKQLVREVSQHTLRIQKVLEDANIKLTSVLSDLMGQSGRAMIEALIRGEQDSERLADLSQGRLKASRPAVLAALQGCVTAHHRFLLRLHLTQIDALNDAVREVEARLGEALAPFQAAVDRLMTIPAVGRTVARVIVAEIGLDMSRFPTAGHLVSWAGLCPRQHESAGKRLSTRTRRGNPWLKTTLVQVAWVAARTRNTYLRAQFLRLKSRRGSKKAILAVAASMLTAAYHILKDDVMYHELGADYFDHRDKVQITRRLVRRLEALGLSVEVRPAA

SEQ ID NO: 453368 - protein, 405 aa, unidentified
MDGIRRYAGIDWAKDRHAICIIDGQGSVLARFEVEHTAAGLRELVHRLKGVEGVAIERPDGPVIDALLDAGLAVFVIASRHVKALRTRHGLAGNKDDRADAYVLADALRTDGHRLRPLQPDSEATVALRATVRARKDLVGHRVALGQQLTAHLALVFPGAVGLFADLDSPIAQAFLERFPSADRAAWLSPKRLAAWLRAQHYCGRRTGAELHERLVAAPAGRTGDAAEAMAAVTLALVRTIAAVRRQIDALEERIAEQLALHPDAVIFTSLPRSGCVRAAALLAEMGDCRERFPTPESFACLAGATPSTRQSGQHRAVTFRFACDKKLRDALLDLAEDSRFANAWAADIYARARDRKKTHPHAGRILARAWSYVIWRCWQDRVPYDPARHRALQRVLGAPTAVAA

SEQ ID NO: 453369 - protein, 430 aa, unidentified
MEEVTDEPLYRDRVCGIDIGKAGMVATIRVPSDANPARRAQETRSFGTTRREVLALADWLRSWQVPAVVMEATGDYWKPVFYRLEAEGFECVLADAKQVKHLPGRPKRDPSDSRWLAACFERGAITSCFVATPEFRVIREHTRYRRDLTGERTREKQRTEKLLESAAIKLSSVVTDLHGVTGRDIMDHLIAGERNPKVLAQLARARARRKISELEAALEGAEFFTPELAALLARMLGRIDQLNASIDELTGVIETLLEPYEEQLQQAESMPGWGRRSAQDAIAETGVDMTRFRTGGHLASWAGRTPLDHQSGTRNGRARHKKGNRYLAAITGETAVAAGKTQTREGARYRRLARRRGKAKAGVAIGNTQLKVLHALLSSPGTRYEDLGVGYYDNRSTGPQLRALIKRAHDLGYNAEFTPIPDLTGCPETA

SEQ ID NO: 453370 - protein, 334 aa, unidentified
MRVQALLEVIERYKQKWSLPQEVRVVVSYEAGQDGFWIYRALRLRGMECYVIDAASIPVERHRRRAKTDRLDAIKLVTNLRAWLHGERDRMRVVRVPSLQDEASRQLIRDRGQLHKEVLQHRERMRKLLITMGCWDGFDHRTFAKRLASGKLVCHDGTPLPSELHERLLRETARLALAEEQLAALERTLQERLPAPVRKRIAYLRHLKGVGHIGASRLVLELFWREFDNRRQLGACVGLVPQPYDSGQSRIDQGISKQGNRRARTQLIEMAWCWLRYQPSSALAQWFNKRTQGTEANRRARRIAIVAFARRLVIALWRYLKDGVIPQSAQLKGA

SEQ ID NO: 453371 - protein, 339 aa, unidentified
MFYVGLDVSVARTAVCIMNVAGQVVREQSVASTPEAIAAMVKASGMDVERVGLEAGINSAWIARGLLEAKLPVIVIDATHAAAALKTGFRNKTDKNDARGIADLMRVNKFRAVAVKSVAAQRDRALLTVREQLRRQSIDASNVIWSILQVEGLKPPKLTSPAFQTLVVQSLNDQALAPLLRPLVAVVEHLDGQVAGLDKAIAARAKASATCKRLMTVPGVGPLVALTYAAGVDDPARFSSSRDVGAHFGLTPRRFQSGEVDWSGGISRAGDAGVRRALYQAANVLIHHSRGWCALKSWAVRVAKRRGLGKAKVALARKLAVVLHKMWTTGEDYRLKAAA

SEQ ID NO: 453372 - protein, 316 aa, unidentified
MQTMLNLGADVDSKYIMVACAAGSFKSHRIANDRKAIRAWLRTVPQASRLGMESTGIYHEALANLACEAGLEVFIINARDLRRYGQGIGRRGKTDRVDAEVIARYVAREHEELHAYVVPSKEQRLLAQLMRRRAKLVKAKDSVRQSFRGVPALKTETRRLIEHIDRVIRGLELLIKRTLQQMPAALAAAEQIEQVPGFGELTSTWLGYRFTRVPFATSDAVVAAAGLDPRPDDSGQRHGPRKLSKRGPAEERRLVFNCARAAARMPLWRPYYEAQQAKGLSSTAATIVLARKMLRVAFALYQHQQPFDPRLIGHGA

SEQ ID NO: 453373 - protein, 337 aa, unidentified
MRFCGIDLHSNNSVVVVTDEADKVLVSRRCPNDLQTILTLLAPHRDELAGVVVESTYNWYWLVDGLMAEGYDVRLANTVAMKRYDGLKHSDDETDAAHLAHMLRLGILPTGYIHPPAERALRDLARKRVQLVRSRTQHVLAVENILARSTGSRPSAAVIKRLAPADIGTLGLSADVALAVQANLAVIATLNLEIERIEARLLEGAKLRPDYARLKSIPGIGEVLAIIIMLETGDISRFAQVGNFASYARCVDSARYSNGKKKGEGNTKNGNAYLVWAFVEAANFARRYSEEASGFFDRKKARTNSIVATKALAHKLARASYHMLKEGQPFDVKRCFA

SEQ ID NO: 453374 - protein, 402 aa, unidentified
MDYTAGAPAFAGVDTHKETNMLALKDGLGRTVGVWEFPADPEGYDALADAIGDASVPVGIEGARSYGAGLAQRLAERGYEVREVVRPRREQRRRGKTDEIDALAACDNLAAGRSMPAKEMEGDAAALRWLMVAREQEVAHMTRLACCMDSMLVTAPYSVRERWRGLGGAALMRAVASCRPKDAPGRTMREVARSWREAAGRAERLEAEILELMARSYPALIGAPCVGAISGARIVLAAGSNPGRLRSEAAFSMLCGTSPVPASSGNTTRHRLNRGGNRQANRAIHEIARARMAHDPRTKAYIARKMSEGKTKREAVRCLCRYIAREIYRLLTGPQEPPCDQSALAQRRKACGLTQRQAAEGAGITRAKVGGLERLAEFHTESLLRYDAFLREVEAKKGLDSI

SEQ ID NO: 453375 - protein, 343 aa, unidentified
MQSITTIGLDIAKSVFQVHGVDANGLVVIRRQLKRRYILAFFEKLPPCLVGVEACASSHHWSRELQALGHTVRLMPPAYVKPYVKRQKNDMADAEAICEAVTRANMRFVPTKTPEQQSGLVLHRTRHLFIRQQTSVINAIRAHLAEFGVTAPVGRKGIEDLLGVIADPSDKRVPDVVRACLAALGSQLLGLKKRILDFDRMILAWHRSNQTSKRLNCIPGVGPLLATALVASVADPKAFRSGRNFSAWIGLVPKQHSSGGRPRLGSISKKGDRYLRGLFVAGALAVIRYAKLHGTKYRPWVAALLARRPTKVAAIALANKLARMAWAMMARGERYNYPATLRV

SEQ ID NO: 453376 - protein, 470 aa, unidentified
MIRHRSDSVLLGPLASVRKPVSQPVIAAVRFMQVELPLHVRLIPQEIESAMRNAGIHANSLLEVRRMYNAVGIDVSKGKSTVAVLQPGGTVIRKPFDVSHTSQNLIELADYLGSLEGPTKIVMECTGRYHEPMLKALYEAGLFVSVVNPHLIKNFGNNSLRRVKSDPADARRIARYTLDNWAELRQYSGMDNTRTQLKTLNSQFSFFMKQKVAAKANLIALLDNTYPGVNKLFDSPPREDGSEKWVDYAYSFWHVDCVRRIGLKTFTERYKAFCKKHHYIFQQDKPEKLFNASKELVAVFPKEKTYKLLIQQSIQQLNLASGHVERLRQEMNALASTLPEYSTVMGIYGVGKTYGPQLIAEIGDVSRFTHREALTAFAGVDPGVDESGQHKSKSNRASKIGSARLRKTLFQIMTTLLQNAPEDDPVYRFLDKKRAQGKPYYVYMTAGANKFLRIYYGKVKECLRNLEQAE

SEQ ID NO: 453377 - protein, 354 aa, unidentified
MNDAKYIGMDVHQATISVAVRDSRGNLVMEAILETKAETILQFVRGLGGSLHVTFEEGTWAAWLYDLLKPHVTKVVVCDPRKNPLLRVGNHNDREDARKLSELLYLNKLSSVFHGETGIRTLRELARSYLTITRDLTRVMNRLKAIYRGWGIACTGQQVYAPRYRAEWLAKITEAGVRRRAEIYYQQFDVLARLRQEIRRELLAEGRKHFATRLLQQIPSIGPIRAALLIALMQTPNRFRTKRQLWAYCGLALKTYTSGEYRFVGGQLKRKKAVAIRGLNKNHNHDLKNIFKGAATRAAATAGPFQEFYEARIASGMKPPMARLTLARKIAAITLLVWKKGVCFDAKQLKQQAA

SEQ ID NO: 453378 - protein, 313 aa, unidentified
MITEEVHVVGVDVSKATLELGSLSLTLPASIPNTPAGFKILLKSISKCITPVHIVCEATGPYHGPLVRFLHQAGIKVSVVNPRLTRDFARARGKLAKTDAIDALLLADYGRTMKPDPTTPPKEHVVLLDELVTRRAQLVEDRARERNRLEQASGPDVAASLRLHIRHLDEQIKKLLKRIAEVVEKHPSLKAKVSLLAQVHGIGTLTASVLLATLPELGTLSKNEVTALAGLAPFNRDSGAFRGKRSIHGGRIGVRCAIYMSALCASRGNPILKAFYQHLRAVGKPHKVALVAVMRKLLIYLNSLLKQQSLSPA

SEQ ID NO: 453379 - protein, 370 aa, unidentified
MKDHTLYVGLDTDKKHIDIGLAEPLPKGEVRYWGKIANDTVALERVRKRLQKDGRELVVCYEAGPCGYGLYRWLNGKPGVSCQVVAPALTPRRPGVRVKTNRRDCLTLAKLLRAEELTAVWVPDAAHEAMRDLVRARGAAKEDLNRCRQRLGGFLLRQDIRYAGKPWTKKHRAWLGRLAFAEPAHRLLVGELRDALDQATARRDRLSDHIAELVPNWSLAWLVEALQVLRGYQLINAASVVAEVGDPRRFDSPRRLMGYLGMGVSEYSTGERVRRGGITKTGNKRARTALIEAAWTYARPAKRPKASAARQPAALRTIADKARHRLSARYRKLIARGKLPAVAVTAIARESLGFIWAIAHAAAPDTPRQR

SEQ ID NO: 453380 - protein, 347 aa, unidentified
MEYIGVDLHKQYFVATVMDEEGRVIRKDRVSTDRAAIKEYFQKEPRAKERKVAIEACYNWSYFFDEIQGMVTEVKLAHPLKTRAIAEARIKTDSIDSEVLAHLLRSDLIAEAYAPDFETRDAKNLLRYRASLSQMRTMLKNRIHATLARNHIEVPEFRELADKFGKKGRAYLREFQLRGYDTEILHHYLDLIDAIEEKIKLVDRKVKEACKRDEICRLIESIPGIGHLLAVLIRYEIDDIQRFSSAKKLCSYAGLVPSTYSSGDKTYHGRITKQGNRWLRWALTEAAQMAVVKDVGFRGYCRRVEKRGGKKKAKIAVARKLLEIIFCVWKERRPYYEKPVAVALCRL

SEQ ID NO: 453381 - protein, 410 aa, unidentified
MRIIALDVHRRFAQVAVLEDGKIRNAGRIDLEHSRLLQFAKTLKPDDEIIIEATGNTNVIVRLLSPFVGRVVIANPILVRAIAWAKVKTDKIDAAVLAKLHASGFLPEVWMPDEETETRRRVVAERAQLVSQITRLKNRIQSVLHANLIPPYKGILFSQRGRTWLTAQPLPEDQRRVILRHAGELDRLGAELAEVDKSLVQRALEEPRVKRLMTITGVNVTVAMSVLAAIGDIRRFSSQEKLVSYFGLNPRVRQSGDKPAYHGRITKQGRAHARSMLVEAAWVVSGAPGPLRAFFIRIRDKRGKHVAAVATARKLAVVVWHMLTKDEDFTWSRPALLQWKLRKLELKAGHPSRRGGHQKGSAAAYSNKSARDSEREATGNAEEEYRRFVTNWKQQSPKGRSGATNEVRRS

SEQ ID NO: 453382 - protein, 394 aa, unidentified
MILVGIDIGKNQHTFSIIDKGTGEILSNPSVFNNNQEGFLLLIGKLSSYAKSELLIGMEDTGHYHFALLKYLLDSRYTVALINPTTTDLTRKLQGGITKNDPLDSLTICDVIGSNQRKKPYRITKVNRFDLYEQKQLTRHHHNLKEELNIYKNRLQKCIDIVFPEFNSLFRSRYGIVYMNVLKTFASAEKIANSDIRIIRKCFEYEGRGKRIPLSAEQLKTVAKASVGIPSVAEEIQIRHLVCQIEMIEEQLSEIDKKIEEFSLQNNSPILSIPGISHFSGTSILAELGDICNYTKASQIIKFAGVAPYHYESSQFTAQHTAITKKGSRYLRKTLYQIILPVINHNRVFNAYYNKKLAEGKGHRCAQGHCIRKLLRIIYHLLSTGHTFDPALLI

SEQ ID NO: 453383 - protein, 340 aa, unidentified
MLNLPIFVGIDYHTKTIQVCVIDQQRKILANQSVENSPEAVFRIVAPFGSNVHVAIEACTGAADFAEQLTTKYPWHVELAHPGYVARMKQTPDKSDWTDAKLLADLTRAGYIPRVWLAPKPIRELRDLVRHRHGLVQQRTQVKLRLRALLRQHRITCPYSPWTIKGKAWLLDGANITSSNLMFLIRDHYDTIDFYDKKISVVLAQMQNAVADDPVVKQLLRQPGIGMITAITMRALIGQFDRFRTGKQLAHFCAVCPRNNSTGGKTTTGGLIKAGDELLRQVLVETAHRLIRYNDEWKAMAQRLQANGKKKCVVVAAVANRWIRRLYYQMVSSEPSGNPA

SEQ ID NO: 453384 - protein, 461 aa, unidentified
MSAHKPKGAQKRSVPKKVDWKALEVVHPDAAGIDVGGSEHGVAIAPDRDPEPVRRFGCFTVDLREMARWLIEKGVRSVAMQSTGVYWMPVFEVLEQQGLEVYLVNAQHTKNVPGRKSDIQECPWLLKLHAFGLLNNSFQPTDEMRIARTLWRHRGNLVAEASSVVQRMQKVLTEMNLQLSNVLSDLSGVSGMKIIHAILDGARDPWELAALVEPGVKATPEDIVKSLEGNWREELLFVLRQQVELYQIYQKKIHACDLQLRKHLQSLGSKLDLQAQPLGPRPKGKHLSRNAPAFDLRTELYRITGIDWSQINGIDVLTAQTVISEAGADLSAFPSEKQFASWLGLCPTNQQSGKKILNRRTRKVVNRATVAFRNAAMTLLRSQSYLGAQYRRLRTRLGAPKAITAMARKLACLFYRLIKHGQQYVDQGTEYYETRYREQQIRSLAKRAQKLGLQLVILKTA

SEQ ID NO: 453385 - protein, 417 aa, unidentified
MQIIPWEERKYFGALDWACDHHDLVVVNGKGVIVCEVRFAHTAEGWQQLRDKLAAFTPLAIAVETNQGLAVEQLLAARYTVFPVNPQSAKRYRERKAPTGVKDDRRDAWSLADALRVDGHGWKPLCADDPLVAELRLLTRDETALIEQRTGLINQLQSALRDYYPAALEAFADWSCPGAWSFVASFPTPAALVKAGRRRWVKFLHVHHFWREATAQRRLEIFARAERLQGQPSSVAAKSLLALSLVRILQTLEVQLRAYRTAIDELFARHPDHDLFGSLPGAGKKLAPRLLAEIGDQRSRFARAEGLQAYAGTAPITFQSGQIEKHLVRRACARPLRSTVHLWANLSRRKCPWAQAYYQAHRDKGQSHACALRCLGQRWLKILWRMWQDGTCYDESLHTRNQRQHGSWVLARQATTT

SEQ ID NO: 453386 - protein, 374 aa, unidentified
MTKIIRIGVDTSKSVFVLHGVDAAERVVLRKRLRRRQVLELFAQLEPTKVGLEACGAAHYWARELQGLGHEVVLLPPQYVKPYVKRNKNDAADAEAICEAMSRPTMRFVPVKTAEQQAALMLVGTRDALVRRRTQLTNAIRGYAAEFGLIAAKGLDKIEPLLARIAAHAPLPGLAQELFAAHAKEYARLQAQIREIEAKLRAWHKHNELSRRLAEVPGIGPIGATLAVMKVPNPKAFRCGRDFSAWIGLTPKDHSTAGKTRLGVITRAGDEALRSVLIAGATAVIQQVKKGKGHPSPWLVELLKRKPRKLAAVALANKMARVAWKLMVSGERYNPARTAAQSAAREGRGAALRGGSAPPPSLASRITSRQVPEA

SEQ ID NO: 453387 - protein, 364 aa, unidentified
MRREAVSVFRERGLPRVCGTEPQRCEPKFKQPLERKTDTMKNYILRQTEPVQSQITVVPAVAKPSVIFIGLDVHNDTIAVSLAPSDSTEVRRYGIIGGEHDDVLKLVKKLQAAHPGATLQFCYEAGPRGFALCRCLRLHGLDCILVCPSKVPRKPGERVKTDRRDADQLARLFRAGELTGIYVPEPVDEAMRDLIRARFQVGKAQHRARQQLKMYLLRHNLRYGGKSSWTPAHLRYLAQIKMPFPVQQIVFQEMLEVISEATERLERYDQEIERAVPGWRWEPAVRALMSLRGMALLHAATLVAELGDFNRFERPGQLMNYLGLVPSEHTTGSDRQQGGITKMGNGPTRRALVEAAWQYALRPA

SEQ ID NO: 453388 - protein, 343 aa, unidentified
MDHFAGLDVSVKETSLCVVDGTGRIVREVKVASEPEALLAVLKGPAYRFKRIGLEAGPLSQWLYSVLAEAELPVVCVETRHMQAVLKAQINKTDRNDARGIAQMMRAGLYRPVHVKTLRSQKLRMLLTHRQLLLSKAIAIENDLRGTLRNFGLKVGMVGTVKFETRIRELVENLPDLAVLVEPLLVVRRVLRQQIGLLHRHLLTIVRDDDVCRRLMTVPGVGPVVALTYRATVDVPARFKNSKAVGASFGLTPSKYQSGEIDRGGRISRCGDEMTRVMLYEAAQVMLTRTNKWSWLKAWAMRIARHRGMKKAIVALARRLAVILHRIWLDGTVFRWTREVVAA

SEQ ID NO: 453389 - protein, 316 aa, unidentified
MAMPVQRPHVGIDVGKFRLDIATDDGGHQSIENTPKAIGEWLDSLGESVRIALEATSNYHLEIALEAHRRGHEIFLINGYRLNRYRDSIGTRAKTDAGDARLLLRYLSREIDELRPWSPPGKAYRQLQTLLRRRATLVQVRVALQQSLAGIPTLKASLHRIVAQLKQTDQLIQKHIRQCLKEAGWEADAKRCQAIEGVGPVTAASLTTLFHRGSFRNSDAFIAFLGLDVRVRDSGIKSGKRRLTRQGDPEARRLLYLAAMQAKRQPAWEDFYQRHVARGLAPTQALVALARKLARVAFSLMQKQTDYVPRIPCGET

SEQ ID NO: 453390 - protein, 402 aa, unidentified
MNAVGIDVSKGKSMVAIMRPFGEIVSTPFEIKHTASDINSLVELINSVEGESRIVMEHTGRYYEVLAHQLSEANLFVSAINPKLIKDFDNDSLRKVKSDKADAVKIARYTLDKWQNLKQYNVMDELRNQLKTMNRQFGFYIKHKTAMKNNLIGILDQTYPGVNTYFDSPARSDGSQKWVDFASTYWHVDCVRKMSLNSFIDHYQNWCKRKKYNFSQSKAEEIYGKAKELVPVLPKDAITKLIIKQAVDQLNSASTTVESLRTLMNETASKLPEYPVVMAMKGVGTSLGPQLIAEIGDVSRFTHKSAITAFAGVDPGVNESGSYEQKSVPTSKRGSSDLRKTLFQVMDVLIKTHPEDDPVYQFLDKKRAQGKPYYVYMTAGANKFLRIYYGRVKEYLSSLPES

SEQ ID NO: 453391 - protein, 345 aa, unidentified
MQPMYYIGLDVHKQKISYCVKDSSGKIYAEGWIPATRFDLDRWMKTLPQPWSAALEATMFSGWIYDHLKPHAAALKVAHPLMLRAIAAAKKKNDRIDANKICDCLRCDFLPECYMAPTAIRERRRTLRYRNLLVRQMVQMKNKISTLLMEAGVSYNKRKLHQAGYFRELLASNPDIHEGLRPLLRLCRATVVQLSKTENALVSSLQQDPLLLERVERLMSISAIGPITALTWALEIGEIQRFSSIKKAISYCGLCGDEQRSANSVQRTPISKQRNKHLQTVLIEAAKMAPRYSPTLALLYDREKQKGNANRATLAVARKLVAYLVAVDRGQTHFLVIDQEIHAAA

SEQ ID NO: 453392 - protein, 317 aa, unidentified
MSLPTASFVGIDVSKQQLEVAVRPSGETWSVAHDEAGLSALVAQLRALAPALIVLEATGGWEVALASALAAGPLPVVVINPRQVRDFARSTGTLAKTDRLDAQILAQFAEVIRPQPRALPDAQAQELAALLQRRRQLVEMLTAEKNRLTLASRRIRPQLQAHIEWLHKQIAQFDEDLRQLIRASPLWREKDDLLRSAPGVGPVLATTLVAALPELGTLTRRQIAALVGVAPLNRDSGTLRGRRSIWGGRAQVRAVLYMSTVVAMRHNPVVAAFYQRLRAAGKAPKLALTACMRKLLTILNAMLKHHTRWAPGLAQHA

SEQ ID NO: 453393 - protein, 319 aa, unidentified
MDILGLDVGKSRFDACLIRQKAKQTISLPNSQAGFDQLAAWLAKHRPDATQPLHACMEATGNYGLDLAAFLFAEGATVSIVNPRQIHAFGQAELARNKTDQLDCALIARFCAAFQPPAWTPPLAYMRHLRELTRRCAALKATRTQELNRQKAGAACPAVQASIQRHLAMLTSEIELIASEIRAILATDSQLQGHFDLLRTIPGIGEVTSALLLAELPNITEFKPKALAAFAGLSPAEHSSGQRQHSGGISRIGNAMLRSALYLSALAAARHNPRLKDFVARMNEAKKPKKVILVAVARKLLVMAQAVLKTQTPFSAQPG

SEQ ID NO: 453394 - protein, 344 aa, unidentified
MKHYAGLDVSVKETSVCIIDEAGKTTREVKVASEPEAILAILMNEALTIERIGLEAGPLSQWLYSGLAETGLPVICVETRHMKAALSAQLNKSDRNDARGIAHMMRVGLYRPVHVKTLASQKRRMLLTSRQLLQAKALDIENDLRGTLRNFDLKVGIVGVAKFEARIRDLVVDHPDLAAITEPLLIARRVLREQLGVLHRRLLAVVRQDEVCRRLMTVPGVGPVVALTFRATVDVAARFKNSKAVGAVFGLTPRRHQSGEIDRMGSISKSGDAMVRTVLFGAAQVMLTRTIRWSWLKAWGMKIARHRGMKRAIVAVARRMAVIMHRMWADGSEFGWTNPSTPAA

SEQ ID NO: 453395 - protein, 477 aa, unidentified
MAAKQEATSQVKPNRKQRRDQQRRIWTADPGLEVVHHDAAGIDVGNSEHYVAIAPEKSAEPVRKFGCFTGDLREVVLFLKAHGVRSVAMQSTGVYWIPLYDVLEEEGFEVYLVNARDTKNLPGRKSDVQESQWLLKLHTHGLLRNSFRPVSEIRVLRTYWRQRGDHVHTASECVQRMQKALTQMNLQLANVISDIMGWTGQKILRAILAGERDAEKLAEMRNWRIQASQEEIVASLTGNWRPECCFPLKQEMERYDFCQRQIAECDHEIKQHLDTLPARHRETDPAVQPVAPPKKNKKVQGNSPQFALDKELQRITGVDFTRIDGINVMTAQTIISEVGLDMSRWKTEAHFASWLGLCPHNASSGGKVLRRGTRKVVNRAATAFRIAGSTLRRSNSYLGAQFRRFRSKLGAPKAITAMAHKLAVLFYRMLRFGQEYVDRGQHFYEERYRQQQISLLNRKAAQLGFSVIPATNRPASI

SEQ ID NO: 453396 - protein, 337 aa, unidentified
MLKLLYRWRDEAVRAGHNITRIAVAYEAGRDGFWLARWLRAQDIEAHVIHASSVAVSREHRRAKTDRLDTELLKRSFLGWLRGERDHCKAVAIPTLEQEDAKRPHRERESLVAEHSRIVNRMKSVFALLGIRGFNPKLKKAPERLQSLRPPEGEPIPPCTIAGLKRDMERRQLIRDQIRQIEQTRLEHLKQAPKTGPHAMVRLLARVIGIGIETADMLVQEVLSRNLRDRRAVARYGGLTGSPDESGKKRREKGLARSGNARVRRGMIELAWRFLRFQKDSSLSRWYRQRTEQAPGTRKTMIVAMARKLLIALWHLVKEGVVPDGVVLRSPNLHLAG

SEQ ID NO: 453397 - protein, 335 aa, unidentified
MNQARMHVGVDVGKECLDICYPDGSKEHIGNTKRSRAKLIRKARAMSAIVSFEATGPYEENLADECLAAGVPAVRLDAWKTRKYAESQGMLEKTDAIDCEMIRDFAASLKPEQLRFVRPMSDGYRRLKRATSVRRNLIKAKTLVVNQLENILDKDVRASVSRVIDALERQIEKMDALCTEAIRSDDKMNALAVRFEQVVGVGPVLISTMLSSCPDIGSFTSKGIAKMAGVAPIENKSCTIRKKSKPRRGRRELRSALYMAAVSACHSNHLLEPVYKRFVDRGMPRRVALIALARHIAILMNYIAKYPDFNPAVDPKKAALLALPKRKPGRPRKNP

SEQ ID NO: 453398 - protein, 310 aa, unidentified
MDAIYVGIDVSKDRLDVHVRPAGETFAVARDGKGLNELLERLRSIAPRLIAIEATGGYETIAAAAIAGAHLPLAVVNPAQVRHFAQAVGKRAKTDPIDAGVIARFAEAVKPEPRELPDEAARLLAELVARRVQLIEMIVAERQREKRADAVRVRKSIARHIASLEKELPIIDGDIDTMVRGSPVWREKEDLMVTFPGVGRGIARTMLADVPELGRLTRREIASLVGYAPFTRQSGQWKGKSMIAGGRPAARSAIFMAAMCAIRCNPVLRVFYQRLIARGKAKMVALVGVARKIVVMLNAMLRDKKQWQPA

SEQ ID NO: 453399 - protein, 344 aa, unidentified
MQHRTLAVDLAKSVFEVAVSQRVGRVTMRQRLTRGQFARFVHESEPATFVMEACGTAHFWGREAQARGHEVVLLPPHAVRPYVLRNKTDGADAKALLEAVRNEAIRPVPVKSIDQHVLGALHRLRSTWMATRTARLNTLRGLLRELGYAIPVGARQVVPHVYALVSDAESGLPDALREVFAEAAREIGDLEKRIRAVEQQLERLACESSLVSRLRTIPGVGLLTATALAAFVGDVQRFPSGRHFASYLGLTPRESSSGLRRRLGRISKRGDPYLRTLLIHGARSVLCHAKKTKTNPDRLRTWALERERARGHNKAAVALANKLARIVWAVWCHERAYGTDPKEA

SEQ ID NO: 453400 - protein, 339 aa, unidentified
MKEVSTVGLDLAKKVFQVHGVDARGTVVVRRALRRSQLLAWFAKLPRCLVGMEACATAHYWARELVKLGHDVRLIPPAYAKAYVRRNKNDPADAEAICEAVSRPAMRFVAVKSERQQAAAGIHRVRDLLMKQHTMLRNQLRGLMAEFGIVAAKGRHGLGELLAILADAEDQRIPSPLREGLLLIGATLRETDRKLEIIDRQLAAAGREDATYRHLITAPGYGPILSSAMAAMVIDPAAFRRSSDFAASLGLVPRQEGTGGKVWLGPISKRGNGYLRRLLVNGATSLLNSKRAKQDPWLVKLLATKPRKVVAVALANKLARIGWALMVRQEDFRGLPAAA

SEQ ID NO: 453401 - protein, 400 aa, unidentified
MRAVFGIDVSKTSSEVAILVNGEKVHGYTILNDAIGFNRLLGDLKTVHNPEIIFEATGVYSRRLQAFLEEYSYAYTRLNPLEAKKQLDSLRVRKTDKIDAEKLAKSQLVHNRKPTYVQEEVYQHLRDLSRFYQNMTEDLVRTKNRLHKVLQVTFPELETLLSTPTGEQYWNLVMAFPCKEFVLSLSQSNLCEIVRQSTSKRISEKRITYLTDKLIKLAKQSFCAVKNTSPMLEEVRYYAQELLRLSERRQVVLNDMVALAQPLPEYDILRSIPGIAETTATSIIGELGDIRRFQSSNQINAFIGIDLRHYESGNFLAKEHITKRGNPYARKILFKCIHNIASASHTNPCHIADFYEKRKRQSTIASTKPHTIASIHRLIRTMYYLITHNKLYDYSLSQNR

SEQ ID NO: 453402 - protein, 341 aa, unidentified
MSKRSVSPCAVLYCGIDVSAATLQVAVQPEGGHGFEQREFANSAAGHKQLLGWLSKRGALARVSLEATGIYSLDVALALDAADGIAVAVLNPRTVHQFAESLRRSKTDPADAVALAEYSRRMDFVAWARPSVAALELRSISRHIETLTEEHARLKNRLHAARGSASTSRCVREDLRTSMTGVDKRLLRLRREASAVIAADAGLKRKFEHLIGIKGIAEVSAIQLLGELAGLDPEMTARQWAAQSGLDPLHQVSGTSMHKASRISRRGNRHLRRALFMPAVSASRFDPHMKAFYTLLLTRNKTKMQALTAVARKLLHAIFGIFKTATPWDGAKLFPQLILTS

SEQ ID NO: 453403 - protein, 376 aa, unidentified
MREKLRFLGLDVHAETIAVAVAEPDGEVRSLGTIANREDSIRKFIKKLGPAEQLRACYEAGPTGFVLYWQLAQLGVECAVVAPSLVPKKPGDRVKTDRRDALKLARSHRSGDLTAVWVPDEASEALRDLVRQREAAKQDQLRARHRLTKFLLRTGRRQPLGLKAWTEHYMRWLAQIRYSQPAQEVTLRDCLNEFEHMSARVKRLEEAILEVVKLAPQPLQEVIRGLQALRGVAHISAVTIAAELGNISSRFESARQLMGYSGVFPSEDSSGKRIRKGGITKAGNAHLRRIVVESAWSYRHLPRVGEKLRKRHEGIPAEIIEIAWKAQNRLHKRYMKLTMAGKDQRKTMTAVARELLGFIWAIGIKAEAACTLQMAA

SEQ ID NO: 453404 - protein, 471 aa, unidentified
MSCFRGAIQNRLRKENFMQKQDSYDYYVGIDCAQNKHDFAMKNNQDKFLIKKGHFSNTLQGYEKFLNTVLSKCLNKDKILFGMEVTGIYGTNLYERLKSDGYHVVMISPDSVKNYRDYKRLNKTDKIDSACIAELLLNGDAQIVHVEKNGYTDLKAYIRRRNALKVTCTQETNRFLAKVCLYFPDLLKVFPSGRATLKAIFSIYPTPYSIIEADFDELVSVLQKASKNKFGVDKANELIHAARNSIVVRKSISDGELYNIHSLIDSIDSLESEIRNLEKIIDSKTEEFPAYHVLLTLTGCGKITAATIVAEIGDISRFHKSSQIVSLAGLYGDNSKSGSSVNKRGKISKKGSRYLRHAIYMVAEFARRNNPIFKAYFTRKKNGDRTKHTLAVNAVANKLCKVIYSLMKNQSTYIIQYRDLAKLSESTQNEFFQNAETDFSAKTRRKKYLYEDEYGELHEFVFKSLKTALIE

SEQ ID NO: 453405 - protein, 354 aa, unidentified
MIIIGADYHPGFQQIAFVDTDTGELQERRLEHREDAEKFYRDLAAQELKVRVGMEASGHARWFERLLGELQFELWIGDAAEIRAKRVRKQKTDRQDAQLILRLLLEDRFPQVWVPSWENRDLRQLLWHRHRMVQARTRIMNQLQAVALNEGLCCKKKLWRDAGREQLESFRLAPWASRRRHDLLELLDRLTPTIAELTQAIEQEAEKCPAARRLQTHPGVGALTALAFVLILGRADRFECGKQIASYLGLVPSEESSGQRRRLGHITKQGNSLLRFLLVEAAQVTVRSDPEWRNRYFHLVLRRGRKIAKVAMARRLAVRLYWMWRKGWDYQQLKKVGSHAGEPGHPDAVQSNTE

SEQ ID NO: 453406 - protein, 322 aa, unidentified
MMNSHSPFSVFVGVDVSKDKLDFAFADGQETFSIDNSPQQIVTELLGRIKTPQATLVVMEATGGYEELLVTQLQQHNIAVAVVNPRRVRAFAAGIGKDAKTDLIDAHVIAFYGQVVKPAAQAARSDDEKKLQALVERRRQLLDLINQENNRRQQTADPEIQEYIQQSLETLKNQVKTIDERLAQCVQADTANARKVEILASVQGVGPVAVSTILAKLPELGKLNRGEIAKLVGVAPLNNDSGQSSGQRRTFGGRSYVRRVLYMATLVATRFNSRIKTFYQRLLSQGKPKKLALTAAMRKLLTILNNLIKTDQLWKEPCKTSV

SEQ ID NO: 453407 - protein, 327 aa, unidentified
MNTIGLDLHKGESQLCLVAPDGTMTEQRIVTSRERFTAVLGNRAPARILLEASTESEWVARHLEALGHTVIVADPNYAPMYATRRRRVKTDKRDARTLAEALRLGAYRVAHRVAHRVAHRVSSERRHVRAELAVREALVRTRTRYIVLAKALVRRDGLRVAASESHLVAQRIAALELSDALAAELLPLFTVLGPINEQIAAADRRITALTTSDPVVALLTTAPSIGGVTASAIVATVDDVTRFGSAHQFEAFIGLVPGARSSGEKRRVGRITKTGNARVRYLLVEAAWRILRAKDTDTAALRAFGCHAARRPPNETSVPEPRVNRDD

SEQ ID NO: 453408 - protein, 350 aa, unidentified
MRMIGCDLHAAQQTIAMLDRETGETVERTLTHDNETVREFYAALPAPVVVGIEATGSMGWFLQLMEELGITCRVGHPATIRKAETRRQKHDRRDAALLLRLLAEDRFPSIWMPSTDVRDLRALLLHRHQWVRMRTRVQNAVQAIALSHGMRRGHTLWNREGQAAIAAVPLPPHAAHRRDELLALGRDLDVQIDTLAARVTHEALARHTATLLMTHPGVGPVTALATDVFLGDASRFANGKAVASYIGMIPSEYSSGTRQRLGALSKQGNAFLRFLWCEATLHAVRRDPELKRFYRRKLQQKGLAKARVAAARKLGIRLWIMLRDQIDYTEFCRRGSAAAESGRAHAGVPA

SEQ ID NO: 453409 - protein, 412 aa, unidentified
MDIIVERACGLDVHQRTIAACVQTENSEKTREVRTFGTTTTELESLKSWLVTKQVTHVAMESTGIYWKPVYNILEDSFHILLANARHIKHVPGRKTDIKDCEWICKLLRAGLLQGSFIPPRPIRELRDLIRYRTKLVQSIAQEKNRILKVLEDGNVKLSSVLSDIFGSCGTFAIRAVLDNRCSPEEMAPILKKKGKNIKATESEIREALRNTITDHHRFMIQLHLDHIEALEEQLQQLMKRIQKQLEPYQDIQKLLTTIPGVGEEGAAAIIAEIGSDMDQFPDEHHLSSWAGMSPGNNESAGKSRSGKTTKGSQQLRCTLVECAWAASHTKDTYLASKFRSLLGRRGNKRSLVAVGHKILISAYYIIKYKAPYHELGQDWLDKTRKKSLIGVYLKKLTDLGCIVQPIQPSLP

SEQ ID NO: 453410 - protein, 396 aa, unidentified
MISMCNEVYASIFLCPMRRVSGLDVHKDTVFLCIVDDDGVVFRSKYGVLTPELEQMAGVMVEYGVEEAAMESTSIYWMPVWRVLEPYFSLRLVNPFFIKQLPGKKSDVKDAEWIATCLQKELIKGSYVPDELIQQLRQYDRRIFDLSKDIAYKLTKLDAALQRCNIRISNYVSTTQGKAYQGIVRLISEGVTAAEELIKSVHGRTVNRVGKDVIFNALSGVITVADIDTIRQLREEVELARRHKDECQARMDEICRQYFPEQYKNLQTIPGVQARSATAIIAEVGTNMEAFQTASHLVSWAGLKPRNEESAGKIKSRKVTHGNKYLRKTLVECSWAASRTQGCYYNRFSYIQCTVRHKNRMKVQVAIARKILTAAWHILHDNVPYRDFTPDIVPSE

SEQ ID NO: 453411 - protein, 426 aa, unidentified
MADTNHPIAALHWVAIDVARYWNAVLVETASGQRHRFRMTNSAADMQRLIDFLLGLGGRCRVALEPTGDYHRPIAHRLLRTGFEVVSISSVAQSRFREAMFNSWDKNDPKDAAVILEMLKQGRTQRYVDPMLAGHHDIQELSKTYYQISRARTKVQHAIINHHVPLYFPEMHKYWTSTRNEWWVKFMIEFPTPAHVRQHTCQEFIELASPVVGRRVHRVAKLTEIWECCADSGALPHDPHSVAVQTFLFTLHHYQHLNDMRRQLEEQAQNLLASDADYINLMSLPGVGPINALTILAEAGNLRRFGHHRQFLKYCGFDLAKSQSGVQRGREQLSKRGNARLRLAFWLAAVVAIRARENSFREKYDRYVSSNPKDPDLKRKALTAVAAKMARVAYGIIKKNQPYRRFFEQSLPSGSIPLNRAVGAPT

SEQ ID NO: 453412 - protein, 236 aa, unidentified
MHPSGATRQVTNDKAGHKALLRWFSRLRVERIVFEATGPYHRLFERALTAAGLTFAKINPRQARRFAEATGRLAKTDRVDAAMLARLGALLQPEASVPKSDVLDELTELVAARRALVKDRTACLNRAKVLRIQLLKSQTSQRLRQIEAQMAAVDRLCLELVTSDQTLAERLVILPSIAGLGEARAVAILADMPELGEIEPKQAASLAGLAPMARESGQWRGKSFIRGGRAHVRQAL

SEQ ID NO: 453413 - protein, 330 aa, unidentified
MVMWASSPNSKAEIAYLMKPQEINVGIDTSSKQLDIYVRPTGQFFSVTNDKNGIKDAIKQLQPLKPKRVLIESTGRLELEFVCAANKAGLPIVVCNPSQIRSFAKSAGRLAKTDKLDAIDIAHFGEAMKPRLQVLKPEELREISDLLTVRSQCLEMSTMQKNRLQRMPKSVHKPIQTILNTIKKELERIDKQLDKLVNSVSEWRQRRDLLLSAKGVGNVLAYTLMSELPELGKLNRKEIAALVGIAPMNRDSGSFHGKRHIRGGRHRVRTVLFVSIMSAIQHHPKLKPTYKRLVDAGKPKKVALIACMRKQLTILNTMVKNNTYWDENMA

SEQ ID NO: 453414 - protein, 485 aa, unidentified
MKQTKSSPCGRAIPAHGGQLSRKERRELARQVQSEQVTLQIVHSNAAGIDVGKNTHYVAVPPDRDAESVRYFDSCTDGLQQMVAWLKKCGITSVALQSTGVYWIALYDLLQEADFEVYLVNARYTKSLPGRKSDVQESQWLMKLHTYGLLPNSFRPPQEIRWLRSYWRQRQNHVRSAASCIHRMDKVLTEMNVRLSSAVTDLSGATGLAIIQAIVDGERDPHELAAYRDPRVKATQEEIARQLHGNWQADLLFRLKQELQGYRFYQTLIAECDQELAQLLRAFPDRSAGVALPEETRKNRRKKKRGNSPQFDLRQLLYLMSGVDLARIDGIDVITAMTVVAEAGYDMSPWPTADHFVSWLRLAPDNRISGDKIIGKARTPTQNRLSQALKMAASSLKASKTYLGARFRRLRARRGPAIAVKAMAAKLARLVYNMLRHGMEYVDRGTEFYEQQQRERRLHALTKNAAQLGFQLVPTELSLAGTGTI

SEQ ID NO: 453415 - protein, 330 aa, unidentified
MDLSVQSLGIDVSKATLNYCLLGSGGEIKEEGVVANDATGIHELSSMCGDDTGSIHVVIESTGDYHLLATLMLNEAGYCVHLINPLLTHMYQRANVRKCKTDKADARLLGRMGVEHREDLSVFHLTTDQVVLKKKAALIHQLTKTKQRLASSLRQTKETLDILGDGSSAIETGDKAVKAIEDTIENLEKEVTDAGKQDPMVAKLAEIPGVSEKSAALLMSAFLGKRFDSKEKMTAFAGLDVSVRQSGTSIRGKGRLSKRGNPGLRKTLFGIAWGLKQHNEAFKRLYDYYRGKHKHYTAVMNILARKFLHVLFGMMKNQTPFNPDLIVLPS

SEQ ID NO: 453416 - protein, 349 aa, unidentified
MTVYVAVDFHAREQTVSYCDLADGEIHRRKLRHQHDDVRAFYQQFTGAVIVAFEASGYSAWFEQMLAELGHTVWLGNPAEIRRKAPRRQKNDRRDADLMLDLLLKGDFPRVHGFSEESRTVLRQLRYRHKLVKVRTIAKNSLHAIGINAGLPLKRRLLTEPGIAQLQALSLSPVLTQQRDEWLQLIALMNERIATVEAQLQQRAKDDAAIALLRTHPGIGLLTSLALRYTLLPTARFSTTRQVTAYVGLDCMEDQSAERRRMGSISKAGSKLLRFLLNEAGHTAARHDPELKKFYRRLLHRRDKPKAKVAVARKLLVRSFIMLRDQIDYAEFVRRGVAARVAREAHSLP

SEQ ID NO: 453417 - protein, 380 aa, unidentified
MEPAPSLTHRGRAMGDHNAFVGLDVHKESIAIAVAETGRSGEVRFLGEIRNEAAAVVKLARKLGRSYPSVLYAYEAGGCGYGLHRQLTRLGHDCVVVAPSKIPRVVNDRVKNDRRDAVSLARLLRADELSPVWVPDEGHEAMRDLVRARHAAAEDLRKVRQRIQAFLLRHERRYEGSPWKKMHAVWLGRQQFDHPAQQIAFQGYLSGAAHAAARRDELEGQIRELLARWSLRPTVDALQSLRGIALITAVTLVAEIGDIRRFQRPGELMAYLGLVPGERSSGATIRRGGITKAGNSFARKMLVESAWSYRRPARIGVEMRARMPEVADSVREIAWKAQVRLCGRFRHLTARGKKSQVVVTAIARELVGFIWAVSQATTAA

SEQ ID NO: 453418 - protein, 415 aa, unidentified
MALKIVYKICCGIDVHKTFVVACIASTDNKGITSYESHRFSTYTSGLKDLLQWLLTRNCKDVCMESTGKYWIPVYNILESDCSIVLAHPKYVKAIRGKKTDKKDAKWIADLFKHDLVAGSFMPPADIRQLRDLMRYRFKLTCFKSSEKNRLQNCLTVSNIQLGNVVSDTFGKSAQAILDKLLENPADTSFDLEPLVFRSLKKKLPELRDAIDGYITPEQAGKLKIIKAHYENLESRKAELENLILALAAPYQQELTILQTAPGISSEFTAIGIISEIGTNMEAFPSAKHLCSWAGLTPTNNESAGKKKSVRVSKAGCYIKPLLVQCANAVVTSKKHPEMRNRYLRLRKRRGHKKAIIAIARMLLTALYHMLKNGENYNAELYQKSDLPPVDREITVEQALIITRNQGYKIKSATI

SEQ ID NO: 453419 - protein, 425 aa, unidentified
MTAREEVTPAATWVAIDIAKRAHAVLIETPDGKQKRFRMNSTQGDYVRLIDLLRACPAPVRVALEATGDYHRTLAYRLLQEGFEVCLVSSLAGARYREAMFNSWDKNDPKDAGVILALLKQGITQRFIDPLIAGHHGLQELSKTHYQISLARTRLQHSLLTHYLPLYFPEVERYFHTAQASWLAQFLLRFPTAASVRALPFETFQREAWEVVGRKVNKRTWIRELYDAAHASVGLPVVDGDVAIETFRLQLRRYQQLIEQRDALVETARRLLQGRPDYESLCSLPGIGPVLALTILAEAGDLRRFAHHRQFLKYCGLDLAKCQSGQFRGQEKLSKRGNARLRFAFWFAATVAVRMRENSFREKYERYIQTDPLNADRKRKALTAVAAKMARVAYSLVKHQASYRCYFETSLPRGSTPLCAAVGTS

SEQ ID NO: 453420 - protein, 394 aa, unidentified
MTKLFVGIDVAKDMSSAQGIDSTGRGCFSLTVAMDSGGFMELWTAIMLHCKDLSEVIVAVESTACYHINLFSFFTAKGVNTVVINPLLISNFAKLSLRKTKTDKKDAMTIAQFLLVHRDAISHLSLSQDLQDFRDIAREKESVSHMISAHKVEIKRILQTTFPELENLCNITTRVMLDFIQEFPSARLVKAAKPKAIQKVLKRKGVDTRLTYTAEDLIQAARSLVATISPAKELIVKGKVATLQHLQQRHDELATVLTDYCKSAMLEDLEIITSIDGISTGTATTFLAEIGCIGNYASHRNLIAFAGIDPTVYQSGKFQGASRISKRGNRHLRRVIWLMTVNVIQHNSIFKNYFLKKRKEGQPFKKAVFATAHKLMRVIFAMLSQRTMFKEACA

SEQ ID NO: 453421 - protein, 400 aa, unidentified
MNAVGIDVSKGKSMVSVLRPFGEVVAKPFEVCHTAGELRALADYLKSLDGETKVILEYTGRYYEPVAQLLHDAGLFVSAVNPKLIKDYGNNSLRKVKTDKADSRKIARYGLDNWVELRQHTPMDTIRYQLKTMNRQYGLYSKTKVSMKNNLISLLDQTFPCVNTLFSSPAREDGSQKWVDFAASFWHLDCVRGLSLAAFTQRYQKWCKRHGYNFSSGKAAEIHEGAKNQIALLPKDAMTKMLIHQAIEQLNATSKTVELLRTEMNRLAQQLPEYPVVMAMGGVGKSLGHQLMAEIGDVTRFAHKGSLAAYAGVDPGANQSGTREANTTLQDKPIAASHTMGAALSAMPTRQPAAIGRHDEPDTTKAVYHPLHGAEYRLFVIPSFGLYGLSKTAWDWYDIL

SEQ ID NO: 453422 - protein, 374 aa, unidentified
MYIGIDVHKNSCYLTALNEAGNVLEEKEIETSHIEDWIRTINTNCKIAMEASTASKPLYHLMKEHKLNVLMAHPAGLRVIAESTQKTDKSDSFHLANLLRMNYLPCSYVPDETYERMRNLCRYRVSLGRKMTKIKNEIHALLTRNSIKMKQTDIFGRDGLDNLKSLHLNDIDALLLHSLLEELNYLTEKAQTIENIMAGQGKHIPEVTQLMTIPGIGYYSAMTILAEIGDITRFPNSKKLCNYAGLTPRIRDSGEIIIHGRISKKGSPTLRWILVSAAHAVLRCRKGNTKLRKFYTHLIRRGKAKQVAVVALAKKLLLVIYAMLTKKTTYEDGDKRLLEKKMIAMNGRATTIPETNFQQELYKLKHKSKVLGVG

SEQ ID NO: 453423 - protein, 463 aa, unidentified
MQEPLPHNSIDVFVGVDVGKGQHHAVALDRSGKRLYNKALPNDEAKLRALINELKAHGQLLFVVDQPATIGALPVAAARDEGVLVAYLPGLAMRRIADLHAGEAKTDARDAAIIAEAARSMPHTLRSLRLADEPLAELTMLCGFDDDLAAQVTQTSNRIRGLLTQIHPALERVLGPRLDHPAVLDLLERYPSPAALAATSEKTLANRLTKLAPRMGKRLAAEIVQALSEQTVVVPGTQAATVVMPRLAKQLAGLLQQRDEVASEAERLVHAHPLYPVLTSMPGVGVRTAARLLTEVAHKAFASAAHLAAYAGLAPVTRRSGSSIRGEHPSRRGNKVLKRTLFLSLRLRPCETRSHAPTTRARSSKESVTTKRSSRWPDVDATSCSPCCATGPFTNPKPPLTLDETHRGTPCGSEYPAIRNASLPPWHVSGVARQSAWHSGLVARPIGVRDPLHCRCGFALNQE

SEQ ID NO: 453424 - protein, 424 aa, unidentified
MKFKMQNKQNQLIERISVKHLVVGVDIAQQFHVARAVNFRGIVVGDPLKFKNNEEGFASLLEWIKNLQRLNNLDEAIVGMEPTGHYWINLSKWLSNQNIEVVTVNPHLVKKNKENRDNTQSKSDKKDALVIADMVKNGYYSEVRYTSEPFEKLRVLMSNRDVVVKRLVSSINQLNRWVDIVFPELRQVFKDIKAKGAIATLRLFPSPMGLETMQPHEVITGWKSVMKRQPGLKKALLLLQLAKKSVGTRQALDAYKFHLNQLLEEYDLAVTQLERVEQQVTEALNKIPFAKKLLTIKGISDISLAGILGEAGDLSQFSHGNSLLRHAGLHLAEASSGKWKGQIVISKRGRSRLRRFLYLATMSLVMNNPEFQALHSHNVKVKKMKKMKSIMKLIGKLARIFVSISSRNESYCPDKLKPFSPIAA

SEQ ID NO: 453425 - protein, 408 aa, unidentified
MRIVGLDIHRVFAEAVMLDDGRAVRLGRIGMTREHLAAFARKLRRDDHVVVEATGNATAVAEVIRPHVGRVAIANPRQVRLIAEARIKTDAIDATVLARLYASGFLPEVWVPDQNTLALRRQVTRRNQIVRQRARLKTIIQSILHAHLVPPCPHADLLGPKGRAWLLGQALPADEQDAVARHLREHDRLSEDLRVVEREIARDALADEDTKRLMTVPGIDMVVATGLLAAIGPVERFAGPDKLVAYLGLNPSVHQSGDGRPRHGRITKQGRTHARTMLVEAAWQAVRGPGPLRAFYQRIAQRRGNHIAAVAVARKLAVIIWHLLKRGEDYAWVRPALHAKKLRDLELRSGQPARRGQRGMAYKYNLSRIRLEERRRAEQAETAYKRLTEAWIPRGKRAPTGAAKEERP

SEQ ID NO: 453426 - protein, 453 aa, unidentified
MVQRKQKISIKPGKSREPLTITHPNAAGIDIGSSSHYVSVPPDRDDEPVREFPSFTVDLNALADWLDACGVDTVAMESTGVYWIPLFELLESRGFKVFLVNARHVKNVSGRKSDVLDCQWLQQLMTYGLLRGAFRPTEDVCVLRALWRQRGMLLRGQGRQVQHMQKALAQMNVQLANVISDVVGETGQKILRAIVAGERDGQVLAAMKNARIRATAAEIAKSLQGNWRAEHLFALKQALDMFDFIGTQLAECDNKIEGQLQNLQVHDGEPAKGKKRGRTRNAPKFDLRSQLFKMCGVDLTRIDGIDVTTALAVISETGTDMSRFPTAGHFASWLGLCPGTKITGGKVMSGKTKRVANRAAQALRLAAAALRSSQSALGAYFRRMCGRMDKPKAVTAAAHKLARMIYTMLTKGEEYTDQGQDYYEERYRERVLRQLVQRAEKMGMKLVAKEQPA

SEQ ID NO: 453427 - protein, 378 aa, unidentified
MNRIIKIGMDVHTTNYTLCIFEPSFEHDGTVHCITQVKPEVKNIIHVIETFKKKHENEELNIVCGYEAGCLGYSLYHELKEKGIECVILAPTTMKTEKGGRKLKNDYRDAKMIAECLAYGGYSAVHVPTELDNSVKEFIRMRDDIKENLKSIKQQIIAFLTRNGKQFEGKSFWTRKHIDWINTVSFSEPLLQDTLKEYMIEYNHLCDRVETLDRQIEEISLKEEYVEKVQQLQCLIGIKTHTALSLIVETSDFNRFKKGNMYSAYLGLIPGDDSSGGQENKLGITKAGNSHLRKLLVEAAQGYTRGKVGFKSKVLKSRQEKCSSEVVAYADRANERLRRKYYRMTLRGKRYNVAKAAIARELACFVWGIMTDHIDLCS

SEQ ID NO: 453428 - protein, 355 aa, unidentified
MVVVGTDVHKHNHTFVAVDPVGRELGQLTVKAVSSGHARAVAWAREQFGTELVWAIEDVRNLSARLERDLLAAGQHVVRVPTKMMAAARAAARTRGKSDPIDAAAVARAYLHDPDLPVASHDDVSRQAKLLTDRRDALVVNRTRLTNSLRNRVHEMDPDREPGPRKLTALKHQEHLRQWLSTQPGVLAQIALDELDDIIACTRKIKAYDKQIRDLARQHAPALLDIVGCGDLSAVKLLGESAGALRFKSEAAFARHGGIAPIPVWSGADNNKKVRLSRSGNRQINAAFHRIAITQIRDKNSQGHAYYAKQRAAGKGKADALRRLKRHLCRITFRALTTDHERRQPTPTTALQTAA

SEQ ID NO: 453429 - protein, 355 aa, unidentified
MKIVGCDLHARQQSIALLDTETGELIERTLDHETDQVREFYSSLTGPGVVGIEATGAMQWFLQLMEELEIECRVGHPAKIRAAETRKQKHDRRDALLALQLLLEKRFPTIWMPSTEQRDLRALLRDRHQWVKMRTRVQSTLQAIALNHGLRKGKALWSQAGVACLEALPLLPYTGQRRNELLRLYGQLQKRIQELNQQVEQAAEQRPQARRLLTHPGVGVVTALATEVFLGDPRRFAHGKAVASYIGMIPCEHSSGPRQRLGQLSKQGNALLRYLWCEAAMHAVNKDADLKRFYRRKLVQKGMGKARVAAARKLGIRLWIMLRDQIDYEEFCRRGRQEGEAHAGMPDSNSGPAVQ

SEQ ID NO: 453430 - protein, 413 aa, unidentified
MSSTLIVGIDISSELNAASFIDETGNRLVKKTFFFPNNLDGAQQLLNFTISLAQQYNISSIKFGMEATSHYAWHLHTFLASSPELAPFNPLFYVINPSIIKSFKGAYIHLPKTDSIDAAVIAECVRFGQVKPTPLPDLRYAALQRLTRMRYHIVRSLVREKNRALSLISFKFSTYPSECPFSNIFGKASLAIIENFTPDDIASMPLDDLIDFIVKNGNNRLSDPTQIAKTLKAAANRAYRLHPDLAEANDLALSMTLENIRFLESQLKKLDGEISRQLKAFSQTLTTIPGIGDVLAAGIIAEIGDIKRFNNEAAVAKYAGLIWNKYQSGNFNAQDTSLVKCGDQYLRYYLVEAANCVRVHTVRFKDYYNKKYREVPKHQHKRALVLTARRLIPLIFAMLSKGQIYQERGVASI

SEQ ID NO: 453431 - protein, 416 aa, unidentified
MKIWQQLTHYAGFDWARDHHDIVIVDPQGQVAAEFRIPHTLAGWQDFRQKVSAYPALGIVIETNQGAAIDQLLQIDLTVYPIHPIAARRYRERKSPSGNKTDRLDAWAMADALRLDGSAWKALQPLDPLTQQLRLLCRDEMSLIEERTALINQLRQALSEYYPAALEAFDDWTRPSTWKFVIEFPTPEILLKRKRSRWEKFLHKHKLWRPDTAEKRLEIFAGAQAFCGSPAVTAAKSLLAVSLARLLGALQNQLDEFRSQIEKLFEQHPDSGLFGSLPGAARYLAPRLLGEITADPGRFDDPQALQCLAGTGPVSYQSGQIHKVRVRHQCHKLLRHIIHLWADCARHAAPWAQTYYKKKRQDGMSHACALRCLGQRLLKILWKMIQTHTPYNADLHTQNQLAHGSWVLQLMPPKLA

SEQ ID NO: 453432 - protein, 408 aa, unidentified
MDVIYRRCCGVDVHKNKITACLMTGHDERVVKEFNTITEALRELVGWLKAEGCEMVAMESTGSYWKPLYNVFELEGLSAMVVNAAHMRSIPGYKTDKRDAKWIADLLRHGLLRASFIPDKDQREFRELTRYRVSRIEERAREINRLQKFLEGANIKLASHVSNIMGKSAKRLIHLAITHDELNHEQIGEACDHRIKATIEELKASLTGIISPLQRELFAEVLRIIEEQTEQIERIEILIRKYTTEAYNAAAEAIDEIPGIGRKSAEQIISEIGVDMSRFPTAGHLCAWAGVAPGDNESAGRLKSGKTRQGNKALKKTLVQCANVVIRNQDSFFHAQYQRLVVRKGRKKAVVAVAHSMLIAIYHVLSGKKFCDLGADYYIQFNREKKAQSLVKQLKRLGYDIDCPVMIA

SEQ ID NO: 453433 - protein, 315 aa, unidentified
MTTITETYVGIDVSKDRLDLAVLEGSRIRQYANTVGGIKELVKEMKELMPALIVVEVTGGYERVVVQALFEAGLRVARVSGYRARQYARAKGLLAKTDPLDAMNLADYGKHVQPRLFEAKSEQGECLSGKLGRRRQLGEMVKAEKNRLRLAYGDIGQSIERVIEFLQGELKQVDEEIRAYLDKEPEWLEQEQLLRSVKAVGAVTAVTLLAELPELGKLDGKEIASLVGLAPINQDSGKRSRYRKTGKGRPSVRSVLYMAVLTGIRYNPVIKKQYDGLVARGKVKKVALTACMRKLLTILNAMMRDQVPFRQTVIA

SEQ ID NO: 453434 - protein, 341 aa, unidentified
MQITTIGLDIAKNVFQVHGINAADEVVVRKQLRRGQVMAFFEALPPCLIGMEACATAHYWARELTKLGHQVRLMPAKDVKAYVKRNKNDAADAEAICEAVRRPTMRFVPVKSAEQQARLMQHRVRDLLMRQRTQLINALRAHLAELGIAAAQGRTGVKELLAIVAQDGDTRLPVDAHASLMVLAAQLQAVQTRIGLIEKRIVAQHRSSEESKRLQTIPGIGIIGATTIAALVPDPKVFRSGRDFAAWIGIVPRQDSTGGKQKLGPISKQGDRYLRRILIVGAHSVLRRARQEPEKYPWLTQLLARRPFKVVAVALANKMARIAWALLAKGGIYRAPQLMAA

SEQ ID NO: 453435 - protein, 475 aa, unidentified
MNLKGKKTKNQVVAANIFEQQELLKKAEVIREKLTASTWHELETNGKFDKNAKLSFISDDMLILGCDVGSETHYLRAIDTRGRELSKSAYSFRNNCEGFQSAKEWAVELAAKNEKKQIVLGLEPTGHYWFCLATWMIANGISVVQVNPYAVKQTKEVEDNSQLKDDTKDPKLIANLVKDGNFGMPYLPEKVYAELRRLSMFRDQLNEDRIRAINRMHREMKIYFPEYKEALGRVEGAFSLELLRQTPFPGEIQTLGEDGIRQIWHDAKLRGRGYSRVREIVGYAKTSVGMKDGAEASAMAVKWFVKEIRELDEKLAEIEKLMREKYQEIPYAKNILEISGIGENTLSGILAEMGDISRFDDVKEIQKLSGLGLVACSSGKHKGETKISHRGRKRLRYWLFQAAKSAVAHAEEFKELHVYYTTRTDNPLKKMQSLIVIACKLLRIIYGILKNGTVYDPKKMLRDIRRPEKKEVIAA

SEQ ID NO: 453436 - protein, 425 aa, unidentified
MKEEAQKEPEFGVYIGLDWADRTHVISLRRNGSNKKERYVVAHTPEALAEWVSGLQQRFPGERIAVALEQSRGAVVYALMGYDFLVLYPVNPKTLAKYREAFSPSGAKDDPTDADLLSELVTLHRDKLRAWLPDDEQTRTLTALVEYRRDLVDSQTRLTNQLTSLLKLYYPQALAWAGELTTVQACDFLQRWPTLAKVQQATPAKLRQFYVQHGCRKADLIERRLQEIKLAQPLTRDGAVITASLAMVQASISQLRPVMEGIAQMEKQIAALFSQHADHDLFSSFPGAGPVLAPRLLAAFGTDRGRFATATEVQQLSGIAPVLERSGKTCWVHRRWACPKFMRQSFHEFAGQSILRSAWARAFYDQQRQSGKGHHAALRSLAYRWIRIIHRCWQMRVPYCEETYCRALERRQSPLARVLAAQTPN

SEQ ID NO: 453437 - protein, 350 aa, unidentified
MIIGVDYHPSFQTIAFLMEETGECGEQELNHSDGQAERFYRDLKQRGICARVGMEATGYSRWFERLLAELGFEVWMGDPAEIKAKRVKKQKFDREDARLLRRLMLENNFPQIWVPGPENRDLRQLLWHRHRLVQMRTRIMNQLQALAMNEGYRWKKKLFSAPGRALLEKLSLAPWASRRRQELLELLDRMNPTIEELTAAVEREARKRPEAMRLMTHPGVGPLTALAYVLIIGTPTRFQRGKQIGTYVGMIPCEDSSAGKQRLGHISKQGSSLLRFLLVEAAQAAARIQPDWRRRYLHLAMRRHKSIAKVAMGRRLAVRLYWMWRNGCEYSPSLECGSYVGQLGTGHGVQ

SEQ ID NO: 453438 - protein, 436 aa, unidentified
MFVGHRFRTDPDELDTLWARLPKDAERIEVVMEPTRNAWVALAAWFRRHGATVVMVPPEQSADLRDYYNKHTKTDRLDSKVLARLPLLHPEGLHREDSLGPGDELKRAVKIRSGLVHRRTACMARLDALLEILGPAWIAALGSDMTLTALRFLARYANPVQVKRLGKARLAAFFRRSSRQAWADERADAIIEAAATTLRLWGADGSELDFDALAADIAAEARLALTLTDEINGFDKRIGALYDKADPAGIVRSVPGAGRVCAPQILGRLGDPTRFANLAAVRSFAGLVPAADSSGQADGHRGPTKAGDCCLREALFIAADHARKVDPTLAVRYQRLMLAGKHHDSAVCTLAAVLLTRIAACLRAGTHYLLRDTDGRVITEAQGRAIVAERYTVPPEVRAARRKVTPHRHPRRNERNERAKTGVATRSKASPVPQPA

SEQ ID NO: 453439 - protein, 430 aa, unidentified
MKFKRSNRINQRIERISTHHLVVGIDIAKETHVAGPVNFRGIELNSTFSFSNDREGFERLMRWVAQLQKKHRLTKVIFGMESTGHYGVPLAKWLLGNNQEVVQVNPLTTKRNKENRDNRPSKSDPKDAIIIADAVSRGYYSDWVWTEGIYHKIRCAVNEQEALADDLASIGNRLQMLLDQAFPEFTKVFKDWSCPRAIATLKSFPLPEDLAGLCIEQIIANWYEAGMRRAGGTRGREAAARLLAAARTSVGISESTAELRREIKRTVRRYEWIAADKQTVEDEIQTLLVQVPRADLQPLDELGLGPFIRAAILANTGPLKNYKHGRQVMALAGLNLCESTSGKRKGQIVMSKRGRRQLRKYLYLAVVGLVANHEAFKSWHEHNVQHLKMKKQQSIFKLIGKLTRIMIALAHSGDTFKMHRANPLEQAVAV

SEQ ID NO: 453440 - protein, 427 aa, unidentified
MNYTQNHKISQITPSTLVIGIDVAKEKHVARAQDDRGLEFGKRLIFQNRFHGFELLLEWAHRHAKENSKDHIIFGVEPTGHFWLNLAYYLTAKGYDIVLVNPMHVKKSKELDDNSPTKNDTKDAKVIAQLIKDGRYSVPNLLDGIYAELREGVKIRDQLIQQLMITEGRIQNMIDRYLPEFFDVFGDWEGKAALCTLKLFPFPSQIVEMTPEEILQEWKPFVQRGVGIKRATKLVEAARKSIGLTIGTQFAQREMDNLLEQLELFRKQLEDLDQELEGIVRTIPGANEMIDITGLGVATVTTFLSEIGDLKNYKHPQQLVNLAGLSLRENSSGKHKGKTTITKRGRSKLRRAMYMAIRPLVAHNPTFKALHHYYTKRPDRPLKKQQSLIALCCKLLRVIFVIGHKQCQFDGSKLLQGIPQENLLQVA

SEQ ID NO: 453441 - protein, 407 aa, unidentified
MKKLYVGIDVHLKQHVVSIVPVTTFQDNKTGWKKTRSIKIGNNRQDFEYLDLLLKSQITKVNQVCVAIDHTGGHYSEPISYFLKSKGYEVYYLGTASVKAAKERLLGEENKTDKIDSATLAYLLYLRDLYKINLNITATSADFESQSYLLRSLLLQSQYYRKLEKQTTNRLHQYVHAVFPEGEELYFSPLLNILSTHPTPEDILSDPDVFKKSRISLKSRKAIRELAKKTIGVPGQTYKSIIQDLALLRISNKEKTSSIDRTIRELVVEHPYSSVLMSFPGVKEKSAAIIISTVKNINNWQNKKKFKKGLGVYGTVRETGENHTKFKRGLSGDRMCRQCLFMACFTAIRLKDNNDFKDFYEGQVRKSKPRIKALVATMGKLAEIMYHCLKFNEPYQYQSSCNIKPEG

SEQ ID NO: 453442 - protein, 347 aa, unidentified
MNFYNSSHPYYCGIDLHARLLYVCIIDLQGEILVHTKIKADKSQLLALLEPYIGNIVVGVECMHCWYWVCDWCQQQGIDFVLGHALYMKAIHGGKAKNDKIDSFKIAALLRGGNFPLAYAYPHEMRATRDLLRRRTKIVRHGAMLKGHVVNTNSQYNLPATELNLKNISARQQLRSQFKDPIVQRNIDLDMALLDCYAKELAQVEWFIEQKAKQHNAVFYELLKTVSGIGRILALTILYEIGDIKRFETVQNFASYSRLVKCKAESAGKTYGTQGNKIGNAHLKWAFSEAAVLYLRGNDKARNYINKLQKRMSKAKALSALAHKLGRCVFFMLKNKTVFDEERFLKG

SEQ ID NO: 453443 - protein, 392 aa, unidentified
MRISVGMDVAKAIHWACAIDEAGRTLLDRAVENTPEGIASFAADLRALGGEPVIGLDVVGSFAHFLGASLLAEGFRLVHAPGIAVNRAGQGFAGGESKSDPRDARTIADLVRTRELRPILPDDETVTAIRLKVGRRRDLIEEQTRHLCRLRGLLSSIHPGLERDLDVTCKGPLVLLTRYVTPAEIRHAGKRQIMAHLAKTPHVQGAEALADHALAAARAQMLAVPGEAAMAELVREMATEALETRTKIARLDRDLAALLAVHPDGALIQSLPGMGAVLAAEFIACVGDIRRFPSADALASAAGLAPVIRQSGRKAGWRRTYGGDKALKRVFYQGAFCAVCRKDPLSKAFYDRKRREGKHHTQALIALARRRVSVLWTMIQRRKTYDPLFKAA

SEQ ID NO: 453444 - protein, 392 aa, unidentified
MYIVGIDIGKNHHEASIVSPEGKQIGRSLRFATTHKGADSLMSFIFKNIGNSPCVFGMEATGHYWYPIYSFLKAKGYTIYVINPIQSDSLRKMYIRQTKNDSIDSFLIAEVIRFGQFTTTSMADENILAMRQLCRYRDSVISSRTEIKLRISTIMEQIFPEYEKQFSSLWLSTSMGILEKYLTPENIENAPIDELFEIIKDKSHNKLTMKKAISIREAAADTFGIKIAQDAFSFQLKQLIDRMNFLDKQIEALDCQILEYYEKFDCYLHTIPGIGMIAAATILAEIGDINKFKSSSALVAFAGIDPTVRQSGEFSSTHNHMSKRGSPYLRHAIFLAATTCSFHNSPLNAYYKKKRDQGKHHLTATGAVARKLTTIIYAVLRDSKPYEPKKFC

SEQ ID NO: 453445 - protein, 413 aa, unidentified
MIVEQKGVVSESTRFVGLDVHRRYATVAAVDSKQQVVLTARRIDFNDFDEWVRKHLRRTDVVTLEATSNAWHLYDMLVPLVASVTVANPIQVALIAKARVKTDPRDALTLARLLAVGMLPSVWVPPVEVRELRALGGHRRRLIKQRTQARNRLRAVLYTHNLFPPAGEAFGPANRPWWEGLDLPASEKLRVRHDLSILDSLEPLVKGVEAELVRQSSLAPWAEQAAYLVQLPGIGVHNAMLLLAAIGDIARFDAPHKLVGYAGLGASVHSSGEEHYGGRITKQGRRDIRCTMVESAWVAVGVHPYWKELFERLAVRVGRPKAIVAIARKLLVVVWHVLAKQVADREAVAEQVAGKFLEWSWKLGRVNRDGLTSGAFIRRELCRLRLGDKVTAISRGKRKFPIPRSERADQAVG

SEQ ID NO: 453446 - protein, 374 aa, unidentified
MVNNSLIGKAGGGEASVASRATTTRRREIYRVQVFKAVAEQDPRRHCGTSPNSRLNRRRPTRSASSHLQVREKTMSESVYVGIDVAKDTFSVACCPAVLKTCLPSTPNGHRQLCQSLKNHNIALVVLEATGGYERPIVAELLDAGLPVVVVNPRQVRDFARGLGQLAKTDSIDAQVLAKFAQLVQPAARPQKTAQTSDLAELVHRHRQLNDLRSQESNRLSLVHHREVRKSVQKMLKMLDRQIAEIDELISRHIRNNDNFRQKDRILRSTPGIGPQTSAMLLAQMPELGSLNRQEIAAPAGLAPWDCASGKWLGKGHIWGGRKDVRSILYMAALSARNCNPVIRQFAQRLEQQGKAFKVVITACMRKLLIILNQ

SEQ ID NO: 453447 - protein, 408 aa, unidentified
MKRYYIGVDWGDRLHQVYVGDDEGKKVREIKVPETVEGLAEIGRWLDEKRAEGFELWAAIEKPAGRIVDFLLDHGVEVYPVNPKAVDRVRDRYRMSGSKSDAFDAYVLAEFLRTDHAHLKALRPSSEKAQELKLLSRDQRRVVRHKTRFLNQLTTTLKEYYVRPLEAFENLETEVALDFLQQYPTPAHLSALKRKQFNRFATKQHHLSKQRCEELWEKLNKPQLGVPEHVVRAKAQLLEVLIEQLRASIKAVKIYHHKVESFFASSPAAEFAQTLPGGKSGTLVAAIWAELGDAQGRWESSRHLQAEAGAVPVTKASGKSRVVHFRFACNKHLRYAMYWFSFVSLNHSEWAKLYYRGQRDKGHSHPQALRALGAKWLKIIFVMWRDHKPYDENYHLANIALQKMRQAA

SEQ ID NO: 453448 - protein, 381 aa, unidentified
MQSIKTWVGVDVSAKTLMAKRRRKNGDTEEAREFSNDAAGHRELLKWIGKGARVCMEATGVYHLQLALMLVAARVEVMVINPRVAKDFGRALMNRSKTDRVDASTLLEYVWRMEFVAWNAPRGAVLELRELGRRLSELVHAGAEEKNRFHAKNVAAISSAVIRDVQAHVVQIEKRVKQIEKAAAVVIRGDAGLSEQFAILTKIPGVAQRSAILLLTELAVLDPAMTVKQIVGHAGLDPREYESGSSVQKPTRISKLGNARLRAILYMPTLTAIRHDRGARLFFAQLLARGKKKMQAIVAVMRKLLHGIWIALQRRVTFDCSILFAASLAKAESSDSAVAANQPESRQDHPKGRSEAQELRQQLDPVWAQATRSRRRRSKAA

SEQ ID NO: 453449 - protein, 343 aa, unidentified
MQTITTIGLDLAKSVFQVHGVDAGGQVIVRRQLKRRYVLTFFQKLSPCLVGIEACASAHHWSRELQALGHTVRLMPPAYVKPYVKRQKNDATDAEAICEAVTRANMRFVPTKTSGQQSGLLLHRARHLFIRQQTSVINAIRAHLAEFGIVAPVGRHGVEELLNVVTDPNDKRVPEMARACLSALGDQLQRIKQQILEFDRLIRTWHRSNEMSMRLEAAPGVGPVLATALVAAVADPKSFRSGRNFSAWIGMVPKQHSSGGKNRLGNISKQGDRYLRGLFVAGALSVIRYAKIHGTKHRPWLTALLARRPTKVAAIALANKIARMVWAMMASGERYKEPVALAR

SEQ ID NO: 453450 - protein, 382 aa, unidentified
MDTAATCSFEYTLERVLYMAIELDNNRWKLGFTTGFGQRPRERDVPARDTAALQREIRAAKRRFHLPADCPVLSCYEAGREGFWLHRYLIHHGINSLIVDAGSMESRKRRRRAKTDRIDMEKLLRMLIRYHAGDEDVWSVIRIPSTGAEDRRHLHRDRWTLSGERNKHSNRIKGLLASQGISLFVNGNLPEKIDQVRTWDGSPLPPGLKDRLLREHERFRMVEQQMKAIEQEQRQAIRNPDHPSVTMVRDLMRLKSIHIHTAWPLAMELFSWRQFQNGREIGALVGLEPVTHQSGETSREKGLSKCGNARLRSLAVEFAWQWLIHQPDSELSLWYEERFGKGSSRVRKIGIVALARKLLIALWRYLETGEIPKGAVLKAASV

SEQ ID NO: 453451 - protein, 341 aa, unidentified
MSLIKAVGIDLAKLVFSIHGVDVNDKCKLRKTVKRNKLLAEVAKLPPCIIAMEACSGAHYWAREFTKLGHDVRIMASKFVIPYRQNEKNDANDAEAICEASTRPKTRFVSIKSEEQQAVLCLHRIRQGAIKDRTARINRLRGLLSEFGIIIPKGRYPLQNAMSGILEDAENGLPFLARELLNDLWQSIKGLNEEILKYDRKLYALANQMKDAKRLMSIPGIGEITATVVVATVNDAKHFETSRSFSAWIGLVPRQYSTGGVVRLGRISKRGEKHIRTSLIHGARAVITNCKNKTDRTSLWVKELVERRGFKRATVALAAKNARLIWALLHSEKEYQVDYVK

SEQ ID NO: 453452 - protein, 430 aa, unidentified
MKNASRSNRKLEAITYRTIVVGIDIAKNRQWARFVDYRGMEIGKAVSFNNDREGFEYIVAEIEAKIKTFDAEKVIVGMEPTGHYWKPLANYLMKQDITVVLVNPYHTKKAKELDDNSQTKSDKKDALTIAKLVKDGRYYDTYMPHDKYADLRVLTTTRISLNDKKSSIENRITAVLDEYFPEFTTVFKHPYKGKASMQILKSCPLPKDIKALGVDGVLTEIRKAVKRTVGRKTAEKLVNAANISIGVDYGEAEATFKIQKLVEELELVNKQLNEIEERMGKILDDLDIGKYLLSVNGLGVVTVAMLLGETGDPHRFVDAKQISRLAGYNLIEDSSGKNKSGTAISKRGRKNLRRVLYQISLTMVATNSEMKQLYHYLKTRKDNPLKKMQALVVISKKVLSLVYALAKKKEYYRSDRVLGEVRQNQLLLAA

SEQ ID NO: 453453 - protein, 336 aa, unidentified
MVQIYGIDLGMSSFDVSFLSESGSVRHLSGVKNTVHGISKFLLSLPSAAVLCAEHTGVYGDLLLRLCTLNRTCLCFVPGYQIKHSLGLQRGKSDPLDACRIREYAERFYDLLRPCFYPGEEMSELQELYRTRSLLVDSRKRLDTLNIGDNCKSSVSLAADHARRAVLAELNTQISGLDHEIEALIQNSSEFSRNYQILTSIVGVGPVTSCELIIKTENFRKLDTAKKCAAYAGIAPYPKESGKMKCGHKISPMGDKQLKTLLFLCARSAKEHNKEIRLYFLKKHKVEKKHFFVAMNNIANKLLRLIYSLIQKQQTYDRDYIQRDPRCVVISDTHKC

SEQ ID NO: 453454 - protein, 386 aa, unidentified
MQASTVGTPTASHYGTIFITIELSQKSWLVTLHSPDQDKLSRHQLAGGDHAGLLALIDRIRDRAARALGGVPAVASCYEAGYDGFWLHRLLLAAGITNYVFDPASIAVDQRARRVKTDRIDGETMLRTLMAFLRGEPRVVRIVRVPSAEQEDARRASRERDRLVKEQTAHTNRIKALLRLLGMAIGNPRRRDWLSWLATQRDWQGQAVPPQMLGEIRHEHARLMLVRERLDALAKTPAQADPTPAAAQMTERSELLLRLKCLGPAFATTLTNEVFYKDFRNRREVASYFGLTPSPWRSGGIDRDQGISKAGNPRARCAAIELAWLWLRHQPDSKLTLEYRKRTLDAGKRIKRVAIVALARKLVVALWRYLTTGLVPEGAVLKTVKV

SEQ ID NO: 453455 - protein, 453 aa, unidentified
MVQCNRAVSLKPGKSRAALTITHPNAAGIDIGSAAHFVAVPPDRDDEPVREFPSFTVDLNAIADWLVACRVDMVAMESTGVYWIPLFELLESRGFTVLLVNARHVKNVSGRKSDVLDCQWLQQLMTYGLLSGAFRPAEQVCVLRSLWRQRGMLLRSQGRHVQHMQKALTQMNVQLANVIADVVGETGQKILRAIVAGERDGQVLGAMKNARIRASVEEIAKSLQGNWRPEHLFALKQALDAFDFIGTQVAECDTQIEQQLQTLQVHEGEPAKGKKRGRARNAPKFDLRTELFKMCGVDLTRIDGIDVTTALAVISETGADMSRFPSDKHFASWLGLCPGTKITGGKVMSGKTKRCANRAAQALRLAAAGLRTSQSALGAYFRRMCARMDKPKAVAAAAHKLARLIYTMLTKGEEYTDQGQTYYEERYRERVLRHLSQRASKLGMRLVAAPQAA

SEQ ID NO: 453456 - protein, 327 aa, unidentified
MIAQSTSASPVCYVGADIAKDTIELSCLHFTVPPSIKNNPEGLGTLLKCLAKSKQNVHVICEATGPYGKALVEALHQAQILVSVVNPRQVRDFAKCQNKLAKTDKIDAALLADYGRLMPQTPTPKPEPHLVVLDELAKRRAQLVEVKAKEQTRLKTVTSPKIKKTINDLVKYLDDLIDSLNSDIKDHIQAHPDLKKKAEVLSQVEGVGPATTITLLASLPELGKSDKNGITALVGLAPFNRDSGQFRGHRSISGGRYEVRNALYMAALTTVRYNPILKAFYQSLLLKGKAKKVAQVAAMRKLLVYLNSLLKNHYKEEALRSAVLAVQ

SEQ ID NO: 453457 - protein, 352 aa, unidentified
MTLVGCDLHSRKQQVAVLDTRTGELIEQELAHEGDAVERFYRALPTPVTIGIETTGYTQWFHALMHQLGHTVLVGEAAKIRAMVVRKTKTDRRDAKHLLDLLQHDRFPTVWIPDPGTRDRRALIAHRVRLVRMRTMVKNGLQAIALNQRLALHSALWTQRGLTQLKALALPPHTTRRRDDSLALLAWLTTRIDQLDAHIAAVASADPRVQLLLTHPGVGPLTALTTVLVLGPLARFPDSKHVVSYVGLAPAIHSSADKYHLGKITKQGNALLRWILGQAAPLAARADGELRRAYFAVLHRRGRPKAKVALARKLLVRLYIMLRDQIDYEEFRRRGRVRRPRIAVNPVSATTM

SEQ ID NO: 453458 - protein, 446 aa, unidentified
MDPNGNQIQLDPTEDEEIVARVAAIDVAKDSGMVCTRVPHPDRPRRRVTTVWSVPARTAAITDLAGQLTDEGIERVVLESTSEYWRPFYYLLEARGLTVWVVNAREVKNVPGRPKTDKLDAVWLAKLNERGMLRASFIPPVEIRQLRDYTRLRVDLTGERSRHIQRLEKLLEDALIKLSSVATNMMGVSGRLMIEALIAGERDPRVLADLAKGRLRVKRAALIEALTGRFDEHHGELAAMLLEQIDGLTAQIGRLDARVEQQLADIPAAQAPPGDTGLDGQPAYLPTVDRLNEITGIGRHAAQAIIAEVGLSMAVFPTSAHLTSWSKVCPRAVQSGAKTHAGKTGKGNPYLKSALGEAAAAAGRTNTFLGVRYRRLALRIGKLKALVAVARSILVIVWQLLADPTARYRDLGPEFFENRVRPERRKLNHIRQLEALGYKVTLEPAA

SEQ ID NO: 453459 - protein, 407 aa, unidentified
MAKVIIGVDPHKLSATIEVVDSHEKLLGSGRFSTDQPGYTAMRAYAKTWPERIWAIEGSNGAGRPLAQRLLEAGEHVVDVPAKLAARVRLFDTGHNRKTDALDAHSIAIVAVRTKTLRVLRPDGELEALRMLCDRREELTRLRVQTVNRLHRLLAELVPGKAKKDLTALQAKAILATVRPRDIAGKTRRKIAAEELADLLTVEAKMKKATAELKVLVKARGSRLMDLHGVGPVVAARTLADVGDIARFADRNRFASWTGTAPLDASSGEQNRHRLSRAGNRRMNHMIHIAAVSQIRLDTDGRAYYRRKQAAGKTKLEALRCLKRRISDALYRQLLADAEQAQLLCAAEPVDTGPGGHCGASQESSAVDLPPHIDTSDQPLPGPATQTLQPAGPTGKTSHPRTPQTTG

SEQ ID NO: 453460 - protein, 355 aa, unidentified
MDSTKYIGMDVHKESISIAVMNAAGKIGMECVIETKASMILQFIDGLRGNLHVTFEEGTWAAWLYDLLKPRVTKLVVCDPRKNKSMREGNQSDKIDARRLAELLRLDHLTPVYHGEHGLRTLKELVRSYLTITKDLGRVMTRVKAIYRSWAIPCTGKQVYARCHRAEWLGKINELGVRRRAELYYQQLDALRMLRQQVRRDLLAESKKQQAWKRLCQIPSMGPIRSAVLLGILQTPHRFRTKRQLWTYSGLAIETHSSADHRRVNGQLQRAKKQVLVRGLNPNCNHDLKNLFKGAAVVASSKPGPFEEFYAALVAKGMRPEMARLTLARKIATIVLIVWKRGVCFDAQHLKPQTA

SEQ ID NO: 453461 - protein, 359 aa, unidentified
MFTERTSVGLDVHARSVVAHGLDGATGEVFTSRLSPGVEVQDWIGGLPGPVAVLYEAGPTGFGLARELRAAGIRCEVAAPSKLQRPAGDRVKTDARDAEHLCRLLRLDEFTPVRVPDAVTEAARDLVRAREDCRTDLMRARHRLAKLLLRQQVSYPGKNAWTGAHMAWLARQRFDDANLQCCFDEYLDQVLATTARRDRLDVRIEQLAADSQWTPIVRRLGCLRGIATLTGFALAVEIGDWTRFDGNSIGAYLGLVPSEHSTGASKQRGGITRTGNSHVRRLLIEAALHHMQPYRKGVVLRARWDLASPAARARGDAGNRRLHARWVGFQARKKRHHVATVAIARELAGWCWSIANIED

SEQ ID NO: 453462 - protein, 407 aa, unidentified
MGDQPTATDVDVFVGVDMAKEDHYAHAIGPDGNELYARTVRNDQADIEAAIDTASAAGRTVLVIDMTASSAHLLLATAAARRVPVAYVTGLQMRRAADLYAGSAKTDPRDAFILADYARRHVDRLTWLDIDDELLVRLRVLNGRDVDLAGDATRTVNRCRDALVSISPALERVVGPKLTHRGVQDLMGRWATPTALRTAGKTRVRTLISKRSPRLADKLTDRIWDALDAQTLTLPAEDTWGEVIADLAGDLTKIAARRDALKDDIEKAFLAHPLGKVLVTLCGFGPRTGARTLAEIGDPHRSATGGHLASYAALAPVNRQSGRTLDTATRQRRGNHRLKNALFLAAFVATQHDPDARAYYQRKRAEGKKHNAAVICVARRRCDLILAMLKNREPYRQPQPENLPQAA

SEQ ID NO: 453463 - protein, 354 aa, unidentified
MSNTIPSITIGLDLGDKKHAVCVLDAAGDIIDERSVTNHRESLRRLSQKHPGARIALEVGTHSPWTSRFLQGLGHEVLVANARKLRAIHANHRKSDRTDARMLARLARVDPELLHPVEHGSEQAQRDLLQIKLRDNLVRQRADIISSIRFALKSLGVRLPSPNTACFAKRCRTLLAGEHGELLAMVEPSLQTVDLLTKSIRELERRIEALCEESYPATGRLRQVPGVGAMTSLSFVLTVGDPERFARKRDVAAYLGLVPKRDQSGDLDKQLRISKTGDAYLRRLLVGAAQYILGPFGPDCDLKRKGLQLAERGGSRAKRKAVVAVARKLAVLLLALWEGQGDYQPDRRPQPASA

SEQ ID NO: 453464 - protein, 343 aa, unidentified
MSIVTFRIVFVGLDYHASSVQVCVMDKDGRMLVNRKCANDWRAVMAAVHERCGKEVQVHAAIESCCGAADLADELISRGWTVQLAHPGYVARMKHNPDKTDYSDARMLADLERLGFLPRVWLAPEEVRELRRLVRYRQDLTKDRKNLKLQIGATLREARQKAPANVNAWTKAWLAWLDASAELSPNARHVTNRRLRRLQEVQEDLRRVDKRLERQTREDPLVQKLLTIKGIGLVTATTLRAEIGRFDRFRTGKQLARFCGLSPRNASSGKRQADAGLIKAGNNELRALLIETAHRLIRCDEHWTALAARLSSRGKPTGLVVTAVANRWMRWLYHQVQPSCLAA

SEQ ID NO: 453465 - protein, 428 aa, unidentified
MAQSINSTGDRVLVAIDIAKASNDVLVQLPDGRKRKFKVANKIRDYQDFVSYLKGLKAPCLIGFEATGNYHRPLAYYLGKEGFALRLISSLAAAKTREALYNSWDKNDPKDAQVILHMLKTGLSQVYCDPRIDSANELQELSKTYYQVSLRKVRVQHSIMTHYLPLYFPEAQKYFNSTRAEWFSSFMWRFPVPAAVTKYTREEFIAAAWDTAGRKVNKTAWLADFYDTATQSIGLPVSEDSEAVRMFRLVLRDHLDLCNMRQQIEQQADRYMANNEDYHRLQSIPGIGPITALTVLAETGDLRRFSHYRKFLKYCGLDLSTEQPGRFRGTSKLSKRGNCRLRLAFWLATTSAIRMRENTFRAKYEHYIRSNPDNKDLKRKAYTAGAAKMARVAYSLIKTGTDYRCFYESAIPSGKIPSPGAVEALLTS

SEQ ID NO: 453466 - protein, 316 aa, unidentified
MESITRVGIDACQEWLDVLIERPHSKCRRFSNNLDGIAQLVSDLGQGNYVVAIESSGRYEALARHELEAAGYKVRVKNPRQMRRLAEGLGVQAKTDPIDARMLAETAELGRANEPRTKEREALGDLSRTIECLKKDRARHMKRMKVPGYSQVAIESLKAVVKSIDAQIAKLEKKFIELVHKGPLAERHDLALSVQGVGPVLARIAVSELPERLDDWSIRQISSYAGVAAIDHSSGKRSSPARVPSHGNSHLKGGLYMPAVALVSTQKWAKELYRRLKEKGRTHQQAIIAVMHKLLIHLVAVLKRGSPWQAEPPKRA

SEQ ID NO: 453467 - protein, 334 aa, unidentified
MDKPAVAGVEISADVLVVAFDNGQLRSSEFPNSAAGHQQMLRFMRRNATQVRVCMESTGLYGLDAALALHQQPGIEIMVANPRSVRHFGCAMMQRSKTDPIDARLLAEYARRMPFQPWQPPSLKGRQLCALSRAIHQLTEMNAMQKNRLHAAGVTETTPKIVIRELERSLTQQQRSIQRLTREALQLIASDPQLQKRFDLLLSFPGIAETSALQLLGELVLLSPDCNVRQWVAYAGLDPRQYSSGKSVEKKVRISKVGNRHLRRALFMPALVAVRRNPQFRAYYRHLLAHGKFKMVALVAAMRKLLHGIYGVFQTLQPFDPEKLFTLPAPVEIA

SEQ ID NO: 453468 - protein, 346 aa, unidentified
MVLIGSDFHPSWQQVSWLNKETGEAGDVKLVHEPGAVEKFYRQFPAGSRIGMEATGNCQWFVELVTSLGHKLLVGDAAKIRASDSRQQKHDKRDARLLVQLLAEDRFPQIWVPSREQKDLRQLLIHRYKLVRIRAQVKNGLQHLAMNQGVLKKRKLWSVAGQKALRELPLASWASRRREDLLKMMSELDVKIDLLDQAVAEAAEKDEKARLLMTQPGVGPITSLAFVLTMGDVSRFRRGKQVASYLGLIPREYSSGGHQRLGSISKQGNTFLRMLLVEAAQGAVRCDPEFRKEYLHRCHKKPKGVAKVAAARKLAIRLYWMLRTNTGYPEIVRVESSSRVALVSAS

SEQ ID NO: 453469 - protein, 356 aa, unidentified
MSKSSRVDFTGQHIYIGLDVHKKSWSVCILSEDFEHKTFTQPPEVDKLVSYLGRHFVGARYHSVYEAGYSGFWIHDQLTDQGIDSIVVNPADVPTNDKERRGKRDPIDCRKLARSLRSGQLQGIYVPSRSKLQDRSLVRTRQSMVRKQTRCKNQIKSMLFFYGIHLPEETVMSHWSRRFIGWIETIQMERDSGNIALKSHLEELTHLRQIIASVNRAILALSKTEPYRAQVRLLRTIPGISTLTAMILLTELDDINRFRSLDPLLSYVGLIPDIHQSGETTHTGGITHRRHPQLRWLLIEASWVAARKDPALMMAFHQYAKRMRKTTAIVKIAKKLLNRVRYVLKNQTEYVPCVIE

SEQ ID NO: 453470 - protein, 365 aa, unidentified
MTTSVLDTKAIGQVVIGVDTHKHVHVAVALDVVAGKLAELSIATDQGGYDHLASWAESFGRVLAFGIEGTGSYGAAVASFLRRRGHKVVEVNRPDRRVRRQRGKSDPIDAENAARAVLAGVATATPKSAEGLAEMIRVLKVARDQAVTDRTQAIITLKTLLVTAPVELREQLRSLTGRRLAATCAALRPGPITTPSAAAKHAVRALARRWITLDAEVGEHDKIIAALVQQAAPALTLAFGIGVDTAAEILIVVGDNPERIHSQAAFAKLAGVAPVPASSGMHQRHRLNRGGHRQLNAALYRAVIVRMRFHEPTIAYVTRRTAEGKTKREIIRCLKRYLAREIYQILITGHTRALPPAREPAPTAG

SEQ ID NO: 453471 - protein, 419 aa, unidentified
MRFIALDVHRDFSEVAIAEGGQVRLAGRVETTPAGLELFAQSLGADDQVVLEATGNALAIARVIEPHVARVVLANPKAVKGATQTAKTDKLDARTLAQLLAAGFLPEVWTPDERTRALRRRISRRAQLVRQRTREKNQIHAILIRNLKARPPVTDLFGVQGRKWLSEQGLPDDEREMVEACLRGIDFLDREVAAIDRALAELVLASPEMRRLMTLPGVNFVTAAGLLAAIGDAKRFPTARHLVSYLGLDPRVRQSGSEPARHGRISKQGPGEARHVLVEAAWHAARTTGPLRAFAERVAARRGANVATVAVARKLAVIAWHMLTRGEDYAFVRPSLVREKIRRLELMVGAERRQGRRNPVRVFATSEQHRLEKELAAQAELAYRRLMVDWKAQRRKGTGAAPGRASSAARQGTAPRPAL

SEQ ID NO: 453472 - protein, 333 aa, unidentified
MYYMGLDIHKKNTQACVKDESGKVLVNERFPSETREINAFLDRLGAAEARVVMEATGFYQYIYEAIEARGYEVVLAHPLKLKALTVGRAKTDENDAEMLAELLRINAVPVSYVPPKETRELRNLTRHRSSLIAESTTLKNKIHAELAWRGVKPPAEARSAFSKRFVRWLRTLRIEAVDDHLDILEVVQEKVKKADGRIKDEATKDADIRLMETIPGVGHVVATVIKAEVGDLGRFRSPDTLASYAGLAPAVRQSGEMKGHMGGMSKQGNPRLRHVLTEAVRAHVMFCEDSRLTAFYLRKKEEKGSKKAAVATAKKMLEAIYFMVLRKEEFRAH

SEQ ID NO: 453473 - protein, 298 aa, unidentified
MEFKIYVGIDVSKLTLDVFIREKLAHKKFKNDKNGFESLLRWLEKQTATAFESILICFEHTGLYSLPLAVYLEENDIPYSMISALAIKRSLGITRGKNDYIDSRRIADFSYRYKDKISLTRLPAQDIAKLQSLLTLRGRLSVTLGRFTVSKNEAAKFMGRDGTEELFLVYDNMISTIKEQIKNLERSIKEVIGNNEKLKLSYELVTSVKGVGLIVACYLISYTHNFTRFSTWRKFACYSGIAPFDHQSGTSVKGRTQVSSIANKEMKRILHLAAICAIHTDAEMTEYYSRRQNEGKHK

SEQ ID NO: 453474 - protein, 325 aa, unidentified
MKEILLAGVDVSKLTLDIFVKPCGLSLQISNNQKGFMLWWREMKKILTPDTRVMVVMEHTGLYSRKFEEFLRTSGVDYCKIPALEIKRSLGMTRGKNDRIDAERIAGYGWLRREILHADPQLDKSIEQLKHLLGLRLKMVRDRAGYINRTKEMKCAGCTEEMKLQEQIIAFFSKKIKEVEGCITKLIASNPALQTTCKLLRSIKGIGPIISAYMIGNTNNFTRFSNARKFNCYAGIAPFNYQSGTSIKGKSRVSHLANKDTKTLLNLAATCAIRCDEELKTYYLRKVGEGKNKMSCINAIRAKLVARMFAVVKRQSPYQPLAAAA

SEQ ID NO: 453475 - protein, 318 aa, unidentified
MTGQTSIYVGIDVSKGRLDVGIGEQGMFWNVANDEKGIAQLVERMKEVRPELIVLESTGGLELPAMAELYASKIPVALVNPGRVREFARSIGLLAKTDKLDARLLARFAEAVRPPVTRLPDEQEQHLIALVTRRRQLIEMLVAEENRLNTVRLSLRQNLEEHITWLRQALKDLDQEIQEFIQQSPVWKDKQDLLLSVPGVGPVTACTLLAELPELGTLDRKRIAALVGVAPFNDDSGHRRGKRRVKGGRSSVRNVLYMAALSASKFNPILSRFYQSMIKRGKEKKVALIAVMRKLLTFLNAILRDLKRWNPSLKQFAS

SEQ ID NO: 453476 - protein, 441 aa, unidentified
MTEFFLGIDVSKGYADFILIDSQKNIVEKNFQLDDTFQGHNFLFSFLQSFFLNNPNANIIAAVESTGGYENNWVSFIAKLKDDFPICVTRLNPFGVSHSSKADLKRVITDKISALTIAEYVINHRAKISFVEEDYFAPLRKQWIYVKLLVKQKVQLYNQLEALLYTANPELITYCKHGMPNWVLVLLKQYPSAKSLAKASPSVLARIPYVTPQKAETIISNAKVSVASQTDPVTGALLKSVVGQIIFLDKTIKAQEEKLTRCCSFPEVKLLQSFTGIGAYSAVGLLLEIRAIERFSSAKKLAAFFGLHPVYKASGDGMGSMRMSKKGRREPRLILFNIARTAINCNPLIKQVYKNNLQKGKSGLSAMGVVMHKILRIVYGMLKTNTAFNPDIDIRNTVQAALKKPKVVVLKSRRFQQFDSLAPVSKKQNKKREEQKASQKE

SEQ ID NO: 453477 - protein, 349 aa, unidentified
MSNCITLTVDYHDRNSVIRWRDGRTGSELLPTVATTAASFLQVVDQALAAAGRRGRVVWIQESTSGWARVQRLLGKHVEFVLANVVQMPLPPKARRRKTDKVDTARMQREYLAGTLPRAHQPSAWWRQLRRLVSMREDLVRRQTALRNWINRYLAHETWEARDNLWSGKGQQRLEAILTRLPVSDRQLIEWKLTELELLRRQRLAMDKMLYRHWQEWPAAQRLDAIKGISIAAAVSIAARIGPIERFADADAWIAFAGLAPGVRQSDATRHSGCIGGGGTDRQLRHYLIEASVWARQLPRYRDTYERVAKRRGKKIGRLVVARLMLRSIYKMLRDGLAFEAEKKVTVVR

SEQ ID NO: 453478 - protein, 344 aa, unidentified
MLHAGLDLSRRRLDVCLIDDAGEVVEHTAAPPDADGLRHLAERLRGQPVRAVIESMTGARFVHDTLEEFGWEVLVADAQKVKGLAPLACKTDKIDARVLAELSWRDLVPAIWLPDPSIRRERELARYRLHLVRHRTTLKNRIHATLMTFGHPCPVSDLFGHAGRELLDRLAIPDPWRRNVDVSLELIDDLELQIASLTVELRRQGADHRYIPLLVTAPGFGWINAYTVASEIGDIERFASPTKLCGYTGLCPRVYQSGASDRRGPISKQGSRYLRWALFEAALHACNHPVYAERYQRTKKRLGRQRGPKVAQIDLSRKLTEAIWHMLTRNQPFAPAGARFRLAA

SEQ ID NO: 453479 - protein, 343 aa, unidentified
MNEYDGKQFVGIDLHRRHSVIVRQTSTGERLSAVRIVNDPDSLALQLEEAGEHPDVVLEATYGWYWAVDALQAAGATVHLAHPLGVKGFRYRRVKNDVRDAGDLADLLRMNRLPEAWIAPPPTRELRELVRYRAKLVALRSGLKAQAHAVLAKAGVLIAVSDLFGVEGRQRLARVPLGAAYAQRMSSLLELIDVLDTHERRFAEQIAAKLYDDRGYGAIQQLPGVGPVLGAVFVAEIGDVHRFADPSHLCSWAGLTPQHRESDTVVRRGHITKQGSKLVRWAAVEAIQRQPAGTKISVDRKRIEARRGKNIAKVAAARKLLTLVYYGLRAGHIRALTHQPAAA

SEQ ID NO: 453480 - protein, 395 aa, unidentified
MYSSFVGIDIGKYHHQAAFIDSLGKKCSADISFDNTCEGFEMLLMSLNRFDKEQTVVGLEATGHYWLALYSFLADAGWTVKVINPIQTDAFRNIYIRKTKTDRVDSFIIAEVLRFGRYTETILPDENLSQLKELSRCRTGLAETVGSLKRKVIAILDRMFPEFAACFSDVFGASPSAVLNEYTTPEELANADIEKLVKLLERSSRGRHSVKKANELQEKARRSIGIKKGIQALTFELKLLLSQMDFINEQIGELDSFIAEIMKDFALILSIPGIGEITGGAIIGEIGDITRFGTPQKLQAFAGMDPKVTQSGQFSGTDNKISKRGSPHLRRALYISANIARIHDPIFKVHYERMLSRGKHPKQALAAVTTKLLRVVHAVMTKGIPYTPAILANEK

SEQ ID NO: 453481 - protein, 367 aa, unidentified
MRDDITYVGMDVHKRQTKVAMLGGDGQDVIEWSCATDMKRLARRLKKEAEGELFCCYEAGPCGYWVQRELAKSGIRCIVVAPSLIPRKPGERIKTDRRDALKLAKLLRVGELTEVHPPSRDEEAARDLCRAREDAKGDLKRSRHRLQKYLDRRGIVWGKGAWTLAHRAWLRKLRLPAPIEQAVFDDYLGTVEWNEERVKGLEEKLEALSQQAPYAEPVSLLRCFRGIDTVSAMTLVTELHGFMRFRSPRALMNYLGMVPSEDSTGNRRRQGSITKTGNGHVRRILVEAAWHYRHRPYVSRALRARRAGQPGHVVALADRAQQRLHRRYWRLVSRGKPTNKTVVAVGRELIGFLWAVLYPQSLETQRA

SEQ ID NO: 453482 - protein, 338 aa, unidentified
MTLYAAIDLHSNNSVLCVLDETDRVVFSKRLPNDLAKIEQALRGCPGVIQSIAIESTFNWYWLVDGLQDAGFTVHLVNTCAVKQYDGLKHSGDFDDARHLAHLLRLGILPTGYIYPRHERALRDLLRKRGQLVRQRTSQVLSMQNLVARNLGANSSGNEIKRWTDEDIEAMPLLPWQRLALMSNLAVMDCLNDQVKRLESAILSQARERADYQALHTVPGIGKTLALTIALESGDMSRFASPGNFASYARTVDSRRESNGKKKGSGNAKCGNKHLAWAFIEAAHFAVRYDETIRRWFQKKCAKTLQVVAIKAVAHKLARACFHVMKSGTPFDVNKAFG

SEQ ID NO: 453483 - protein, 400 aa, unidentified
MRFFVGIDWASRAHAVCIVDQPGRVRWQGSVPHTTEGLTELVGRLRRFRGRLRVALERPSGLLVDTLVAAGVELVPIHPNALKATRPRYSAAGSKSDPGDAFILADLLRTDGHRFPALRPPSDDTRALRALVRGRDDLVRQRLALANQLRALLERFWPGAAAIFADVDSPIALAFLARYPTPLSAARLGEKRLAQFLGQHAYCGRRPVGELLARLRTAPASQVGEAEAEASGDLVRALVAVLTPLVGQVQHLSAAVTAALAQHPDGPLVQSLPRSGAVNAAQILAELGDDRARFPSDEHFAAEGGLAPVTHASGQHHAVVFRWACNKRLRRALTTFADNSRHASRWAALVYQRARGRGCRHQHAIRILARAGARILWRCWQDRAPYDVTRHRAAQALAAA

SEQ ID NO: 453484 - protein, 326 aa, unidentified
MAKQKQTQEIAFEEVVERGCGLDVHKKEIVATVSGTGIESETRTFQSTTRSLTALKEWLLALGVTHVAMESTGVYWKPVMNILEPGGFSIMVVNARHIKYVPGHKTDKKDSAWICKLLRAGLLKGSFVPGRNQRDLRDLTRYRRKLVQQQAAEHNRMIRIFEDANLKLSSVFSNIRGKMCTRVIDAVIAGETDPQKLADLCTHRRLKATREEIALAVEGCFTEHHKFMIRAIRTSIANIEAEIDHLDKEIERRMKPFEAQITQLCEIPGMDVTSANELLAEIGVDMEVFPTAEHLTSWAGLAPGNNESAGKKKAHTPTTATKPQKR

SEQ ID NO: 453485 - protein, 338 aa, unidentified
MSEVTTVGLDLAKQVFHVVCCDAHGKVVGKRMLRRAQVLRYFANLPVALVGMEACGGAHYWARELQALGHAVKLLPARSVKAFVQGNKNDYNDALAIAEAVVRPEMRAVAVKTAAQQDIQALHRMRQQCVATRTRLCNQLRGLLGEYGMVLPRGVGSLRRRLPALLEDAENGLSTFFRRLLAEGYQQLRALDEHIATYDTEVVQHSRQDDACQRLRTIPGFGPIVASVFHSQVGDGQAYRRGRDVSAAMGLVPRQHSSGGKTVLLGISKRGDRQLRSLLVHGARAVVRQAAHKDDRLSRWVNRLKAQRGHNKAVVALANKLARIGWAVLHNRSTYQAA

SEQ ID NO: 453486 - protein, 349 aa, unidentified
MYYVGVDYHKRYSVATVLNSDGVMLARQRLDNRLEAFRELLGSYDKAEVEAVVEATRSWGIPVDILEQLAGRVILANPGEVKLIAKGRIKTDKVDSLALAKLLRVGWVPEAYLRPRANREHQLILRVRCFLVQLRTRVKNRIHDLIDRQDEPIRETAASFSDLFGKKGMVWLKGLDLSHPCGTLLCRLLAAYDAVDAQVRQSDRLVAELFAADDDCKLLKKTPGIGTFFAVLIKTEVGSIERFASSARFCSYAGVVPSTESSGGKVWHGRIIKQSNRWLRWALVEAVIPATVADAGLRAHYEFYRRTKGSKVAKVVTARRLGCIVYRILKEKQPFYERPFPNRGYRQAG

SEQ ID NO: 453487 - protein, 346 aa, unidentified
MDLYIGLDVSLASTAICAVSAQGKVVKATVAGSEPEELVRALRSLPGTVIGVGLEAGPLSQWLHRALVEAGFDAVLMETRQVKGALKAMPNKTDRRDAEGIARLLHMGWFRPVHRKSMSAQETRALLSSRKAIQQALMNIELSMRGVLRNFGLKIGKVAKGRYEGRVRELVDGNPMLEAAATSILTVRKELRKEIAGLEKMLLGHAKSDPVCRLLMTMPGVGALVALTVKSAIDDPDRFRSSREVGPWAGLTPKRDQSGERDVLGHITKAGDAGLRAALFRAATVMLNRGRASWLTAWAWNVAKSRGKKRATVALARRIGVVLHRMWRDGTEFCFKRADAMAAAAA

SEQ ID NO: 453488 - protein, 387 aa, unidentified
MPQPNDLSRSLVALDQNSTIIAVVELSQSSWLVAGMLPGVERQPRKKLEPSPERLLALLNGWQDEAVRAGRTITRIALAFEAGRDGFWLARWLAARGVEVHVIHASSVAVSREHRRAKTDRLDTELLKRGFLGWLRGERGHCSMARVPTIAEEDAKRPNRERDCLVGERTRIVNRIKSTLARLGIRNFKPTLRKAAERLATVHTPEGMPLPPNTLAELQRDMARLGFVVSQIREIEDARQKRLEQQHETGPHAMVRRLARIVGVGVETADLLVHELLSRPMRDRRAVARYAGLTGSPDESGARRREQGLARAGNARVRRAMIQLAWRFLMFQKDSALAFWYRARTTDSRSGTRKAMIVALARKLIIALWRFVTNGEPLEGVVLRPAS

SEQ ID NO: 453489 - protein, 424 aa, unidentified
MQNTEARKRKQVPEGYLVVGVDPHKKRHAAVAITQDFTTQAKFKFDNTREGLESMLDSAKVEMVKSGCRGVMFAIETGGHYWRNVAYFLDEQGMPFRFINQFTLKRRREGKDLNRRKNDYRDSEVAAQLLCTGEFTESKLPQGVYAELRTAHNAYRRLVKETTRITNLIKGLLDALFPEFTQVFKDPCGLTALSVLSTCPIPGVIAGMTEDEFEVTIEAQHKGRRLMRKKLKALHYLARTSIGIDAGARSVSSEIAFLVDKLELIRQQICIIEGTLVRLVDETEEGKYLLSIRGLNYIAVAGLLAELGCFKAYRSAKQMIKMAGSNPTESESAGKKKSRTPMSKQGRPVLRYCAWTSVIPMLRFNPDFRAWAKQRRERPVHANPLGGREVVGAALNRLLRLAFALVKNQTYYQVSKPELTLVAV

SEQ ID NO: 453490 - protein, 402 aa, unidentified
MPKLQLPGGAIRINVGIDIAKEVHWVTAIDADGVVQIDRKLLNTPADIASLADQLGALGGTVRIGLDVVGGIAGLAEAMLAAAGFALVHVPGMAVNRARQGTVGGENKSDPRDARTIADQVRTRTDLRPIEPATELDLEIRLLAGRRRDLVDAQTQRLARLHDLLVGIFPGLERGLDLTTKGPLHLLTRYVTPAELRAAGKKRLVRHLKAAGGLPKAEALADRALTAADEQTITIPAERMTARLVRELATEALASRTRLIELDRELEALLQRHPDATLIRSLPGMGVVLTAELIAEAGNLSRFRSADALASAGGMAPILRQSGKTRFLRRPAGGNKGLKRVFYQSAFCSLGNDDSRTFYDRKRREGKRHHQAVIALARRRINVLWAILQSRKPFQTGFKTTA

SEQ ID NO: 453491 - protein, 456 aa, unidentified
MAEQELDQAQEEPAELVARAAAIDVAKDSGMVCTRVPHESRSGRRVQKVWDVTARFAAVTELADHLVCQGIERVVLEATSDYWRIWFYLLEAAGLQVWLVNARDVKNVPGRPKTDKLDSIWLCKLNERGMLRPSFVPPEEIRDLRALTRLRTTLTAECSRHKQRAEKVLEDALVKVSAVVSDLFGKSGRAMMRALVAGERDPKVLAGLALGRLRPKQARLAEALAGRFRDVHAYEIGLLLDLVETLEARITDLDGKIEAHLAALPGVPPACASCGLIGGGHAPGCGNHGTRPLSLVQRLDEITGVGVVTAQVIIAELGLDMGQFPTAGHASAWAKLCPQTIQSGARTRAGKTGKGNRWLRGALGDAAMAAGKTDTYLGERYRRIRRRRGKQKAIVATARAILEIAYLLIRNRDTRFCDLGAGYYDRLNPQRQTRNKIRELERLNPGMKVSLTAPAA

SEQ ID NO: 453492 - protein, 317 aa, unidentified
MSESTTVTVGLDVHARSIRLAAVCAEELLEERTLPYDEGVVERALRRWPGVRCCYEAGPTGFGLCRHLVERGIECVVVAPGLVPRRPGDRVKTDPRDARKLARLLAGGLLEPIHVPSPELEAVRDLVRAREDARLDRMRDRHRLSKFCLRHGRSVPWKSWGIARRRWLGEQRFEFAAQQQSFDGYLHALDLVDARIEALERAIDEAAAQGPCRELVTSLRCLRGVDTLTALALVAEIGDFARFETAAEFMAFVGLVPSERSSGEQRRHGSITKAGNAHARRLLAGRGKPHQKIVVACARELAGFVWAIATEQPIRST

SEQ ID NO: 453493 - protein, 425 aa, unidentified
MNKDILSTLFVGIDVSSSSNYFCAINFEGKHILDFSIANDLPSSEIAIERIFNALKDNGLKFVTMVLESTNVFSFHIANLLASNNSLFNFNSKVFVINPKESSNFRKTYSDMDKTDPKDAFVLADMARCGRINQQPYKASQLFALQRLTRQRFHLVKTITREKAYMMSNIYLKFSSLYIAKKEDEPFSNLFGNTSKSIIADFTPDDIVNMSDEDMITFIMEKGKSRFSNPEENVKLLKKIARDSYRLDKVAYDPINVAISSSFNTIKALEDNLKVIDKAIEKNIKGLCDNEFTILKSIPGIGDVYAAGIISEIGSIEFFKDNNALAKYAGLTWRKTQSGNFEAETTRMTKTGNKYLRYYLIEAVSSLKNHSKDFNEFYTRKYNEVSRGAHKRALALSARKLVRLIFGLLHHNQLYSTTKLDNRNN

SEQ ID NO: 453494 - protein, 317 aa, unidentified
MSTSAAQFVGIDVSKSQLDVAVRPRGETWTVAHDEAGLSALVARLRTLAPALIVVEATGGWEVTLVGALAAALLPVAVVNPRQVRDFARSTGTLAKTDRLDAQSLAHFADALRPQPRPLPNAQAQELSALLQRRRQLVEMLTAEKNRLPLAARRIRPQLQAHIAWLQRQISQFDDDLRELVRSSPLWRDKEDLLRSAPGVGPVLATTLVAALPELGTLTRQQIAALVGVAPLNRDSGTLRGRRTVWGGRAQVRTVLYMSTLVAVRHNPVLAAFYQRLRAAGKAPKLALTACMRKLLTVLNAMLKHHTRWAPVMAQHA

SEQ ID NO: 453495 - protein, 347 aa, unidentified
MNYIGVDCHISSLDFAVVNEKGTTTKRAEVNTGVKEFMEFVKSIPKPRKIFIEEGELANWLLETSLKYGENLVITDPKINKWIGKAGKKNDTIDAEKLAQLARGKYIKEIYHCINNRRRFKELVFAYHDTVKSQTRIKNKIKAAFRREGIRCSGATVYSEKYRKEWQKKLPGNKVVHLMVNELWAQLDQIQKAQERLKRNIRIYGKQYPEIKRFRNVPGIGLIHASTISAIIETPHRFANKKKLWMYAGIGLAERKSGEKVYSRRLTREYNRLLKNTVKKASEAAIYAKDNQFRRQYLRLTIEKGIPSYKAKLTVARSLLAALYGMWKKGEAYDPEIDIKRGKGNEK

SEQ ID NO: 453496 - protein, 430 aa, unidentified
MKSNTQNTKIEAITETTLVLGIDVGSETHYARAFDYRGIEYSKKPLKFSNDEAGFVTFKAWILDIKEKHGKDKVVSGMEPTGHYWFNLGKFLQDNEMKPVLVNPHHVKKSKELDDNNPTKNDRKDPKVIAGLVREGRYMIPYLPEGVYADLRTASNMRFQLQAELTRIQNRISRWFNIYFPEYKTVYGQPDAKSGMLILKVAPLPEDILTLGIDGVNQIWRDAKVRAVGKARAKTLIEAAEHSVGSKEGEISASMEIRMLLDDYESRNTRLQEVVALIEELVKKIPMAEKLLEIKGVGIKTVSGFLAEVGDISRFNNPKELQKLAGLALVENSSGKHKGETTISRRGRKRLRYLLFEVAMSLVSKNPEFRELHSYYTTRKLNPLKKMQSLMAVAAKLLRVFFAMLTKGVDYDSKKLVGDIKRPEVYLQAA

SEQ ID NO: 453497 - protein, 429 aa, unidentified
MSYRIAGIDVHKKMLAVVVSDVEVDGEYQFERRSFGSNPGQVRSLAEWLLEQEVEEVVMESTAQYWKPVWGALERYWKPIRQKREGAGPMSGTLHLAQAQSNRGPRGRKKDFPDAERLVKRLVAQELTLSFVPDTHQRLWRTVMRRKYQLTHNRVRLQNRLESLLEEAHIKLSSFVSDLLGVSARRMLKALAEGETDPAALAVMADRKLRATQEQLRDALGACTELNPVYRRLLKMMLEELRLIDEQIGQLDQEMANLLTQHQDAVQRLAEVPGLGVDSAHQIIAEVGATAATFPSEKHLSSWVGACPGDEESAGVNYSHRSPKGNRQMRRILNQSANAAVKTKGSIFEIVYRRTVPRLGHNQAIGVIAHRQCRLIWKILHQGVHYEERGSAVNIKSRQRRAARMIRELRSLGYRVEPANSQQNPAGGR

SEQ ID NO: 453498 - protein, 345 aa, unidentified
MPNLNHFRDFTYVVGIDIAKSVFQVHSCNTQTGEIQNVPIKRAKLLEHFVNRGKCLIGMEACGSSQYWAREFQKLGHTVRLMDPKRVKPNVRHNKSDRADAEGIYWALVNGVQAVAVRNNIEQDIHTLLTMRSRLMTLRTGNINHVRGLLAEYGQVMPKSPAQFLKHVSDSINNLEGEVDSLVIDMFRSLVEQIKAGEDKLRELDSEITKLAKQTKHAEHFLTVPGVGSLITANLCVLLANPSAFASGRQFAAFVGLVPMHTGSGGKTINTSIPYRCDKRLRALFVEGAQAVARSKHPADWVKNILSRKPKKVALIAIANRMARQCWAVAHYEQPWRDTSIATAA

SEQ ID NO: 453499 - protein, 346 aa, unidentified
MKQITTIGLDLAKQVFQVHAASADGSPIFNRKLRRAEVLRFFERTPACLVGMEACGSAHYWAREIRALGHDVRLIPPVYVKPFVKRGKTDAADAEAISEAVTRKTMRFVPVKSADQQAAAVVLKTRAFLVNQRTQAINALRGHLSAFGIIAAAGTVRIAGLISIVRDKTDERLPKAARLALMEVASQIDALKVQIEKLEQAIVATVRRDDDARRLVTIPGVGAIIAASVRALVPDPGGFKSGRHFAAWLGLTPRPHSSGGKERLGRISKMGNPALRSLLVVGATAVLRHARGNPNASRWITALLARRPYKIVAVALANKMARIIWALLVKGGTYQDKGARNQIVAA

SEQ ID NO: 453500 - protein, 342 aa, unidentified
MTNDKLMAGIDLHSNNLFCGIVDAQGKRVFEKKLPCDLPQVLAALEPFKDRLDTIAVESTYNWYWLVDGLQDHGYRVVLANPCRIKQYDGLKHTDDQTDAFFLAELLRLNILPTGHLCDRQLRPVRDLLRRRLGLVRKRTSLILSLKSLYVRMTGQTLPLGLLKAMKVEEAQTLFSHPADQLIAQMQLRLIHQLGQDIKDIEKAVMAGASAWPCYRRLQTLPGVGIILSLTITLETADPKRFAQPGHYASYCRCVEAKRLTNGKKKDRNNGKCGNSYLGWAWVEAANFAQRFDQDCRRFYDRKKEQTNSVVATKALACKLAKAAWYIMSQEVVYDSKRMFPH

SEQ ID NO: 453501 - protein, 372 aa, unidentified
MKKGGDAFVGIDTAKLKNAVAIAESGRDGEVRYFGEIPNTPEATRKLVGKLVEKYRDLTFCYEAGPTGYGLYRQITELGHRCMVVAPSLIPRRTGDRVKTNRRDAVSLAKLLRAGELTETWVPDTIHEAVRDLSRAREAVVEDLRRKRQQVSAFMLRHGRVYPGKRTWTVRYMRWLGEQRFEHPAQRVALDEMLNAVKDASERQSRLETALAEIIPGWTMAPVVAAFQAMRGISFVAAATVVAEIGDMRRFATPRQLMSYLGLVPSERSTGDTVRRGPITKTGNRRARRVLVEGAWTYRYGARMSREILERTRDVPKTVRDIAWKAQSRLCARYRRLTSAGKLKTVTTTAIAREMAAFLWAIAREVPPVVAS

SEQ ID NO: 453502 - protein, 281 aa, unidentified
MEYFAGLDVSLEETAICIIDDTGLIVREARAASEPEALVAFFRASGIAMKRVGLEACSLTAWLHQALTEAGIAVICIDTRQAKAAMGAMPNKTDRNDARGIAQIMRTGWYRAVHVKNPCCRSWRALLAARRMVLNKRRDVENGVRALLREAGLKLGTPSRRNFAARVIELVTDDPVLSALARSLLSVIAVMTQEIDRLTKRVLDEVRIEPTCRRLMTVQGVGPFTALAFRATIDRPDRFRRSRDVGAHLGLTPRRYQSGETDVQGRISRCGDELASSATRF

SEQ ID NO: 453503 - protein, 297 aa, unidentified
MQQDSAAFVGLDTSKMTISVALAEDGRHGEVRFLGDIDHTPEAVRRLVTKLAGKYGRLLFCYEAGPTGYGLQRQISALGHDCAVIAPSLIPKRPGERVKTNRRDAITLARLHRAGELTRIWVPDPGHEAVRELVRAREAAMADLRTKRQHLQSFLLRHGRIYRGSRPWTQVHARWLSNLSFEHPAQSLVLREYRQAIDDAETRLERLTQQVAEVVCSWSMAPVVEAYQALRGVAFLTAVTFVAEIGDVRRFETPRQLMAYLGLVPSERSTGEQVWRGSITKAGNPRARRVLVEGAWT

SEQ ID NO: 453504 - protein, 359 aa, unidentified
MCQNEVDEDLKQRGPSMNEISTIGLDLAKNVFQIHGVDASGAVVLRRQLRRGAVEKFFAQLPPCLVGMEACGSAHHWARVIGSYGHQVRLMPPAYVKAYIKRNKNDGRDAEGICEAVTRPTMRFVPVKSIAQQAALAVHGTRTLLVRQRTMAANALRAALSELGIVAPQGYKGLRELITRLEEPSADLPEDMRGALLILARHWQALDVDERVLERKIAKAAGCDQDARRLLEVPSVGPMIASTVLAKVPDPKVFRSGRDFAAWIGLTGKDHGTGGKHRPGHISKQGDRLLRALLISGASAHLRQQKARGITDPWLRDLLARRPYKVAMVAFAAKTARIIWAMLVKGEHYRDRASVSAAA

SEQ ID NO: 453505 - protein, 354 aa, unidentified
MKRTTKYVAFDVHQATTVASVREESGRVIARSVLPTDSGALTEFVRGMRGARHVTFEEGTQAQWLYELLAPLVDRVIVCDRRGAPHQGNKGDQVDADQLSELLRRGALRAVYHGSADHATLKELTRTYRTLVEDATRVMLRLKALFRARAIPTRGTTVYQARARGQWLAQLADRGARFRAEALYAELDVLRTLRPKAKAAMVTEARRDPAWPVLRTIPFLGPVRVALLLATMQTPWRFRTKRQLWAYAGLAVVTRSSADYTLIAGAPVRRRRAPMTRGLNRNHNRVLKDVFKGAATAATARPGPLQDFYHGVLARGTREELARLTLTRKLAALTLRLWKKGERYDPTKLTTPAR

SEQ ID NO: 453506 - protein, 407 aa, unidentified
MDLLKTVFGIDVSSRKSNVCIMVNGQKVNDYAISNDMVGFNQLLGDLKQVTNPQIIFEATGVYSRRLQAFLDMHELRYVMMNPLEAKRKTKDDLHQNKTDKLDALYLAKLQSEHPQRLAYVQSKEYQELMANNRIYEQASHDLITNKNRLHKAVQLTFPEIEHLLANPRGKNYWSIALRFPHPDIVLETKEADIIDFLKGLSGIGKKRANDITQNLIRLAKVACPAVKKNSAHIRGLKMAINNILSAEEECQTALQEMAKLAPKRDLEILTSIPGIGENTALRIISELGDIRRFNNPSQLNAFVGVDPQVYESGNLTAHLSISKRGTAIGRKVLYLAINQIQSAKKVGNPCHIADYYEKRKRSSETASHKKAAIASIHKLLRTIFALIKNDQLYSYDVAKHNQRLLS

SEQ ID NO: 453507 - protein, 348 aa, unidentified
MKIVSLDVHKESSQMAVMSEQGELLLEMKVATEAPELRRVVGGIPGPKRVVFEEGPLSGMIRDALEGVAEEIISADPSQNALIARSEDSNDEKDARRLGTLAAVKAIREVYVPAEPYRTLRSLLVHDERLAGAITSAKNRIKALCRRRGIRCRGTGVYRAAGRPGVLEQLPAELRWQMESLYRQLDLARRERVGAHRVLGRLTRKMPLIERLDGIPGVGLVTARTMVGWIVDPGRFKNRNALNGYAGLGLRQGVTNWKVVSRARASRRGQKRLKRVLMIAAEAAVKGENAFSHRYRARREAGWDERKGKRDVARTILFVACGMWKNGREYNEALVRVPEPPAKAARAD

SEQ ID NO: 453508 - protein, 397 aa, unidentified
MIAVGIDISKAKSTVAVIDSDGTVLASPFTMAHTQPEMEAFVTYLKGLGEPTTILMEYTGHYHYPVLKKLQGEGFPVCIVNPYQMKKYGDVEIHKAKTDKKDALRIAAYALEKSYKLVPYSSMEQKYEDLKFLSRQYSQRITYVAKLKVQLIALLDQTMPGITRILPLNSRNPEKCALLLFIKRFKSFDEIQRIGKARFLASYDVLAKKASERSASSKGLSIYELAVDSITTRGEDPYIWLSQNQCVDLLSTTQNAADEIISQMRNIAETIPEYKVLRAMRGVGDRLGPIILAEIGDVRRFHSGKALNSYAGNDAPPYQSGQFESRNRHISKRGSSALRKACYEVMQALKLTKPQDDPVYLFMLKKEQEGKPFNVAKMAGVNKFLRIYYARAMELYK

SEQ ID NO: 453509 - protein, 321 aa, unidentified
MAVLEQTGSVVGVDISKDRLDVSCLPPAVGVADAFDNDACGHASLIACLKELKPRLIVLEATGGYHRMLVAALAAAGLPVVVVNPRQVRDFARAMGVLAKTDAIDASVLARFGEKVGPEIRPLPDTQSAELADLLARRRQLVDLRTAENNRLQQAVAAGIKASIRAVLRTIETQIDRIDEDLDDRIKGSPVWKHKEELLLSVPGIGPQTARMLLACLPELGTISRQTVAMLVGVAPLNRDSGTMRGKRTIWGGRAAVRSALYMATLVATRFNPLLRRHYQKLLAAGKAKKSALIACLRKLLVILNAMIRTNTPWKNSLENA

SEQ ID NO: 453510 - protein, 341 aa, unidentified
MKNLFIGVDFSKEKVDVAIILADGLAETAARVFNEFKTTVSGYKQLVKWVEQNSCDIDPSLWLFCGENTGDYSKGLCNFLYGKGYDMWLENAKSIKDASGLRRLKSDRADASMIAEYAMRNYDKAIMYEPLSESLAQLRELFLYRQMVVRHRCSFQVRRGEKRLTMEKSPIKTMISQSGRHIVSELNKEVEKIDKRIAELIKSDEELTEVFTIVTSVPGIGTQNAVCLMVYTDNFRRFNYDSRKIACYYGLAPFGKDSGTSVHSDPHVHYMANRQIKAMLTQAALAAVNFNPIMARYYMRLVERGKKKQVALNNVKNKLVHLVTAMVRNRQTFTPEYKISA

SEQ ID NO: 453511 - protein, 378 aa, unidentified
MSNCTRYLGLDVHAETITAAIAEGRGRIRSLGKFPNRPEAVRKLTEKLGGAKNLKVCYEAGPTGYALYWQLTKLGVDCEVIAPSLIPKKAGDRVKTDRRDAEKLAQSYQAGDLTPVWVPTPEHEALRDLVRQRAAAKADESRAKHRLVKHLLRRGLREPNECRAWTHPWWRWVQSLKFDHEAQQVAFADCIAEVLHMGERLARLDQAIDRLVASAPPHMQAVIEALQALRGVAKLTAVTIVTEVGTFQRFRRATEMMGYTGLVPSEYSSGEREAKGRITHTGSAHLRHVLGEAAWHARHRPWLNLRLKKLLPTLPAGVAEIAWKAQERLHRKFTRMTYCRKHAGKVATAVARELVGFIWAIGTLVESQQIANNKTRAA

SEQ ID NO: 453512 - protein, 343 aa, unidentified
MQLTTVIGLDTAKSVFHVHGVDADENVSVSRQLKRQRVLPFFKKLPPCLIGIEACSASHHWSRELQALGHTVRLMPPRYVKAYVKSQKNDARDAEAICEAVTRPNMRFVPTKTRKQQTMLMLHRTRHLFVRQRTAIINAIRAHLAEFGIVAGVGRNGVEALLKVIADENDDRVPDVARECLIALGAQLKTLKARVLEFDRKILASHRASELSRRLEAIPGVGPQIATALVATVADPNSFRSGRDLSAWIGLVPKQNSSGGKSKLGGVTKAGDRYLRSLLMIGALSVIKRAKQLGYTNRPWLAKLMARRPTKVAAIALANKIARMAWAMMVRGEKYREPIALAA

SEQ ID NO: 453513 - protein, 310 aa, unidentified
MAEIVITAGIDVSKDRLDLALWPEPGANGSFTPGEIEPLIGWLGAHRVSRIGLEASGGYEREVVRRLSAAGFVVVVANPLRVRRFAQAKGRLAKNDRADAATIAEFTATLAPQRQLREAALDRLGEYLMVRRQLQQAVTDTVNQLEHLREAELRRLVAAQRAGLKRRIQQLDRRIAALVAEQPHWQALAKQLRSVPGVGPVLAHTLIALLPELGRLTRRQVASLVGVAPFDDDSGRRNGARQIAGGRTAVRGALYMAALVAKRCNPTIAAFARRLAGKNPKVILVACMRKLIAILNAMQRDGKPWQPVAA

SEQ ID NO: 453514 - protein, 412 aa, unidentified
MDILYKSCCGIDIHKRFVVACLRRIDADGELHQEVRSFSTFTEELLRLSDWLVTSGCTHVAMESTGVFWKPVYNILEGQMELLVVNAQHIKALPGRKTDVKDAEWIAELLQHGLLKSSFIPPRFQRQLRDLTRYRSGLVQERARIVNRLQKVLEDANIKLAGVATDVLGVSARAMLDALVSGQSNVEALAQLAKGRLRHKIPELEKALRGKFGAHHSFLIGEQLSHIDYLDEAIRRLSQQIGERLGPFHQQLALLDTIPGVNQQTAEALVAEIGLDMNRFPTAQHLASWAAFCPGHKESGGKRQSGKTRKGNRWLKRTLTEAAHGASHTKDSYLASQYHRLSGRRGKKRAVVAVAHSLLVSAYYILKRQQAYQDLGSNYFDQLHRERLQRHLIRRLETLGYKVSLEALPQVA

SEQ ID NO: 453515 - protein, 333 aa, unidentified
MGHVIIGMDPHKRSATTGIIDDRQKVLFGGRFGTDRDGYKAMLAAGRKFPDRTWAVEGCNGIGRHIAQRLVADGEPVAGVPAKLSARARLFSTGQGRKTDPVDAHSVALAGLHSPGLRVITADDATVALRLLADRRDELGTARTQTINRLHRLLLELLPGGAKKFLSAGQAKELLATVRPRDIAGKTRRRLAAELVTELTRTDKRIKTADAELKQLVAATGSSLLALHGIGPSGAARLVGDVGDIARFADKGRFASWNGTAPLDASSGDQNRHRLSRAGNRRINRVLHIMAVVALRNDTQGRACYRRRLAAGKTTMEAMRCLKRRLPASSAAR

SEQ ID NO: 453516 - protein, 360 aa, unidentified
MMVVGCDPHKRSITCGAVAASSGAARGERTAPAHADGFDVLLRWARALDGERVWAIEDCRHVSGRLERFLLARGERVVRVAPKLMAGARTGARTRGKSDAIDALAVARAAVREGIQTLPTARLDGGALELRLLVDHREDLVAARTRDQARLRWHLHDLDPTFTVPPRALDRPLWWRRVQTRLQQQPAGVRVRIAVELLEQIRACTLRIRALERELERLAHAHAPRLLAERGCGALTAAKLIGEIAGADRFATDAKLARNAATAPIPASSGNTTRHRLDRGGNRQLNCALHRLAVNKALWDPASAAYLARKQAEGKTRKEALRCLKRVLTRRVWQLLRTPTPTQPAIQIHCNTPATTPALT

SEQ ID NO: 453517 - protein, 355 aa, unidentified
MERYLGLDVHAASCTLAVISQTGKRLKDLPVETNGQALVEAVRMIPGRKHLVFEEGLQSAWLYETLNPHVDEIVVAGITESRGPKSDKRDAYGLAEKLRVGDLEKQVFKAPRQFTRLRERSRIHMTLVGDVVRVQARIKSLYRSRGVLVTGVDVYSPRRREQWQKELCSSAQTRATRLYDHLDFLLEQRKQAEADLLREAKGHAIVRILETAPGFGPIRAARLVPIVVTPYRFRTRRQFWSYCGLGIVTRSSSDWVQVADGSWIKARVPQTRGLSRQHNRVLKSIFKGAATTVITQRNKDPIHARYQRLLDGGTKPTLAKLSLARMIAATVLRMWKDEEEYDPGRAGAPTGIREG

SEQ ID NO: 453518 - protein, 368 aa, unidentified
MSKTDESRLCVGVDLHKTQFTVCAVSEDGEIIHEDVYRTDETGYNKFCRRMHIEERKGYAIEMAVETTGNARYFKNRMEAEFFTVKVVNTNKFKVITMSTKKTDANDAYTLAYYLMKEMLPESHLCSQTSEELRRVLKTRSILVQSCVRIKNQIHGMMLGYGIETRSAQFQSKKKRRELIGDLEDQGFSEFAASSLNVTLDSLTVLEEQIKAIEEQLKDMVKENDTVELLQTIPGVGFLGATTIAAYTEDMSRFDGDFKRFASYLGIVPSVHSSNETLWMGKITKHGPCELRTAFVQVALGLIRQKNKYADWRLIQDYNKKKEDKGSGRAIIALTRKVARIVFAMLHSREPFNPALMVSEHHQIQQAA

SEQ ID NO: 453519 - protein, 372 aa, unidentified
MKKVSTVAAKQAKNFPARSFSEQKLTVGLDLGDRSSWYCVIDDSGAVQMEQRLNTTPKAIGEVFGGMPRSRIALETGMHSPWVSRLLTELGHEVIVAHARNVRLIGESRKKDDRLDAQTLARLVRIDPQLLCPVKHRSAQAQANLSVIRARAGLVRARTALVNTARGLAKSYGERLRSCNVRNMNPEKAAGLSAELQSALEPLLIALQSLSQQIGEYNERIEKLAEQSYPQVALLKQVKGVGTLIALTFLLTLEDPHRFAKSRDVGCYLGLQPGRRNSGQSQPQMHISKEGDPYLRTLLVQGAQHILGPFGPDCDLRRWGLKLAERGGKSGKKRAIVATARKLAVLLHHLWVSGEVYEPLHTHQRTTMLAAA

SEQ ID NO: 453520 - protein, 436 aa, unidentified
MRVIYERVAGLDVHKQTVVACRMRVTEDKRVEWETKTFGTMTADLLGLHDWLSEWEVKQVALESTADYWKPVFNILEEGFEVVLVNAQHVKKVPGRKTDASDAEWLAELMLHGLLKASFIPAKPQRELRELTRYRTTVVRERARVVNRVEKLLESTNIKLSSVVTDVMGVSAKAMLTELAGGVTDPQALAELAKGRLRNKTKELEAALTGTVGHHQRFILAQQLSHIDFLDGQIEVLSQQISQHLAQMAQPEPDDDDPTGSSKGEADEGLSWTEAVELLDTIPGVDQRTAEIILAEIGLDMSQFPTADDLASWAGFAPGNYQSGGKRYSGRTTKGNRPISAALNQAAWAASRTKDTFLKARYHRLAARRGKKRAIVAIGRSILVSIWHMLSRREPYQDLGPDYYDQRRKETKVSYLTKQLTRLGFVVQLDPLPVAA

SEQ ID NO: 453521 - protein, 389 aa, unidentified
MKPDSQMTLDRYFRQCVGIDVSKDKFTACLQMYDRASDVGCHTMSIDFDNTKSGFNQFVKWSRKEAVKGFPLTCLMEPTGVYYEPLAYHLHKIGQTVYVVLPNKARSFCEAEGIKTKTDAMDARSLALMGCTSRKLKPWSPPAPIYRELRQMTRFHADLSQIMTSVMNRMESLSHMEKADKTVRKNCQKLIDEIGTLMENNGKAIMQKVAEDKELEARVKRIAKAKGLGVATVVCIVAETEGFHLIENRKQLTSYAGLDVRAKQSGKEDPKHAISKRGNAHIRAALYMPALVAVRYNPQIKAAYGRICQKHPKEKKIGVAAAMRRLLLLVYTLWKNGEEYDPMRDKTHTPKKRMKEEDTEMEYGPEDCIGPKHEPVDWNATDEHGNPPF

SEQ ID NO: 453522 - protein, 341 aa, unidentified
MDKVISVIGIDLAKNVFQVCAANDSGKRLFNRSVSRAKLLPMLPNIPKCVVGMEACSSSHYWGREIEQLGHEVKLMPPQYVKPYVKTNKNDATDADAICEAVVRPSMRFVAIKSVEQQALMLLHRDRRGLVRDRTSLVNRLCAMMGEFGVIAPVGLHKFRSWLKEEYGAVESQLPGLLRRHIHVMVSRLWETDEHIALLESEIHGNSSSAEDCKRLGEVPGIGPLTASALVASLGDIKSFSNGRAFAAWLGLVPKQHSSGGKSKLQGISKRGDSNLRSMLIHGARAVIRHLNPKRAVSQWLRDLLCRRHKNVVIVALANKLARIVWALLSKGTKYQESYSC

SEQ ID NO: 453523 - protein, 357 aa, unidentified
MRQQSNEISFKGQNIYVGIDVHLKSWSVTVLSENSVLKRFVQPPDPDALHKFLTRSYPDAEYYSVYEAGFCGFWIHERLTALGINNIVINPSDVPTTAGERIQKTDAVDSAKLARSLRSKELTGIYVPDSTSLEIRSLIRLRSTITKDVTRQKNRIKSHLRFLGYEIPEEMCSKYWPKRFIVWLRGLEMKTQSGKQSLDFMLDLLENLRKEKLDMTRALRALSRTEQYEKTLELVMSVPGVGQQVGMALLAEIVDIKRFKDAEHLAKFVGLVPMCHSSGESEGVGDITIRKHAFLRTLIVEAGWQAIRQDPAMTLSFETYCKRMKPSKAIIKIARKLVNRIYFVMKWQTPYVTNVVS

SEQ ID NO: 453524 - protein, 342 aa, unidentified
MSIPHVGVDLHKQTSQVAILADTGEITQHRLPNDRTVIKSFFRELPTPARIAIEATGTWWWIVDLLESLGHDVSLSHPKQTRAIAAARLKNDRVDAQRLAVLLRANLLPTVWIPPQPVREARELVRHRLHLVQIRTRVKNHLLALLARRNLRAHCGQSWLSVRGRQELERLSLGETPGRIVENCRKLLQLLDDQIRGLEIALIERFHDDPHVQRLQTIPGIGRFLATLLVIELGDIRRFPSAKHLVSYVGLVPRVRASGERVRLGHISKEGSPILRWALVVAATQAARQPGPLQHWHRQVLVRRGPMIARVALARRLLALVYEIWTRETTYTLQLRPSAVQR

SEQ ID NO: 453525 - protein, 348 aa, unidentified
MLHAGLDLSRRRLDYCLLDEQGDRVESGAAPPDRDGLRRFARLVDDRYGPVRVRAALESMNGARFVHDTLERSGWEVEVADAQKVKGLAPLACKTDRIDAWVLAELSRRDLVPAIWLPSFEQRQERERARWRLFLVRKRSSLKHRIHAQLLAFGHRCPVSDLFGRQGRELLARLDFPEPWHGGVLAAVQMIDELDREITQIDRELKALGCGHRYIPLLQTVPGIAWVLGYTIASEVGDIHRFASPAKLTGYTGLCPRVYQSGDTDRRGPLTHAGPKHLRWALMEASTHACKHPIYCERYQRNKHRLGKQRGAKVAQVDIARRLAEAIWHMLTRNQPFAPAGATPSLAA

SEQ ID NO: 453526 - protein, 373 aa, unidentified
MPGCDHRLVDRHAWELRVRGTAGSQAVSFQTRTVARAAFASSNLLGWDVMITNTSKFTVFVGIDVSKDHLDVHFLESAKHVVVENKTQAISKLIVKKISDPATTLVVLEATGGYESVVVKALQEHKIPVAIVNPRRVRDFARAIGNDAKTDSIDAKTIALYGQVTNPKPTPAKSEELEKLDSLTTRRQQLLELINQESNRLQQTHDQEVCKWIESSLKSLKKQLKNVDDRLKACLKADPAVARIVEIVESVNGCGAVMACTAVARIPELGSVSNAAIAKLIGVAPINRDSGTFVGKRFIGGGRGDVRRVLYMATLVATRFNQRIKGYYQHLLAKGKQKKVALVACMRKLLTILNTLVKKNELWKDEMSVPVNH

SEQ ID NO: 453527 - protein, 394 aa, unidentified
MKLIGIDIGKNKHFFCIMDKDSGEIVSQPASFSNDKEGFDFLLQKIKSYPKNSVLIGMEDTGHYHFALLKYLLDLQYTVALINPKTTDFNRKMQGGITKNDKLDTINICDVLDTPERKKQYRITKVNNFDLYEQKQLTRQHHNLKEELNVYKNRLQKSIDIVFPEFNSLFKSKYGTVYINILKTFGSAENIVNTDIRTIRKCFEIDGRGNRISLTLERLKERARSSIGISSIAEVIQIKHLSAQIDLIEEQLSEIDKKIEEFSIQNNSPILSIPGISHFSGTSILAELGDISNYSKPSQIIKFAGVAPLHYESSQFNAQHTAITKKGSKYLRKTLYQIILPVIRHNPVFNKYYQLKISQGKGHRCAQGHCVRKLLRIIYHLLKTNQQFDPQLLR

SEQ ID NO: 453528 - protein, 450 aa, unidentified
MKKAKGFGEVNRYVAGIDLAGAADHYVCGPRKDDGTHDIEHFGTTTSELSRMLAWLLDRGVTSAAMESTSVFWIPVYDMLECGGISPVLVDTRQVHMIPGKKSDVQDCQWLQRLHSCGLLRGAFRPPEKYNAIRSVIREKANVSAMRTQAIQAVQKAMDQMNIRLHHAVSDITGVTGMRILGAIVDGERNPRVLAKMRDRRCKKTEEEIAEELTGNWRDEHLFTLEQAYKTLVFLEERIAAFDQKIRAMYAKLASESGRPDPPDPEHRGKHKDRVDIAAKRDLTKLLGGFDPTTIDGIDYGLAAAIVSETGTDLSMFENEAHFVSYIGLKPSQGKSAGKNVRTGKKAKNTNRIGQYFRQAAYTLSRSNCEMGARYRCVKSRTSPATANKDVARELAKRFYRGVRYGQKYVDIGEEAYERRRREQTVRNMIRKISKLGIKAEELGFLQQAG

SEQ ID NO: 453529 - protein, 374 aa, unidentified
MTMLETAVCGGVDTHLEVHVAAAVDSIGGLLGVEEFEVSKAGYEKLLSCLRSFGTVVRVGVEGTGSYGADLACFLAQSDLDVVEVDRPDRQERHRKGKSDPVDAIAEAHAALSGKAKGRPKGRNGNVEAIRVLNVARRSARNHRISTLCQMRHVAFCAPDELRVQFKGLTTHQLVTKAAGLRPGRSTDTVLAMTKRALRELGGRAQNLNAEIARLEEQLEVLVRRTAPELIGLYGVGVHAASLLLVAAGDTPGRIRKEAAWAHLCGVAPIPASSGKVTRHRRRASSQPTTISMRAGSIGRVRIRSTRTPGSTSRLRSRAAAKARSLSRWATSLDTTRSCGSRHRPRPGFELWFSNRTRRCSQPAGKVAVEMLTP

SEQ ID NO: 453530 - protein, 385 aa, unidentified
MLVADRLPAPAAIRVDLGAIFVSMELSKSTWVLTSLLPGAGERMSKHAVRAGDVAALLERFAQLRAKAKRRAGQEYEIIVIQEAGLDGFWIHRVLEQEGIESHVVDPASIATSRRRRRAKTDKIDGEALVRALLAYKRGEPRVCAMVRPPSVAQEDRRRLNRERRVLMVERTQHINRIKGLLFSQGITGYEPMRRDRRDRFKDLRTGDGRDIAVHMQAQIGRELDRLELVIEQIKALEVERDAVLAAETSDQPMTMLTSIKGIGAESAAILTSEGLFRHFDNRRQLAAYAGLAPTPWQSGSISREQGVSKAGNARLRTAMVELAWLWLRYQPETKLARWFHERVERNGGRLKKPMIVALARKLLVALWRYATAGVIIEGAIVRTA

SEQ ID NO: 453531 - protein, 380 aa, unidentified
MSNLNTPVQDCFVALELSRTKWLVGALLPGRTKVITTLVPGGNATKLIEVLRRLATQACRAAGGAVSLKVCYEAGYDGFWLARYLISRGIETYVLDPASFLVSRRGRRAKTDRIDVEAMALTLKAYLAGDRSVCRAVSIPSPEEEDAKRLSRERTQLAAEKTRHTNRIRGLLSLHGIREVKGLWGGDWANALCDLRTGDGRELGTYLRAEIAREFERLHLVLCHMKALDADRHAALTQESSAFPERHKADALTRLAGIGQISATALAAEVFHRRFQSRKHLASYLGLAPTPYASGDSERDQGISKAGNQPARTLLVELAWCWLRHQPDSSLAQWYRRRFGEHGKRARKVGIVALARKLAIALWRFVETGLLPEGARLSPQ

SEQ ID NO: 453532 - protein, 355 aa, unidentified
MTNTKYIGMDVHKESISIAVMNGFGKVVMESVIETKASTILQFIDGLRGELCVTLEEGTWAAWLYDLLKPHVSKVVVCDPRRNALLKDGNKSDRIDARKLAELLYLDKLHPIYHGEHGLRTLKELVRSYLTLTKDLGRVMTRVKAIYRSWSIPCTGKQVYAPRHRSEWLAKISEPAVRRRAEFYFEQLDALRTLRQQARRELLAESKKQPAWRRLCQIPSLGPIRAAVLMGIVQTPHRFRTKRPLWKYIGFGIETHSSADHRSVHGQLQRSRKKISVRGLNRNCNHDLKNLFKGAAIVASSKPGPFQEFYAALLAKGMRPEMARLTLARKIATIALIVWKKGASFDAQYLKPQTA

SEQ ID NO: 453533 - protein, 389 aa, unidentified
MKIFVGIDLAKLNHFAAAISSDGEILIEPFKFTNDADGFQLLVSKLESFDKNSIIIGLESTAHYGDNLVRYLVAEFYQVCVLNPIKTCQMRKNNVRKTKTDKVDTFVIAKTLMMQDDLRFITFFDLDMMDLKALGRFRQKTIKQRTRLKIQLTTYVDQVFPEIQYFFKSVLHQNAVYALLKEAPSPKEIASMHMTHLANLLKVNSHGHFTKEQAEELRVLAQKSVGANDSAISIQITQTIQQIELLDSQLEKIEAEMTDIMKFNDSVIMTIPGIGYINGGMILGEIGDIHRFSNPNKLLAFAGLDPSVYQSGNFQAKTTRMSKRGSRVLRYALVNAAWNVVRNNATFKAYYDAKRSEGRSHYNALGHCAGKLVRVIWKMLTDEVEFNLE

SEQ ID NO: 453534 - protein, 426 aa, unidentified
MKNNRNERINQVHENTLVIGIDIAKEQHYACAVDIRGRELAKVWRINQSTDGFIHFTRSIQKLMDKHQKTDVLIGFEATGHYWKNLAFYLESSDLPYVLVNPLHVKQSKEMDDNLQTKNDAKDARVIAKLLPNGYFSVPRNMTTIDHHLRQGSAIRERLRKDISAVKNRIQRWIDLYFPEFRQVFKHYGKQERTVLKLTPLPMDIKDASVEELVSQQKTAGAKYAGKPKMKKLIDLAQRSIGITDGAYMARIEIQGLVNQLELLELQLEEVTAEMIEKAKSLPEFQFLVSIKGISENTVSELLAETGSLQNYNHPRQIIKLAGFTLRENSSGKHQGAKRISKRGRRRLRALLYKAILPLIQNNTAFHKVYTYYYSREDNPLTKKEAMVVLCRKLIQVLHGLSTRQTMFDPERMLEDLSYITSSKAA

SEQ ID NO: 453535 - protein, 385 aa, unidentified
MHQVESECSVLDGVAVFVAIELSKSAWLFAAQASPSGKTSSHRLESGDITGLVALLRRLQARERQACGGGTVQIVVGYEAGYDGFWLQRRLAAEGITCWVMDPGSLQVNRRARRAKTDRLDAAMLLRALIAWCRGDRAACHMVQVPSVAREDARRTHRERQRLVAERVQHVNRIKGLLATQGITDYQPLRRDRSARLGEMRTKDGHALPPRLRREIERELQRLELVLEQLEAVEAERDAAVAAPAVDDADAAKVALLVRLGGIGNELATVLVREGLYRSFTNRKEVAAYAGLTPMPFASGERHREQGISKAGNPLLRKAMVELAWLWLRYQPDSALARWFTDRVGSVRGRIRKITAVALARKLLVALWRYVTAGLMPEGARVKAA

SEQ ID NO: 453536 - protein, 415 aa, unidentified
MALKIVYKICCGIDVHKTFVVACIASTDSKGVTTYEHHRFSTYTKGLKDLLQWLLEHNCKDVCMESTGKYWIPVYNVLENDCSIVLAHPKYVKAIRGKKTDKKDAKWIADLFKHDLVAGSFMPPADIRQLRDLMRYRFKLTCFMSSEKNRLQNCLTVSNIQLGNVVSDTFGKSAQAILDKLLENPADTSFDLEPLVYKSLKKKLPELRDAIDGYITPEQAGKLKVIKAHYENLESRKAELEELILALAAPYQQELAILQTAPGIRSDFTAIGIISEIGTNMEAFPSAKHVCSWAGLTPTNNESAGKKKSVRVSKAGCYIKPLLVQCANAVVTSKKHPEIRNRYLRIKKRRGHKKAIIAIARMLLTALYHMLKNGENYNAELYRKSDLLSVDREITVEQAIIIARKQGYKIKSATA

SEQ ID NO: 453537 - protein, 304 aa, unidentified
MFGIGIDVSKAMLDVAVHDEQFRQFSNDKRGFASLIRWLKKWPIKQVVLEASGGYERAALDALHSAGLPVVRINPARARRFAQGIGRAAKTDRIDATVLAQMAHLLSLTRYVPPAPWQQRLAEFSQCRRHLVQMRVSEMQRLRRLVDPDLIAMKKRHIAQLSDELKQLDKAIGEQLEGQPGWQNIGSVKGVGPILVSTLACELPELGSLGSKAIASLVGVAPMNRESGTWHGQRRISGGRAVVREALYMAALTAIRYEPKLRDFYAGLKAKGKASKVALVAVMRKMLVILNARKRDAEVALGSP

SEQ ID NO: 453538 - protein, 436 aa, unidentified
MRGCRCSMIMGFTKPIEHFNLQRKKVITMNTLYVGIDVSSKSNVVYFMLPDGSKHCNFSVANSHTGSSQLVKRILSAMTSCSLDTVLIGLEATSVYGDNLVYFLREDAALARFNSKIHVLNPKQVSKFKEAYNDLPKNDLIDSFVIADCLRFGRINKEVYIGDYRYKALQNLTRARYFAVSNLIKEKQRFMNILFKKYSTMTQEKVFSDTFSTTALAVYDEFESAEALADMDLHELTAFIMEKGKNRFPNPNAVAKAIQKAARSSYRLPKTVNDSVNQVLSISITSIKALEAQIKEFDKAIATQMELLPNVLISIPGIGPVFSAGIMAEIGDINRFHNQAQLAKYAGLAWKQHQSGDFEAQTTRLINSGNRFLKYYLCEAAFSLVRCDKEYSDFYHLKYKEVNRYQHKRALALTARKFVRLVFRLLKDNRLYTSAE

SEQ ID NO: 453539 - protein, 400 aa, unidentified
MAQQLWAGVDAGKSDHYCVVIDTDGQRLLSQRVANDEAVLVELIDEVMALADGGEVTWAIDLNAGGAALLITLLVASEQRLLYIPGRTVYHASSGYRGDGKTDAKDAAIIADQARMRRDLQPLRPGDDIAVELRILTARRTDLVADRTRAINRLRAQLLEYFPALERAFDYSTSKAALILLTGYQTPNGLRRAGAARLTAWLAKHKARNASAVATKAIEAANAQHTTVPGQNLAATMVARLAKEVMTLDTEIDATETMIEDRFRRHHHAEIILSMPGFGVILGAEFIAATGGDMSAFDSANRLAGVSGLAPVPRDSGRISGNLKRPRRYNRRLLRACYLSSQIAIRTDIASRTYYDRKRTEGKTHTQAVLALARRRLNVLWAMLRDHRIYQPTAPNAAVA

SEQ ID NO: 453540 - protein, 335 aa, unidentified
MKEVTTVGIDLAKSVFTVHGVDGVGRTVLRKTVRREKLMELIASLPRCQIGVEACAGAHEWARKFEGHGHRVGIMMARFVAAYRKSSKNDGNDAEAICEAVGRPNMRFVPVKTEQQQAILSLHRVRQGFIEERTATINRIRGLLAEFGVVLPQRADQVRRAAVVAAEALPVLAREAIADLRAHLSYLDERINRYERQLVALATMHEPARRVQGVPGVGPLTASAITASMSSGHEFVNGRQFAAWLGLVPRQYSTGGKVRLGRITKRGDGYLRTLLMLGARAVLQSAARKRDRLSRWALALRARRGYHRAIIAVAAKNARIIWALLARHREFVLPV

SEQ ID NO: 453541 - protein, 355 aa, unidentified
MKNQAIQYLALDVHQATVVACVRDENGAIVMRATVPTEERPILNLVRAAGPRVHVAFEEGTQAQWLHDLLQPHAERVVVCNMRGKSEATNKSDRIDAAEVSERLRLGSLKTVHHGTTSVLTLKEFVRNYNSLVEDATRVMLRIKALFRARAIRVSGMSVYRPAERQTWLDRITTPGARFRAASLFEQLDLLLELRPKAKAAMIAEAKKQPGWKPLRSIPFLGDVRVAQLIAVMATPHRFRTKRNLWPYAGLAVVTRSSADQEFADGKLRRRSRAPRTRGLNRNHNPTLKSIFKGAATAAAAKPGPLKDIYEACVARGTKEDLAKVTLARKIAAIALHLWKKGDLWDSKKLTLQTT

SEQ ID NO: 453542 - protein, 341 aa, unidentified
MRYLAVDLHTNSFTVCVRYENGREKLATYRMSELKQFIHTLKDTDMLAVEATGNTRFFVDMVKPYVEDVIVVDPNKFKVIKSSIKKTDKNDARLLSWFLSKDMLPEARLKDKKQAQISSLVGTRDKLVKLRTTLFNKIHNILNHHGIKSNKEAFGSEKGLDKVLSMDFDMIVKVELKVLVEQIRSLTDGIRKLDVQIKEAGSTMKGHQNLTSIKGIGAKSATVLLSVIGNVNDFADFDKLASYFGIVPRVSNSNETERHGRITKRGSKIGRTTLVQFTLIAKRYSPYLQKFYEKIRRRRGTGKAIIATARKLLGIIYETLKNNWIFEDFPNFVLANSCVKK

SEQ ID NO: 453543 - protein, 354 aa, unidentified
MAHASTGVIGGFDCHADTHTAVALDPLGRRLDTATFDATGDGYRQALGWLQSFGPVIAVGVESTGGYGAALARHLLEARVRVIEINQPHPHTRARRGKSDPIDAEAAARKVLSGEATGAAKDTTGIVEAIRQLTVAREGAVKARSAALCQLGDLIVTAPTQLREQLDPQNTLQAKASVCARLRPKGANIDDPTQAAKAALRSVGRRIKTLTAEIDELTGELDGLVAIAAPTTITQFGVGTCHAATLLLAAGENIDRFTSEAAFAHLCAAAPIPASSGRTSRHRLNYAGNRQANRALYMVVIVRLRYCDETKAYVRRRLADGRTKKEIIRCLKRYVARQLFRTLRADLATLAARS

SEQ ID NO: 453544 - protein, 349 aa, unidentified
MRFYTSAHRFYCGVDLHARSMYLCILDAGGQVVFDKNLPASGQAFLQAIAPFRDGLVVAVECLFCWYWLADLCAREQIAFVLGHALYMKAIHGGKSKNDQIDAGKIARLLRGGTLPQAYVYPAGMRETRDLLRRRQYLVHKRVEAIAHIQNTNSQYNHPVFGKKLGYAANRDELDIANRFTDPSVKKTVEVDLALIDHYDALLGDVELYLTRSAKVDDVQTYHRLQTLPGVGKILALVLLYEIHDINRFPDVGNFLSYARLVRCAHESAGKQKGSGGKKIGNPHLRWAFSEAACLFLRQSERARRWKAKQEKKRGPAKAMGILAAKLARAVYHVLTKKVAFDEQRFWNC

SEQ ID NO: 453545 - protein, 412 aa, unidentified
MDMPVIVPRACGLDVHKKTVQACVHILDKRGQGSEALQTFGTTTRQLLALRDWLMSLQVTHVAMESTGVYWKPLWHLLAGDLQCLLVNAQHIKHVPGRKTDVTDSQWIAQLLQHGLLRSSFVPDPPPQQWRDLTRLRTPLVAKASQAANRIQKVLEDANIKLASVASDPLGVSGRAMLHAMIDGQQDPVVLASYAKGRLRSKNEELKEALLGRVTEHHRFLLQVLLDDLAATEQLIERVEQRIEEAMAPFAPQIQLLDQIPGVDLHVAHVILAEVGPDMSRFPSAAHLCSWAAMSPGNHESAGKRQSGKTRKANRWLRAALVQAGWAASHTKNTYLASLYARLVGRRGKKRALIACGHSILNSVYYMLRDNVPYADLGSDHYERTHGQRLARMLVARLEAQGYTVTLERHAA

SEQ ID NO: 453546 - protein, 366 aa, unidentified
MKKISTVAKRGNEIFEEPKLTIGLDLGDRTSHYCLLDEAGNVILEHSLPTPPKGIQQVFSRISRSRIALETGTHSPWVSRQLTRLGHEVIVAHARNVRLGGESSRKDDQFDARTLARLARIDPDLLGPVRHRSAKAQIHLTVIRARAGLVSARTALVNTARGLAKSYGERLRKCGTGQVGRALAGGLSAALRDALDPLLQGIESLNERIAEYHRRIEQIAKEVYPEVALLKQVKGVGTLIALTYVLTLDDPHRLRRSRDAGCFLGLRPGRRNSGMSEPQMHISKEGDRYLRTLMVQGAHYILGPFGEDSDLRRWGLKLAERGGKNAKKRAVIAVARKLAVLLHKLWVSGEVYEPLRNNHKVVSAVA

SEQ ID NO: 453547 - protein, 319 aa, unidentified
MDNLSHGRVIGIDVSRNWLDIHCLPDGHRLRVPNAPAGHASVANLARDREAIVCFESTGGQEWQLWIRLEAEGVAARQVPPAQVKAFAQSRGTRAKTDRIDAELIARFFAFRPEAGRSLPAEKLRLLRALTSIRPQLVEMRKRLLAQVRAHQKLGTAAMFEDVDTELKQRYDSLIRELEDRITHAISSDDRLSEMATVLRSIPGIGPVASTMLIAEMPEIGTITGEQAAALTGLAPVAHDSGTLRGKRAIAGGRRALRHVMFQAALVAAHHNPSLRSFADRLRKAGKPHKVIITAVARKLVTIANALCKNRQKWTAKTA

SEQ ID NO: 453548 - protein, 364 aa, unidentified
MNKCHSNTELSSHEGTRRQFNGGKADIKLGIDVQQDFYVVVMQEGGSDPKPPQRFRKEAFLHWAAKLAGSGAQVHAVYEACGFGFGLQRNLTALGIDCYVVCPQKLDEQNRRVKTDGLDAKALCLKLDRFVQGNRDAMALVRVPTEQEEQQRAIHRQREQLVKARKQLEAQGRSLMVNHGLEPVQNWWKPRTFAALPVPQWIRELLLNSQPILLALQEKIAALTVQLQSAAAPNQPRGLGKMTSVVIDREIGDWYRFNNRRQVGSYTGLCPGEYSSGNTRLQSCVTKHGNPRLRAALVELAWRLVRLQPNYKPVVKWRQILAKAALATGAARKKAIVAVARQLAVDLWRVRTGRCKPEVLGLEI

SEQ ID NO: 453549 - protein, 386 aa, unidentified
MRKSNDLSRCLAALEQDSTLIAVIEMGKSSWLVAGVVPGIERRPLKKLAANEGALLALLYRWRDEAKKAGHPIKRICVAYEAGRDGFWLARWLRKRKIEAYVIHSTSVCVSREHRRAKTDRLDTEHLMRAFIGWLRGETDHCRMCAIPTLEEEDGKRPSREHEHLVGERTRIINRLKSCLARLGIRDFNPASCKAPERLAKVRTPEGTPIPPNSLDELKHDMAHLRFISDQIDEVEKARLARLQKAPKKGPHAMVRLLASIHGLGIETADTLVHEVFSKNFRDRRGAPRYAGLTGSPDESGERRREKGLARAGNTRVRRSMIQLAWRFLQFQKESALVQWYYKRTADGRKDTRKTMIVALARKLMIALWRFVTTGEIPAGVQLRAA

SEQ ID NO: 453550 - protein, 361 aa, unidentified
MRSRESQDAGPAPPVHPEQLLGLDTPVFARLGDAGGSRGRKGAIVEPEKVFVGIDVGKYHVEIALSDRGEVSRFTNDDSGIGEILGLLEGRSVGLVVLEASGGYERQLLASLLGAGIPAVAVNPRQARDFAKALGRLEKTDAVDARMLSQFARSVRPPVRPRVSEELAEMQDWLTRRRQLVEMLVAEKNRSQHAKQGVLKDIREHIDWLKKRIRDSEKELGEMLKKAPEWNAEVEVLDGIKGVGRVMAIMLLVAVPELGTLNRKQIAKLVGVAPLCCDSGTLRGKRTCWGGRADVRACLYMAALVAARFNATIQAFYRRLIAVGKPKKLALVACMRKLLTILNARIRDHRAALSGPRAALS

SEQ ID NO: 453551 - protein, 400 aa, unidentified
MLSIGIDVSKGKSTVCGMKPGGEIVYAPFEVQHTIEGMSELVSLLRSSGEEVRAVLESTGSYHCPVVTALLENGIFVSVVNSLRMKRFCSQSIRKVKTDRIDAMQIALYGLAYWQELQPTRLPEDTYRELQLLARQYYQMTSLLIKAKVDFNAICDQVLPGMQELMSDHAGRHKLSDFVLRYRHTTHILEMGETRFRKDYCKWAEKKGYRNCERMAALIFATAQNGIPVLPNAPSTQIVITEAIRVLHTVEASRDAILTQMQALAKTLPEYSLVREMPCIGDTLAPRLIAEIGDVRRFHSKRALIAYAGIDAPPYQSGKFCANNRHISKRGNRYLRKTGYEVMQSYVMHKPTNDPIFTFIEKKRGEGKSGKLAMVAGLNKFLRVYYGKVTELYRSLPAIE

SEQ ID NO: 453552 - protein, 346 aa, unidentified
MQYYTERHRHTCGVDLHGRNLYLCVLDPDRKIVLHRRVDCDEEKLLRALAPYREDLVVGVECMFKWYWLADFCDEHGIPFVLGHALEMKAVHGRKSCNDRLDAERIARLLASGMFPVAYVYPKEMRSTRDVMRRRSFLVNQRSSLISHIQVTNLQYNLPEMGKISRADQREGIETRFEDPAVRASIEADMTVIDILDVVIPRLERTIIKAARGHDGHAFVLLKSVHGIGNVIGLTLLYEIHDIHRFDSLGGFLSYCRLIKCIKTSDNKPKGSGKRKQGNHHLKWAFSEAAVLFLRANPEGQKLHSRLVKKHGKAKALGILAAKLARSVYYMLHRKTPFDMDRFIRA

SEQ ID NO: 453553 - protein, 362 aa, unidentified
MQHQGNELDFKGYNIYVGIDVHLKSWTVTILTEAQPHKTFSQPPKPEVLAIYLEKHFPNGSYHSAYEAGFSGFWAHYRLISLGINNIVINPADVPTTQKEQYHKNDPVDSRKIAKALRSGLLIPIHILGNEAIEDRSLVRTRSALVKDMTRFKVRIKSFLFFFGINYPENFENTRTHWSRNFMQWLKEIKLETWSGRTALDMLIREAENQRQLLLEINKKIRMLCRSDRYKQNVDLLQTVPGIGMTNAVVFITQIESVERFRTIDELASYVGLVPTSHSSGEKDNKGEMTFRGQKILKSMLVESAWVAVRIDTALSLSYNTYIKRMQPNKAIIRIARKLLNRIYYTLKNKRPYQTGIVGQNL

SEQ ID NO: 453554 - protein, 349 aa, unidentified
MKKHSKAERHPAETIGVDLGDKMSRYLILNEEGLAVEEGSFRNNADSIGKHFGNRGRARVALEVGTQSAWISREFTKLGHEVIVANARELKWITSSDTKNDRNDALKLARLARADRNLLAPVEHRTAEQQAELAVIRARDALVRSRTLLVNTARSLAKGFGLRLPASITTTFGARALAGLAEHLRTAMSGLLEQIDALGVKIGDYDRRIAEVSAKHPEMERLAGVPGVGTLTAAAFVLTLGRRERFAHSRDVGSFLGLRPRQRQSGERDPQLGISKSGDKYLRKLLVQCAHHILGYWGKDSALRQWGLSKSDGSASKKRAVVAVARKLAIVLHRMWMTGEKFKPFPKMV

SEQ ID NO: 453555 - protein, 339 aa, unidentified
MNYVGIDWAYGRAAYCAMGEGGEIKAEGLISADEDGLAKLVLRLGTEAKAAVEMMSGAVWVRDRLEVAGWQVQVAHARKVRDVAPLACKTDKVDARVLAELRRRELVPELWLPSAEDRALRELLRRRAHLVKARTSARNRIFGLLTQFGLRLSHRRLLRPDAMELLESRGVPAVWRASIAELLELSDEMDRRIDPIDRELRPLARGDERASLLVTIPGIGPLLGLTLAAEIGEVSRFASPGKLIGYAGLAPRVSQSGKRSQTGSLSKAGSRTLRWAAVEAANQAWRPTNPWHEHYLRVSARHGKNPAKSAVARKLLIAAWHMLSRREPFKPAPASSSAF

SEQ ID NO: 453556 - protein, 427 aa, unidentified
MTTPYRPDPSQFAAWIGIDWADQEHAVCVVDADAGSFERSTLAHEPGAIDDWAAELHRRFPGPIAVCLEQSKGALIYALMKYDFLVLYPINPKQLARYREALTPSGAKDDPADAELLVEFVRRYHQRLRPWRPDDETTRLIAILAEDRRDLVDLRTQLANRLQSRLKLYFPLVLQVFRRRSKLYSPVVCELLLRWGTLEELQAADTGDLRAFFRLHQLHQKTIQQDLAKIREAKPLTKDEAIVRSGRLVSQALARQLVDLADAIARCEAELAKRMEMHPDAQLFTQLPGAGDALAPRLLAAFGTDRERIESAGDMQTYSGIAPVTRRSGKSQFVVRRHACPDFLRQTFHEFARCSIAKSVWAEAYYRMQRQRGKKHHAAVRALAFKWIRVLYACWKSRTIYNEFTYIQQLRNSQSPLLAYVSANATP

SEQ ID NO: 453557 - protein, 432 aa, unidentified
MQLWCGIDWAKNHHDVSIVEEGGTQRVRLRIDDTVAGFTQLMTMLAEQQSLCSEPITAAIETSKGLLPVALRAAGVPVVAINPLAVSRYRDRHSPSRSKSDAGDAYVLANILRTDPHSHRSLPVDSELAQSIHVLARAHQDAVWDRMQIANKLRSVLREYYPTFLAAFDDLASREARATLRLAPSPMHGQQLRKSSLTAALRRTGRTRGIPATVNTIHAALHVEQLRQPTLVESAMAEHATALLHALDTAVANVARLEQSLTLAFDQHPDAQIITSFPGLSTVLGARILAEIGDDRSRFATARGLKAFAGTAPVTRASGMKTVVTRRVVRNKRLGQAAYLWALPMLAHSPGAHAHFTTRRERGDSYSAAARNLTNRGMGMLHHCLQTRQHYDESRAFPNRPPHPVTSSKPSAHDAHQETEAQPESIAASSGQ

SEQ ID NO: 453558 - protein, 348 aa, unidentified
MLADQLDYVVGVDPHRDSHALAVVDVRTGAVVFETAVAANSDGYARALELVDVHAPGRRAFAVEGSGSFGAGLTRFLSGGGERVLEVGRLRRERRSGGKTDALDAVRAARSVLGQERPATPRAGGERQALQALVAAREGAVNAKCAGLSQLRDLLVTTPEPLRNELRRLTPARLLRRLAATRPDTRRDPELRGSLLALRSIARRVLQLTAEERELAREIETLTRKLAPQLLDQPGVGPHAAAQLILSWSHPGRIRSEAAFARLAGAAPIPASSGQTVRYRLDRSGDRKLNRALHLILVTRKRTHPATNAYIQRRIQEGKTRREATRCLKRYLARNLYRLLEHGPPTMA

SEQ ID NO: 453559 - protein, 420 aa, unidentified
MTLFVSIFTTLLAIINPLEPLPVFLRLLEGKDRREPSWSDLGGRGERPDWGQPVMRWTPPRRPWCARVVVLVTTEQEASVSEASTIGLDIAKRVFHAHGADSSGKVVFRKRLRREQVLAFFAGQPACVVAMEACGSAHYWAREIGELGHTVRLIPPAYVKPFVKRQKNDATDAEAICEAAQRPTMRFVLVKSEAAQANAVVFRARDLLVRQRTQAINALRGHLGEYGVVVAKGPSHVTKLIAHVEDPTAGLPEAARTVLRVLTASLQFLSERIDLLDREVARRAREDKEVRRLTTIPGVGPVIATALAAIAPPAGAFKRGRDFAAWVGLTPSQHSTGGKQKLGATSKMGERTLRRLLIIGASSVVRKAIKHGTPSGSWLGRMLARKPRMLVIVALANKMARTVWALQATGEIYRAPIVAV

SEQ ID NO: 453560 - protein, 321 aa, unidentified
MTRIICGVDISSASLEARIGPEGACGSFPNHAEGIRALASFCQTHQVQLVAMEATGGYEQQAFAQLSQQGLAVAILNPRAVRQFAQSMGSLEKTDRIDAGMIAWYAEVKKSPPACVAPESQQHLRALVTRLRQLTDLRTAQLNQQRLVTDRAVQASFQELLAVLARQIRELEQDIAALLDQDPLWRELNQAFGTIKGVADRTVARLMAEMPEIGALSNKTVSKLAGVAPLANDSGKHQGKRAVRGGRATVREILFIVASVVGRHEPDFIAFQQRLRAAGKPPKVVRIALAHKLLVRLNAKAREVRQRLPDRMAQPAAGEAY

SEQ ID NO: 453561 - protein, 307 aa, unidentified
MRITSRRFAPESLFFFETHFFCSIMSKIPLSSPVVPVVGIDVSKATLDVCVLLSDQRPLRRRVSNDQEGHAELLAFLSQIGAHKALVALEATGPYSLAVATAAFTAGHPVTIFNPRRVLDFARAKGRRNKTDRVDAALIAEFALSDPPALWQPLPEAQNTLREFTRRRDDLENLLHSELRRLETAPAVLKLKASLQRSVRFLKAELQRLEVALKVHLKSQVSLQDDIRRLEAIPGIGSKTAILLTAEIPRHFKNARSVAAWLGVIPQQWTSGTSVRHGAHISHAAPSLRAKLYFPAISASSPQASPR

SEQ ID NO: 453562 - protein, 319 aa, unidentified
MTQIVLGIDVSKKTLDAALIFNNRTLSKQFKNSSEGFKLLAAWLASLQIKQVHACLEATGVYGEAIALFLHECGHRVSVVNPLRIKGYAQSNMQRNKTDRLDACLIAAFCLTQRPDEWKPPSAEVKHLQSLVRRVEVLEEMLQAEENRLSNAALEIKPSIERMITLLKEEIKELERQTKWHINQHPNLKEQSELLQTIPGIGARTANLLLSEVEFERYSSARAIAAQAGVTPRKRQSGTSLKQTGLSKLGNARIRRALYFPAIVAKQHNEIIKKFAERLKKNGKTPMQVVCAAMRKLLHIAFGVLKHKRAFDASLAFSA

SEQ ID NO: 453563 - protein, 320 aa, unidentified
MTILDSQVVVGVDVAKDEIVVYRSDLQKTLKVANKRSTLKQWLKTLPTNSALALEATNIYHLDTTEMAHEMGHDVYVIDGSRLNKYRDGIGMRAKTDALDAELLARYLSRESDRLRIWNPPPKAYTQLKSLLRRRAQLVRGCVALKQSWKNEPLLKEQFNQLLAAIAQFEKTIQKTLKEIAEDAGMQDQVKRCQAVEGVGLLTATAAATAFLRGEFANSDEYVAFLGMDPRVRQSGQKDQRRWLSKRGDSEFRRLFHNSAMAASRSPVWKPYYQSYLARGLKGTQALVILARKLARVMFALMKNQSEYRPNSMLGGSPQT

SEQ ID NO: 453564 - protein, 377 aa, unidentified
MNAAAHQKCTAAEVSKMEYVGVDVATRSCSALILDEAGGIKMCLEEFANEESGWRALTEAIGPDAQIVMEAGTAAYPLYDFLCRGGFNVVMADPRKIKMITASKSKTDEKDAMALAHLLRLGYVPKAYVPTPDIMRNRELLRACVDVGQEITQTKNRIHAMLTKAGLRPEYRSSRNLFASRRQLEWLRSVRFGDHRDTVLQCLLMLLESLQGQRKLLKAQIARIGLSSREVNILMSIKGVDYYAALLIISEIGDIRRFRNADTLCAYAGLVPGVRQSAEVVSHGRITKRGPGTLRWILDVVAQVVVRYDNPMSAYYRRLVRRKKKRCVAITAVSRKLLVMMYAMLTRGERCRWEDAHLTDVKIMLMRRTCARKVSAG

SEQ ID NO: 453565 - protein, 315 aa, unidentified
MEQPSAALTFIGIDVAKDRLDVHLRPSDEAFALGRDGAGLDALVERLGALAPALVVLEATGGFEVAVAGALAAAGLPLVVVNPRQIRDFARATGRLAKTDRLDAEAIARFAEAVQPAPRPLPSAAAQALGELVARRRQLVEMIVSEGQRRRQTRDPRLQRRLEAHLTWLQKELSALETDLDDAVRGTPAWRATEDLLASVPGIGKTSARTLIAELPELGSLDRRKIAALVGVAPINRDSGTFRGRRMVMGGRASVRTALYMPTLTAIRHNPPLQAFYRRLIGRGRPAKVAITACMRKLLVILNAILRDQTPWQHA

SEQ ID NO: 453566 - protein, 336 aa, unidentified
MRYIGVDLHRKMFEVCVITGTTRSHQQYQLKEIATFRNTLHKRDEVAVEATGNTKYFVRQIEDAIGRIVVVNPQQFKVISQSTKKTDRRDAETLAIYLEKGLLPEVRMKDDVHSQLASIAHTRDRLVKLRTVLKNKIHNILAAHGIETTREAYSSQKELEKVLRLEVNAAAKVELQVIVEQIRHLNEGIAKLDQEMTDRGKKLEGYEQITSIKGIGSKSGTILLSVIGNVQDFPDEKKLSAYFGMVPRVSNSSETVHHGHITKCGSALGRTTLVQCTLVAIKYSPYLRRFYDRLKAKKGSGKAIIATARKLLSIIYLTLRNRWVFEDFPNFVLRTT

SEQ ID NO: 453567 - protein, 534 aa, unidentified
MSRRPKKTKRAGQGGAVPSLRCIAPHAAGIDVGAIEILVAVPQDRDPSPVRSFETFTEDLHRLKSWLQPCGLTTVAMESTGVYWIPLFQILERAGMEGCLVNAQPVKPVPGRKRDVIDCRWRQSLHSVGLLRASFRPEERICGIRSLLRHRDSLVQMAAAHVQPMQKALTQMNLQLHHVLSDITGQSGLAILDAILAGERNPAVLAQLRHARVQASEEVITKSLVGDYQREHLFTLRQSLQAYRYYQSLITTCDQEIAEPRQNLDSRTPPDASPLPPERYPHRPRKNEFRFALRSERYRIYGTDLPAIPSINALTGYTVLAEVGTDWSKFRNGDAFASWTCLCPQNKKSGGKILSAHTRRSANRVNRALRLAAQTLERSTSYLGAYYRKMRARHGAPAAITAAAHKLARIIFHLVTTGEAYDESLFAAEEQRQRKRMENKLKRTAKQLGYQLIRWGKLHSVLQAASFLFIRSAVAASRSKAAAESKDPASARAEIDLKGNSPHEPAELSCPSRVFCERTRTFPSRAELFLTADG

SEQ ID NO: 453568 - protein, 462 aa, unidentified
MARRKRKNTSSSDALPPHLATVNLHAAGIDVGAEEHWAAVPPCDDPQPVRRFGANTADLEALADWLWGCEVTTVALESTGVYWIPLFELLETRGFPVLLVDPSKLPRSGRPKTDVHDCQWLQRLHTYGLLSACFRPEEQVVVLRSYLRQRATLLADAARDIQHMQKALTQMHIKLQQVVSDMTGVTGLALIRAILAGERDPRQLARWRDPRCTQDEAAIAAALHGTWRVEHLFVLQQALERYAFQHRQLAACDARIAAPVETCADQSHGAPLPPKRGQRRRHRNRPAFDPREPLYRMTGVDLTRIEGIDETTALIVISAIGLDMSKWPSEQHCTSWLGVSPQRRISGGKVLSSRTRPTTNRAAAALRLAAASLHHSQSALGAYFRRMKSRLGTSKAITATAHKLARLLYSMLKHGTAYVAQGLEAYEQQYRERVVKNLSRKARKLGYALVKPGEATVETSLA

SEQ ID NO: 453569 - protein, 433 aa, unidentified
MIRYVGIDLHKHLIVGHVVDPAGKTLDTFRYESVGAVTLEHIGRYRLKPEDQVVMEATTHCWAVVRALEPFAARVTVSNPMATKAIAKAKVKTDKVDAAVLAHLLRLGYLPEVWQPDQTTQVLREWTARRSRIIGQRTAVINRLRSTLAQRLLDCPHDMTSQAARDWIAGQIIDADTRWLLESDLRLMASLQVELDAMEKLLAKRGHIDPRVKLLMTLPGVSQHTAQALLAAIGDISRFPDADSLASYLGLVPTTRQSASHCYHGHITKQGRGHTRSMLIQASHSMRTNPGPLGYFFRRLRKHKPYSVAVVAVAHKLALLAWHLLTKGEPYRYALPLATKTKLQKLRVRATGQKHRTGPVPGKKPRTKVLGGSHLTKPLGTVYEIEGVPAASPAPTGERRHLAALKLESFVENLQQEHVIPRRTGKKATARDA

SEQ ID NO: 453570 - protein, 412 aa, unidentified
MHAVGLDIHRNFGEAAEIRDGVARQLGRFDLVRAKVVAFAKRLGDGAEVVIEATGNTMAVARLIAPHVKRVLIANPLQVRAIAHAKVKTDKIDALTLAKLHAAGFLPEVWQPDEATERLRRQVARRANVVQARTRLKNRVHAVLSRNLVRLPRGDLFSGPGRVWLASQPLELDEHQAVNSWLEELDRLGVELERIDQVLAKAALGDERVRLLMTVTGINLIVAIGVIAAIGNVSRFRTPEKLVSYFGLDPRVRQSGEGYARHGRISKIGRAHARALLVEAAWVAAVTPGPLRSFFTRIMRKRGKPIAAVATARKMAVIIWHLLTKNEDYAFARPALLEAKIRQMEIKAGLPSKRGGNKPGRARDYNIKALREKERALVAQAEAAYTRFVAAWSERPKENPRRAGAAKEERRS

SEQ ID NO: 453571 - protein, 466 aa, unidentified
MPWIATARDIADVQHAPVLVQPHAAGLDIGSEAIVVAVPPDRDLQPIRVFSTFTVDMHALVAWLVACGIDTVAMASTGVFWIPIYEVLEQADITPYLVNARHIKTVPGRKTNWNAAQWLQKLHAFGLLQASFRPDAEIRTLRTLARYRAELIGRRAPHINHMIQALKHMNIQLNLVLTDITGVSGLAILRAIIAGERDPQRLAQFRQPACKHSEAEIVKAVTGTWDDAQLFILTQSVDVFGYSTTKLIACDAQLEQPYQAMESRWEKDAPLPDLPPAKGESKSKNAMSFNARAQIARVIGVDLVAVMGVSAITVQTIISEIGTDMERFPTVKHCCSWLGLAPHNDISGGKVLRSRTMKVHRRANQAFRQEAHSVTRAHSSIGAYYRAMRARLRPKQAIVATAYKIARTVDHLLKTGEPYREESDAEYDRQRQEREVKHLARRAQKLGYTITAVPVRTPESLPESGG

SEQ ID NO: 453572 - protein, 416 aa, unidentified
MTAVMIGVDPHKGSHTAVVISAAEEPLGEIRVRASAAQAGKLTGWAAAWPERTWAAGGAAGLGRLLARQLVAAGERVLDVQPKLASRVRLLQAGGTNKNDPNDALSVAVAALRSRTCREVAAEDHPAVLKVWSRRHRDLARLRNQVACRLHAVLCDLVPGGIAKEISAAQAARILGQATPSGAVEVARAELAAEFLEDMRRLDAQLRGTRKKLAAAVRVSGTTLTQVFGVGPVIAGTIIGDIADVSRFPGRDHFASCNGTAPVEVSSGNRKTRRLSLRGNRRINHAIHMAAITLWGSRIRPPVLTWDLGGPLIFADEAAEDGPALDPRLGEVGDRVVGPGRTELTAAMGTSSVVVSLVLGQDRPQVPLAEDQHPVGDLGPGGEHESFRIGIRARASRRDLHGLDTGGGPRPRRTPR

SEQ ID NO: 453573 - protein, 342 aa, unidentified
MKEKVRFLGLDVHAETIAVAVAETDGEVRSLGTIPNRAESIRRMIRKLGPAEKLRACYEAGPTGYVVYWQLAELGVHCDVVAPTLVPVKAGDRVKTDRRDAEKLARCYRSGDLTAVWVPDEGSEALRDLVRAREAAKQDQMRARHRLSKFLLRSGQRPPAGVRSWTRPYLIWVAQLRFTQPAQESTRQDYLHEVEHMRARVTRLEQAIMEAVKLASPALQQVINDLQALRGIADISAVTIAAELGQVSRFGSARELMGYCGAVPSEDSSGKRIRRGGITKTGNAHLRRIVGEAAWSYRRPPCIWYGLRRRQESISEEAKEIAWKAQHRLHKRYMRLGAAGKP

SEQ ID NO: 453574 - protein, 351 aa, unidentified
MVVVGADVHKRTHTFVAVDEVGRKLGQLQVEATTPGHGKALAWARREFEGELVWAIEDCRHLSARLERDLLTAGARVVRVPPKMMAQARASARTRGKSDPIDALAVARAYLREPGLPVACHDEVSRELKLLVDRRETLVAQRTATINSLLWRVHELGPERAPKSRTLDLAKHQQALRVWLVAVPGIVAELALDELEDIIALTARINALARRIAGLTKKVAPSLLAMPGCGSLTAAKLIGEAAGVTRFRSEAAFARHAGVAPIPAWSGSTAGRVRLTRSGNRQLNTALHRIAVTQVRLAESRGRIYYDRKRSEGMSKREALRCLKRLIARSVFTHLNVDHQNRTATPLAAAA

SEQ ID NO: 453575 - protein, 338 aa, unidentified
MITYYCGIDLHARKSRVAVLDSSNKYLVDETVDNDYPRIASLLEPWKHRIKIAVESTINWYWLVDDLQDDGYKVILVDSANCSAISNVKIKTDKRDARKLAKLLKADVLPTGYIYPKETRPVRDVLRRRCHLVVQRATEYSALQRLMLKYNHQGFTRNSIKRFTKDMIPRYFKDPFLKTDALLILQRIQLLSSQIEFLEDGIMREANKTPDYSLLQTLPGFGVILALLVKYEVGNIDRFPDPRHFSSYARVFPGVAASGGKSKRGRKSKQGNPYLKWAFSQAACQAVRYYPKVRTYFDRKAKKKPRIVAYGTIAHKLALAAYQVLKTSTPYNEELLFQ

SEQ ID NO: 453576 - protein, 386 aa, unidentified
MPQLNDLSRSLVILEQDATLIAVIEMGQSSWLVAGIVPGVERSPLKKLAVDESALLKLLNRWREEAEKAGHRIERIAIAFEAGRDGFWLARWLRARGIEAHVIHASSVAVSREHRRAKTDRLDTELLKRAFLGWLRGERDHCKMVAIPTLAQEDAKRPNRERESLVGEQSRIVNRMKAALARLGIRGFNPKLKKAVERLDGLRTPEGEPIPPNTLAELKHDMERRRLVRSQIRDIEGTRLERLKQAPGDGPHVMVRLLARVIGVGVETADMLVQEVLSRNLRDRRAVARYGGLTGSPDESGKKRREKGLARSGNARVRRGMIQLAWRFLMFQKDSALAHWFYARTKNAPQTRKTMIVALARKLLIALWRLAREGAIPEGIVLRPAL

SEQ ID NO: 453577 - protein, 284 aa, unidentified
MSLTNTKPEIKKWLRQQPANTALCVEATNVYHLDVVEMAYEKGFKVYVVDGFQLSNYRKSIGGRVKTDSSDAALLARYLEREGRELRAWTPPPAVYGKLQSLLRRRAALVTMRTALNQSWSNEKLLKTAFKSFTKQIDRLDLLVQKKLKELLKEAGLLEQVARCQAIEGIGFLTATALVMAFIRGEFKSSDAYIAFIGMDLRISDSGEKTGRRRLTKRGCSEIRRLLHNASMSASRTAAWKETYEHHRNKGKATTEALVILSRKLARIAYALLKSEKAYVSKTA

SEQ ID NO: 453578 - protein, 346 aa, unidentified
MPSLGIVPNSRLNRLQPSSLRQEWESPMTTPVYIGIDISKRTLDIATSDRYLGQVPNTPTGHAQLLEQLATLDAEQNNVHLAMEASGGYERPLLQHLLTAGSHVSVVQPACVRHFAKSLKLHAKTDRIDAMLIARFAATTKPNPAEKPCKTSEKLRALRDRRDQIIDDRVREQNRLECCDNTTIARMIKQSIVRLRKLESQLDDQITRCLSRSKSLSAKADRLTQVVGIAQQTAVTLLAHLPELGTVNRQQIAALAGLAPYAHDSGAMRGKRRIFGGRAVVRRALYMASLSAVRHDAVLRTFYQRLLAAGKAKKVALCACARKLLVHVNSLCAQVQALPGKKAAGA

SEQ ID NO: 453579 - protein, 389 aa, unidentified
MKIFVGIDIAKLNHFAAAISSDGEILIEPFKFTNDADGFQLLVSKLESFDKNSIIIGLESTAHYGDNLVRYLVAEFYQVCVLNPIKTCQMRKNNVRKTKTDKVDTFVIAKTLMMQDDLRFITFFDLDMMDLKALGRFRQKTIKQRTRLKIQLTTYVDQVFPEIQYFFKSGLHQNAVYALLKEAPSPKEIASMHMTHLANLLKVNSHGHFTKEQAKELRVLAQKSVGANDSAISIQITQTIQQIELLDSQLEKIEVEMTDIMKFNDSVIMTIPGIGYINGGMILGEIGDIHRFSNPNKLLAFAGLDPSVYQSGNFQAKTTRMSKRGSRVLRYALVNAAWNVVRNNATFKAYYDVKRAEGRSHYNALGHCAGKLVRVIWKMLTDEVEFNLE

SEQ ID NO: 453580 - protein, 403 aa, unidentified
MNNVAGIDVSKGKSMVSVLRPFGEVVAKPFSVGHTGSELKELADYLKSLDGETRVVMEHTGRYYEPVARFLHDEGVFVSAVNPKLIKDYGNNTLRKVKTDKADSRKIARYGIDNWAELRQHTPMDTIRMQLKTLNRQQSLYTKTKTMMKNNLIALLDQTYPGVNALFDSPVREDGSQKWVDFAMTFWHVDCVRNMSLTAFAERYRKWCKRHGYNFSQSKAVEVHAGAQDLIAMLPKDALTKTMVRQAIDALNAVSASLERLKAEMCTLAAQLPEYPVVMAMHGVGDSLGPQLMAELGDVTRFTHRNAITAFAGVDPGADQSGTHEAKSTRVSKSGAPELRRALFLVMDCLLKTQPQDDPVYRFMDKKRAEGKPYLVYMTAGANKFLRIYYGRVKEYLASLEGN

SEQ ID NO: 453581 - protein, 323 aa, unidentified
MNKDIKYFGIDISHLVFDVTDSDGNYYQFTNNVSGFRKFIKLLDSNSHCVMEATGYYHYQLAYYLFENGKKVSVENPLSVKRFIQMGLSKIKTDKSDSKLICAYAGQVELTLWKGSSKQVQECLQITRTLSVYTKQRTMIKNKLHGESVLGEPSKAVVKSLKRSLKQLDKEMKTLEDQLLIIVKESHQDLFSRIKTIPGIGRKTAIMLIVLTGGFERFSSAGELCSYAGLTPVIRQSGSSVKGRPRISKMGNQKLRNLLFMCSFTACKYNKACRDIYERIVAKGKSKKLALIAVCNKLLKQAFAIAKSGLIFDQEYKSTLVKN

SEQ ID NO: 453582 - protein, 369 aa, unidentified
MGDRIGYVGLDVHKEGIVVAVAEGGARGEVREYGRIANTRSALDGLARKLGREGVKLRFCYEAGPCGYGIQRQLSAGGHDCVVVAPSLIPKRAGERVKTDQRDAVSLARLDRAGELTAVWVPDPGHEAIRDLVRARLDAVHALRRARQQLAGFLLRQGCHYRRPAWTKLHHRWLAGLKFEQAMHHLVLEDYIAAVEAAEARRDRLTAQIAAMLPDWTLAPVVAALQAMRGMALVNAATLIAELGDLSRFANPHQLMAYLGLVPSEHSSGASVKRGGLTKAGNSAARRLLVEAAWTYRFPARVSRELLLRQEELPKAIREIAWKAQTRLCARYRRLARTGKPANVVTAAIARELAGFVWAIARQVTIPAR

SEQ ID NO: 453583 - protein, 377 aa, unidentified
MNRILKIGMDVHSTNYTLCAMEPVFGADDRIYAKIQVAPDYKNILMFIEKVKQKLDPYDTYDIECGYEAGCLGYILYNQLTSAGVKCVILAPTTMLTQQGKRTKTDKRDALMIAQCLSYGGYHPVYIPTEDDDSVKEYLRMRDDHKLALKKIKQQINAFCLRHGYYYPQGKWTQMHLDWLSAIKLPPLYQETLDEYMATYFELTDKIEKYDTRIEEIAAQEKYADKVKKLGCFIGVKTHVALSLIVETGDFKRFAKGNAYAAYLGLAPGEHSSSDKINRLGITKAGNSNLRRLLVEAAWGICKGNIGYKSKDLKKRQQGNSVQVISYADRANNRMRSKYYRLIRHGKKKNVAIAAIARELACFVWGMMTDNIEERVA

SEQ ID NO: 453584 - protein, 381 aa, unidentified
MQVELSHHVRLIPQEIESAMRNAGIHANSLLEVRRMYNAVGIDVSKGKSTIAVLQPGGTVIRKPFDVSHTSQNLNELADYLGSLEGPSKIVMECTGRYHEPMLKVLYEAGLFVSVVNPHLIKNFGNNSLRKVKSDPADARKIARYTLDNWAELRQYSDMDDTRTQLKTLNSQFSFFMKQKVAAKANLIALLDNTYPGVNKLFDSPTREDGSEKWVDYAYSFWHVDCVRRIGLKTFTERYRAFCRKHHYIFQPDKPEKLFHASKELVAVFPKEKTYKLLIQQSIQQLNLASGHVERLRQEMNALASTLPEYNTVMGIYGVGKTYGPQLIAEIGNVSRFTHREALTAFAGVDPGVDESGQHKSKSNRASKVGSARLRKTYFRS

SEQ ID NO: 453585 - protein, 399 aa, unidentified
MRQLWAGIDAGKTHHHCVVIDSGGTRLLSRRVANDETELSVLIDDALGLSEGGVVTWAVDLNNGGAALLIALMANRGQRLLYIPGRVVHHSAGGYRGDSKTDAKDAAIIADQARMRRDLHPVRAGDEISIELAILTSRRTDLMRDRTRTINRLRALLGTYFPALERSLDISNVKATLILLSGYQTPDGIRRLGQARLEAWLRKRKAYNATQIAAKAIGAAQSQHVRVAGQDVAATTVAKFAVQVMNIDAEMAELDRDIEERFRRHRHAAVIESMPGFGPVLGAEVLAVTGGDFTAFETADRLAGIAGLAPAPRDSGRVSGNLRRPKRYDRRLLRTFYLSAQLSLRNCAASQTYYARKRSEGKRHTQAILALARRRLNVLWAMLRDNAVYRPEPTTALAA

SEQ ID NO: 453586 - protein, 333 aa, unidentified
MTYSYALGIDLHKKQSTWKLVDKNHKVIFSKTVLCQPKDIEAALVKLPVSLNGLPVAIEPTCGYRWVDKLLTDKGCDMHIANPYKFRVIASSKQKTDDADAKVLAEFLQLGYLPESWRTPDQVEKRRTLVRVRDSLVKARTRIKNQIEGLLTTECPITSRKTLPPDLKFQELNSLIKEHTSHIKNFDREINRIVTDDPICNLLLSVPGVGPISAFAIVAEVGDFSRFPDSSKLASFAGIVPSQRSSGETVRYGHIVKTGSKLLRTTLIETAMRFRPPYDHKLNIFFERVKKDRGAMRARVALAHKLLTIMYSMIKNNKPFVPSYDTAKLGDLV

SEQ ID NO: 453587 - protein, 410 aa, unidentified
MDVLIPRCCGLDVHQKTVVASVRILGPAGEVTRDTRTFGTTTRELEALAAWLRPWQITHIAMEATGVLWKPVWHILEPEWQLLLVNPQHLKRVPGRKTDVKDAEWIAQLLQCGLLRGSYVPPAAIQELRDLTRTRTTLQDETTGVVNRIHKVLEDANVKLSTVATDIMGVSGRAMLRAIIAGITDPQRLADLARRRLRRKHGALVEALHGRVTAHHRFLLERLLTQVEFLEGEIGRFDQRIAELTGPFAAVLDRLDGIPGINRRAAENVIAEVGTDMASFPSAPEIVSWAGICPGKRQTAGKTQPAPKRKGNRWLGRALTQAAWAARNKRQCYLAAQFRRIARRRGDKRAAIAVAHSILVATYFIMRDGVEYRDLGPDHFHRLTPDKVVRDLVKRLEKLGHRVTLEKTAA

SEQ ID NO: 453588 - protein, 373 aa, unidentified
MKKSTRFVGLDDSKDFIQVAVADGGPGGEVWDWGVIASGPDALAKLVRRLGRAEDLDFAYEAGPCGYGTYRQLLALGARCVVAAPSRTPRKPGDRIKNDRRDALALARLHRAGELTAVWVPDTETEAMRDLTRTREDAKYAETRARQRLQSFLLRHGRRYPGRCSWTKQHHRWLTEQRFDHASQQICLEEYLATVEEGARRVARLDGQIRELVPMWSMAPVITAMTAHRGVNLLVASTVAAELGDLTRFDRARPLMGFVGLVPSLSATGQGRHTGSITKTGNAHVRRCLVEAAWAFRHPARRTAHLKRRLDGQPADVQDLAWKAQVRLCGRYRRLTARGKQHNKVITAIARELIAFLWATARLVNAPVPATIS

SEQ ID NO: 453589 - protein, 347 aa, unidentified
MVHVGLDLSRTRLDVHVMDESGAPLAVTTALPEAGGLAALAARIGAEFDGPVYAAIESMNGARFVHDQLELAGWQVEIADAQKVKGLAPLACKTDKIDSWVLAELSRRDLVPAIWLPTPAVRAERERARWRLHLVRHRTALKNRIHATLLAFGHPCPVSDLFGTGGRELLARLALPEPWAADTTAALQLIDTLDHEITECERALRRAGADHGYVPLLMTTPGVGWVLGYTIAAEIGDITRFPSPTKLAGYTGLCPRVYQSGGKDHRGPLAKNGPKYLRWALIEAATHACRHPVYAERYRRTKTRLGRQRGPKIAQVDLARRLAEAIWHMLTTNKPFAPAGAAQPLAS

SEQ ID NO: 453590 - protein, 399 aa, unidentified
MNRNRTVAGLDVHKDSIYLCIMGHDEAIIFEKTYGVLTPDLRQMCQDMVERGVTEAAMESTAVYWVPVWNELCESMDLKLVNPYFIKQLPGRKSDVKDAQWIAECLLKNLIRGSFVPEPIVQDMRKLNRRIFDLQEDITYCTNKLDAALHRCGFRLSNYVSKITCKSYREAVASIAEGKTDPETILKCIHGRVINKHGRDTLLAAVTASFSETDITVIRQYWELIAVYLRQSEECQSQLTALCESNFSTEYKRLQTIPGVKERAATAIIAETGVDMKMFATAAALVGWCGLKPRNDVSNGRYKSRKITHGNKYLRHILIEISWTASRTRNCFFSNFSYIQVTQKHKSKMKIQVAIARKILVAVWHMLSKEEDFIDIYLRRLEQQRLMEQKLKSFESKMA

SEQ ID NO: 453591 - protein, 343 aa, unidentified
MSIQHLVAVGVDPHADTLCAAAVDSAGNRVWDVTVANTASGITELMGRLDGDRVIWAIEGTGTFGRDLCDRLLRRGEVVREVPTRLTGRLRRRSGFSKTDRGDATAIARAALTEPLAGVSHHPVLEALRVLVRQRETLVNAQTRAFNRLRAHLRELDPATARTLGRIRTRHTLEQLGRLATNHPNPHHRALQLAIRLDAEEALERLRRIRQLDTEIRAVLPEAGHQLMGITGIGAIGAATILAHTGIIDRFPTEGHYARHAGTAPLDASSGRQQRHRLNRYGNRTLNKTIHIAIVTQLAQHGAAHHYVTRRISQGKTKPEAIRAAKRHLTRHIYRTLKHHPLT

SEQ ID NO: 453592 - protein, 352 aa, unidentified
MPMLEGRVDAVIGVDTHRDSHAAALLDPNGGVRATLAVPSDRVGHARLLQLAVAQAPGRRVWALEGTGCYGAGLTGFLLDQGEWVVEIDRPKRPRGRNGAKSDALDAIRAGREALAREHLACPRQRGHREAIRVLHTTRSAIVEAGADARRQLKALIITAPEPLRDSLRGRSWLQQARACAALVAAPSDPVEHRATVRALRMTAQRGLTARAEAKELEVQLRQLITAVAPVLLAQRGVGPISAAQVLISWSHPGRFRSEAAFAMLAGAAPVEASSGQVVRHRLNRGGDRQLNRALHTIVMIRQTHHQPTKIYTTRRIVQGKSQRDIRRCLKRTVARQLYRLLERTAANQAAS

SEQ ID NO: 453593 - protein, 341 aa, unidentified
MREIFRQAVGIDVSQDELVVILGRLYSDFQVEFTADRSFANNQSGFKALLSYAGKFANGLPIQYAMEATGVYHEQLAYFLSDHQVAVSVILPNKISNYFRTLEVKTITDKTAAQAIALFALERRLEPWSKPQRIFRTLKQLIRERGQLIDERTMQKNQLHSEKAEKYPSMESIRRIEARTALINSQIKEIQQEIDQAIKEDDSLLKKIQPLLSIPGVGKLTAVTIIAETNGFELIRNKRQLVSYAGLDVIEKTSGTSVRGKKKISKKGNRHIRKAMYMPALAAIRQETRFKHIYARLIAKHGIRMKAAVAIQRKMLELIFILWKSQQHYNPDFKNQMAESN

SEQ ID NO: 453594 - protein, 356 aa, unidentified
MIWWKLRRTTPRSRSTWPVAVDDAGREVARWRGPNSPAGWRQVGTWAAALGMPCRWGIAGAWNYGRGLAQCLVATGAEVYEVNPRWTALQRQRARKVEKSDRLDARAVALLVWREAATLPVVAADDETAVLELLVTEREGAVAEATRLRNQLHQLLLQLDPEYRGHLPSLRTSAGVDAAASYATAGPSPLAQHRAGAVRRLAQRLQLALEQAKALAGQIEALARECCAPLTEICGISLLAAGALAGILGPGCRFATDAQLAAYAGVAPLEVSSAERVRHRLNRSGNRRLNAILYRIALTQARSSPRAQAYLERRLREGKTRREAIRALKRYLVRAVWRRWQECLCATAARPATLAA

SEQ ID NO: 453595 - protein, 349 aa, unidentified
MKKIIIGIDISKEKIDASAIDVRNSQLGVLKLDYQAFENRPMGFRRMLVWARHLIKGISLEMVMFCCETTGGYDRCLCDYLFAKGLDIWRESSLQIKKSCGLRKGKDDKTDSLIIAEYAMRHMDKAVYYVSPSETVRELKALLLYRRKLEQEKTSKKVRVAELKATAAKSKSISFILRDAQKSIRVLEKSIKDCEKQILALYDSDEELKKSYDHLTSIRGIGIVNASAMIAYTNNFKNITTSRKLSSYYGIAPFREQSGTSVNKKAMVKCYSSSMLRAYLTQAAENTIREHGIYHDYYRRLSERGKCHGIALNNVKNKLLHLSVSLIANDMDYEENHEFLRTIRKVQST

SEQ ID NO: 453596 - protein, 382 aa, unidentified
MEAIRSDNFTPNEDVLAVALELSGKCWKVGLQDEKHERPAIYSLYDEQAAARLAHVVAVIEESKKKWNLPTTITVAVMYEAGQDGFWICRALSKLGYRAMVVDPASIPVERHARRAKTDRLDVIRLLGSLRGWVRGEFGRMHVVRVPAPEAEALRQLPRDRGQLQKEVGQHRDRIRKLLRTVGYWEAVGANFASRLADGQIRCYDGSPLPAQLEQRISRECERLAQVEAQLAALEKSLLSQLAPPVRERIATLARLKGVGQVGAMRLVLELFWRRFDNRRQVGSCVGLVPQPYDSGNSRVDQGISKQGNRRVRALLIEMAWLWLRYQPDSALARWFAQRTAGNATNKRGKRLAIVAVARKLTIALWRYLDSGVLPEGGAMKT

SEQ ID NO: 453597 - protein, 391 aa, unidentified
MSQYFVGIDISKYKHDCCIINAADQSIVAKFTIRNDKDGFNELLTSLQSLSTPEDIRIGFESTAHYALNLELFLEKAHHSFMEVNPVLISEYKKSTSLRRTKTDSIDCESIARWLMTIEYKPHSKGFYHAYSLKSLTRLRDRLIRQRSFYLVKITNVLDHTFPEFKPFFQERFSKTALYLLENYGSAEKMAHMNSASYDNLRRISRGKFTPQKFIELKVLAANTVGVNNSIFDTELTCLLTLYKEAANQISVLEAQITELIEEVHPHYMSIPGIGPISAAVIYAEYGDISNFSSPAQMLAFAGLEPGISESGTESHKGRMVKRGSSQLRYTLMNCALPLIRFDVTFATYYAKKRSEGKPHRVAISHVTKKLVRVIFALERQNTDFVATALR

SEQ ID NO: 453598 - protein, 397 aa, unidentified
MYYIGIDIAKFKHYASIIDQTGKTLTKPISFQNHTEGGNKLLDWIHQYVDTPTDVLIGMEATGHYWLALYSFLLGKEFSVIVLNPLQTNAWRKGTEIRKRKTDSIDATLIADVIRFGRFTETPLANETMLALKQLSRFRNSLVHSVSDLKRKAIVVLDQTFPEYHTVFSDIFGKTSAEVLMEYTTPSDFEHVSVDQLTEMMEKASRKKIGENKAKHLLQIASQSFGVTFCKDAFSFQLKMLLEQIKFIEEQIKHCEQQMGEYLVELNTPITTIPGIGSILGATILSEIGDIHRFDKPAKLVAYAGIDASISQSGQYEASKSSMSKRGSSHLRRALFQAAISGYRCDPVLKAFYEKKRAQGKHYYVCIGAVARKLCYIIYAVLKNNKPYEIHHHTPQK

SEQ ID NO: 453599 - protein, 344 aa, unidentified
MTKTQIAVLGIDLGKNSCSLAGLDATGAVVLRRRMTRDGVVAFAAALPACTIAMEACCGAHFLGRTLADQGHEIRLMSPEYVQPYVKAQKTDDRDAEAIAEAATRPTMRFVTLKSEAQLDLQVLHRARERLVQERTALINQLRAVLLERGLILPKGRSALARRLDELMAAGLALSARADRLLEDLREEWAGIDQRIKAYDDEFASLTREDAQARRLATIPGIGAINATALLAAVGDGSAFAKGRDLAAWLGLTPRQHSTGGKTKMLGISKRGNRYLRKQLIHGARAALPHLAAKPNALGAWLQHLLVRAHPNVVVVALAAKLARIAWAVLHNEKDFDQQALVAA

SEQ ID NO: 453600 - protein, 327 aa, unidentified
MQVITIGIDLAKHVFQVHGVDINDKVVFNKPLRRPQMLPFFAKLAPCLVGMEACASAHYWARELKKLGHDVRLMPAKDVKAYVKRNKNDAVDAAACCESVRRPTVRTVPVKMPEQQALLMQHRVRDLLVRQRTQAINALRSHLAELGIVAAQGYDGLKALLPIIADGSDARLPENARASLSALVAQIASCQAEIGAIEKRLLAQHRRCEDSKRLETIPSIGVIGVSAIVATVPDASIFKTGRDFAAWIGIVSREDSTGGKQRLGPISKQGDRYLRCQTARNVDPPYCLSWDCYPGEATGTAGTHAVVPAGTTACVATLSTSTLPAIN

SEQ ID NO: 453601 - protein, 386 aa, unidentified
MRAVCGLDVHKDSVFLCILHDSGEISEKVFGVLTHELRDMRRVMQSYGVTEVTMESTAVYWIPIWRVLEPYFHLKLVNPYFIKQLPGRKSDVKDAQWIAECTLKDLVRGSFVPPERIQQLRQYDRRIFDLDAEIVRKLSKLDAVMQRCNIRLSNYVSNTDTKSYKDVVRKLCEGVTDPEELIDEIYSRIINRHGRETILAALTGVVSDAEKDTMRQLRDELDLAEKHKQECMDKMLHICQTYYPNELGRLMTIPGIKERAATSLIAEIGVDMTKFQTAANLASWSGLKPRNDESNKKIKSRRITHGNIFLRKTIIECAWGASRTKDCFFSRFSYHQTQVRKKNKMKVLVAVARKLLIAVWHVLHDETDYKDFGADNDCDTSVGNNG

SEQ ID NO: 453602 - protein, 367 aa, unidentified
MTALYDYHIGVDYHKSYSHLVVQDSAGKTLRSGRVKNDRQSLGSFLERYRENSHAVMEATRNWMVVYDWLDDICDDVVLAHPLKVKAIADAKIKTDKIDATVLAHLLRADLVPEAWAPTEKARDLRVALRERMFYVRLRTMVKNRVVTVFDRYPEQTAQLKKLGDLFNKTGLQQLTALNVSAIDRIQIDRGVEFIGDIDGRIKQAEATIKAMTTTNGNVKLLKTIPGIGEFFARLIDAEIDDIDRFRNPEKLAAYAGLVPSTYSSGGKTYHGKIIKQGNKWLRWAFVEAVAPAVASDSQLRAQYEHLKLNGTNKARVAIARKLLTITFQILRDQRPYERRGVVGEEGASATNPGCPDDFLASPAGLG

SEQ ID NO: 453603 - protein, 359 aa, unidentified
MQTQRKELNFEGQSIYVGLDVHLKSWTVSIFTEKLHHKTFSQPPRAEVLSEYLKFNFPNASYFSTYEAGFCGFWAHFKLEELGIQNIVVNPVDVPTTQKDQKRKSDAIDSNKLGRSLRSNELKGIYIPRPETLEDRTIIRVRFTIVKDMTRQKQRIKSLLYLYGIEYPDEFQNTNTHWSKRFINWLKTVQLQYTTGTDALNLLIKEAEQQRLILLEATRKIRTLSKTERYAKNIELITSVPGIGLITGMMLLAEIEDIKRFDNSDKLAGLIGVVPDCHSSGPTEKKGEMTTRGQYFMRKGIIECSWVAASKDPALSLAYYEYCKRMEPNKAITRIARKLINRIFTVLKNEKKYEIRIVK

SEQ ID NO: 453604 - protein, 315 aa, unidentified
MAARLEKITLGIDVSKDTLDVYQWQDQCAITLANDAQAILKFLKSLGGSVQIAIEPTSSYHLEMVHQAHAMGHEVYLVNPRRLVHYRDAVGERNKTDATDAWLLARYLERERDELRPHTPPCGDAQRLWSLVKRRALVVKLQQQLRQGMAGVLSTQAAQRELTRVMKRIEQRMIALVRKLGWWQQYQHCLTVPGIGPVNAAALVAAYHRGAFSGADAFIAYLGMDVRRRESGKYKGKSKLSKHGEAELRRLLWCAARPSRCYPPFAEYHQVQLDKGLSKIAANVILARKLARIAFALLRDGTTFKKIPQEPCMNP

SEQ ID NO: 453605 - protein, 402 aa, unidentified
MIYAGIDIAKSSHVIGAVDERGKDAAKPMQFANSAEGFGKCAAYLEGLGAPAEEMLVGMEATGHYWLPLFSFLHAQGYDVVVINPVRTDAMRRFKGSSRVKTDLVDCILVADTLRLGEFSPSKLGDESMMELRQLTRLHQGLKESVADLKRQVIVALDQVFPEYDSIFSDTFGESSKAFLRKCPTPEECRGVRVDALGNTLSRASRGKLGREKAEEIKGIAKESCGIDRGTRALSFQIKLLVEQIDFIEGQIEEVEARIEEGIETTEPLILTIPGIGHVLGAQIVSEIGDIHRFRNASAVVSYAGINPSVSQSGKFSSSENHITKQGSPYLRRALYLAATAQIRLSTPFRDYYDKKRADGKSHREALIAVARKLVHVIYAVLSKQEPYRSDAVNANPVSRSE

SEQ ID NO: 453606 - protein, 391 aa, unidentified
MIYVGIDVAKDKHDCFITNSDGEVLFKAFTITNNLDGFNDLYQKIETVMKDITKVKVGLEATGHYSYNLLGYLIDKGLPTYVINPLHTNLYRKSLSLRQTKTDKVDARTIASMLMSDVNLKSYSDTSYHNEELKSLTRYRFDKVKERAKLKTSVSRLVCILFPELEKLVPTLHIASVYAMLSEFPGAKQVANAHLTRFTNLLSEASKGRYGKETAIAFRDAARTSIGSNMPAKSLELKHTIKLIQELTSEIDEIEHEIKLIMDELNSPILSIPGINYRMGAMIIAEIGDFTRFDSPDKILAYAGFSPSTYQSGQLDGAYSHIEKRGSRYLRYALYNAAKYVCIWDPTFAEYLAKKRSEGKHYTVAISHAVKKLVRVIYHLEKTNQQYIKAA

SEQ ID NO: 453607 - protein, 354 aa, unidentified
MKRTAKYVGLDVHQATTVVSVRDPGGRVIAHSILHTEEPEVVGFLRGLRGRVSVALEEGTQAQWLHDVLEPVVDRVVVCDRRGKKRQGNKGDLVDADELSEQLRLGTLRPVYHGSAHQANLRELARTYRGVVGDATRVMQRLKALFRARGIKTPGARVYHPATRSEWLDKLPGGGVRFRAEVLYAQLDALRMQRPKVKASMVAEARRDPAWAALRSVPFLGPVRVAQILAIARTPWRFRSKRGIWAYSGLAVVTSTSAEYVLVDGRPLRRRRAPITRGLNRNHNATLKDVFKGAASAATARRGPLQDLYHTMTDGGMRPELARLTLARKIAALTLRLWKTGERYDPTQLTMQAR

SEQ ID NO: 453608 - protein, 358 aa, unidentified
MQRNKISFKGQKIFIGIDVHAKNWEVAIAPEVGIVRRHSQKPSAKELFDFLKKNYPDGDYLAAYESGFSGYSTYYALTEVGLGCMVIHAADVPTTQYEEVMKTDRVDAVKLARSLKAGLLKGNYVPEKQYIDDRSVVRIRKTIQKQLSGYKSRVKHLLHCHGVEFPERFSKKQTHWSRAFITWLKKDVRLMSDTRASLDLLIRQVEVLRGTLLEATRQLRKMSQAERYKHRYDLLRTIPGIGLIVTMCILTEICDIKRFHNENEFAAYLGLIPTSHSSGEKTVHGEMTFRGNKQLGPMIIEAAWITIGRDAGLGAQYFQYKQRMEPQKAIVRIARKLSNIIFSVLKNEKEYVPYQTGN

SEQ ID NO: 453609 - protein, 421 aa, unidentified
MSQLPLPFAAFIGIDWADKKHDICLHIPGQKKRERSVLEHRPAAIRQWAQKLRERFGGAPIAVALELAQGPIVSALSEHDIFVLFAIQPTMLAKYRETFTPSRAKNDPTDAEFALELLLRYPERLPRLQPESSDMRRLRRMVELRRALVDDRVAITNRLTSALKGYFPQVLDWFRDKDAPVFAAFLERWPTLEAAKRARHDTLVNFFRSHNVRSQHTIDRRIDAIHSEEPLTTDSAVISPLLLLVETTIPQLRAVNTAVERFDAEIASLFPKLPDYELFHSLPGAGPALAPRLLVAFGERRERFPDAASLQKYVGVAPVTERSGNTCWVHWRFACPTFQRQTFIEWVAQTVPRSFWAKAFYQSYRDRGGSHQAALRALAFKWIRILHRCWLDRKPYDESRYLMALQKRHAPLLAFAAKTSA

SEQ ID NO: 453610 - protein, 315 aa, unidentified
MTTAGRFIGIDVAKRQVDVSERPSGVQWATANTAAGLTGLVERLQAGGAIALIVVEATGGYATAVVAALTAAGLPVVVVNARQVRDFARAVGKLAKTDAIDAGVLAHFAEAVRPEVRALPDELTQTLQSWLARRRQLLEMLQAEEQRLAIALRGLRPQIQQHVEWLRHQLRDIDGELQSLLRASPIWREQENLLRTVPGVGPVLATTLLADLPELGRLNRRQIAALVGVAPLNRDSGQHRGLRHIWGGRAPIRTALYMATVSAVRCNPVLRSFFVRLCGAGKPKKVVLPACMRKLLTILNAMLHTRRPWQPGMVA

SEQ ID NO: 453611 - protein, 428 aa, unidentified
MNEDVYYERCAGIDVHKKFLVVCLRIGRKTEVRNFGTVTHEIREMVAWLKANACQMAAMESSGSYWKPIYNIFEQEGLPVMVCNAFHIKNVPGRKTDVNDAQWIAKCLSQGLLNPSFVPDREQRELRDMTRFRKSQIEERARNINRLQKFLEGANIKLGSWLSDVEGKSATLLLELVIGKPDFTIKDVSNCMHGNMKSTADELFRSLEGYMTPTQREFFAHIMTVIREQTAQIERTDAMIQRSLSANYKAAVEALDAIPGIGKLSAEQILAETGTDMSHFKNQHSLSKWAGVCPGNNESAGKRKSGKTPPGNKTLKSTLAQCAKSAKKNKNSFFSAQYNRLVSHRGKNRATMAVAHSLLIAIYFVLCGNQFKDLGADYYMQFNREKKINSHIKQLSKLGVTIPGDIVKDALRHSPDLPDPPDKLARSA

SEQ ID NO: 453612 - protein, 417 aa, unidentified
MQYAPIMLAAEPANGLTCGIDWSCADHAVSIVDPRGCEVHRSTVEHDAAGLRELVALLARAGVSEVAIERPDGPVVDTLLGAGVTVVVISPNQVKNLRSRYGSAGNKDDRFDAFVLADTLRTDRTRLRPLVPDSAATLALRANCRARKDLITHRVAVANQLREHLKLVFPGPIGLFDDLDSLISLKFLTRFDCQDRADWLTPTRLGNWLKSVGYTGRTHPAILHARLTAAPRGATGAAGDKYTPITHAFLALLNTLVGQIKILDTQIAQQLAEHVDAHIFTSLPRSGTVRAAKLLAEIGDCRARFPSPEALISLAGMAPSTRQSGKTRIVGFRWSCDKNLRDAVTDFANDSRHANPWAADIYNRAIARKKKHPHAVRILARAWLYVIWHCWQNNTAYDPANHRALQALLEQHQPPAA

SEQ ID NO: 453613 - protein, 400 aa, unidentified
MRTVFGIDVSKASSEVAIVINGEKIHGYTMPNDAIGFTRLLDDLKTVQKPEIIFEATGVYSHRLQAFLEENGYAYTQLNPLEAKKQLDSLRVRKTDKIDAETLAISQFVLNRKPTYIQEEVYQELRDLSRFYQNLTEDIVRTKNRLHKVLQVTFPEMENILSTPTREQYWNLVMTFPYKDFVLELSKDELLEGIRQSTSKRISDKRVAYLAQKLAALANQSYCAVKKNSPILEEVRYYAKELLRLSEQRQAVLEQMVELAQPLPEYEILLSIPGIAETTATSMIGELGDIRRFQSANQINAFIGIDLRHYESGNFLVKEHITKRGNPYARKILFKCIHNIAAASHTNHCHIEDFYEKRKRQSQTTSTKPHTIASIHRLIRTMYYLITHNKLYDYTSTQNR

SEQ ID NO: 453614 - protein, 356 aa, unidentified
MSHDVKYIGMDVHQEAIVIAVLNGSGKLVMETIVETKASSILQFLHGLRGELHVTWEEGTWAAWLYDLLQPQVQEVVVCNPRRNALLKEGSKSDKVDARKLAELLRTGMLRPVYHGENGLRTLRELGRSYQTIGKDLTRVMNRLKALYRGWGIACAGTQVYAPRYREEWLSKIAQAGVRRRAELLYQQLDGLQALRRSLRPEFLAESRKHKAAKLLRQIPCIGPIRAARLIALMQTPHRFRSKRQLWTYSGLGIETHDSAQYRYVGGQVQRSKKPQQIRGLNQNHNHEMKEIFKSTATRASCGTGPFHDFYAALLAKGMKPEMARLTLARKIAAITLTLWKKEERFDAEQLKTQAA

SEQ ID NO: 453615 - protein, 309 aa, unidentified
MKQEVVYCGIDVAKEQLDVALGPKRWQVPNTKQGVGQLVKQLKAERSKVHAICEASGGYEKAIVIALQKSALAVSLVQANRVRQFARAAGVLAKTDQIDAAVLVHFGRAMHPPPSAAQSEQIARLRELDAQRRHLGRLLSAEQNRLAQLSCAELRSLSRSLISKVKKQIATIDARIAILIAQDQNLCVKAQKLTSIAGVGPRTAALLLAQMPELGSLNRAQAAALAGLAPFNRDSGSMRGKRTIFGGRRTVRTGLYMAAVTAARCNHILAPFYQRLCAAGKPPKVALTAVMRKLLLALNSALAPKLNPA

SEQ ID NO: 453616 - protein, 355 aa, unidentified
MDSRKYIGMDVHQASISIAVRDAAGKLVIESLIETKAATILEFLQGLKGTLCVTFEEGTSAAWLYDLLKPHVANVVVCDPRKNALLKAGNKNDRVDARKLSDLLRAGLLTPVYHGESGVRTLRELARSYLTLTKDLTRVMNRLKALYRSWAIPCAGEKVYSPRHRSAWLEQLSEAGVRRRAEQLYQQLDILLQIRREARRELLRESRKHPAHELLRQIPRLGPIRVALLIALVQTPHRFRTKRQLWAYCGLALQTRSSGEYRFTAGQRQHSKKLPALRGLNINHNHDLKNLFKSAATHVSTSPDALGDFYRSLLAKGMKPAMARLTLARKMAAIVLTIWKKGARFDPGELKQTAA

SEQ ID NO: 453617 - protein, 411 aa, unidentified
MSAGVITAVGIDVSKYKSTVAARRPGGEVALLPFDVSHDVAGIKKLLEKLHSLEDEDGEIRVVMEHTGMYWRPVALALQQAGFFVSVVNAILIHNFSDNSLRKIKTDKADALKIANYGLTFWMDLREYSSEDETRQMLKIQNRLYERTTTTGTMLRNGLISLLDQTFPGANKLFLNEGRNSKGHVKWADFVIRFWHKECVAALSLHTFADTFQKWCKRTGYRFSTSDAERIHTAARNAVATLPKNDSTKLLITQAAISLNTVYDSLHALRTEMNRLASLLPEYELVMAMEGVGKITGPQLMAEIGDVRRFSHKGALVAYAGVDAPPYQSGTFDAKNRHVSKRGSPHLRKVLFEIASMILVHGNPDNSVFCFMDKKRAEGKHFYVYTVAGAAKFLRIYYARVKEYLNTQEIA

SEQ ID NO: 453618 - protein, 346 aa, unidentified
MHYIGMDCHITTLDFAVVNDAGWLVKANSVATSVNNFMEFVKKVAPPRIIYMEEGTLAAWALETCVSHGEKLVITDPKENRWISSSGQKGDALDALKLARLARGGYIKEIHHPIGQRRRFRELMIAYHDTVRSETRIKNKIKAKFRQNGIQCTGDTVYSKTHKEEWKIKLPQDSALLLILDGLWLQLEQLEQTEKKILAAAKAQAKQYPEIKLFEDIPGIGFIHAATVSAILETPHRFADKRKVWMYAGLGLMKRSSGGKLYSEKLTTDYNRLLKYSIKQAAEAAVIAKDNPFRRKYLEMTLLHGIAPHRAKLTVARDILTTMYAMWKKGEKYNPEIREKATHKQG

SEQ ID NO: 453619 - protein, 341 aa, unidentified
MLRVDTDSGELQERQLAHPEEAEKLYGALAAAGQQVRVGREASGHARWFERLLGELNFELWIGEAAEIRAKRVRKHKTDRQDAQHILGLLLENRFPRIWVPSGENRDLRQLLWHRHRMVQARTRVMNQLQAIALNEGQRCQKGLWRERGRQQLEAIQLAAWASRRRRDLVELLDRLNPTIAELSQAIEQEVEKCREAQRLMTHPGVGPLTALAFVLIIGKVERFPSGKQVASYLGLVPVEQSSGDRRRLGHITKQGSSMLRFLLVEAAQVTVRSIPEWRSHYVHLMMRRGRKIAKVAMARRLAIALYWMWRKGWSYEQSKSSVRTRASSEQAMVCSTTPRH

SEQ ID NO: 453620 - protein, 410 aa, unidentified
MRYVGVDLHKKTISLCVVAVVRGERTVVQRRGLRCEDTAAIRDFFAQLGAFRAAVEATAHYEWLLLLIEDLADRVVLVHPKKLRVIAESTRKSDKIDAEVLAMFLCLDMLPESYRPSPRIRQYRVLVRHRCRLQRRITSVKTLVRHKLADYNQDIADLFTERGQRHLAAVALNDADRFEVTALREQLRLFEGQLAAAEDELARFARSAPLAEQEARALLQTIPGMGPVTIDVILSELGDWRRFRNQKAVAAFAGLAPGMRQSGDKRHDLHITKEGSRLLRWIMVQAAWRLVNRSPRWQRLFERTKRKTGSPKKAIVAVARHALMVVYAVLRSGRSYRLLEPQGEPLPPAHRGATSARARQKGAAPVRLAVASAPGPDGSRARAEATAKAEGASGRAIPTDPASRRSAVAK

SEQ ID NO: 453621 - protein, 345 aa, unidentified
MSSSQEPEQLVGLQDRILARAAPLYKQEDGMTNVKEHFVGIDVSKDTLDIGVLGEKHTTQVANTKKGMAEITKRMKALKPKLIVVEATGGYEENLVLTLFATELPVALVSPQRVRQYAKAKGLLAKTDKLDAQILADFGKHLQPRLFVGKSEERKRLSALVGRRKQLNDMLQAEKNRLRTNSVEVKNSLTRIINCLKTEMKELEQQIHQFMQMHEEFGEQEKLLRSAKSIGRVTAATLLADLPELGQLDRKQIAALVGVAPMNRDSGKKRGYRKTKGGRPDVRRTLYMATLTGIRHNPILKPQYDQLVKRGKEKKVAITACMRKMLTILNAMMRDQQPFRYPATA

SEQ ID NO: 453622 - protein, 320 aa, unidentified
MLSFCGIDVSKDRLDVMVLPEGQRSSVPNDVAGWAELVEQLRRCSIAAIGIEASGGYERGARRALLAADLPVRQVNPFKLRQFARASGVLAKNDPLDARMIASFVAIMPTRPAQRQTPAAERLAEMLAIRRQLSAEKVAAENASRLLEDAMLQRLSRRRIVRLAADIDLLDKRMVEIVATDDALVHRCRLLTSMPGVGAVLACTLIALLPELGRMSRKQVAALVGVAPYAFESGTLKGRRCIWGGRAHVRQVLYMAAMSASNWNPVLKAFHDRLTTGGKLPKVVIVAVMRKMITMLNAMVRDDVVWADRLSGRRVLPTAR

SEQ ID NO: 453623 - protein, 477 aa, unidentified
MKTPKDDDLRPQEAKSKRRRRNKGMCLEDRPVLEPNAAGIDVGAREMFVAVPPGRDENPVRVFATFTEDLQRLTSWLVQCGVTTVVMESTGVYWIPLYEILEQRGIRPCLVNARHMKNVPGRRTDWHECQWLQFLHSVGLLRAAFRPEQDICAVRTLLRHRNELVKAASQHVQHMHKALTQMNLQIHHVISDITGLTGLAIVDAILAGQRNGTELAQLRNPRIKVDAETIRKSLEGNWRSEHLFTLGQSRDLYRIYQQQIVNCDLEIEKMLQQFEPRTEPAERPLPPDRKRNRDGRKKRKKNGHPHPEFDLRTETYKLFGVDVTQIPGLDENALSLFSEVGRDMSRWPTAAHFVSWLALCPDNDISGGRVLWRGARRIKNRAGHLFRLAAFSLHHSPTPLGNYLRRMKAKLGPKAATMATAHKIALIFYTMVKNQVEYDETIWATRDSQREKRLEAKIKRQAKQLGYELVPIEPKAA

SEQ ID NO: 453624 - protein, 444 aa, unidentified
MVPITVECGSYGIQNIEERGVFSLKNALAKKLQQVPKGYLVVGVDPHKKKHTAAAITQDFSLVTRFKFDNTRVGLEGMLKRVKEAMAKSDCRGVMFAIETGGHYWRNIAYFLDARGIPLRLINTFTLKRRREGKDLNRRKNDYHDSEVAAQLLCTGEFTDSKLLYGIYAELRATHNGYGRLVRERTRISNLLKGLLDGLFPEFTQVFKDPCRVTSLTVLSTCAIPGVIADMTEEEFIASIKATGRAQLRKDKLRAIHKAAKTSIGIVAGSWSIATEISLLVEKLELIKRQIRVIEHSLVKLVDETKEGKYLLSIRGLNYLTVAGLLAELGDFRSYQNAKQMIKMAGSNPSESESAGKKGSRTPMSKKGRPGLRYCAWVAVIPLLRFNADFRAWAKRMRERPAHANPLHGREIVGAACNKLLRLAFVLVKNQTYYHSSSLIPVTV

SEQ ID NO: 453625 - protein, 407 aa, unidentified
MIVGIDVAKESLVACAMDDQGEDVFHSYSVENNRPGCLKLIHLIADNANLLQPDVIKVGMEATNVFWEHCYRLIKNHEQLNSNFNLQIYTVNPKVVSNFKKAYTDLPKNDSVDAWVIADRIRFGRVENSSSPEALYRALRQITRHKFKLAQHIKAEKARALNLVFLKFSDFTQKSPFGTFTKASMALLEKYTLREIVNTDIHELAEFLHQNSNNRLGGSTPIEKITTALKKAARNSYRLKPEIDQAITQTLSMTFDNIRFYQSQSKRLKRVLKRQLKAIPQTLITVDGIGPVLTAGIISEIGDINRFDKETNLASYAGLTWSQYQSGSFTAEETHLTKKGNKYLRYYLVEAANSLRVHNDSYKNYYYKKYNEVPKHKHKRALVLTARKFVRLVFALLSKGEIYQPRR

SEQ ID NO: 453626 - protein, 342 aa, unidentified
MNVKTIGIDLAKAIFQIHGVNEHGKCLFNKPLKRAQMISFFANLPPCLIGIEACSSAHYWANKLQGLGHTVKLMAPQFVKPYVKTNKNDAADAEAICEAVGRPNMRFVPMKSSEQLAVQALHRARQGFVKARTAQANQIRGLLAEHGIIIPKGIAHIGKHLPEILEECENGLPGTFRQLLERLGDHLKALDRQVQELEVQLQSWHRENVTSKKLAQIPGIGPITASALIASVGDAKNFKNGRQLAAWLGLVPRQHSSGGKQTLLGISKRGDSYLRTLLIHGARAVLRVAERNAQHADSWLAGVMGRRNHNVAAVALANKNARIVWALLAQEREYKANYGVAA

SEQ ID NO: 453627 - protein, 391 aa, unidentified
MIFVGIDVAKDTHYAAVSDDSGAVLVKPFAFQNNAEGFCLLLKKLSEFDRSKLLIGLESTGIYSENLICFLYESGFRLAVINPIQTATLRKTAIRKTKTDKVDTMLIIKSLMVNSYRLYSQRDADSLKLRTLCRFRQNLKKSKARLKIQLAGYVNLVFPEFGKFFKSGIHIAASYALLKKYSSPKEIAALRTSTLCTLLSKASHGRFGKDTAEALKSLALSSVGVKNPYISIQIAQTIAQIELLEQQIKDLNSAIEEAMESINSVLMTVPGIGAVNAACILGEIGDIKRFSRPCKLLAYAGLDPTVRQSGQFTAKSTRMSKRGSALLRFALINSAWQLTLNDTTFKAYYDLKRSQGLNHYGALGHVAHKLTRVIFKLLTSDTPFNPAKLVA

SEQ ID NO: 453628 - protein, 392 aa, unidentified
MVCVGIDVAKDKHDCFILSSEGEVLADVFTIANNRDGFELLLQTIRSCARPTDNIKVGLEATGHYSYNILGFLLENGLHTFLINPLHTNLYRKSLSLRQTKTDRIDARTIASMLMSDVDLKSYTDTAYHNEELKSLTRYRFGKVNERAQLKQSVSRLVNILFPELETLVPSLHMASVYAMLAEFPSARQIADAHLTHFKAVLTDASRGRYDRDKAVEIREAARHSVGSAMPAKSLELQHTIRLIRELDKEIDEIEAAIKAIIDEMAPPILTIPGISYRMGAMILAEIGDFSRFDSSDKLLAYAGLSPSTYESGKLKATGTYAHMEKRGSRYLRYALFNATKFVCHWEPSFAAYLARKRAEGKHYNVAISHAAKKLVRLIFALQTSGKAFQPA

SEQ ID NO: 453629 - protein, 342 aa, unidentified
MQISTIGLDIAKNVFQVHGIDAAEKVVVRKRLRRRQVLEFFKALPPCLIGMEACATAHYWARELTKLGHRVQLMPAKDVKAYVKRNKNDAADAEAICEAVRRPTMRFVRIKSAEQQGQLMQHRTRDVLIRQRTQIINALRAHLAELGLVAAQGDKGVKELLAIVADKEDTRLPIDARASVIVLAAQLEAVQTLIGSIEKRIKMQHRSNEASQRVETIPGIGVLGASAITATAVDPTVFRSGRDFAAWIGLVPRQDSTGGKQKLGPISKQGDRYLRRILIVGAISVLRRARENPGKFPWLTQLLARRPFKVVAVALANKMARMAWALLAHGGTYRAPELAETA

SEQ ID NO: 453630 - protein, 418 aa, unidentified
MEAIHARVAGLDVHKTSVVACVRLRCGGKVRRECRTFETTTAGLEALLAWLEEMACTNVAMEATGVYWRPVWNILSDSDFDLVLANAAHIKNVPGRKTDMNDAMWIADLLACGLIRASFVPDPQMQDLRTLLRTRKQFVREQTRHVQRIQKTLEQGNIKLDAVISDIMGSSGRRMLEAMVAGESNPHVLAALADRRLKAKPDALRAALHGRLTDTHRFLLRTHLRQWDELEAANVEIDRQADALIASMEQAGRFRMLIALLCKIPGVSKLAAISILAEIGIDMSRFSTAAHLVAWAGMCPGHNQSAGKRKSSRLRKGAPWLKTMLVQCAWAAKRKKNSYYKAQFHRLCARRGPQKAICAVAASMLTTIYYIILRGTPYQDLGANYFDHRSTEAKANRLVAQLTKLGYAVQVQPLAAAA

SEQ ID NO: 453631 - protein, 421 aa, unidentified
MKVTYQTCCGVDVHKTFLVATIIKTTSGVEPSYEKKRFSTFNSDIRRFKQWLLDNNCLDVCMESTGKYWVPVSNLLEDCIHVTIANPKWVKAVKGNKDDVKDSKWIGDLFRLGLVPGSFIPCKEIRILREYTRYRFKLVSCKTSEKNRFQNAFTVCNVALDAVVSDMFGVSASAITDYLITSDEFDGETCKSFLKGTLKAKADAVVESIEGYQMTPDQKERLLLIRSHLEFVKMELDVIDAKLNDLVVPYESAIALLCTIPGVERASAITIISEIGIDMSQFDSSRRLCCWAGLTPGSNESAGKKKSVRITRAGVYLKPALVQCAHAAVKSIDSPYYKSKYERLLKRRGKKRAIIAIARMILTAIYHMISTGEEWNPCDLFKIDMPQELQEKQKAKAIKQAVRFLVLEGIIPQPDIECATG

SEQ ID NO: 453632 - protein, 368 aa, unidentified
MKQIAYVGIDYHMNVVAIAVIIEGEKEFYDTIRLKNTDTLIAKYMQKLSHQFTIKACYEASSSGYCFQRKMRVWGYHCDVIAPSLVPKKPGSRRKNDFRDARELAQHYANGLLTVVHPPSEQDEALRGLIRCRQSLKEAEKRVKNQINSLLLSQGLHWPKSKWTMRHRQWLATLHLPHTYLQQVLDEHRALLHYLEARVLHFDRQIEALAQSDIYADSVKKLCTLKGIRTLAAMILIAEITDFRRFASPRALMAFLGLIPAEHSSGDKQNGCSITKTGNKRCRTQLIEAVLHYVKKPIIRGRIKTALADVDAATSSIALTCMQRLHKRYWALVMKGKEPKVARTAIARELAGFIWALMNQQSAPATTV

SEQ ID NO: 453633 - protein, 319 aa, unidentified
MAQNDRIVVGIDVAKDKVDACIRRFTLRQTLPNTAQGHRKLVAWLRKYKVGKAVMEASGGYEREWRNVLHKAGIEVRIVDPRRVRSFAQSAGRLAKNDPIDAEMIAWFAETFSQAPGQIPDAAREELAALAKARKALVDVKIRLQAQNEHAAPEPARKACARVLKSLAAEIDKLEAAISAKVKATPEFAERAEIIESVPGLAQATSAILIAGMPELGQVSDKIAAALIGVAPYDDDSGKRRGERYIKGGRRWVRNAIYMPCLGAATQCNPVLKAFYQRLLAKGKEPKVALVACMRKLIIILNTMLARRQKWNPGGHAMG

SEQ ID NO: 453634 - protein, 344 aa, unidentified
MQPNMTIGLDIAKHVFQVHAVDAAGAIVIRRKLRRSELLTFFEGLGPSLVGIEACATAHHWARSIMALGHQVKLMPPAYVKPYVKRQKNDAADAAAICEAVSRPSMRFVPVKEVDQQGVLVLHRTRDLLIRQRTMLINALRAHLAEFGIIMRQGRAGVAVLMASVEEGKAEHLPELARAALMSLIAQLRDAHARANDVEREILTWHRNDERSRRLETIPGVGPITASAVVATVTDPSMFASGRELAAWIGLVPRQSSSGGKERLGRISKKGDPYVRRLLVVGAHSVLRIARSKKPGQSNLINWGSELAARKPYKLAAVALANKMARIVWALMAKNEVYRRQMPA

SEQ ID NO: 453635 - protein, 337 aa, unidentified
MYFGGLDAHKKYVTLVVVDSTGEEVHRQRRVSVGDGEPLLEALADFRPLEVVVETCPFWPWIHDLLEPTEIGFHLAHASELDSIARGSKTDATDAELLARMLATGLIPEAYPKPVAQRELCHLVRHRTTLVRDRTRACNRIHNQLQQRGLQLPREKLLRAEGRDWLEEEAWTELSPGQRRIVESQLELIDMLTPRIKDLDVRVAERAREHPAASLLQSIPGIGPYRSLMLAAELLPITRFPSPDHLVSYAGLAPITRQSGSGDPKHGPLPRGANRRVRGELISAIPSHVRTTPESSLGIYYERQKERLGWATARVATARKLCRIIYAMLSTGEVWRG

SEQ ID NO: 453636 - protein, 419 aa, unidentified
MSFKILKFNCCGLDVHKTWIYACIGITDSNNRTEYKQARFSSFTKGLNELCDWLAKYNCKDVCMESTGKYWIPVFNILEQHNLWVTLSHPKYTKPMKGNKTDRKDAKWICDLYMCGMVKPSFIPPADIRELRDLVRYRFKLTCMITGEKNRAQNCLTVSNLKLDDVFSDVFGKSSRSITEQILKHPGETFDVTPFVDGRCKTPTEEIQAAVDGAISKEQAVKLRQCLDHIDELNKHISEVEQEILRLSDKYEIALNLIRTVPGFNKNPLTAIQVLSEIGGDMSVFPTAKHLVSWAGCCPRNDQSNQKIKSTRISRAGSYFKPVLVQVANALIKSKKHLEFTNRYKRIKARRGHKKAIIAICRMILTAIWHILSDLKPYTPEGFLESRPVKEEKVLSTSQALNLLKQRGYIIKDEPLSVS

SEQ ID NO: 453637 - protein, 320 aa, unidentified
MITIGMDAHKGVHVALALDEAGQELGQWQGPNSAGGWQAISEWAAPLGSRRRWGIEGAWGYGRNLAQHLVAAGETVYEVNSRWTAMGRRSARKPGKTDRLDARAVALLVRQEASALPRVNGEDDTAVLDLLTGEREAAIAESIRLRNQIHALLSQTDPEYRAYMPNLKSQAALDSLESYTAVGSNRLQAERAAAIRRLALRLRLALSQAEELAQQIKDLARGRYSLLTDICGINLITAGTLAGILGPGHHRFATDAQLAAYAGVAPLETSSAGLVRHRLNRGGNRRLNAVLYRIVLTQARHLPAARAYIERRLSEGKTRR

SEQ ID NO: 453638 - protein, 331 aa, unidentified
MTYIGIDVSKATFVVAYSSEKNSKTRTFKNTVKGIHAFVQTLSSKEDHCIMEATGNYSSLLVYLLNEAGVTTSLENPLKIKNFARVMLSTIKTDEVDARIIALYGERMQPRPYKLPSDAILTLKQKRTVIRQLKKQLIATRNLKGSMEVLPFFDPSCKKSVTQTITFLEKQIKTLEEDLSVLAHKEYKKQMDLLTSIKGIGVTLAAALIMATGGFTYFDNAKQLTRYLGLSPNYQQSGTSVNFKGHINRNGDISLRSQLYVAAFASLRCNKECRACYDRLRSNGKPGKVAVIAVANKLVRQAFAVVTHEKPYVDGYVSTLGSAETSSSVEG

SEQ ID NO: 453639 - protein, 343 aa, unidentified
MDHFAGLDVSVKETSICIVDDTGRIVREVKVASEPEALLQVLGNPIYRFKRIGLEAGPLSQWLFSALAEAGLPVICVETRHMRAVLQAQINKTDRNDARGMAQMMRAGLYRPVHVKTLRSQKLRMLLTHRKLLQSKAIAIDNDLRGTLRNFGLKVGVVGTVKFEARIKELVENLPDLAVLVEPLLMVRRVLREQFSILHRRLLAIVRDDEVCRRLMTAPGVGPVVALTYRATVDVPARFRNSKAVGAVFGLTPSKYQSGEINRTGAISKCGDEMMRVMLYEAAQIMLVRTAKWSWLKAWAMKIARHRGMKKAIVALARRLAVIMHRIWVDGTEFRWTREVTAA

SEQ ID NO: 453640 - protein, 323 aa, unidentified
MNKGINYFGIDISKDVFDVMDSTGKHDQFENNFKGFKKLLKLLDSNSHCVMEATGYYHYQLAYYLVEQGLKVSVENPLSVKRFIQMKLSKIKTDKSDAKMICMYAQKAELKLWSGHSKNQTECFQITRLLSLYLKQTTAIKNKLHGEKVLGNPSSMVVKSLRKSLKNIEKEIKALEIQLTEYVKVEHQKLLTLLESIPGLGRKTSIMLIILTDGFERFTTASQLCAFAGLTPMIRQSGSSVKGRPRISKIGNKKLRNLLFMCSFTACQHNKACREIYERITAKGKSKKLALMAVCNKLLKQAFAIANSGIEYDESYRSTLAIN

SEQ ID NO: 453641 - protein, 327 aa, unidentified
MAETHVCVVTGSGAVIHNAKVPSTPADIAAELAQVPTCRRVVFETGRMAPMLYHGLSQLGLPVVCVESRQAYQALKLLATHKTDRNDARGLAHLARTGFFKPVHVKSLSAHAVRSLIIARKKLVGQRVTLENQIRGLAVVFGVRLPRALSPAFIRQALQASEGIPGLSAAMRGLVAARAAVLAAVVAIDADIRRMVRASDACRRLMSIPGVGQLTALAFTAAVDDPGRFRRSRDIGAYLGLVPRRYQSGEIDYTGSISKCGDRRVRTLLYEAANVMLTRYKGPLKLKDWAIAIAKRSTMRKARIALARRLAIIMHAMLRHGTEFKPA

SEQ ID NO: 453642 - protein, 331 aa, unidentified
MNYSHFVGLDVGKKTFDASLMSAAEKELSHKSFDNTPEGIQSLLDWIAGYHLSLSKLLFCAENMGSYVTELSVSSVSMGFSLALVCPLTIKKSIGLQRGKNDRIDAKRIANYAVLHYRKLELYKLPDKDLVRLRGWIIIRDNLVKQKVSSIKLLETFSWMAKLADVTESISFLEEQLKSIKERILEVEEDMEQLIAASTSLYTNYLLLRSIKGIGIINAIVLLCVTDNFQRFDNPRKFACYCGVAPFEHTSGISIRGKTQTSSLANKEVKVYLTRAAITAISWDPQMKAYYKRKIAEGKHKASVINAVRAKIIARSFAVIRRQTPFVTLAV

SEQ ID NO: 453643 - protein, 317 aa, unidentified
MSQDNARAAITPQGELGAIFASIELSKKTWLLTTMSPGAGDKMSRHIISGGDIGALFAQLTTLKRKAYDRTGRHYPFVIIQEAGLDGFWVHRALIAEGYESHVVDAASIATSRRKRRVKTDRLDGESLIRALLAFKRGEPRVCSMLRVPNPNEEDRRRIVRERKVLMEERIRHSNRIKGLLFSQGITGYDPLRRDRREQLEILRTGDGRPLPPNMKRQVLREFGRMELLIDQIKEVEAERDDMLIEERQSAREVALLSKVVGIGPEFAAVLWGEGLFRHFDNRRQVAAYAGLAPTPWQSGEQHPGRQRRSSCRDRYA

SEQ ID NO: 453644 - protein, 318 aa, unidentified
MSDSVFIGIDVSSQTLEIASSDQAKTWRVANDSSGIEQLVSQASALAPALTVLEATGGYEFEAACALQAAGLAVAVVNPRTARDFARAMGALAKTDALDARMLAAFARVLHQHPERERFVKPMADAELQQLQALVLRRRQLVQMLTSERQRLRLAHAAARPSIERVIEFLKKEQGDSEVEVAAHVQRHHAQLAQALASVPGIGAASVAVLLAELPELGKLDRRRIAALVGVAPLNHDSGQMRGQRSIWGGRADVRRTLYMATLTAVRYNPALKACYDRLLAVGKRKKVALVACMRKLLTMLNAIAKHGSTWDSTMHIA

SEQ ID NO: 453645 - protein, 339 aa, unidentified
MHYCGIDLHARTMYLCILNQAGAIVLHRNMKADSDSFLKAIAPFRDQIVVAVECIFSWYWLADLCAREGIAFVLGHALYMKAIHGGKAKNDKIDAQKIAVLLRGGMIPQAYVYPQDMRSTRDLLRRRMHLMHHRSQLLAHIQNTNSQYNLPEIGKKIAYKSNRAGVAERFADVSVQSSIRFDLRRIDFYDGLLNEVELEILRHAKLHDANTFRLLDTVPGVGKILALVLLYEIHDISRFPTVQDFVSYCRLVKPKKESAGKTYGFIGAKIGNAHLKWAFSEASVLFLRNNPEGQAYVARLEKKHSKGKALTILAHKLARAVYYMLRRNEAFDMKRFLNR

SEQ ID NO: 453646 - protein, 389 aa, unidentified
MIYVGIDVAAEKHACCILAESGKVHKQFTFSNDISGFEKLHKALLAPSETKIGLESTGVYGNNLAEFLRRNGYETHIFNPLLVKKSIQATTLRKTKTDKSDAKHIAQYTKEHSQPNLEPSYHISELKSLSRGRFSLVRERSKVKTQAKSLLVQLFPEFSQAFSNVFGAAASAVLRQLPSARMIAQCPVDVLTDLLRTVSHGRLGKVKAELLIDLAEHSVGIQSMALELQMQMFLQQIDLFTLQINRYEVEIKSEMEKIQSPITTIPGIGSVLGAVILSEIGDIRRFATPAKLQAYAGVDPSVGESGTSVSTPGRMVKHGSHYLRWALCQAARCVSLYDPIFAAYMKAKRDEGKHYGVACSHVAKKLTRVIYSILKNNTAYSLTYSQIGA

SEQ ID NO: 453647 - protein, 341 aa, unidentified
MAEYVGLDVSMKETALSIRRDGKRVWRGKCASDPKLIAEVIRRRAPGVARVVFETGPLSVWFYHALTAEGLPAICIDARHAQAALDMAPNKTDAHDADGLAQLAEVGFFREVRVKGFDSMLGRTLVAARNRLVQITTELSNQIRGLMKTFGLVVPAGKGSRFEAHVRALLADQAGLAPILLPLLEAWRAMRLRAAELGRQLVASARQSEACQILMSVPGVGAVTATSFATAVEDPENFRRSRSVGAWLGLTTRRYQSGEVDYDGHISRRGDTHLRGLLYEAATVLLTRTSAESSLRTWGLKLKERIGFKRAAVAVARKLAVVMHAMLRSGQLFDRTAGMAA

SEQ ID NO: 453648 - protein, 318 aa, unidentified
MNIIGLDISKDTIDATLHKTNGSIHYIKFKNNDDGLKQFRLWIKGNRIRKVYIGMEATGIYYEKAADMLSSYYTVYVINHLKIKDYGKSRFNRTKTDKADSNLIADYIKRHQDTLIPYQIPKNKALQKLINLKNQLQQQQKQIKNRLHSTEEDFIRNIHQDLIDTIQDKMEQVKIAISEQIKKQTDNNHYRNLQTIPSIGKDTASVLYAQLTEKHFKTANQFVSYAGLSPAIIQSGTSVRGRGRLSRYGNRRLKSTLYMPALCAYRFNAFPKLINNLKKAGKPKMVIIVAIMRKLAKLAYYIVKTGQPYDAERHRLNQ

SEQ ID NO: 453649 - protein, 356 aa, unidentified
MWYVGLDVHFRQSTFCVLDEHGRKVKTETVRGPWANLLLALAKIKEPWTVCFEASTGYGVLWRRLRSMAQRVVVAHPGQLRLIFRSKRKNDRIDAERLAKVLYLDAVPAVHVPSEAVLAWRGLIAHRNRLVKERTALKNCLRALLRGQGIVAPRSLWSRQGIAWLRALELPTLLDALRRDQLLERILTVQAQIRRVEAELNRVGLKDARVTLLRTIPGVGMRTAEAVVAYLDDVRRFTNLKQVGSYFGLVPRQDASATVNHLGHITKQGPSLVRRLLTEAAWQGIRRSARLRAYFERIGQGNRERRKIALVATAHHLVRVMVAMLRSGESWRPEKVESTEAAPEAGGLEAASTPAA

SEQ ID NO: 453650 - protein, 347 aa, unidentified
MDMMVTLGVDAHKKSHTIVATDPAGARLGQYSTPATPAGHLRALQWATERYGQRRWAIENCRHVSRRFEADLLTAGEVVVLVPPKMMANQRQGARTHGKSDPIDALTIARAALREPELPHARLEGPERDIRLLVDYRDTLITERTRLQNRLRWRLHELAPGYDPPAGSLDRTKVLNQIDELLTHHHSVVAQLARNEVTHIRELTSQAKTIEHQLTALVTQVAPSLLTIPGCGILTAAKLIGEAADITRFRSRNAYAMWNGTAPIPVWSANPTRVRLHRGGNRQTNAALHRIAITQLRIHPDAKRFITRRRTQGNTTTEALRALKRHLSDVTYRTLTHDATNQQPKAA

SEQ ID NO: 453651 - protein, 411 aa, unidentified
MEPVYVAGVDVHKSMLAVVIGGAEVPEAQYLRGKFGTSTAQIRALAAWLAEHHVVEVAMESTALYWRPVWLGLEGRFRLHLAQARSNPAPRGRKTDFQDALRIVRRLLAHDLTLSWVPPAEQRLWRVLARTRTQMIQSQVQARNRIECLLEEGQVKLSAVVSDLMGWSGRRILDQLAAGETDPAKLAASAHPRLRATPEQLREACDGQLLPAHRTILKLFLDQIDQLEKHIQDLERRLAEAQQPYQEAIARLCRVPGIDLHAARQIVAEIGPEAAAFASPEKLAAWVGVCPGRQESAEISYSNHSPKGNPHLRRILSQVAWAAIRTKGSHFQIRFQRWIGRLGPQKAAWAIAHKLVRLIWKILRHGTEYQEYGPLLLDPQAVKRQRLRHTAALRKLGFSVTLTPLGGQTLA

SEQ ID NO: 453652 - protein, 407 aa, unidentified
MDLVHLKCAGLDVHAQTVVACARLGSGKAVAYDRRTFGTTTPELLALSDWLTAHGCTHVAMESSGIYWKPVWHVLDGHFELVLANAMHIRNIPGRKSDVNDATWIADLLAHGLIRSSFVPPPSVQELRDLTRTRKQLVREIAQHTLRIQKTLETANVKLTSVLADILGVSGRAILTALIAGETQPERLAALASDQVKASRAELVAALHGRLTDHHRFMLRLHLDQIASLDVAVRDVEARLGETLAPFRAAVDHLITMPGVSETVARVIVAEIGFDMTRFPSAAHLVSWAGLCPRLHESAGKRLSNRTRSSNPWLKTTLVQAAWSAARKKDSYFRAQFLRIKSRRGPKKAVLAVAASMLTAAYHMLRNGAVYRDLGADHFDRHDKAKLAKRLIARLHDLGLVVDVRAA

SEQ ID NO: 453653 - protein, 376 aa, unidentified
MNKCHSNTELSSHEGTRSQFNGGTGAIKSAVGRMRPVCALGIDVHQDFYVVVEQVDGTNPKPPQRFPKRAFLRWAARLKENTGAEVHAVYEACGFGFSLQRQLSLLGVQCHVVCPQKLDEQNRRVKTDGLDAKALVLKLDRFVQGNRSALALVRVPTEEEEQKRAIHRQREQLVKARKQLEAQGRSLMVNHGLEPVQSWWKPRAFAALPVPQWMKELLANSQPILVALQQKIASLTIQLQSSATPKQPRGLGLMTSVIIDREIGDWRRFSNRRQIGSYTGLCPGEYSSGNTRLQSCVTKHGNPRLRAALVELAWRLVRFQPNYKPIVKWRQILAKGALATGAARKKAIVAVARQLAVDLWRIKTGRLRAEELGLIN

SEQ ID NO: 453654 - protein, 314 aa, unidentified
MSHLFVGVDVSKDRLDVAAHPEPSSWSVANDEAGIEDLVHRLWDLRPVCIVLEATGGLEMPALTALTVAGLPAVAVNPRQTHHFAKAAGLLAKTDRIDALVLARFAEAMKPEIRPILDAPAQELRALTVRRRQLTEMLTAEKNRRSMAAKRTVKEIDKHIAWLEKSLSRIQDDLYKTIRNSPVWREKDDLLQSAKGIGPKTSAVLIAELPELGRLDRWEIAKLVGVAPMNCDSGRYRGQRHIQGGRASLRCALYMATLTAIRFNPVIAAFYQRLMAAGKLFKVAMTACMRKLLVRLNAMLRDRVPWQEKTPQIA

SEQ ID NO: 453655 - protein, 355 aa, unidentified
MSQEKYIGMDVHAATISAAVKNAEGKLLMECVLETKAATILEFIQGLRGTLALSFEEGTLATWLHDLLKPHVSRLVVCDPRKNALMRDGNQNDRVDARNLAELLRTNQVHAVYHGKHGTRALKELGRSYLTLTKDSTRVMNRIKSVYRSWAIPCAGTSVYSRRHRAQWLAKLVEPGVRIRAEHLYEQLDGLQPVRQAARRELLRESRKHAAVKLLRQIPAIGPIRSALLVAILQTPHRFRSKRQLWAYSGFAVQTYDSGEYRFVRGKLHRNRERITVRGLNHNHNHDLKNLLKGAAISALERPGPLQNFYAALVENGMRPSMARLTLARKIAAITLTMWKKGVSFDPKQLRRQAA

SEQ ID NO: 453656 - protein, 347 aa, unidentified
MMYVGVDVGKSKCRASMMSSEGRIVKELNFSNDKAGISHLASMLSMDDRVVMESTGPYWLDLYNQLDDLRIPVVLANPLKTKAIASARIKSDKVDARILAHLLRTDLIPECYVPPKEMREIRSLVRHRLSIVKLRTMVKNKVHALVDRNGLKHEFSDLFGKRGLEWLKSLELCRLDRLMLDNYLMHLENLNLQIEKVDCEITSRASVDGDVRLLLSLKGVNVYSALLIKSEIGAIERFPNYKRLVSWAGLVPSLHQSGDVEYHGNITKQGSSMLRWVMVESARVASVFDPRLKAFYERVKARRGDQKAVVAVANKMLKIIWFMLTRKEPYESVDEGRYAKKLNSLDS

SEQ ID NO: 453657 - protein, 354 aa, unidentified
MLGVLTSIATKEAPVSEGYEGRQVVGIDLHRRRSVIVRMTEGGAPLEKVQIVNTPESLAMVMSRAGEHPEVVLESCYGWYWAADTLAAGGAQVHLAHPLGVKAFSYRRVKNDVRDATDLADLLRMGRLPEAWIAPPATRELRELVRHRAKLVGLRSSLKCQVHAVLASCGVPVPMSDLFGVEGGKLVKRAALPTAFRARVDSAYRLIETLDFEVELFAKLVANRLRRHRGYQAVQTIPGIGPTLAAVFVAEIGDVTRFARPEQLASWAGLTPKHHESDTTVHRGRITKQGSRLVRWAAVEAVQRAGKHTRLGATRDRVAARRGRNIGVVAAARELTGYVYYGLRDGHIRRLAAA

SEQ ID NO: 453658 - protein, 457 aa, unidentified
MKRRGRRTKGMEEAHPFAGMSQINKDAAGVDIGAEEIVVCVAGDETTQIVKAFGNYSVDLQNIGKWLHEHQIKTIAMESTGVYWIPLFEELERQGFECLLISSRSLRRVPGRKSDIQDAQWIQTLHSYGLLESSFRPQGELVALRTLLRHRAQLLEHRSPHIQHMQKALLQMNVQLSQALSDVTGESGLTIIRAIVAGERDPQKLAVLRDRKCKKSAEEIGKALTGTWRTEHLFIVKQSLEMYDFYTRQVEVCDAEIDRMYALTRPEWTGGELKPLPEKKRNSHSKNAPQKQAEIRQHLKRISGVDLSVVDGFGVSLAQTVIMEVGTDMSKFPSEKHFCSWLGLAPKHEISGAKVLKNKTLKTKNRAGQAFRMAAQSVKRADCVFGSLYRRLKGRLDKAQATVATAHMIARVVYRMLKYKVEYETIDIEEYEAKYKEQQIRYMRKKAAKLGFQLVPA

SEQ ID NO: 453659 - protein, 473 aa, unidentified
MSRVDEENEDVLLLSLTGSSPNDSEEDVVSKGSGLSRGDKRRNAKLAELRRLVPVNHAILGIDLADKKQAVVVCDHDSQVLARQTVKARAWELGPVLDWARRVAHKRGFADVTVGCEPTGHRWMVLNQLAARRDMTLVCVNPMLVGRAREAEDYTRDKSDDKDAMLIARLVAGLHCYAPECADETWARLRQLGARRERLVTEATACVAQLRDLLECVWPGVLEAAAKPFDSANWCAALALVLERCNGCPERLARLGLARFEAAVVRELPRWGGQRRRRPIISAVYSALVDPRGVMTQRRGALERARWVLADWRSATTRLTEVQTRMVEILDELGLTAYVTSIPGVSAVGAAAMLAETGDPARFDSPRALVKHAGLCPRDNASGTFNGRSRISRRGRPRLRLAAWRAVWGALPHNSVMAARYRHLTTRQHNRLTDGQARAAIAAALLRWLHVVVTERVHWDATIAGAAEMPAAA

SEQ ID NO: 453660 - protein, 343 aa, unidentified
MKISRVGVDLAKNVFQLHGSDRQGKAVWKRRLSRDKWLNTLVDAIEPGCEVGMEACTGAHHWARELQSKGFTVKLIPPQFVKPYIKSNKNDAKDAEAICEAMSRPSMRYVQVKQVYQQDIQAAHRIRSELMNHRKAKANQLRGLVAEYGLVAPKQYARLRAAVPDWLEDAENGLTDLFRRLLHGLWEDLTTLDKRITEMDKEIERLAKEDPMAQRLQQLRGVGPLIATAMVATIGDGKQYKHGRQMAASLGLTPRQYSSGGKERLLGISKRGDVYLRTLLIHGARSVITHAKHKDDGLSRWVKDLGARRHTNVVAVALANKTVRMAWAMMTKEVDYDPTLAAA

SEQ ID NO: 453661 - protein, 347 aa, unidentified
MLGVDVGKRELHGTWRDPETRRVRWQGVVPNTEAGIRQLLRRVPETAVVVEPTGRYGAVLIRAAQAAGREVLLATPRKARAFLWSEQPRAKTDRVDSAGLALYGLTGRLRPYLLPSPAVDQVKQLLAARRGLSQSLMSLRQQRAALPLAADVLTPAIIALEQQIAELDRQMKRALASTPEPAPQRALAAAAAADPAAPSGHSLAAAAAALAAIPGIGEVTAPALAACLIDKQFTHPDQFVAYVGLDLRVSQSGQRRGQAGLSKHGDAELRRLLFLAAMAAANSTRDATFAQRYAREQAKGLAKTAALNAVARKLAKVAWSIVTHGTQYDPTRVDSQPIDDKPLDSRP

SEQ ID NO: 453662 - protein, 469 aa, unidentified
MTRGDRRRNARRERLRGLLPRDGAVIGIDLGDEKQAIAVVDHDVRVLARKTVRVKAFRLGEALDWAVAQARAKGFTAVAVACEPTGARWLQVQRLCAERGLPLVCVQPLVSHIARQQQDYTAHKSDESDCVMIARLAIELHCYIPEELDETWAQLRHLGRRRAQLITSATASVQRVRDFLSVAWPVAPEACAHPFESVTWLAAMQVVTSRCGGQPEKLAAIGLAEFTALVRQAVARWGGQRPAGPVCRAVFAALASTEGVVVSHRRGLLRRCADELGDLQRIRARLRAVEADMVAVLGELGLCRLADIPGLTAVGAAAILAETGDPRRYDSSSSLARHAGLSPSGNASGAFEGQAHICRRGRPGLRLTVWRAIWPLLIHNSVMAAKYAAMIAAAGAAAPQAAQAQSGTGSRQASAAAAQARRAKARVACATALLRWIYSLAGCDTGWDPDVASAAARCPHAPRCQAEAA

SEQ ID NO: 453663 - protein, 294 aa, unidentified
MTIVAHSRPFVVGVDTHARNHVYAIITAGTGELIATRDFPATGAGINRSIAWVARHTGADLGTLWVIEGTGSYGALLAGAAGAAGYDVAEAARMDARHVVGKSDPLDAHRIAAAVLPLDEQHLRRPRLNEGVRAALRVLVTARDSMTTERTRAVNALTALLRVNDLGLDARKPLTGAQIADVTRWRARDEPLAASIARSEAVRLAQRVTGLDAEIKTNTTRITELVKISDAAPLLQETGFGPVTAAICLTVWSHPGRVRSEAAFASLAGVSPIPASSGNTVRHRLNRGGDRTLN

SEQ ID NO: 453664 - protein, 366 aa, unidentified
MKKISTMQAFSNEILKEQKLTIGVDLGDRWSFYCVLDEAGKIILEQKVATTPEAMKQTFGRISRSLIALETGTHSPWVSRLLTELGHQMLVAHAQKVELITKSNRKDDRHDARTLARLARIDPELLGPIRHRSAKAQIHLTVIRARAELVSARTALVNAARGLVKSFGERLPKCGTYQVHEKLAEGVSAELRDVLAPLLREVESLNERIKEYDERMEKIAKEVYPEVSLLQQVKGVGTQIALTYILTIEDPYRFPKSREVGCFLGLRPGRRNSGESEPQKKISKEGDRYLRTMMVQGAHYILGPFGADSDLRRWGLKLAERGGKNAKKRAVVAVARKLAVLLHRLWVSGEVYEPLRNSEKAMRAVA

SEQ ID NO: 453665 - protein, 349 aa, unidentified
MEHVAIDLGRPNSVTCELGAEGKKVRRRFRLDRPNLTRLFSGRPACRVLIESSTESEWVARHLEGLGHEVVVSDPNYAAMYGERNRRVKTDGRDADALFEANRLGVFRRAHRRSDPQRRVIAQQGVRGALVRTRTRWINVVRALLRREGHHVPSGSPESFADRVGDLDLPRELRDIIAPLLALMDPLNEQIKQLDRKTESLGKEDSRVRLLQTAPMIGAHTSTAFVALIDDVTRFPKAHKVESYLGLVPSEWSSSERRIKEGITKRGDSRVRWLLVEAGWSILNHPRPDTLELRSWALRLAARRGKKVAVVALARRLGGILYAMLRDNKPYDPTRLSAAQSRRPRTAAA

SEQ ID NO: 453666 - protein, 347 aa, unidentified
MKHFAGLDVSLDETTVCVVDEAGGIVREARVPSEPEALVAFFRGLGLAMERIGLEACSLAAWLHEGLTAAGLPAVCLETRRAKAAMGAMPNKTDRNDARGIAQIVRTGWFRAVHVKSPACRSWRALLAARRLVLNKMRDLENGVRALLREAGLKLGRPARKELAARVRELVGADAVLSASVEPLLAIVATMAHELAQLTRRVLAIVRDEPVCRRLMGVPGVGPLTALAFRATIDRPERFRHSRDVGAHLGLTPKRYQSGETDVQGGISRCGDELARTALYEAAHSLLVRSRRWSSLRAWGMQVAKRRGMARARVAVARKLACVLHRMWADDAEFRWGKQETASAVPG

SEQ ID NO: 453667 - protein, 340 aa, unidentified
MNVTTIGIDLAKSVFQLHGVDAQGEVVFRKKLRRPAVLDFLRDLPPCLVGMEACATAHFWAREIGALDHDVRLIPPACVKPYVRRQKNDAADAEAICEAVTRPNMRFVPIKSAERQGVLMLHRSRDLLMRQRTMILNAARAHLAEFGIITAQGPHKLLTLIQSIEAGDGPELPAMARAALTSLVNQLAMLSDEIRQLDRQLMAWHRADETSQRLATVPGIGLITATALAASVPDPGIFTNGRQFAAFLGLVPRQSSSGGKDRLGRISKMGDGYLRRLLVVGATSVVRRADSNPSATGTWVRGLLERKPARLVTVAVANKTARIAWVILARGETYRAPMTA

SEQ ID NO: 453668 - protein, 317 aa, unidentified
MTDTYVGVDVSRAWIDMFCPLTNQHQRLTMDPAILDTFAAGLSSKGVVVVLEATGGCERALLHALTIHKVGYARVNPRQAREFARATGRLAKTDAVDARMLADMGAKFALKADDPIDPQRARLADLVARREALIGYITKEKQRLGTTVDLFIKDDIATKLTFLKTRLAALTKEIAAHIKSATQLARLDAALQSAPGIGPVVAATLLAGLPEIGTTNRRALASLAGLAPHACDSGIRRGSRHIWGGRAQIRRALYLAAFIASSRDPVLKEFRTKLSNQQRPFKAIIIAVARKLLTHLNAMIRSGQPWNNQISADLTPA

SEQ ID NO: 453669 - protein, 301 aa, unidentified
MTIVAGFDVHRRQITFDALDTETGELMRGRIDATPAAVERWAARFEDREVQVALEACTGWLFVSRALERAGAVPHLAEPVETSALRGRKRRAKTDREDARWLRTLLAEGRLPESWIPPEHVRGWRSRSRLRKTLIDERTQWLQRVQATLFHHGIGGVPAELRSAAGREFLEELELPADARERIEIAFEMIDSLDGQLRPLESELRKLARRQTGCRALMAQFGMGELTALMTLCELGDVQRLSASRKAVRMAGIDIGVHRSDRRSRVGKLNRQGSPHLRWALYEAALSATRPKSPDMRTTSR

SEQ ID NO: 453670 - protein, 422 aa, unidentified
MNSQPQSLSSVEPSFGAFVAIDWADQQHVWSLQAADSDQREHGEIQHTPEAIEAWVGGLFSRFPAQPIALAVEQSRGALVFMLSKYEHLHIYPIHPRAAAQFRGALYPSGAKDDPVDANLLLDLLVHHRGHLRRLSPDTEQTRLVQQLVEARRKLVNEKTRQGNRLTSKLKLYFPQILTWFDELDSALVGALLKRWPTLEALQKARQATLRSFFTQHNCRRAELIEQRLEQIRQAIPAIRDAAVIQSAVAMVSVLVSLIATLRQGIAALDRQIEQAAAAHPDFAIFDSFPGAGPVLAPRLLAAFGSQRDRYQSAAEIQQFSGIAPVLVRSGKTAWVHYRWACPKFLRQTFHEWAGHSIGFCDWARAYYEQQRNRGAGHHAAVRALAFKWIRIAFRCWKDRVPYDDSRYLQSLRQRGSPLAVR

SEQ ID NO: 453671 - protein, 384 aa, unidentified
MIGVDPHKWINAVVVVDARGEVLDRGTFATSTVGLRQLGTFARRFKSRTWAVEGCNGVGKPLAQRLVAAGERVKDVPTRRTALVRVFAGGNGRKSDDTDALSIALVGLRTPGLVQVVPDERAATLRLLAHRREELVSTRTQVVCRLHRELLILLPGGTKRGLTAARTKTLLASVRPRDEVGKTRKAIAVDMLGDLVTVDKKIKAIGAQIKDLVAATDTTVTDIYGVGPVTAAMVLGEVLDVARFVDEGHFASYNGTAPIEWGSGGGQGPFILNLGGNRRINHALHMVAITQIRNDTPGRAYYRRKLAEGKTKKEALRCLKRKISAAVYRHLVDDNTQVEERGPGGQLGATTKISAVDPTPTVDTSIKPQPGPRPQATPAAARAS

SEQ ID NO: 453672 - protein, 338 aa, unidentified
MELKRIAIDTSKHVFTVHAIDEKERAVLRRDLRRRQVEGFFAALPPTEVVLEACGGSHHWGRRLSALGHRVKLIAPQYVKPFVKRGKNDRIDAEAISEAAARPTMRFVPVKSAERQAQASVLSVRELLVKQRTQLINALRGQAAEFGIIAAKGAGNAAALAARIASNGELPIVVKEMLARLGQEIARLNQTIAALDKKLAALHRASPVSRRLCEVPGVGQITALTATLTVDPDQFKSGRHLAAWVGLTPKERSTGGKRRLGAISKQGNERLRQLLVLGAMAVIKVAKPGHRYATPWLLRLLERRPRRVAAVALANKMARILWAMMTSGESYRHPPVAA

SEQ ID NO: 453673 - protein, 335 aa, unidentified
MQVYGIDLSKEKFDVNFIDANGKEESLKVKNSLASISRFLSSVSEDGFLCAEHTGAYGDLLVYLCNQMNISIALIPGYTIKHSLGLVKGKSDPLDSKRIREYGERFTDKLEYTEYPEENIVELKQLYTLRYQLVRQRKSLRTIDKGRGVLPMQSIEVYNHLNNVMVKLDEEIAAIEDEIEALIMSDQEMRESYELATGVIGIGPVIATNLIIKTGNFKTIDTCRRAASYAGVCPFPKTSGKMVGKSKISPFADKELKTLLYMGAKAAVKHNKEFKLYFQKKELEGKPYFLIMNNVSNKLLRTVYSVVKNKTPYEKDHICLDPRERNTNSSTKKVA

SEQ ID NO: 453674 - protein, 395 aa, unidentified
MNALALGWDNHRMHSKVSLEEMTSEGKIGVVERARLEHCDRQAMRHWLARVPPGTPVALEAAFGWPWIADLLEEVGLEPHLAHPPAVKVLAQHEAKGDRCDADRLGKFLLRGILPESYLAPPEVRQQRERMRYRVALVGLHTGVKNRIQAILHRLGILHSFSDLFGKSGRAFLEELDLPEASQAVLGGSLRVLDHLREEIREVERWMRRNLEEDEVVRWLQTIPGIGLILAYILRAEIGQLERFPSYRHLGSYSGLAPLSDDSADRHGRRHCSPACNHTLRWALIEAAHGVLLTKGTKAWRLRRLYGRLSGGGRYNKNQAKVAVARELIKLVYMVWKKGEPYTETPPPRPGSRPRNERAQQSERKDQTAKTALRPDQPRHPMVRRRSKTVGQTLS

SEQ ID NO: 453675 - protein, 307 aa, unidentified
MAKKVRSWAGLDVHAAKVVACVVDAESGEMTVHRLAGDIAKVVAFCAALPGPTRVAYEAGPTGFGLARALLAAGVECVIAAPGKIERPAQDRVKTDQRDAERLVRLLMINALHAVRVPGLAEEALRDLTRAREDLRGDLMRARNRLGKLLLRYDVRYEGTWDRWTERHRAWLAKVELPERGAQATFLDYLGAITALEIPRGTLEATIAELAPASRWAGDIARLRCLRGIDTLSAVGLCAEVGDFARFERPAQLMSYLGLVPSERSTGEARRQGAITKSGSSLARWLLIEAAWHYRHSPRVGTKLARR

SEQ ID NO: 453676 - protein, 381 aa, unidentified
MTTAATPHEYSNTTEVTLFVAFELSEKTWKLGFTTGHGQKPRERTVSARQQERVLDEIAQAKRRLGLPDTAPVVSCYEAGREGFWLHRFLQAHGITNHVVDSSAIEVNRRRRRAKSDGLDVRKLLSMLMRYAQGERHVWQVVKAPSVEAEDHRHLHRDLETLKQERASTTTRILGLLSSQGLRVTSLTKLPEQLDALRLWDGSPIPPGLRRRVLRVYAHHTFLSEQIAEVEAERRAQLQTSSEVSIDKVRQLMQLKGVGINGAWLLVMEFFGWRAFKNRREVGGLAGFTPTPYQSGESAREQGITKSGNRHVRWMTTELAWSWLRFQPDSALSCWFRERFGGGGKRLRRIGIVAVARKLLIALWRFLETGVFPAGAVLKEA

SEQ ID NO: 453677 - protein, 452 aa, unidentified
MALVVGIDLGRKSAHDAVILKRDTGLEIGRGFRFTSSPEGFDKLFRKIDAVLNPHEPVDFVIDSPGRAWIPVAAVLKARGFRVYRPSAYRVKKVRQAGHRKNKTNRIDALTLARCLMNYPEDTAPVFLPQADQARLDQIVRQRDRVVDSLARRKQRIQDLCEAVNPGLTKLPDSFLLNEAGRAFLRAYIDPRSVLRLGKKRLGLFLQKRYRLQLEPETLDKLFLACENAVELYRDVRDADSMPFDERVLQDELNWELDQLEREEKRRDLLELQVKKLNRKLDPTDSLISLPGIQHILAAGIRTCVGDIDRFDTLNKHKGYAGFYPSVRKTGDHASSSMPMSKMSSNRYKRYLYLAAENAYKWDLEMAAFYHKRRRAGHTHTQAVCAVANSKLLPRIHQLMKSLKLAEQDNTQRPHYVFRDLSGNPISKAEAKAMITATWGNVDYSKKGVATA

SEQ ID NO: 453678 - protein, 249 aa, unidentified
MLDPTTGEVVERRLEHENGEARTFYATLPSPARVGMEATCNAPWFERVLREHHHELWIGDAAEIRAAMVRKQKTDARDALHILDMLLTDRFPRIWVPSPAERDLRQMLRHRHKLVRFRTSVMNQLHALAMGEGVCRRKKLWTKVGRKELEGLVLDPWASLRREELLRLLDQFDPWIDKLDKAVMQAAENRPFAVCLMQQAGVGPVTALAFVLTIGPVNRFANSKKLVSYLGLNPSEESSGGRQRLGAIN

SEQ ID NO: 453679 - protein, 381 aa, unidentified
MTTAATHHEQSNITEATLFMAFELSEKTWKLGFTTGHGQQPRERTVPARQQERVLDEIAQAKRRMGLPESAAVVSCYEAGREGFWLHRFLQAHGITSHVVDSSAIEVNRRRRRAKSDGLDVRKLLSMLIRYHHGERQVWRVVTVPSVEAEDQRHLHRDLETLKQERASTTTRIQGLLSSQGIRLTSLKKLPEQLDALRLWDGSPIPLGLRHRVLRVYAHHTFLSAQITEVEAERRAQLQASTDARIEKVRQLMQLKGIGINGAWLLVMEFFGWRAFKNRREVGGLAGFTPTPYQSGERAREQGISKSGNRHVRWMTTELAWSWLRFQPDSALSVWFRERFGGGGKRLRRIGIVAVARKLLIALWRFLETGALPEGAVLKEM

SEQ ID NO: 453680 - protein, 330 aa, unidentified
MTDLSPIVKRCAGLDIHRKIIVATILCEEPEGTLKEETREFGVFRKHRRELTRWLQSNGIDQTVMESTGVYHKCIYKELEKAGLAIQLVNARYVKQVPGRKTDVKDSQWLASLARFGLLKSSFVPPVDLREIRLITRYRMKQQGMLASEKNRLHKVLDDSGIRLGTVVSDINGVSAKRMIAGLIEGKPLKELVELAKGRLKEKSQALEESLEGELSIQHRFLLKQIQAHIDYLEKEVANLDQHLTDAMKSYQSQIELLQTVPGIQETSARTVIAEIGVDMSQFGSAEKLASWAGMCPGNNESAGKKKVVQGERVIPHSKGASVRLLMPPG

SEQ ID NO: 453681 - protein, 418 aa, unidentified
METYAERVAGIDVGKADVKVCLRVPSKRVGRRHSEVRTFGTTTRSLLSLREWLLEHQITLVGMESTGEYWRPVYYLLEEVVECWLINPQHIKVVPGRKSDVSDAAWIAQLVEYGLVRPSFVPPPPIRRLRDLTRFRSSLIHDRTRQVQRLHNVLEDAGIKLSLVATDIMGVSGRLMISALIAGQRDPEELAELALGKLKKKNAALIEALTGRFDDHHALLAQMMLDQIDHIDAAVAKLDTQIDASIEPFRGLQEHLVTIPGVAKRAAEVIIAETGADMSRFPTPGHLSSWAGLCPGNNESAGKRFSGKTRNGNAWLCGMLGDCATAAARSKNTYIAERHRRLQRRRGRKRAKVAISRTILESAWWIMTHDVDYQDLGPEHFLARTPNPARRAHRLVVELRALGYDIPALTTAPETTTT

SEQ ID NO: 453682 - protein, 312 aa, unidentified
MNSIICGVDVSKDWLDVFIRPSGVSQRFSNDASGIGALGALCLAEAVELVAMEASGGYERPAFLLLWEMGVACALANARNVRRFAEAMGFLEKTDQIDAAVIAHYAEARPLRASPPPKPAQMRLQALVARLSQVTGDLIIQKQRRSVARDAQAVESLNEVIALLVRQSRRLEGEIASMIDDDPLWAGLDKAFRSIKGVASRTVARLMAELPEIGHISNKAIVKLAGLAPIANDSGKKSGPRPVRGGRKGPRGILFLIAAIAARYDPHLGAFQQRLQAAGKAKMVIRIALARKLLVILNAKARDARKEFQYAT

SEQ ID NO: 453683 - protein, 340 aa, unidentified
MGEQYVGIDLHRRRSVIVRMTPAGEVLQTIRVDNDPVALSLELAKAGPNPEVVLEATYGWYWAADLLQACGARVHLAHPLGVKMFGYQRVKTDARDSTNLAELLRMDRLPEAWLAPPQIRELRELVRYRAKLVALRSGLKAQVHAVLAKEGVRVPMSDLFGVAGTRLLDELHPGRAYGLRIASLRRLLVAYDQEVAMLGREIAAALAGDVGYLAIQAIPGVGPVLAAVFVAEIGDVHRFAAAPQLCSWAGLTPRHHESDTTVRRGPITKQGPRLVRWATVEATQRLPGGSKQAADFHRIADRRGTGIGRVAAARKLLTLVYYGLRDGQVRCLAPAPREAT

SEQ ID NO: 453684 - protein, 337 aa, unidentified
MKYSGIDLHSNNSVVTVTDEEDRVIAEKRLPNDLTRIVELLLPWRDELKAVVVESTYNWYWLVDGLQEAGFVVKLANTGAIKKYDGLKHSGDEADARQLAHLLRLGILPTGTILPPAHRAVRDLARKRMQLVRSRTSHIIAIENIAARQTGMKISSNQIKKMTADEVVQMDFPADVALAINSNLAVVITLSEQIELLEKRLQEDMNERPEYSLLTSVPGIGRILASVILLEIGTVERFATVGNFASYARCVDSQHMSNGKKKGEGNTKNGNKYLSWAFVEAAYYGQRFCTEAKRFYDRKKAKTNTAVATKALAHKLARACYHMLKEQKPFDAGRCFS

SEQ ID NO: 453685 - protein, 426 aa, unidentified
MSEASSPQEPRFTAIVGIDWGDRKHAWSLQAAGSERRERGEIEHSPEAVGSWVSMLSARFDGQPVAVAVEQSRGALVFMLAKYANLHVYPIHPRAAAQFRAALYPSGAKDDPVDADLLLDLLAHHRAHLRPLRPDTEQTRLVQHLVEARRKLVNEKTRQVLRLTDKLKIYFPQVLDWFGKVDSPLVGDLLQRWPTLEDLQKARPATLRSFWTRHNCRSQEAMDERLKKIPQAVPAIRDAAVIQSAVEMTQTLVELIATLRQGISKIEGRIEQVSRAHPDFAIFDSFPGAGPALAPRLLAAFGSLRERYATAADMQKFSGIAPVLERSGKSVWVHSRWACPRFLRQTFHEWAGHSIGFCDWARVYYERQIQAGKGHHAAVRALAFKWIRIAFRCWQDGVPYDDARYIASLRRRGSPLAAALAARNQA

SEQ ID NO: 453686 - protein, 466 aa, unidentified
MSRKNKKMSNKVRSHSDRSLKAIQPNAAGIDPGSKEHWVAGPPGDDDKPNVKCFATTTPELNRLADWLQEQGVETVAMESTGVYWIPLFEVLDSRGFQVVLVNARQISNLPGRKTDILDCQWIQLLHACGLLRGSFRPSDDICRLRALIRERSTMVDERADWIRRMQKYLDQMNIRVHRAVSDITGLTGMAIIRAIVDGERNPYALAKLRDRRCRKSGQQIAEELTGNWRPEHLFNLGQALTMYDQLSAAIGDYDNEILSCIGQLQPDDADDTPLPPHGSKTKARNIARRGQEPLRQALYQLSGVDLTAIDGVSVDTAAVIISEIGLDYSCFPHEKHFISYLRLAPNLAISGGKKIAKRFKATTCTRVTSALRMAALTLRNSKTALGGFYRRVAYRKGASVAVFATARKLAQLIYRLVCYGQTYVDEGAQAYEARFNQRRLIHYTHALKNMGFRVEPMTEFEAVPT

SEQ ID NO: 453687 - protein, 486 aa, unidentified
MGRVSLPHYKERSDPVDKDGRRTGLLSRSSLSDGDTHIQGVSIMSRKKRTHLRGERGQAFANKIRGIPLDQILCVSLDVHKYFHVVIIHNALGEIVTPSFEIDIFQTGFDHLCRAVDETIVRTGAQVVLTGMEPSSHYFENLARHLHKRSQPVTLVNSFAVKKNRDQQMMQYEKDDDIDTASIGDLLQRGEGSPFNPPTGIYLQLQHLDRVRISKVKMRTALQNQIIGHLDRIFPGLIIIGDEAQDRYEPLFATDFWECQTLQHLIRVCPNPHTLVAMSPHDLIEAFHARNYRMGPVRAAKIIAYARKVLLPDPELAAIRCHLLPHDIALLEDVERHIAQLERDLYTLLAETPYLVWTKLKGLSDTQVASLAGAIGDPANYRYAAQVFRRSGLVPGRNDSGTRQRKGKGKKVVKVGDVHLRRALMNGLATLILHQPALRDYCNKLKASKPAGVARVATARRAMGILWAVLRDQRSDTLMLKKGAKM

SEQ ID NO: 453688 - protein, 427 aa, unidentified
MKVLYDRVAGIDVHKDMVKVAIRSPGDKPRTRKTEITEFRTFYGVLQEMGREMRRRGVTHVVMEASGIYTEPVYHALAGLGFTEVAVINPAHARALRGHKTDAKDCARLAELFECGLLRGSYIPPQELKEVRDLTRYRTRTVQARTSEIQRLGKALESAGIKLGSVASSITGMASTAMIEALIDGERRGQVLADLAIGRMRSAGKLADLSMALTGRFTEHHALLCRLHLDRITVFDDAVAGLEARIAGKAAPWQREAGLLISVPGFGDAVSQAWLGEIGPAPHQWFSSAGKLASWVSLCPGNHISAGKRKHGRTGRAGTYIKPMLIQAAWAAIRVRGRLQARYNRLVRRFGGDKNRAAKKKAITAIAHTLLKIAYQVLKSGTPYQEPGADFYTRRESPEHKQAWLERQLQKLHPGCTITITISPEAA

SEQ ID NO: 453689 - protein, 473 aa, unidentified
MARKKGKDPAGIGGPGLTGEPVEVSDEPAEVIARAAAIDVAKGSGMVCTRVPHESGPRRRVQRIWQVSARYSEIAALMAELAKLGIQRLVLESTSDYWRIWYYLAEAAGLEVWLVNARDAKHLPGRPKTDKLDCVWLCKLNERGMLRRSFVPPEAVRDLRALTRLRSRLAQDQARHQSRIEKILEDALLKISSVISDLMGASGRRFLAALVAGERAPDKLAALGDRRLKASPAQLEEALAGRFRDIHALEIGMLLELIDDITAKMARLDAEITARLARIPGLAPACAGCGEIGGGHAPSCPQAGAPVLSVIERLDELTGIGIDAAQVIVAELGTDKTTFPTPGHAAAWAKLASRTIQSGSTSKDGRTGKGNPYLRAVLGRAAMTAAKTDTYLGERYRRIARRRGKQKAIVAVSRTICEIAWMIITDPSVRFSELGPDYYARLDAGRQTRNKIRELERLNPGMKVTLTPAATAA

SEQ ID NO: 453690 - protein, 370 aa, unidentified
MPGKTIYVGLDVHKSSISVSIAEDGRDGPVRFLGPIPNAPVEVAKLVQRLSKEGDTLEFCYEAGPCGYGLYRQLLDLGHHCTVVAPSRIPVKPGDRIKTDRRDSQKLAILHRSGDLTAVWVPDEVHEAMRDLARARIDAVMQLMRARQQLLSFLLRHGRTYTTGKHWTQRHRSWLAGQVFTQPVHQIVFQDYIEAVFTAQDRRDELVRRIETMVGSWSMGPLVEALRGLRGIELVSAVTFVAAVGDLNRFDTPRQLMAYLGLVPSEQSSGEHVFRGGITKTGNREARRMLIEAAWSYRYPARVAKEKAEVIVRLPKPVRDIAWKAQLRLCKRYQRLCAVRKKPTVVVTAIARELSGFVWAIGRQVQPAPP

SEQ ID NO: 453691 - protein, 496 aa, unidentified
MKPTKKDVLAMAKRKKSTYERLRDGEKLKQWERKEMERQFRAEDPGWEVVHRDVAGIDVGNESHFAAVDPKLTLQSVREFGSWTAGLQTMADWFKQCGVKRVVMQTTGVYWIGVQEVMEGNGLQVAVVDARGTKNLPGRKSDVQECQWLRKLDRFGLLREAFQPPEAIRGIRTTWRLRQRWVSDAGRSIQQMQKALTTMNVQLANTISDVSGVTGQAIIRAIVGGERDPWKLAKLRESNIRASEEEIARSLEGNWREDVLFELEEVLEAYDFQQKRIAKCDEQLKKYMGTQPTREVGGDVEVAGEEVAEGPKKRGRKKKGQRKPRKNQPAFNLEAELKRVMGVDLTRIDGVKVMTAQTIYAEVGADLSSFPTENHFASWLMLAPKRDVSGGKVIKHLSFKGSNRVANSLKMAAESLKESDSYLGARYRSLRGRLGGVRAVKAMARYLACLIYRMLTKGEAYVDRGAAYFEKKRQDRDLVYLRQKAATLGLQLVAAV

SEQ ID NO: 453692 - protein, 411 aa, unidentified
MTKDRFAVHVGLDWADRKHDLCIQFSSGERCFQVIDHSPESLDTWLKNLHKQVKGQLAVALELKKGPIVYALQKYPFVTVFPVHALSLARYRQAFWPSGAKDDPQDAELALELMLRYPKKVTPIEPSNSDIRLLQQLVEQRRQLVEDKRRFVNRLINTLKQYYPQPLEWFSHRGSALFCDLIIRWPNLQTLKRARTSTIRSFFETVRGRGAANVEKRIVSIEQAIPLTNDSCVIEANELMAVCLAKQIKLVVDNIQAYDKRIESLFETLPDAKLFKSLPGIGPCMGPRMLAALGDNRERFHSAEEIQSYAGIAPVTERSGQKCWVHWRWQCSKFVRQTFVEWAAKTVQSSYWAEIYYQGQRRKGKSHQSAIRALAYKWIRIIYRCWKTRTCYDEAKYLRALKERNSPLLSV

SEQ ID NO: 453693 - protein, 350 aa, unidentified
MKNHITIGMDLGDRNHIVVIMDADGREIECTKVTNTKVSVERFFQKYSGATVAIEAGTHSPWISRLLEELGCRVYVGNPRKLRVIWDSTDKSDERDARMLAMVCRLEPKLLWPVRHRGVSAHSDLELIKARDMLVQSRTKLINHVRSVVKGVGERLPGCSSDSFANRVAALLPESFQPALIPLIDTIGDITGRIRELDKQINTLSQDRYPETQVLQQVKGVGPVTALAYVLTLEDPGRFTKSRMVGPYLGLTPRRDQSGDTDKQLRITKEGNVYLRKLLVGCSHYIMGPFGPDSDLRRHGLAIAARGGKNARKRAAVAVARKLSVLLHRLWVSGQDYVPLYASLKIRKAA

SEQ ID NO: 453694 - protein, 412 aa, unidentified
MEVIYPCCCGLDVHKKSITACVLWAEAKGKSRKEKKRFGTFTHDLLQLADWLAERGVTHLAMESTGVYWKPVWNILAEQFEALLVNAQHIKAVPGRKTDQKDSEWIADLLQHGLLRGSFVPPQPIRELRDLTRYRVSLVQEINRIANRIQKVLEDANIKLASVATDALGASGRAILEAMLAGEQDAARLAEMSKGLLRNKIPELKLALEGRMTEHHRFLLRQLFEHLRFTESKRSEIEQEIDKRMRPFEDKVTRLCTIPGVDRVTAWGMLAEMGMNMNQFPSSGHLASWACLCPGSFESAGKRLSGKMRKGNVSLRRCLSQAAWAISMMKNNYLSALYRRLAARRGAKRAIMAVAHALLEIAYHMLKRKEDYRELGADHFDRIDVNRIRRSLVRRLERLGHKVTLEPLAQTA

SEQ ID NO: 453695 - protein, 379 aa, unidentified
MYRILKIGMDVHTTNFTLCALESKFGEEDQILANITVGPEHKNVLDFIRRIKEKMDPKGQDEIDVECGYEAGCLGFSLFHTLTACKLKCRILAPTTMLSEQGPRIKTDRRDAKLIAQCLSNGGYHAVHIPTAEDNAVKEYVRMRDDHKLALKKVKQQTNAFCLRFGFTYGGTHWTRMHLKWLRALKLPELIRETLNEYLATYDELTAKIDRYDKRIQEIAAQSEYQEKVRKLECFLGIKTHTALSLIVETGDFIRFRKGNIYAAYLGLAPGEHSSAESGGRLGITKAGNSHLRRLLIEAAGGICKGQIGKKSKDLISRQNRNPADIIAYADKANIRLRSKYYRLTRHGKKRNVAVAAIARELACFVWGMMTDNIHGNAA

SEQ ID NO: 453696 - protein, 374 aa, unidentified
MRKVIMIGCDLHDKTMLLKIALGRQEAEMCSVKNTAASRAKMIGALKQRAAAAGGARILFAYEASGQGFGLYDELTDAGIECHVLAPTRIARSQRATSQKTDEKDAQQLVELLRAHVLAGNELPTVWIPDPTTRDDRELVRMRLDVAEKMTMVKSQIQSLLKRNQIRRGGAAGKGWTRLFRSWLQGTLCESAASPLGANARLALASLIRQLNSLEEEERRLDEGVNGLAGAARYAAAVEEMTSLCGVGVLTALVFLTELGDLSRFANRRQLAAYLGLAPRSFESGSANDRKGHITRQGSSRVRKMLCQATWARVRWDKQEQEAYGRLVAKNPKKKKIAVVASMRRLAVRMWHRGRAVPPGQPSRSMRLMAHAAG

SEQ ID NO: 453697 - protein, 331 aa, unidentified
MNQENLIGIDVSKNELQVSCEFWDGRRERCTLPNDTAGIARLAALARRGGKAAKACMEHTGIYSFDAALGLHEAGAAVMLPNPRAVRDFMRATLSRAKTDKVDADGNLEFLRRMPFNQWQPPPKKHLELRQLTRRILQLKGHLAQEKTQRHIAAHLPEAVRLDIRRQIASIGRSIETLEAEALRLVSADPDLKRKHTLLTTIKGVGVWSALCILAELIALPAGMTPSQWVAHAGLDPRPFQSGQSMDKPRHISKTGNARLRRALFCPAMVAARHNQAVKAFYDHLLGKGKKKLVALVAVMRKLIHAIWGMLHYGQPFDGSKFFTQKSPIIA

SEQ ID NO: 453698 - protein, 342 aa, unidentified
MKKKLFIGIDFSKKTIDVSVIHPNNLQKVCYSQFANDKAGYSQLLNWIKPLSQESNEDWLFCGENTGLYSLGLSEFLTKKSLFLWLENPLQIKQSSGIKREKNDKVDSREIALYAYRFQDKARAFQLPGKALKSLELLLSFRERLLGNKHALMVSASEIRRVMQRDATARFIYEQSQKDIERINKEIKEVEKRMLQQIESDESLKENYELISSIKGVALINTIAILVATQNFTRFECSRQFACYAGMAPFGKQSGTSINTRAKVSNLAAKKIKMLLTQAAQCAIRYDPNIRQYYLRKLAEGKEKWLIINNVRNKMIHRIFAIVRNKQLYQVEYANHLVIGIA

SEQ ID NO: 453699 - protein, 406 aa, unidentified
MQTVYERCCGIDVHKKLIVACFRNGKKAELRKFDTLTCNIKELANWLLDNDCEMVAMESTGAYWKPIYNILELFGLDVMVVNAHHMRNVPGRKTDAKDAEWIADLLQHGLLKASYIPSKEQREIRDVVRYRKSLIEERSREINRLEKILEGANIKLSSYVSDLTGSSSRKLLNQAIEDKVTPDNIGDLVHYSMQGKIPVLLKAMDGVLTPIQKKLVKAILDHIDDMTRRINDLDDIINNEMKHYEDAINKIEEMPGIGKRSAEVIIAEIGADMSRFPTAAHLASWSGLCPGNNESAGKRKSGKTNKGSKHLKSILIQCAKAAKNNKESFFFAQYQRLVTKRGANRATVAVAHSMLIAIYHMLKDNVPFKDLGSYYYTKFNTDKKANYYLKKLQELGVSVPVSLATA

SEQ ID NO: 453700 - protein, 386 aa, unidentified
MQTPNDLSRSLIVLKQDSTLIAVIEMSLSSWLVAGIVPGVERQPLKKLAVEESALLKLLNRWREEAEKGGRKIERIAIAFEAGRDGFWLARWLGARGIEAHVIHASSVAVSREHRRAKTDRLDTELLKRAFLGWLRGERDHCKMVAIPTIADEDAKRPNRERESLVGERTRIVNRMKAALSRLGIRGFNPKLKKAAERLEDLRTPEDEPIPPNTLAELRRDMERRRLVSDQIRQIEDARLERIEHAPNDGPHAMVHLLARVIGVGVETADMLVQEVLSRNLRDRRAVARYGGLTGSPDESGKKRREKGLARSGNARVRRGMIQLAWRFLMFQKDSALAHWFYARTKNAPQTRKTMIVALARKLLIALWRLVREGTIPEGVVLRPAL

SEQ ID NO: 453701 - protein, 354 aa, unidentified
MIIIGADYHPGFQQIAYVDTDTGELQERRLEHREGAEKFYRDLAAQETRVRVGMEASGHARWFERLLSELRFELWIGDAAEIRTKRVRKQKTDRQDARLILQLLIENRFPRIWVPSWENRDLRQLLWHRHRMVQARTRIMNQLQAVALNEGLRCKKRLWRDAGREQLESFALAPWASRRRRDLLELLDRLTPTIAELTQAIEEEVEKCPEARRLQTHPGVGALTALAFVLIIGRAERFQCGKQIASYLGLVPLEESSGNRRRLGHITKQGNSLLRFLLVEAAQVTVRSDQEWRSKYFHLALRRGRKIAKVAMARRLAVRLYWMWRKGWNYQQLKTFGSHAGEPGHRDGVQLNTE

SEQ ID NO: 453702 - protein, 316 aa, unidentified
MYLGIDVSKLTIDCCLIADGQSHQKKFQNNKGGFEQLTKWLQSHKVSDKLHCVCEATGTYYEALAEYLYSRYTITVENPRKIKGYAIAELQRSKTDTQDAKLIAQYCQDRKHKLKAWQPPAKEQKQLQEIARYLDYLKQQRATEKAKQHEAPDYIKSHIQTTISNLTAQIQTVKKQLLQFYKDNPSYNNLRKRLKTITGIGEQATAVLLSTYKRHEFKNAKQFTAYLGLDPRKYQSGTSVKGKSRISKIGSSEIRKSLYMPAVVAYRCNAFPEFVGRLKNKGKHIKLILIAIMRKLAVIAFTLLKNGQDFQAERYK

SEQ ID NO: 453703 - protein, 359 aa, unidentified
MRALYAGFDLHGNSNYLGMIDGDGKRVFRKKLSNDLGWIGKVLVPFKEELVGIAVESTYNWYWLVDGLMEEGYKVHLANPSAIQQYVGLKHADDKHDAFWLAEMLRLGILPEGYIYPKEERPVRDLLRKRGHLVKLRTSLVISLQNILSRHLGRKVSVNDVKVLKEDRVTPLLESSEDLALAGRVSKESIDFLTHQIRRIEGVVEKRMEVKEEYRYLLTLPGVGKILALTMMLETGPIGRFATVGDYVSYCRKVPSQWTSNGKRKGSGNRKNGNKYLAWAYAEASELARRFYPEPRVYYNRKMQKTNASVAHSALAHKLARAGYYVMRDQVPFESQKLFGRGQGWNGEPELGLAKSHET

SEQ ID NO: 453704 - protein, 313 aa, unidentified
MFNKRLPNDLGQIRAVLEAHREELGGVVIESTYNWYWLVDGLMDAGYRVHLAHPSAIKKYEGLKYSGDFADAGYLAHLLRLGLLAEGYIYPREERGARDLARKRMQLVRCRTAQILAIESIVVRQTGARMNAEAVKRLTPEQVEGLGFVPDVALAVEANRAVSQALGQQIEALEKRLKKRVHLRSEFKLLKTAPGIGEILATTIMLETGTLERFAKVGNYSSYCRCVDSLRESNDKKKGEGNAKNGNKYLAWAFVEAANFARRYCPQAKSFYERKKRKANGILATKALAHKLARACYHMLREQKPFDVSRCFG

SEQ ID NO: 453705 - protein, 402 aa, unidentified
MNCVGIDVSKGKSTIAVMRPFGEVVVSPFEVRHTANELSELARQLKSLDGETRVVMESTGNYHAPVAWLLHDAGFYVSVVNAMLVHDYGNNSLKRAKTDKKDAVKLANCGLDHWLTLPRYVPEEDTRLMLKTCYRQYQQYSKVQTMLKNNLISLLDTAFPNANRLFTSPPRADGSEKWVDFVATFWHCECVCGLSEKAFTAKYQKWCKKHGYNFSEDKALDIYASAFAHFGVMPKTDTAKLLVEQAISQLRATSTALAALKQKMQSLAASLPEYPVVMEMFGVGPTLGPQLMAEIGDVRRFHSKKALVAFAGIDAPPYQSGQIDVRSRSISKRGSASLRRTLFLVMGVLLQCAPMDEPVYQFMDKKRSEGKPYRVYMMASANKFLRIYYASVKAYLDSLEHD

SEQ ID NO: 453706 - protein, 356 aa, unidentified
MVRGNGSQAALVVVGVDTHKDEHVAVAVDQMGVRLCERRVATTIPGATDLERWACGLGGVVAFGIEGTGSYGAGLSRFLTARGYTVVEVNRPDRSVRRRNGKSDPTDAEMAARAVLAGVARTTPKSGMDQVEMLRMLRTTRNSALKARTQAMNQMQSLIVTAPSALRETLRGFTTTRLVNRCARLRPGELATPTAVAKHALRILALRCRQLTVEIDALEKDMTQLTKQVAPALIQLFGVGPDTAATLLISAGSNPQRLKSEASFAALCGASPLPASSGRTNRHRLNRGGDRQANAALYRIVIVRLRYDKRTVAYMKRRVGEGMTKTEVIRCLKRYVAREVFGVLRMERENALLEVA

SEQ ID NO: 453707 - protein, 426 aa, unidentified
MKSTTQNAKIAAITEKTLIIGIDVGSETHFARAFDWRGYEFSRKPLEFSNTGEGFETFRAWIDELKEKHGMDKVMPGMEPTGHYWFNLGKFLQDHGMTPVHVNPHHVKKSKELDDNTPSKNDRKDPKVIAGLVKDGRYFRPYIPDGIYAEIRALSGLQVLAQSEITRLKNRIARWFSIYFPNYKDVYGNIGAVSGLMVLEAAPLPADIVKLGVDGVNRIWREAKLRGVGLKRAKTLVTAAEHSIGSRDAQEAARIELRILLADYKMQTAQEAELMALIEDKIRKVPYVDKLLEIRGVGLKTVTGFVAEVGDITRFDDPRQLQKLAGYAIVKNESGKHKGESHISYRGRKRLRYVLYEAAVSVVSHSAEFRSIYQYYTTREKNPLKKMQSMIAVACKLVRVFYLILKTGATYDAGKLMDDIRRPVAA

SEQ ID NO: 453708 - protein, 405 aa, unidentified
MVAVMIGIDPHKASHTAVAIDPAEVPLGQLRVRASAVQAERLLGWAQAWPERAWAVEGAGGLGHLLAQQLLSAGERVLDVPPKLAARVRLLATGNINKNDPNDARSVAVAALRSAGVREVRRDDHAAVLKVWSKRYQDLGRARTQVACRLHQVMCELIPGGVPGEITAGQAERILASITPAEAVQAARWELAAELTEDLRGIDARIRQARTKLAAAVRAAGTSLTRLFGVGPVIAAAVIGDVGQVARFPDRDHFAAYNGTAPIEVSSGGRKIWRLSRRGNRRLNHAIHMAAVTQIRHRHSQGHAYYQKKLAEGKTGKEALRALKRQVSDAIYACLQADARRAAAHAKGPGGQPGNGSDSSAAGSHPERQLFGPATPGPDTTIRPGTTAGTPPPSKPTSKKTRPAT

SEQ ID NO: 453709 - protein, 351 aa, unidentified
MPYKLNSGIAVIGIDIGKNSFHVVGHDKRGAIVLRQKWSRGQVEARLANLPSCLIGMEACVGAHHLSRKLQMLGHYARLMPAKYVRPYSKGQKNDFRDAEAIAEAVQRPTMKFVATKTAEQLDLQALHRVRERLVSQRTGIINQIRAFLLERGVAMRQGLRFLRAELPRILAAPCDTLSPRMLRVIEELAGDWRRLDERIEGLSSEIEALARQDEGCARLMTVPGIGPIISSAMVAAIGTGDAFSKGRDFGAWLGLVPKQISTGDRTILGSISKRGNRYLRTLFVQAAWVVLVRVGPKHWERYGLKSWLEAAKKRLHHNVLAIALANKLARIAWSVLAHGRTFEATKIQAA

SEQ ID NO: 453710 - protein, 341 aa, unidentified
MEEYIGLDVSMKETAVSIRRAGERIWRGKCASDPSIVAELIRKRAPSVKRVVFETGPLSVWFYHSLRTEGLPAICIDARHAKAALDMATNKTDANDADGLAQLAEVGFFREVRVKGLDSLLTRTLVAARTWLVRITTGLSNQIRGVMKTFGLLVPAGKGSTFEKNVRSLLADQDRLASIVLPMLEAWRGIRVRAAELGRQLVRDARQSRACRILMSIPGIGAITATSFTTAIEEPDNFRKSRSVGAWIGLTTRRYQSGEVDYDGHISRRGDRPLRGLLYEAAAVILTRSSTHSTLRTWGLQLRERIGFKRAAVAVARKLAVIMHTMLKTGQLFNPNAGAAA

SEQ ID NO: 453711 - protein, 424 aa, unidentified
MNLTQNDRLKQVTSDILIVGVDVGSQTHFCRAFDWRGFELSRRVFKFSNTGMGFLTFLRWTEELMNKTEMKKVIVGCEPTGCYWLTFQKFLQDHDIQLVTVNPFTVNRSMELDDNSPEKSDLKDPKTIALLVIDGRFSTSYLPSGVYAEIREASVCRDQIMKQHVRLSNQIQGWIQKFFPEYLECYADWDSTSGLMLLREAPLPQDILKIGAGGINQIWRNAKVRAAGIKRAQTLVEAAQNSVGLEAGEAARLEIWVLVNDYILKAEQLKRLDEYLEEKVKEVPNVEKLLAIKGVGMSTVIGFIAEVGDIGRFTDPKQIQKLAGLEIVKKSSGKKKGQPRISKRGRRKLRRTMYESARALMIWNPVFQDVFLYYRNRTKNPLGGMQAKIAVACKAIRIFYVVLQTGCDFDEEKIRKDIIRPEAA

SEQ ID NO: 453712 - protein, 362 aa, unidentified
MAQVRSWAGLDVHASKVVAATVDSESGELRIGRLSGRTGEVVEFCAGLPGPTRVAYEAGPTGFGLARALWAAGVGCIVAAPGKIERPAQDRVKTDQRDAERVLRLLMIDGLHAVRVPSTEEEALRDLVRAREDIRGDLMRARHRMSKLLLRYDVRYEDTGSAWTARHRAWLGKLDLGETGAQATLLDYLGAIDALVVRRDALESTIGQLVPDSPWAQTIARLRCLRGVDTLSAVGLCAEIGDFERFERPGHLMSYLGLVPSENSSGERRRQGAITKTGSRHARRLLVEAAWHYRRAPAKGQTLKRRQEGQPAHVIAISWKAQQRLRRTWRRLDSERGKRRTIVAVAAARELAGFCWALANAD

SEQ ID NO: 453713 - protein, 423 aa, unidentified
MFKIIKFNCCGLDVHKTWIYACIGITDANFRTEYYEDRFSSFPKDLRRLAAWLHEHKCEEVCMESSGKYWIPVFNALEQTCKVTLAHPKYTKPQKGNKTDRKDARWICDLFMCGMIKPSFIPPPAIRHLRELIRYRVKLTNMLTGEKNRAHNSLTVSSLKLDDVFSDIFGKSARSITEYILAHPGEHFDVTPFIDKHCKTPVDVIQDAVDGAISPEQAVKLRECLNHIDELSAHRDNIEKEILELVKPFSAQLALIRTVPGLDKDPMTAITILSEIGSDMSVFPTAKNLVSWAGCCPRNDKSAKHVKSTRIAAAGSFLKPILVQVANALIKSKKHPEFTERYRRIKSHRGHKKAMIALCKMLLTAIWNILSTGEVYNPSGYLIQTPRPSNETKVLTQKQALELLRLRGFVIKDDPVEPDLLPA

SEQ ID NO: 453714 - protein, 401 aa, unidentified
MVSDFMKGRYNLMKIYVGIDIAKLNHFAAAISSDGEIILEPFKFTNDADGFQLLVSKLESFDKNSIIIGLESTAHYGDNLVRYLVAEFYQVCVLNPIKTCQMRKNNVRKTKTDKVDTFVIAKTLMMQDDLRFITFFDLDMMDLKALGRFRQKTIKQRTRLKIQLTTYVDQVFPEIQYFFKSGLHQNAVYALLKEAPSPKEIASMHMTHLANLLKVNSHGHFTKEQAKELRILAQKSVGANDSAISIQITQTIQQIELLDSQLEKIEAEMTDIMKFNDSVIMTIPGIGYINGGMILGEIGDIHRFSNPNKLLAFAGLDPSVYQSGNFQAKTTRMSKRGSRVLRYALVNAAWNVVRNNATFKAYYDAKRAEGRSHYNALGHCAGKLVRVIWKMLTDEVEFNLE

SEQ ID NO: 453715 - protein, 365 aa, unidentified
MQKIYIGVDFHARQQTVCYLKTETGELVIGELKHQHKEQVRAFYQQFAAPVIVGLEASGYSPWFEALLEQLGCEVWLGHATEIRRRARWREKNDRRDAELIWDLMVHDEFPRLHRPAAQSREVLRMLRYRQKLTKLRTMAKNSLQAIALQAGLAKGKQLFTAAGQEQFQAAALSPVLHWQRAHWFALLQPLNQQLGETMVWFKAQSKDDLGVTRLRTHPGLGLLTSLCLVHTLQPVSRFRNARKVAAYAGFDPVERSSAERKCFLGISKAGSRLLRYLLVEAAHTAVRYDEDLKRFYKRLAQRRGRPKAKVAAARKLLIRAYIMMRDEIDYAEFRRRAVAARLARHSQRPNVPEVLIGQPASLVE

SEQ ID NO: 453716 - protein, 343 aa, unidentified
MEYYAGIDVSLESSSLCVVDATGRIVREAKVASEPETLTAWFNSLGFALSRIGLEAGPMSQWLYAAMKQAGLTVELLETRHVRNAFKIMPVKTDRKDARGIAPLMRLGWFRPVHCKSLPAQEIRSLLGARKLLQGKLHDIELSLRGTLRGFGLKVGKTTPKTFEGRVRSLVTNHPTLTLIAEALLRARAVLLGEFLNLDQKVHTLARHDPRARLLTTAPGVGSMVALTYAAAIDDPARFKSSKTVGALFGLTPKRYQSGETDVTGRISKIGDAAVRTALYEAANIILERPVKGGWLKAWALGVAKRAGMRKAKVALARKLAVVLHRMLVDGTPFNMEKAAAKA

SEQ ID NO: 453717 - protein, 448 aa, unidentified
MDSFPIINPNAAGIDIGSEEHWVCVPEDRDEQPVRRFACFTADLYAMADWLKKCHIDTVAMESTGVYWIVLYQVLETQGFQVNLVNARHARNVPGRKTDVLDCQWLQRLHTYGLLSGSFRPEDDVCVLRSYWRQRDRLIRYTSAHVQHMQKALTEMNVQLHKVISDITGTTGMRIIRAILDGERDPLKLAQMRDPRIKSSVETIAKALQGDYRQEHLFALKQSLELYEFYQHQIQSCDREIEAYLEQMDSKVDPDSTPPPASKRGNKKPRGNEPDFDLRTHLYRISGVDFTQIDGLHVLTVQTILSEVGFDPGKFPSAKNFASWLGLCSNNRITGGQVKSSKTRKVVNRAADAFRLGAQAVANSSSALGAYYRRMRARLDPPKAITATAHKLARIFYHLWKNHGLYHDPGADYYERQYRDRVINNMKKKAKNLGFEITLNPIANMQVS

SEQ ID NO: 453718 - protein, 386 aa, unidentified
MQTVADRPEAPTAIRTDLGAIFVSLELSRSTWLITSLWPFGGEKMSKQVVRGGDVAELLERFARLREKARARTGKVFPFVVIQEAGLDGFWIDRALQNEGIESHVVDPASIATSRRRRRAKTDGIDGEALVRALLAYKRGEPRVCAMVKAPTPEEEDRRRLCRERTVLIGERVQHVNRVKGLLFSQGISGYEPLRRDRRERLDTLQTGDGRLLPDHLKAQVRRELDRLELLLDQIKAVEAERDVLLAAQQAPAPAAMLLDIKGIGPEFAAILWSEGLFRHFDNRRQVASYAGLAPTPWQSGSVDREQGVSKAGNPRLRTTLIQLAWLWLRHQPQSALALWFEERVRRNGGRLKKKTIVALARKLLIALWKYVTAGVLIEGAVMKAA

SEQ ID NO: 453719 - protein, 413 aa, unidentified
MEILHARCAALDVSKKDAKVCVRTPGKRAGTYTNTVTTWGATTNQVLALRAYLLEQKVSLVVMEATGVYWKPYYFLLEDGLEVMLVNARQARNMPGRKTDVSDAQWLAELGAHGLIRASFVPPAPIRQLRDLTRLRTTLTTERSREIQRLEKLLEDAGIKLSSVATDIMGVSGRAMLAALIAGVTDPQAMAELAKARMRTKLPALAEALTGRFSEHHAFLARLHLTQIDQLSTAITELTHRIEVVIEPFRDALTLLVTIPGVSRLTADVIIAETGGDMSEFATAGHLASWAGTTPGHNESAGRSKSTRTRPGNPYLKQALGIAAMAASRSNGTYLQAFFKRIAARRGYLKALVATEHSMLVAVWHMLSNGIVYTELGGGYFARLDPQKAIRQALRRLEQLGYTATLTPIETTV

SEQ ID NO: 453720 - protein, 383 aa, unidentified
MDQSESVGACGAAITVLVAIELSKSAWVLAVHDPVTDKISRRRLDGGDASGLISICERARDSAAGRSLDPVGVECVFEAGYDGFWLQRCLEQAGITCRVMDPASLKVDRRARRVKTDRIDAESLLRALQAWRRGDRQACSFVRVPTLDEEDARRPHRELNRLRKERVAHVNRIKGLLALHGIMTYQPMRQDRRSKLAELRTAEGAALPPRCRAEIERELRRLELVLEHIAEVEAALAPADEPSANEAAVILLEKLTCIGHETAVVLAREVFCRDFRDRRSIAAFVGLAPSPYSSGRLQHEQGISKAGNSLVRARLVQLAWRWVRFQNESNLTAWFMQRTGGESRRSRRVAIVAVARKLLVALWRYATQGLVPSGAKLKPAAAG

SEQ ID NO: 453721 - protein, 322 aa, unidentified
MSGAVLGIDIAKQKFDAALLIDGKTRHKTCKNSAEGFEALMLWLEKQGIQKVHACLEATGNYGEDLAIFLHDAGHRVSVVNPARIKGFAQSELLRTKTDKLDAALIARFCMALKPDPWKPPSPEIRFLRALVRRIESLIDMRSQEKNRISTAHKSVIFLIKEHIAYLDREIEKIRRQIADLIGQNPHLTRRKELLDSIPGIGKATIPHILAELDDLEKFTSVPEMVAFIGLAPKETLSGSSIKGKPRLCKIGHARLRKALYMPALVSIQCNPVMIAFYNRLKEKGKNGKVIVCAIMRKLVHVIFGVLKSGKMYDPDYQPNVA

SEQ ID NO: 453722 - protein, 400 aa, unidentified
MTGSQLWAGVDVGKEHHWICVLDTSGTVVLSRRCDNDEATIRAVITEIDALAETVSWTVDLTTAYVTLLLTVLADAGKPVRYLSGRSVWQASSVYRGGEAKTDARDARVIADQSRMRSDLPVLRPDDELIRELQMLTGHRTDLVADRTRTINRLRQQLVAICPGLERVAQISSDRGWVVLLARYQRPKAIRRVGAARLAAMLTGAGVRHAESIARAAVTAAKAQTVRLPGEDVAAELVAELAQAVIDLDARIRAVDAEIEARFRRHPLAEVILSLPGMGFRLGAEFLAAVGDPALIGSADQLAAWTGLAPRPRDSGKRTGRLHTPQRYSRRLRRVMYMSALTAVRCDPRSRAYYQRKRAEGKRPVQATICLARRRVDVLYALLRDHRTWQPTVPVTAGAA

SEQ ID NO: 453723 - protein, 335 aa, unidentified
MNDVSVIGIDLAKQVFELVALDDRGRVLWRRRFRRDQLLAFMAQQSPTRVGMEACAGAHDWGRRLSALGHEVRLLPMHQVKPFRQGTKNDRNDALAIAEAAMRASLKGVAIKSQAQQDMLSIHRCRQLLMRQRTALINQGRGLLMEYGVVLRRGAGQFRRGLPLLLAEADNGLTPSIRETLALIGRQVSELDERIEGLERRLKAQADAVSRRLRSRPGVGWLTATAFAASVGDPSTFRDGRQVAAWLGLVPRQHSSGDQIRLGRISKRGDRYLRTLLIEGAHSYLRRAPHYDTRLSRWAVALQARVGQQKAAVALANKNARVLWSLMASGEAHQD

SEQ ID NO: 453724 - protein, 337 aa, unidentified
MNYSGIDLHSNNSVIVVSDETDHVLCQRRVPNDLAVVLRTLEPYRQEIVGVVVESTYNWYWLVDGLQAAGYTVHLANTAAMKRYEGLKYSDDETDAAYLAQLLRLGILPTGYICPVEQRALRDLARKRLQLSRSRTQHILAVESNVARQTGGRIASRVVKQLTEETLKTFGLIENVTAAMAANVAVIQTLNVQIEKLEARLRSEMRPQAQFGLLTTAPGIGEILATTIMLETDSIERFAGVGNFASYARCVDSKRVSNGKKKGEGNVKNGNRYLAWAFVEAANFARRYCPEAKRFYERKKAKTNSIVATKALAHKLARACYHMMKENQPFDVKRCFA

SEQ ID NO: 453725 - protein, 338 aa, unidentified
MELYAAIDLHSNNSVLVVTDAEDHVVFAKRLRNDLELIMTALRSCPGDVRAVAVESTYNWYWLVDGLRSAGFDVRLVNTAAVKQYDGLKHGDDLSDAKHLAQLLRLGILPQGYICPPELRALRDLMRKRAQLVRQRTAQILSIHNLLARNLAKSVKGDDIKRLEDGEIDALALLEDQKCALRANVAVMRCLEEQIRLLERAILAKGRLRKEFHGLKTVSGIGDVLALTIALETGDVHRFASAGKFASYARMVDSRRESNGKSKGVGNSRCGNKHLSWAFIEAAHCAVRYDPSVRRFYQRKCAKGLSVVAIKAVAHKLARACYHIMREGVPYDGTRAFA

SEQ ID NO: 453726 - protein, 345 aa, unidentified
MTVYIGVDFHARAQTISYLTTEDGEIRRAQLDHGQPQEVRKFYEQFAGQQVIVGFESSGYAAWFEELLEELGYEIWIGHATAIRLYARRRQKNDRRDADLILDLLWRGDFPRIHRYSPESRAVLQQLRYRQRLVKMRTMIVNSLVFMASSRGVSLRTQLKSRRGIERLQQIALPQPLIEQRAEMCQLLQELKTRIARVEQWLEAKANSDIRVQRLRTHYGIGPLTGLCLVHTLECVERFANPRKVTAYVGFDPVEDSSGERRRIGSISKQGSRLLRFFLVEAGQIAIRKDQDLARIYQRVLVRRGHAKAKVAVGRRLLVRAFIMLRDEIDYAEFQRRGVAARSSR

SEQ ID NO: 453727 - protein, 371 aa, unidentified
MLQNSPSIYVGLDVHKESLAIAIASPERGGEIRFYGNIPNQQQSINHLFLKIKKQYSYIMACYEAGPCGYNIYHQLTAMDVECIVVAPSRIPKSPTDRIKNDHRDVVGLARLLRAGELTPVWIPDLTHEAMRDLVRARAASKQDSRIARQRIQSILLRNDRRYDKKPWSYKHRIWLANQTFPLPSQQIAFQHYCQSLEQIESRIIQLDQEIDRLLPEWSLYNLVCQLQALKGVGKTIAISLVSELGDFSRFPNPKQIMAYIGLIPGEYSSGNKTRSRGITKTGNSELRRLLYEAAWAYRSPAKVGSWLITYRPTETTQESKDIAWKAQQRLCARYKALLQRGKRSQIAVTAVARELTGFMWDIALTARQSG

SEQ ID NO: 453728 - protein, 312 aa, unidentified
METAQVQFEQVVSRGCGIDVHKKMVVATINGKGLKEETREFATFTSSLTELKEWLLEREITHVAMESTGVYWKPVYHILEPSGMKIWVVNARHIKYVPGHKTDKKDSKWICKLLLAGLLKPSYIPPKEQRELRDLTRYRKKMIQQVASERNRIIRILEDSNVKLSSVLSDTNGVVATKLINILCEGRNVTMHDIDQVYHKKLQCTKEELYEACNGLMTQHNITMLQMIQKNISNTQASIETFNQLIRETLSKYDNVLEVLKEVPGLNTKTVEDLVAEIGLDMSVFPSEKHLASWAGIAPGNNESAGKKKVVG

SEQ ID NO: 453729 - protein, 415 aa, unidentified
MDVIVDRCAGLDVHKKTVMATVRCPDGRGGRGQATREFATFTGRLVELRDWLVAEGVSQVAMEATGVYWKPVWHVLEEAPGLQLLLVNPAHFKNLPGRKTDVADSEWLCQLLECGLLRGSFIPPADIARLRDLTRYRTKIVQERVRETQRIQKVLEDAGIKLDSVATDVLGVSCRRMIEALISGERDPEVLAEMALTRMRPKIGVLREALVGRFGDHHALLLRMHLDHIDQLNGIEARIDAEVDALMGPFVEPATRLLSVPGIGKRVGEVIVAEIGVDMSRFPTAGHLASWVGLCPGHHESAGKHRSGKARKGNPALRAAMCEAAWAASHGKDTYLAAQFKRFKRRFGTKGETKAIFAVAHTMIVIVWHILAEGTTYEELGPDYFERRTDAEARQRQLVRQLEALGHKVILEPAA

SEQ ID NO: 453730 - protein, 460 aa, unidentified
MTLLERLGSQLPRRYYLGVDVGYKEHVAVVISLETFVRGDDRWKRARCVHFPSTRAGLRQFQSYLDRFSTDRSEFFGLCEPTGGHYGATVFQYLLDQGYAMNLVENATVKHMREKIFPGLPKTDEMDGRVMTRIGYLHEAVGEEFTLRTLELPNPDDADLLALCRDSWKLSTMTTRSRNQFTQLMAVTFPELKTFFTSSVSTVVPVSLVAAYPTPALLAEAPAEKVKEVLWKARGYQHAHRVSELQTLAGNSSGLLPDPGRVWRLEWLTDFLLTNFRHKAVLDKRVEELVKQRDGYELIVNVPYSGPATLGVILAVTGDVSRFSNYRKYVAYTGYFAGLQKSQTIDRTKMSRKGNRNMKRALFQIVAPLVWFDKGDNHYKKLFRHKMAEGREWYKAMPFVCATLARHIYHCLKFNDPYDVEKAFRGSSLIPASEGEWLNLGTSLDEKFEVMEASLCQIEG

SEQ ID NO: 453731 - protein, 412 aa, unidentified
MEGSYKVAGIDVHKAMLAVVITDAAAEGEFRLERRKFGTGAAQLRALTEWLAEEAVREAVMESTAQYWKPVWQALEEQVQLHLAQAHSNRAPRGRKQDFRDAERLVRRHIAGELILSFVPDAEQQLWRTLTRTRQQLRRDRVRLHNELESFLEQARIKLSSLLSDLLGVSGRRMLEALAEGQTDPARIAALADQAVRATPEQLCDALTAAATMNGLHRHILKLFLERLQLIERQIDSLDTSIGEAMREQQESVRRLAEVPGFGADSALQIIAEVGPRAATFASASQLASWVGCCPGREESAEVSKSNRSPKGNRAMRRILSQSANAAVKAKGTVFERLYRRWVARMGHSKAIWAVAHRLCRITWKILHQSVRYEERGPRSNPKADHRRAIRLLRQLRQLGYPVNLTPLNHGA

SEQ ID NO: 453732 - protein, 400 aa, unidentified
MLSIGIDVSKGKSTVCGMKPGGEIVYTPFEIQHTREGMSELVSLLHNSCEEVRAVLESTGSYHCPVVAALLENGIFVSVVNSLRMKRFCSQSIRKVKTDRIDAMQIALYGLAYWQELQPTRLPEDTYRELQLLARQYYQMTSMLIKAKVDFNAICDQVLPGMQELMSDHAGRHKLSDFVLRYRHTTHILEMGETRFRKDYCKWAEKKGYRNHERMAALIFATAQNGIPVLPDAPSTQIVITEAIRVLRTVEASRDAILTQMQALAKTLPEYSLVREMPCIGDTLAPRLIAEIGDVRRFHSKRALIAYAGIDAPPYQSGKFCANNRHISKRGNRYLRKTGYEVMQSYVMHKPANDPIFTFIEKKRGEGKSGKLAMVAGLNKFLRVYYGKVTELYRSLPAIE

SEQ ID NO: 453733 - protein, 327 aa, unidentified
MAKRTTICAGIDTGKRKLDVALDGSSEQLQIDNAPEGYKVLLDWLRCHRVKRIGIEASGGYEQAVVAELRRKRVVVVVFQPAQVRAYARFHLQRAKNDKIDAALIAACTAAVKKIHPPPDARVLPFAEHLTMIDQIGEDIALLKNRLETCRNPRIQQVWKEDLARLAKRERIEFKALVAAIREHRDLAERLDLIYSVSGAGLPTAVAILVRMPEIGQLTREQAAALAGLAPYDDDSGKHVGVRHIDGGRERLRRALYTAALPASFRWNPQLITLYKRLIAAGKGHKRALIACARKLLIFVNAVVARGIPWDHERPPTVAATALPQTG

SEQ ID NO: 453734 - protein, 343 aa, unidentified
MKLIRVGVDLAKSVFQVHGVGRSEKAAWRRKLSRAEWITAVQQNVPLEAEIGMEACGSAHHWARELRALGYSVKLIAPQFVKPYVKSNKNDATDAEAICEAMSRPGMRFVSVKTVDQQDVQAAHRIRSELMDQRKAKVNQIRGLTAEYGLVAPREILHLRRAIPLWLEDQENGLSPRFRRLLTGLWDDLRVLDGRLVELDQEITTIAASDPVAKRLQQLRGVGPLIATALVATVGDASQFSNGRQMAASLGLTPKQNSSGGKERLLGISKRGDCYVRCVLIHGARSMINSAKTKTDPLSLWVLRIAATRHPNVAAVALANKTARIAWAMIRHETDYQPALAAH

SEQ ID NO: 453735 - protein, 358 aa, unidentified
MQTQNTKPKFNGQKFFISIDVHKKNWKVTIRVNHTELKTFSMNPSPEELIKFLTENYPGGEYNIVYESGFCGYWINKALTKGGVKCIIVNASDVPTKSKEKITKSDVVDSRKLARELENGTLKGIYIPEEIEEQIRTLSRLRYQLANHGAALKNRIKGLLNYYGERIPENYELKNWSKRFIEYLSNKALNSKTISKVSLNFLIAELRDNQARIKEVLKQMALYSKQYGYDTTIKNLTSVPGVSMITAMTIYSEIMNINRFQGLDELASFVGLVPAVYSSGEKEKVLGLSVRHNQYLRYMLIESAWVAIRKDPALTLKYSELIRRMSKQEAIIRIAKKLLNRIRFVWKNNIPYSFSLVA

SEQ ID NO: 453736 - protein, 377 aa, unidentified
MKKELYLGLDVHKDCIITAVAEEERKGEVRESGALSNDLHAVEKWIGRLRKAHGKETLLRACYEAGPCGFGLARRLGQLGVACEVVAPSLTPKRSGDRVKTDKRDARKLARLLRAGELTPVYIPEPTDEAIRDLCRARSDAVDDRRRSRHRLKGFLLRHGYRYQGKSSWSAAHERYLRELVLPPPAMKVILEEYLQGIAAAGERIARCEEAMRDLLEQWRLAPAVRALMAMKGFQTVAAMILVSELGEVHRFTHPRQVMAYLGLVPTENSSSERRRQGHITKCGNAHARWLLVECAQHYAAPPKVSRELSRRQEGQSHEVRAISWRAQNRLHRRYTRLLARRLQRNKAIVAIARELCGFIWELLRTQPCYQAQSRSV

SEQ ID NO: 453737 - protein, 315 aa, unidentified
MERLPAAPSFVGIDVSKHRLDVHVRPSSQTLTAARDSTGLQQLVGSLRKLAPALIVLEATGGFEITVAAALASAGLPLAVVNPRQIRDFARATGRLAKTDALDAQVIALFAERVRPEPRPLADADSQNLAELIARRRQVVEMIGMETNRLYQVRNARVQRMLRTTVNALTAQLAELDRDIDDTIKRSPVWRAADNLLTSVPGIGDVTAHTLIADLPELGQLDRRRLAALVGVAPINRDSGQMRGKRTIAGGRSDVRNALYMATLSAIRWNPIISQHYKSLVERGRPKKVALVACMRRLLGILNAIMRTNTPWQCA

SEQ ID NO: 453738 - protein, 344 aa, unidentified
MKLFIGLDVSLAKTAVCIVSEHGKIVKEAEVGSDPAALTQFALEQQGEIAMIGMEAGPLSRWLHRGLTEAGLEVVLMETRQVKGALKAMPIKTDRRDAEGIARLLHLGWFRPVHCKSVSAQEIRALLGARKSIQQGVIALEMSLRGLLRNFGLKVGAISKGRFDARIQELVARNTTLVAATEPMLRARATLRHELARLERHVRSLAQDDPTCRLLMTMPAVGAVVALTFKSAVDDPARFSSSKKVGPWVGLTPSRQQSGERDVTGGITKAGDAHLRHALCQAATVMMNRGRGSWLRTWASRVAKRRGTKRAMVALARRIGVILHRMWLDGGNFRWEGAPEPIHA

SEQ ID NO: 453739 - protein, 385 aa, unidentified
MTNTQYHSTIVPRDYDIFIGLDVDKKRMAVTCVDHGTLQKSLSLPYSGKQLLNYTAKHFPGQRVAFVYEAGPTGFGLHDELSAAQHPCLVVTPAMVPSAPRKRVKTNRLDSKKLALGLRGGDLQGIHVPAQSYRELRQLVQLRDTQAAQVRATKCRIKSLLLFEGIPFPEPHEKWTVAALQGLATLPCNATVRFKLDQLMEALQFHYQMAAKVQKEVRRFCNQDSELRQSVELLRTIPGVGTITATHAIARLGDWRLIKNERQIAGFLGLVSSEHSTGEKEKRGEITRIGDQRLRNKLIQCAWTAIKKDPELRAFYRRIYARHPPKVAARKAIVAVARKLTTRLYAVLKKQRPYEIRADLATTPLTVEETVGLRERLDIAQNDEL

SEQ ID NO: 453740 - protein, 414 aa, unidentified
MDVIHSRCCGLDVHKRTVVACVLLSEPSGPPHREIRTFGTYTNELLALADWLAEHGVTHIVLESTGVYWKAVWNLLEDRFALLLVNPRHIKTVPGRKTDVLDAEWLAELLRYGLLKASFVPDRAQRELRELTRYRTSLTNERSAAVNRLQKTLEGANLKLASVASDVLGLSGRHMLAAVVEGTTDANALANFAHGRLRDKLPQLEQALSGRVGPHQRFLLAEQLAHIDSLDASIERLNAEIAERLRPFDELIDRLDAIPGIGRTIAEVLLAEIGADLTRFATANHLASWAGMCPGHNESAGKKRSGKTRKGSPWLRAALVQAAHAAAHSKQSYLAAQYRRLTARRGTKKAAVAVGHSILVIVYHLLTHDCPYAELGPTYFDQRDPRGVQRRLVYRLEALGYNVQLTPLAEAPAA

SEQ ID NO: 453741 - protein, 335 aa, unidentified
MRLYCGIDLHAKNSYLAIIDEQRKRIFKRNVTNDRKLILAFLDPYRSELQGVVVESTFNWYWLVDTLMDDGYTVHLANVSAIQQYEGIKYVDDKHDAFWLADLLSLGILKEGYIYPKEQRPIRDLLRKRGHLMKLRTSLLVSLTNTLANVCGTKVPSHRIKGKEDHVSVHLDHHESLALMGQVSKAAIDMLTDQIKTIESHVEKQCKFDTPLLSLPGVGKILGLTILLETGPIGRFPAVGNYVSYCRKAESTWKSSEKVKGRGNRKNGNRYLSWAFAEAAEHARMFDTASRNFYNRKLHERNSPVAHAALANKLSRAAYYIMRDRVPYEEAKLFG

SEQ ID NO: 453742 - protein, 338 aa, unidentified
MSIVMGVDQHRGQITAEWIETATGEVSRARVAPAHREPVARFLGRFGGVDLDVALEATTGWRFVVEEIRAVGGRAHLAEPAETSARRGSKKRAKSDRADAGHLRELLMIARLPESWIAPDHLLDLRARVRLRHTLSDQRGEWQQRIRAVLYHHGCPQRRDLMTHDGRQWLQAQALPETAREQVTVALAMIEALDVQLAPLDRELRAYARRQPGCRALMGHYGIGEPTAVTILAELGDCRRLSSSRLAVRYSGLDITVHQSDQRRAPGHLSRQGPPALRWALFEAAQVARRPGSPDRDYYTQAADRLGANRACLAIARKLLKRSYHTLRELGEEALAPA

SEQ ID NO: 453743 - protein, 337 aa, unidentified
MNVTLIAIDLAKSTFQVCGVNRQGKELFNRAISRKKLTALIAQYPGIPVAMEACGGSNYWGRTFQKNGHEVLMIPPPHVKPFVKGNKNDRNDAFAISEAARRPKMRVVAPRSLEQTDMILLHRIRERRVRARTALMNQMRGLLSEYGIVLPAGAATLRKALPLLLEDAENGLTIAARRYMQDLLNEWRDLDERIQADKQSIHVIARESPAACRLMDVRGVGDMIATAALAKLGRGDQFKNGRQFSACLGLVPREHSSGGVQKLGGISKRGDDYLRRMLIQGAWSVIRYAEGRQDRLSRFALEVKERRGKHKAVVAVANKLARIIWSLVRHETTYCPA

SEQ ID NO: 453744 - protein, 426 aa, unidentified
MKEHIDYLSTLFVGIDIASRIHVISALDFNQDFYIKMKPFENTKEGAGIVEKMIADVLADNHQFKYVVIGMESTGFYGVHLANYLSTSELLAPFSVRVYCLNPKEVKNYKKSFNDIGKNDGIDSFVIADFARVGRISIKPWRGSQYLALQRLTRHRMHITECITREKTYMLNNIYLKFSEYALLRNGEHPFSNKYGATAEAILTEFTTNEDIVNSSIEELVEFINSKSKGRIADPEETAKIVQAAARNSYRLDKCLYEPLTISIASSFNCISSFEKELKAIDKAILQTVQGLNPEEYTVLNSIPGIGKVYSAGILAEIGSIKAFQNANQLAKYCGIVWNDNDSGDFESEDSRMSKAGNRYLRYYIIEATGSVINHCPEYKAFYQKKYAETRNHQHKRALALTSRKFIRLLFGLLDKGQLYSPEKSR

SEQ ID NO: 453745 - protein, 341 aa, unidentified
MKNLFIGVDFSKEKVDVAILFADGLVETAARVFNEFKTTVSGYRQLVKWVEQNSCGIDSSLWLFCGENTGDYSKGLCNFLYGKGYDMWLENAKSIKDASGLRRLKSDRADASMIAEYAMRNYDRAIMYEPLSESLAQLRELFLYRQMVIRHRCSFQVRRGEKRLTMEKSPIKTMISQSGRHIVSELNKVIEKINRKIEELIASDDELREIFSIVTSVPGIGPQNAVCLMVYTDNFRRFNYDSRKIACYYGIAPFGKDSGTSVHSDPRVHYMANRQIKAMLTQAALAAVNFNPVMARYYMRLVERGKKKQVALNNIKNKLVHLVTAMVRNRQKFNPDYKISA

SEQ ID NO: 453746 - protein, 340 aa, unidentified
MKFIGLDAHSRTCTFVVMGKSGKVLKKGKVETREDLLLGFVRSVKGPRKLIFEEGVMSHWLYMLLKKEVDELVVCQPRERKGPKTDELDAEELAELLRSGKPKSVFHADDVLMDLRIIVSGYDDVIQELGRAKNRYKALYRQAAIQTDVTKFYESEEMLLSLDGEERYYVACTLFEQIRFLEQQRAGYVERFEENARKQKAIKLLMSIPGIGLVRANQIVAIVVTPYRFSKKYKLFAYAMLTKHSRTSDGKEYGKQQAMGCAELKRVFKSAALSSIKSDNAFRRKYDEMRAAGKSDRTARSAVAKKIAATVLGVWKSGKKYNDKHKEVTQRANRNCHSGA

SEQ ID NO: 453747 - protein, 361 aa, unidentified
MHATTVAVDLAKSVFQLAVADSSWRVTECHRLTRTQFERWFANRKVSLVIMEACGSAHYWARWLNSLGIEVRLLPAAYVRAYVRRNKTDAADARALLEAARTANIDPVRVKSVEQQALQGLHRIRSLWMSTRTSRINALRGFCREFGLSIPQGARTGVEAIRRVLADPRSPVPALIRETMRLLIEEIRLLEQRIAQLEREFTELARHSAACTQLMSVPGIGLLTATAMVAATGGDVTHFKDARHFASWFGLTPKEYSSGSIRKLGRISKRGDRYLRMLLTHGARAVLRAAALARNASRPLDGLRAWATEVQHRTNHNKVACALANKLARICYALLRDHAAYGNPPPRPNKKLERTAFAIAA

SEQ ID NO: 453748 - protein, 484 aa, unidentified
MALPSFAVDPGGERLRHLSCEDCSETAPLLGPGEGPTPRRVSSREDWSISTTPCLPDPPSMRVAKEGAGVLGVGIDWAEEFHDVALGTVAKGVTDQFRIEHSPAGVARLIERCLALEPDPAEIGVVLETRHGLLVEALLDAGFSVVPVNLDLVARRRGPARKKDDAEDARICCLLALDRHAGLRTLIPHGQWGGELRAIARDDERAARDQRRLLNRLRADLQTTYPAALALAGDDLGAPTMLRLLQRWPTQAELAGASRAELVSFARAGRHGWPERFADRVSTALSTPSLPTRDYLVHAKAAGIRLATVPLLALHDTRRAWQQRMSQLLRGPRTGRDHSTRDPDPGNTFPGGEIYLSMPGLGDRLAARVAGEIGEHITQFNSPNALQCYAGTAPVTRRSGKHDFVVARRLAHNHYLGAAVHQWAFCSLSRSGWAREFFDAKIAAGKAHHAALRALSNRWLEILWHCLTKGVLYDENVHQANRAA

SEQ ID NO: 453749 - protein, 350 aa, unidentified
MMIIGCDFHTRFQQIAMLEGTTGEVIERRLEHENGDEERFYGTLPGPARLGMEATIHAQWFERMLQRYQHELWIGDAAEIRAARVRKQKTDSRDALHILDLLLTNRFPRIWIPSPTDRDVRQLVRHRHKLVRVRTSVMNQLHALAIGQGLCRKQKLWSKLGRRELEALTLDPWAHRRRQDLLQMLDQLNPPIAELDRAVLQEAQRRPPAVQLMNEPGVGPVTALAFVLTIGPVDRFPRSKQVVSYLGLNPTEASSGGRQRLGSISKQGNAMLRHLLVEAAQTAAKLDPELRRDYQRLKFRRGSGVAKVAIARKLAVRLYWKLREAAQSSTAARMHGSPMNPVVDESLSPK

SEQ ID NO: 453750 - protein, 421 aa, unidentified
MAPQLMQQFAAYVGIDWADRKHDFCLQAGGEDTVEFGCLPHRVECIDEWARALHQRFGGPIAVALELAKGPIVSALQKYDFFTLFPINPSTLAKYRLAFKPSRAKDDPSDAELALDLLLRHPERFAPLKPQSVGMRSLTVLIEQRRQLVDDRNRFTNRLRSALKEYFPQTLDWFEDIDTMLFCDFLSRWPTLSAVKRASSKTLDGFFRAHNCRRATLIDQRLKSIRSAVALTEDPGIVTPYRLHAVTLVAQLRTTLAVIDVFDQEIAALVRTLPDFALFDSLPGAGPHLAPRLLAAFGEQRARFRNAVEVLQYTGIAPVTERSGKKSWVHWRWQCPTFLRQTFVEWAAQTINKSFWAGAYYRQQRAKGSSHQAAVRALAFKWIRILYRCWQTGKRYDESVYLNALRRRGSPLLGKLSLSDG

SEQ ID NO: 453751 - protein, 457 aa, unidentified
MTRRKHSRPARDIAPVHPHAAAVDIGATLHVAAVRPGCDPEPVRTFGTFTTDLHRLADWFEQCGVETVAMESTGVYWIPLYEILDQRGFEVVVVNARDAKHVPGRKTDVSDAAWLQRLHEYGLLRASFRPKGEIATLRSYLRQRERLLEGAAAHIQHMQKALTEMNLQLHHVVADVTGVTGLRILRALVAGERDPDTLAAYSDPRCKAPAETLRAALVGNYREEHVFALAQALELYDIYQAKVAACDQRIEAVLERLKAANPPPAAALPPARPRRRQANEPGFAVREALHAILGADPTQIDGIGPSLALTLVGECGTDLSAWPSAKHFTSWLSLAPHNKISGGKVLSARTRRSGNRAAALLRLAAVAVGRTATALGAFYRRLAARVGKAKAVTATARKIGVLFYNMLRHGMDYADPGASAYEARYRQRVLSNLRRRAKSLGFVLQKADPASAAIAVS

SEQ ID NO: 453752 - protein, 343 aa, unidentified
MVNHYIGADVHSNNIELGVERQGRIIQRHSLPTSIRAIREVLDRIAGPKHLTFEEGPLAGWLYRNLKDHVDTLVVCDPRRNRLVACDGDKDDRIDAAKLARLLRGGFLRAVYHSDDLQRLSLKRWVALYHDRVQAATRSINKLRACARLYGERIPRSALQDVAARRTWLATLDSDLADQLRLLWRSYDSHRTDVRIAKRHMLRRARRFAVIGHWSALPGIGPIRSATLFAYLDTPWRFKKKTQLWKYCGVGLQRTGSGKDRHGRDRPARLELFWMVNRRLKDVVMGMTLSAIRSQDNVFRDAYEERIRHGALASNARHAAARKMLTVMWGMWKSQRPFDASLC

SEQ ID NO: 453753 - protein, 351 aa, unidentified
MAIADSGRDGEVRYFGEIDSSPATVAKVLGKLSARYAKLHICYEAGPTGYGLYRQVKALGHHCTVVAPSLIPRKPGDRVKTNRRDAVTLARLFRAGELTSVWVPDPVHEAVRDLVRAREAAAADLRKKRQQLLSLLLRHGRNFTGRAHWSLAHRRWLADQRFEHPAQQIVFQDAVDAIEDAAARLHRLDQQLVAIVPSWSMAPVIAAYQAMRGVSFIVAATFVAEIGDVRRFDNPRQLMSFLGLVPSERSTGETVRRAGLTLAGNRRARRVLVEGAWTYRFQRASARPCAPGSRGLPKAVRDIAWKGQVRLCARYRRLVAAGKKTPVVVAAIAREMAAFLWAISRQVEPLT

SEQ ID NO: 453754 - protein, 418 aa, unidentified
MKKHSKSLQRSEPTLKRTKARGPVQRDAKEVLAEVLGKLTGKLDAPAVSTSAKENRRGNTVGPNRDRLTVGVDLGDRWSQYCILGLEGETLAEGQLRTTQEDVREFFQALTVARVVIEVGTHSAWVQEVITEWGHEVLVANPRLMEGSKRRKRKSDRIDANKLARLGRVDPQSLYPIRHRSREVRQDLVVLRARDALVSVRTELINTARGLVKSMGTRLPRCSSPSFADKVKDAIPVEVGEALLPLVQLVETVNDCIARYDQKIEELGREKYGHTTLLRQVKGVGPITSLAYVLTLEDPQRFSSSREVGPYLGLVPKQEDSGDSQPQLGISKAGDRMLRRLLVGSSQYMLGAFGPDTDLRRYGLRLCERGGKNAKKRAVVAVARKLAVLLHHLWVTGDVYEPLHHTGAETRTAQATAA

SEQ ID NO: 453755 - protein, 388 aa, unidentified
MNVGADKSEPLTAIRTDLGAIFVSLELSRSSWLITSLSPGGGEKMSKHSVPGGDFAGLMERFAQLQEKARLRTGQSFRIIVVQEAGLDGFWIHRALQNEGIESHVVDAASIATSRRRRRAKTDKIDGETLVRALLAYKRGEPRVCAMVKAPTPGEEDRRHLCRERKALTAERVRHVNRIKGLLFSQGISGYQPLRRDRRQRLEELQTGDGRAFPQHLKALVNRELDRLELLLKQIKTVEAARDALLAVGQTAKPAPAAMLLDIRGIGPEFAAILWSEGLFRHFENRRQIAAYAGLAPTPWQSGAVDREQGVSKAGNPRLRTTLIQLAWLWLRNQPRSALSLWFHERVSRNGGRLRKTTIVALARKLLVALWKYVTAGVVIEGVTMKVA

SEQ ID NO: 453756 - protein, 327 aa, unidentified
MKKSIGIDVSMETLDVALYDGKSFKSGKYENSERGFAEIEKEFIGCYGSNSLISMEATGIYHLKAAVYFHDRGYTVSVINPLIIKRYSQMRMLRAKTDSVDARIIAEYGFNERPCYFLRKDNKKERIVQLLRVIDGLHMMQSENRNRLHALERVPEADETALSIYREIGKTLQARKHEAEQRIHEILEESYSVEYKRLKAIPGVGERLSSLVIGFFGEFENFDNAKQLSSFIGLNPSLMQSGVSLNGRGIISKKGNRYMRKIFYMASLSASIYNKACKELYERLIMKGKSKRVALVAVANKLARQIFAVVKYKRIYDPFYEKNKSYC

SEQ ID NO: 453757 - protein, 356 aa, unidentified
MSNYITIGMDLGNRKHTVCAVGAAGELLWRREVANTPEALKPFFEENAGATVAMETGLCCRWISALAKSCGCDVLVGNARKLAAIWQSKQKNDGNDALLIAKLARADRELFHPVELRDDERHEMVQIIELREVVVAQRTQAVNSVRGLCKARGVFIPKCDASCFHRVAGEAIPTDIGWKFRPMLRHLKEVAAAIKRYDAMLEKYAREHFREEVEILQTVPGVGTITSCAFVAHVADPGRFGKARDAGAYFGLTPAQDQSGDRDAPRRITKAGSTLVRRLLVTAANYIMRDSSADTALKRHGERICARGGKVSRRKAKTAVARKLAVLMVAMLKSGRSYDDGLAAGRNTTGKDNAAA

SEQ ID NO: 453758 - protein, 364 aa, unidentified
MKIVGCDLHARQQSIAMVDTETGELTEKRLMHEGNAVRDFYTSLEGPVVVGIEATGAMQWFLELLEELGIECRVGHPAKIRAAETGKQKHDRRDAEVILDLLVMKDRFPDIWMPSTEQRDLRTLLRDRHQWVKMRARLQHTLQAIALNHALREGRALWTAAGQRALQDLALPPYTDQRRDELLALYTQLEKRIQQLDKQVESEAQQRPGARRLLTHPGVGPVTALATEVFLGDPTRFATANQVASYIGMIPCEHSSGKRQRLGKLTKEGNALLRYLWVEATLHAVIKDAELKRFYRRKLIQKGMGKARVAAARKLGIRLWIMLRDEIDYEEFCRRGKLRQKGEAHAGMPDFNSGPAQAVTGSTE

SEQ ID NO: 453759 - protein, 315 aa, unidentified
MTNLYKSKSVVNVGIDVGKFELDVCIYEKKIHWQDENTESGIKRILKRLAHYQVERLVMESTGRYEFDMAQAAYQKDIPVCIVKPLRIRRYAGAIEQLAKTDKLDAELIAEYAAKVQPEATPQKSKNLLAIKHLIARRRQLMTMRTQELNRIQIMDKSLESSCKRIFRTLELEIKRIEKRLARHVEDQADWTEKQAILKSAPGVGDTLVYTLLADLPELGELNRKEVSALVGVAPINRDSGKMKGKRRVQGGRHSVRTILYMATLSATQCNPVIKAFYQQLVAQGKHKKVAITACMRKFITMLNAMVRDSCVWAY

SEQ ID NO: 453760 - protein, 310 aa, unidentified
MNNNNTLYVGLDVHKESITVAYAINSEPVELMGKIGTSPTDIQNLCKRLRSKSSQVSIVYEAGPCGYGLYRRLVKSGFDCMVCAPSLIPKKPGERVKTDRRDAIRLVRSLRAGDLSAVYVPGIEDEAFRDLARAWASARDDLRHARQRLKSFLLVHGVHYVGRADWGPAHRRWLSKYSFESPWRQLAFDEHRRTIEDRQAQCERLESALKEAVTEWRLYPVVEALQAMRGIQFITAVGLISELGDLTRFEHPRQLMSWFGITPSEYSSGGSRHQGSITKAGNSYARKLLVEAAWSYRHPARISPAIQKRQ

SEQ ID NO: 453761 - protein, 419 aa, unidentified
MKLFVGLDVSKAKLDACFLLREDDTNTILWQETVANSESGATSIKDQILRFHEELDFDKILVGMEATGQYSMHPSLFFSNDPELKLINVETIVENPRVIHRFSKVWTEEKNDKLDAQIIAEFLTTGKHTKSQPREEKFVALLRFTRTRYQLIRQMTEAQQHYVENLYYKCNTLSSDLKAENISTSVFSSTMIQLMNGDISMAEIRTMNSVELAALLQKFGRGRFKDPVKLAKVIRKSVSDSYRLGKLTQDSIDINLGVQMRVIRGFEQEIKIIDKAIENIMETIDSAKTLLSIPGIGPVYAAGIIAEVGQIDRFNHEAQLAKYAGLYWPKHQSGNYQKEKTPMSKSGNRYLRYYLVQAANSVRRYIPEYEAYYQKKYKEVPKTQHKRALVLTARKLVRLVFALLSDHQLYIARSEAMES

SEQ ID NO: 453762 - protein, 369 aa, unidentified
MTDLTLFVGLDVHKKTISVALVDAMAGAEVRFYGTIANEPDTLRSLCRRLSKDGRPLHFCYEAGPCGYGVQRHLTRLGHHCDVVAPALIPCKVGDKVKTDRRDAMMLAQTLRAGQLTAVWVPDEAHEAMRDLVRLRAQAMRDLRKMRQQLLSFLLRHGIVSPYGHWTKMHRRWLGELTFAHPAQHLAHEEMLQRIERAEALCDRLKRAIADLVPQWSLAPVVLAIQALRGVSLVVAAVIVAEVGSFGRFDNPRQLMAYLGLNPSEHSSGATIRRGPITKTGNALARTCLVEAAWTYRFPARVTQIIRDRMKDLPEPIRNVAWKAQVRLSGRYRKLTAAGKPAPKIVVAIARELVGFIWAIARMVEPKFA

SEQ ID NO: 453763 - protein, 413 aa, unidentified
MDKIYDICCGIDVHKKLIVACLNHKRKKELREFGATTRELMELAEWLQKNECEIVAMESTGSYWKPLYNIMESYGLHAIVVNPAHMKAVPGRKTDVKDAEWIAELLQHGLLQPSYIPSKDQRELRELVQYRKSLVGERTRELNRLQKMLEGANIKLSGTVTNINGKSARKILEYILSGNEIDEKKYDEMYEEKLIAHNLKASKEQILDDLKGFMSPLQRRMLKELLQHLDELNVHIENLNDEIDNFMKPEEKQASQMIQDVTGIGNTSAQAIIAVIGTDMERFPSDRHISSWAGLCPGDNISAKKRKGGKIRKGNALLKSTLVLCAHAAVRHKSSYFHAQFKRISTHRGKKRAYVAVAHSILIAIYHILKDGVKYQDLGAEYYNQFNAERKIHAYLKKLKALGWEPPKEAVPA

SEQ ID NO: 453764 - protein, 352 aa, unidentified
MIIIGVDYHPEFQQIALLDQDAGELQEKRLSHPGEAEKFYRALAVSQKVRVGMEASGHARWFERLLGELQFELWIGDAAAIQSKRGRKQKTDRQDAEHILKLMLKDDFPRIWVPSGENRDLRQLLWHRHRMVQARTRIMNQLQAVAINEGLRCKKRLWRTGRQQLALLRLAPWASRRRHDLLELLDRLNPTIAELSQAIEQEAAKCAEARRLMTHPGVGALTALAFVLIIGDTERFQCGKQVASYLGLVPLEKSSGNRRRLGHITKQGNSLLRFLLVEAAQVTVRSLPEWRSQYFHLLMRRGRKTAKVAMARRLGVDLYWMWREQRDYQSKSSVRTQDSPEQAMVCNRTPRN

SEQ ID NO: 453765 - protein, 356 aa, unidentified
MSREIKYIGMDVHKEAIVIAVLNSSGQLIMESIVETKASSLLQFIHGLQGELHVTWEEGTWAAWLYDLLQPHVHQVLVCDPRRNALLKEGNKSDKIDAQKLANLLRTGMLRPVYHGEHGLRTLRELGRSYQTISKDLIRVMNRVKALYRGWSIPCAGTQVYAPRYRQDWLDKIEQAGVRRRAELLYQQLDGLQALRRTLRPELLAESRKHKASKLLRQIPCIGPIRAARLLALMQTPHRFRSKRQLWTYSGLGIETRDSGQYRFVRGQLQRAKKPQQIRGLNRNHNHEMKEIFKGAATRASCGVGPLRDFYVALLDKGMKPEMARLTLARKIAAIALTLWKKEERFDAEQLNTQAA

SEQ ID NO: 453766 - protein, 401 aa, unidentified
MAIVAHTHPFVIGVDTHARNHALAVLASPNGEVLDDAQFPATAAGLTRAVTWAARRTGGDLNVLWVIERIGTYGARLARAAADAGYPVVEAARMNARANRGVGKSDPMDARCIAQAVLSLDVTALRHPRADDGVRAAVRVLVASRDHMSTERTAAVNALTALLRVSDLGIDARRPLTSTQIATVTAWRTRGEDLATATAREEAIRLAKRVTTLDGELKTNTKRVTELLAQSPARELLNQPGIGPVTAVVALTAWSHPGRLRSEAAFASLAGVNPIPASSGNTIRHRLNRGGDRRLNRALHMVIVTRIRMDPLTRAYVERRTAEGRSLREIRRSPRWSMPASSAPASSTSTTTSTVTPGSPGTPRPRSTSAPLRPSTRTGRTPSPPPTTPTPNGSAAGPTRR

SEQ ID NO: 453767 - protein, 310 aa, unidentified
MQVEPSIIGIDVAKAELVIYFLGQTYSIENTPQAIRAWLKDLPSLCEIAIEATGTYHMDVIELAHRKGHHIYVIDGSRLHHYRKGTGGRAKTDASDAQLLARHLQHEKEALRRWSPPPKAYRTLQTLLRRRAALVKARTIIQQSLGAEPLLKAGLKRLISQINTLDAQIQKHLRDAVREAGLCDQVKRCKALEGVGDLTAYALVMAFLRGDFRNSDAFVAFLGMDVHVKDSGTKTGKRKLTKKGDSETRRLLYCAAMAARRSKRWAGVYQAYLDRGLATTQALVILARKLVRIAFALMKNGTDYRPAPAS

SEQ ID NO: 453768 - protein, 349 aa, unidentified
MEEISTVGIDIAKSVFQVHAIDVGGNVVVRRQLRRQQMLKFFSQVPPCLIGIEACGTAHYWARELSALGHDVRLMPPAYVKPYVKRQKNDAADAEAICEAVTRPTMRFVPVKSVEQQSAAMLHRSRALLIKQRTMLLHSIRAHLAELGISIGVGVSQIVRVVRELAEGERSDLPELARFVLEALAKLVCDLAQRLQAIEKKLISWHYKNDLSNRLETIPGVGFVTASALSSIVPDPQAFKSGRHFAAWLGLVPRQNSSGGKARLGRISKQGNPYIRQLLVLGATSVLRYVRRDGGSGTGWIGGLLRRRPPKVAAVALANKMARIAWSIMTRGGEYEEINDLRAVQPANS

SEQ ID NO: 453769 - protein, 389 aa, unidentified
MTDAHGQPLDELAVAHSGPGLTALVAALRRSGGEPARIAVAIETPRGAVVDTLLEQGVHVYTLNPKQVDRFRDRHTVAGAKDDRRDAFVLADALRTDRGAFHRLRPDDPRIVQLRELSHLTDDLTQERGRLANRLRAQLLRIWPAVLTLAPAADEPWLWTLLERAPDPAQAQRLPRRALRAVLATHRIRRITAEGLHAVLQEPCLPTAPGTVEAAREHVAVLVPRLRLVATQQTHCARRLEELLAALAAPDTAKRREHRDVTILRSLPGVGRVVAATMLAEAARPLAARDYQMLRAYAGVAPVTRQSGKTRLVSMRRSCSGRLRTAVFHWATNSIRLDPRWRAHYDRLRQRHSHARALRGVADRMLGVLVVMLNTGTLYDPARRTTRAA

SEQ ID NO: 453770 - protein, 338 aa, unidentified
MESFAGVDLHKRVSQLAVLREARSPSYFRFPNDITTVEGVLRRLPAGTQIALEATGSWWWFVEKARSMGHEVCLSHPKQTKAIASARLKSDKVDALMLARLLKADLLPTVWIPGEKERQIRELLTHRTRVVRQRTAVINELQALYAKRNVDFAMIGHRARPVVAGANDLSGYGPSIVERDVELVGVFNEQIRGLDKELSRIAKQDAQARRLMSIAGVGPLTAVAVCCWVGDIGRFADAKKLGSYFGLAPRVRQSAERERHGHITKEGNRMVRSLLVEAALSGIRYSKGPARKHYLGVLKRRGKKIARVAAARKLLGAIFHMMKEGIDYPEYLRRSSAQ

SEQ ID NO: 453771 - protein, 350 aa, unidentified
MDKELYIGVDVSKQTLDLAYYDGESIDWKKAHIKVSNNNAGFKKIGSWVAKVSKGVDIVLFCMEYTGLYTQNFRLWLEEKHYIYRMVEPRKMHRFEPDLDDGLRSLDRIKTDELDSFRIAIYCEQNHRKILRNPSKLPPPVYFKLKRLLAERKQTVKQSVLYKQQLHDICAYDTDLSVERKNGQLKTLNDALKGIDNEIDMYIKEDADISKNFSLLTSIPGIGRVVALETIVLTENFMAIDNPRKYACYIGVAPFKKESGTSVRKGSSVSKKGFKQAKADLSIACLVCMQHIPNIRDYWDRKRKEKCSGIVFNAIKFKMILRMFAVIKRGTPYVETDNYRNGKNKQPGVN

SEQ ID NO: 453772 - protein, 344 aa, unidentified
MQEIYIGIDSHRSTLTAAAIDAIGRVLDVAEFHNDPQGHRRLLTWRQRLDGGVRIGIESSGNYGNGLARMLIAAGEDVFEVPANLSHREAKRQGRGKSDPIDAVAIARVVAREQALPRPRVDQAHENLKLLSDHFDQLKRQRTQLVNRVHKALVVSHPGYEKRVGDLKAVRHKTAVMNLVRKDRSVRADLVRRNIREIRRLETEMTSLRQQIKELLDASETTLTREAGIGPILAARLLGEVGNVTNFRSKAAFASLTGTAPLPASSGLTVRHRLNRHGNRKLNYTIHYIAVTRCRVDPDTRAFMAKRPAEGKTRKEAMRSLKRHISNRIYRTMMADANRVTEPA

SEQ ID NO: 453773 - protein, 345 aa, unidentified
MELHTIGIDLGKTVFHLVGPDPRGEVVVHKKFSRTQLLRFTANVHVGLIGMEACGGSHFLGRALREQRHEVRLIPAQYVKPYVKTSKSDYIDAEAIAEAVARPTMRFVPIKTDDQLDLQSLHRVRERWVMRRTAVINQIRGLLLERGITLRKGRHHVDAALPLILEDADAKLSGAVRLLLAQLKLDLDQLSVRIDEADEVIKKIADENEACRRLVAIPGIGPVTATALIAAIGNGGAFHKGREFAAWMGVVPREHSTGGQQKLFGISKRGNSYLRRLFVQGARAVLQQRTKQSSGLSAWLAQLTSRTHRNVAAVALANKLARIAWAVLAKNEQYRPSVVPDVAAA

SEQ ID NO: 453774 - protein, 322 aa, unidentified
MVEAVVGVDIAKKKCDVALFMNGKFKHKTCLNNRQGFEELSQWLKRQGVERVRVCMEATGTYGDELATYMHDAGHTVSIVNPARIKGFAQGELLRTKNDKVDAALIARFCVAMNPVVWTPPPLEIRRLQSLVKRADALIVMRTQEQNRFGTAHETIESSIKEHIGYLDQEIEKLKRQIAEHINSDPNLRTKRDLLSSIPGIGEATVAFILSALHIFEGVDRVQKTVAFIGLAPRERISGSSIKGKPRICKIGHARLRKALFMPALVAMRYNPMMIDFCNRLRKKGKNGKVIVCAVMRKLVHVIYGILKSGKPFDPNYKPNFA

SEQ ID NO: 453775 - protein, 412 aa, unidentified
MIFVGIDWSETHHDACIADLDGRMLAKGRVPEGVEGVARLHEMVAAHAEDPSQVVVGIELDRGLLVGALVAAGYAVHAINPLSVDRYRDRHRTSGAKSDPGDAKVLADLVRTDRHLHREVAGDSELAEAVKVLARAHQGLIWSRQRQLNQLRNALREFYPAVLEAFGTDLASKDALAVLEVAPTPEEGRSLTTSRIVAVLKRAGRHRRITERAEEIKRALRSPQLEAPELVSRAYGDVVRSTVRIVAEMSEQIESLAGELEASFEGHPDAEILRSLPGLGSVLGARVLAEFGDDPDRYADPKTRKNYAGTSPITKASGRSRVALARFARNRRLADALQMWAFCSLGCSPGARRYYDAHRAKGHTHQRALRSLANRWVGILHGCLRHRDSYSEEGHGPMSGTSPLDTLGPWDV

SEQ ID NO: 453776 - protein, 416 aa, unidentified
MNTASSRYTRFCGIDVAKRKHNACILEREGNLLVRSLSFGNDKSGFEQLLERLHQAGGPKKVLIALEATGHYWFSLRDFLAQNAYEVAVLNPLQTAQQAKKAIRKRKTDKIDAVHIATLVKNGEHRPALVPGEFATTCRQLARLRYALIRQAARVKQLLWSRLHPVWPEYEDLFANPFCATGRRLLTTAATPKDILALDSEELTELIRKTSRGKYGAEQAKKVRQAAADSVGITRGLEGSRLSIRLLLAQLESFQPIRDQLEEQMTALGQKLPAYFLTLPGIDPKAAVSLFGETDPIETFTSPAQLVAFAGLDLTVYQTGEYTAPRRRLSKRGSPALRHTLWQMAHRACYQEGDLREYWLRKRGEGLHHLAAVTATALKLCHVVWRILTDRRDYLPKPPNAKNAKAPARRTKTRSS

SEQ ID NO: 453777 - protein, 395 aa, unidentified
MFIVGIDVAKRSHEVCMITSDGQTVQRPFSIRNNCTGYNLMLEKIRKHTNIKSQIVFAMESTAHYWLALFTRLRKDGYHVILLNPIQTSAMRDMFIRKIKTDAKDSFIIAELIRFGRYAESNVAQDRLLALKELCRNRFYLVDMAGDLKRKLIALIDRVFPEYEAQFDTIFCKSSVALLKKYPTPQKLSNAHLDKLTELLWNSSNGHFGEWKARELRELARNSFGVEDCDGAYSTLILLMLDQIQSLSGKADALEKEISRLFQSFDTTVTTIPGVGPIIGAVILSEVGDISRFSSADKLAAYIGVDPSVNQSGEFQAAHAHMSKRGSPYLRRCIWMASQVAVQRDPMFHAYYEKKAAEGLKYMTIIGHVTRKMTAVVFAILRDHKVYEPILSTAA

SEQ ID NO: 453778 - protein, 386 aa, unidentified
MTKKITNPEILAIRAAADVDPACGRVWVGLDVGLKSTSVCVLDRDGKVVHQVSMKTHPTEIGRYLAKNFASNVAVVGMETGAMSAHLADGLRRQGYQVAVMDALQVHRVLSLKRNKTDTNDARGIAEITRTGRDYLTEVYVKSAACYEVRAQLIMRHRLVQQRLANENMIRGLLRVYGGRVEPGAKSSATYRERVVEQLLIIQDHEGLNLRPRILPVLDLCERLQVDAERIETELEALAAANPICRRFMAVPGIGAITALSFFTAIEEPSRFRRADDVAAYLGLTPRVYQSGESLTHGKISKMGNRLTRTHMVNAATVLLSATKTFSSLKDWGVRLAKKVGFNKAKVAVARKLAVILFGMWRDGTHFQFKSETVEPHRQMMQAARA

SEQ ID NO: 453779 - protein, 407 aa, unidentified
MGRATRTRHHRRWKQPTGCPMPQPNDLGRSLAALDQDSTLIAVIEMSQSIWLVAGIVPGINRQPLKKLGADETALLQLLYRWRDEATKAGRTIDRIAVAYEAGRDGFWLARWLRARGIEAHVIHPTSVAVSREHRRAKTDRLDTELLKRAFLGWLRGESRHCSMAKIPTPEEEDAKRPNRERENLVGERTRIVNRMKSTLARLGLRGFKPTLRQAAERLDRLRTAEGVPLPPNTLAELRRDMARLRFVMDQIREIEAARLVRLEQHPEQASHAMVRLLARVIGIGIETADMLVHEILSRNLRDRKAVARYAGLTGSPDESGARRREKGLARAGNARVRRGMIQLAWRFLMFQKNSALAQWYRRQTTDSRGTTRKTMIVALARKLLVALWRLVTTGEVPEGVVLRRVA

SEQ ID NO: 453780 - protein, 316 aa, unidentified
MQAQQVFIGVDVAKDSLVSCIHGLAKPQVVANEERAIKGWLKTLAPQAVIGMESTGRYHQSLARLAHQAGLRVYVLNAKDVYFYAKALGARGKTDPGDARVIARYIAEHHAALHAWAPGTAAQLRVQELLQRRARVAVHRASLRQVLAGLEELAPDVLQLEQHFEQLLQHIDDEVQALVASETQLSQGSALLQTICGIGPQGAALLAALFNRIEFANADALVAYSGLDPRPCDSGTRSGRRRLSKRGSPSLRRQLYLAALAATRSKALGPTYRAIRARGFKSTPAVVILARRLLRIAWAVWKSGQPFDAARLQSAP

SEQ ID NO: 453781 - protein, 348 aa, unidentified
MESTANLPIIGMDIAKNVFQLHVIDANTGEVKRHKLKRDRVSTFFANHQRSLVAMEACGGAHHWARALRQLGHEVKLLPAKHVRPFVLRDKTDARDAQAIWVAAQQPHIRAVPVKSEQQQSCLALHRMRAQLMKIRIMQTNALRGLLYEFGLVLPEGHQALLKCIQDELAKAQEQGRLSEIMVTSVQEQLKRIECLQQDIDQIDRRLAHLVKQSPQMQAIQAVPGIGPLTATALVATATELSSFDSGRQFAAWLGLTPRQTGTGGKTRQLGISKRGDAYVRTMLMHGARAVICRSRRTAWIQQLLERRPFSVVVAALANKLARIVWSVLTNGKAFDQAQWAATGATVA

SEQ ID NO: 453782 - protein, 341 aa, unidentified
MKDTMIGVDLAKRVFQLHGARMTGEVTFRKKLSREQFLAFMAAQPACLVVFEACPSASYWAREMTAFGHEVRLIAPQYVRPFVKRQKNDAAYAEAIMIAARQPEMRFVAPKTAEQQARAVLFRSRERLVCQRTELANALRAVLDECGHVFPVGLGHLKRIAALLDDPACDLPALIIAECRDLLAQIAEKTERIDAKTRNLKALAAETDTARRLQTMPGGGPLTALAVEAFAPDMAQFRSGRDFAAWLGFVPRQHSTGGKARLGRISKAGQADIRRLLIIGAMTRIMGRARHKVPAESWIGRKLARKPKMLVGIALANRMARQIWAMLTRNEDYRDPALEAA

SEQ ID NO: 453783 - protein, 473 aa, unidentified
MPRRKPASSQPDPATAALLQTLNPHAAGIDVGATELWVCVPPSAVASPLLVVPSGPTVLPPHVRRFGAFTADLHAIAAWLRQCQVTTVAMESTGVYWIPLYDLLEAERFEVLLVDPRQVQRAPNRPKTDVHDCQWIQRLHSLGLLTAAFRPEEPIRVWRSYQRHRASLIEDAGRHLQRIEKALEQMNVKLPEVVSDITGVTGMGIIRAIMQGERDPQALAKLRDHRCKESTATIARALQGTWQPEHLFALQQSLALYDYYHEQIRDCDRVIEDHLKGMDLPEVPPLEPTRRVRRRKDNEVTFDARQRLHHMAGVDLTAIEGIEESTALVVLSEIGTDRSRWPSEPHFGSWLGLAPNPKKSGGKVKSSATRPGVNRAAQALRLAAKNLQRSKSALGAFFRRIAARRGLAKAITATAYKLARIIYALLKHGTAYVTQGLAAYETAYRERMVRQMKRKAAELGLVIVEREAVAQLA

SEQ ID NO: 453784 - protein, 345 aa, unidentified
MKLLYGGLDVGSSSCHFTALNGRGKVEVSTKVPTSELHITALLSSFKPHEKLRLHLEASELSMWIRTVVIERVPNVEDVVISDPKRMMWITRDPQKNDRVDSLKLANLLRLGTTHPVYFTDDVQMSSFKKCVQHHEGLVKERTQSKNKIKARLRWLGIIIKNDRPFRKGQRQVILSEIKEPTHREDIEDLYALLDQKEQMCRRAEKRMKKMSKNWPIIEKFMGVPGIGLVLACRFVAYIQTPWRFSTKRKLWKFCSLGITDRSSDGKSLGYRRLDRNGVSALKGLSSTAFRIAKGRAEDNSFKRTYYKSLRNTNNADHARLTVQRKIVTVLWTMWKKNERYDAEK

SEQ ID NO: 453785 - protein, 338 aa, unidentified
MKLYGGVDLYSNNNYLGIMDKKEKKVYKKKLPNDLSEVLKALNPYRKDLVGIAVESTFNWYWLVDGLMDNGYKVHLANPSAIKQYEGLKHSDDERDAFHLAHLLKLGILPEGYIYPKEERPVRDLLRKRLQLVRHKTLHILSFKNLVSRNLGIQMPSNEIKNLTEEDVEAMFKEEHLVIAGRANIATMRFLKERITVIEKAVLKKAKLREDYIKLLTVPGIGKILVLTIMLETGDITRFLEVGNYVSYCRCVGSSRISNGKSKGEGNRKDGNKYLSWAYVEAANFAVRGYPYVRSYYQKKAAKTNNIVAIKAISHKLARASYYVIRNQEVFNPKKAFG

SEQ ID NO: 453786 - protein, 372 aa, unidentified
MGKKSSTLYVGLDVHKDSIDIAVAEAGREGEVRHVGTIGGELGALDRALRRLQSAGARLHVVYEAGPCGFVIYRHLAARGIEVEVVSPSSIARRPGERIKTDRRDSLMLARQSRAGELTAVAVPEAADEAIRDLIRSREDAVRAQRNARHRLKALLLRNNIRYAGKTVWTGAHLRWLAELTFEDAARQFAFQEYVHAVTEATERIGRLEAAMREAVAGWRMAPVVEALQALRGIAFIAAATLVAEIGAIERFAHPRCLMAYLGLVPGESNSGERRRQGAITKAGNSHARRMLIECAWLYRYPARVAPILQKRVERVSPAVREIAWAAQVRLCSRFRRLAARRLPHNKIVVATARELTGFVWAIMMEMQAGAR

SEQ ID NO: 453787 - protein, 346 aa, unidentified
MTKVIRIGVDTSKYIFQLHGVDAAEQPVLRKRLGRKQMLEFFAKLPPTVIGMEACGAAHYWARELFKLGHEAKLLAPQHVKPYVKRNKNDGRDSEGLCEAMSRPTMRFVPVKSAEQQAALMLTGVREQMVARRTQLGNMIRGYAAEFGITAAKGLDKLEPLLAQIAQDESVPVLARELFAVQGREYAQLQGEVKAIESRLRSWHRANPNSRRLAEIPGIGPIGAPELVMKTPDPGAFTSARHFAAWIGLTPKDHSTAGKTRLGKITRAGDERLRSILVAGATSVIKQAMHGRGNPSPWLVALLKRKPPKLAAVALANKNARIAWKLMVTGERYDGARMQAASAAAA

SEQ ID NO: 453788 - protein, 407 aa, unidentified
MDLPAIYQTVVGLDVHQAKISACAMIELPDGTLAIEHREFGAFKRDRRSLAEWVHSLNPAVVVMESTGIYWKSPYAALEAVGINAWVVNARHVKNVPGRKTDVADAQWLATLARAGLLRASFIPPAEIRHLRLIARHRQKLGGMLASEKNRLHKVLADAGIRLNVLVSDIHGQTGRAMVKALIEGQRMPEILGLAGRLRASREELFEALQPEDLSEQHRFVLSEIMAHIEELEARMSRFEQQLLTGLAACEPQWVLLQTIPGIDRVGAAMLLVEIGVDMSAFGSAEKLASWVGICPGNNESAGKRKSGKTRKGNAWIRRLLCEFAQAASRSRCGLKDKFKTMSLRKGHKKAIVALAHKMLRIIFAMLKNNTPYRDQAVDYEALQVQRNAPRWIKMLVKHGFIPKVST

SEQ ID NO: 453789 - protein, 341 aa, unidentified
MNIPVRIGMDTSKSVFQLHGVDENEVVVVRRQFRRAEMIRYFERLPPVLVAIESCGSSHHWGRLLQSFGHEVKLIPPQYVKAYVKRGKNDAADAEALCEAVTWPSMRFVPVKSKERQAACMLMTVRERLVSVKSQLSNAFRSYAAEFGIVGPAGRQNVAALIKRVLEDDSLPEMARDLFRLQADEYAAVQARLAKIEAKLMKWHREDDISRRIATIPGVGPIGSSMLSMKAPPPETFRSGRDFAAWLGLTPKDHSTGGRRRLGGLTKAGDSVLRPTLIVGATALLRHIRKGRHKPTPWLASLLERKPPKLVVALANKFARIAWRLMISGGVYNQPVATMPT

SEQ ID NO: 453790 - protein, 393 aa, unidentified
MLDTTTFIGLDVHARSIKAVSLDVMTGEVRAATFGYDAGAVAEWVRSVDPRARCVYESGVTGFDLQKRLSGLGVDCVVGAVSKMIKPSADRRRKNDRNDAEFLARMLSVGNVVEVWVPDDECEAARDLTRALEDARDDLSRSKQRLSKFLLRHGLVFDERTPTGRRKGNWTRAHWSWIESIGFAEGADEDVLAYYVDAVRRAAEEKARLEGLVGAEARKPRWRKRVDSLRCLKGVDTASAADLVFEAGEFSRFRNARSFAAWVGLTPSEHSSGESDRRGAITKAGNKHLRKALVEAAWHYLTCSGRPKDLARGQAPDRGARRHAAKGVRRLVERREALLARGVHGRGGVGGRSPAHKPVTPEAVRSEAVEANLRSLFCERPGRHTRAQTVGST

SEQ ID NO: 453791 - protein, 343 aa, unidentified
MKLRTIGIDLAKNVFQACGVNEHMKSQFNKKLKRHELLDFMRQQAPTMVVMEACYSSHYWGREMAKLGHDVKLIPAQHVTPFVRGNKNDHNDAFAITEASQRPYIRFVPVKSEHQQEISCLHRIRDRLIKSKTALSNQSRGLLSEFGVVFPCGHKALLNGLNSVIDNTQFSQRLQDMVKDMLSEYNTTIERLNSIKKQLEEFIDDSESGKILLSIPGIGVINASALLAAIDKGQAFNNPKEFAVWLGLTPKQHASGNISKMGGITKRGDRYLRKQLVHGARSVVSRAAKKTDPLSLWATKLRVTKPFNKVAVAVAHRLARLIWILLTRQERYRAASTSQEVSA

SEQ ID NO: 453792 - protein, 318 aa, unidentified
MPTKKARSFIGIDVSKKMLEVAVHDRENHFHCANLDSAFPTLIAELIALRPVLIVLEATGGCETAVTNALHRAGLPVVVVNPRHVRHFAKAVGQLAKTDRLDARVLAHFAAVIRPPLRPLKSEEAQQLEALLSRRRQLVEMMAAEKNRRRMSSSPEIQEEIDEHIDWLKGRIKALDKQVTQQCKRSAAWQRKNEVLLSVPGIGPVVSLACLAELPELGTLNRQQISTLVGVAPLNCDSGKHRGSRHIFGGRAYLRSLLYMAAVAGVRCNPVLQEFYQRLLSRGKPFKVALVACVRKLLSIINVMVRENTLWIDKAVTT

SEQ ID NO: 453793 - protein, 343 aa, unidentified
MEQVSTIGLDIAKNVFQVHGIDETGEVLVRRQLRRRQVLAFFGRLSPCLIGMEACATSHHWARELAKLGHKVRLMPPRYVKPYVKRNKNDAADAEAICEAVTRPTMRFVPIKTCEQQSVLMLHRTRQLFVRQRTTLINAIRAHLAEFGIVAGIGRNGVEALLALISKGEDERIPSAARECLMALAAQLELVKRQILEADQRVLAWHRSSQVSKRLEAIPGVGPLIATALVASIPDPGAFRSGRDMSAWIGLVPKQNSTGGKERLGSISKAGNRYLRKLLVVGALSVIKRAKQLGYTRHPWLVTLMQRRSVKIAAIALANKIARIAWAMMARNESYRTPLPASA

SEQ ID NO: 453794 - protein, 387 aa, unidentified
MARKRTLSTLDTSIAYEAVGLDLAKTDVALAAFDSDHKEPYLIDRIPYDKLYELLANMAPTLVAMEPCSGAHQIAEQIQELGHEVMMISGRHVQAWVKDHCNGQKTDLNDAFTILNLAYDRCLTPIRGKTREECRLLALQASYRQLKGQRTKTMVHVKATLHAWGFPIRAGSFNQKVLHELIDTNREAFGDEVVETLHLMINRVRDLDHDIATVLKLLTEATKRDPRASLLRSIPGFGILTMSRWCAVIGDIARFDSPKQTMAFVGLVPNNRITGHHTETSSGREARGQGRMSKRGDKMLRSLCILGAASLCLMVRNDRLPDCPFVASIKERLASPRPWFKVLVYVAAKLVRIATALLKYGETFSYEKAGISKAVLKQWELEQAKAT

SEQ ID NO: 453795 - protein, 449 aa, unidentified
MKKHDLKQRGLPVIHDYAAGIDIGSRFHVVAVPADLAKESVQTFQAFTADLERMANWLVSLGITTVAMESTGVYWIPVYEILEAHGLQVVLANARDARAVPGRKTDVNDAQWIQRLHACGLLRASFHPDREISALRSYLRLRERHLDYAAAHIQHMQKALTHMNLQLHHVVADITGLSGMRIIRAIVAGERSPSSLAALSDKRCKAGVDVIEASLVGNYQPEHIFALTQALSMYDAYQAQLLVCDQQIAQTLIKLSQEKTLPAEPLPKPRHNTRQPNALNFDVRTLLYQLVGVDLTQIHGIGPYLALRLVAECGTDLSRWRTCHHFTSWLTLAPGCRISGGKVLSAHTRKTKNRVTAHLRLAAVTVGRTNTALGAFYRRLAARIGKAKAVTATARKIAILFYNAMRFGMNYQDPGADHYEQKYRERVVKGLHRRAAEFGFTLQPVEGVS

SEQ ID NO: 453796 - protein, 343 aa, unidentified
MQITTIGLDLAKHWFQVHGVDAAGKVVVKRRLRRAEVVEFFKTLEPCLVGIEACATAHHWARELIALGHEVKLMPPAYVKAYVKRNKNDAADAEAICEAVTRPSMRFVPVKDADQQSVLMMHRARNLLVRQRTMLVNALRAHLAEFGVIAAQGLRHVEQLIAAIEAESTALPELARSILRLIISQLNDTQAKIQQVEAKLAQWHRNSRLSKLLATIPGVGIMGASAIAATVCDPNLFRSGREFAAWLGMTPRQNSSGGKERLGRTSKRGDKYIRCLLVAGAVAILRHARTRATKDAEWVRGMLARKPAKVVAVALANRTARIVWAVMKRGDGYKAKEIVGQAS

SEQ ID NO: 453797 - protein, 324 aa, unidentified
MIDGILGIDVCKNTLDVSISSYTKVRTKSFTNSPDGWRHLLDWLIAQKIQRVHACLESTGRYSLGIACALYEADHVVSIINPAQIRDFVRTKLGRNKTDGVDASHIREYCELFKPSPWAPPSKAHRRLGELQTIRSGIIAGLTEWKNRKNSGIVDAEAQALADATISHFTSQLGAVDKAIARTIDNDCDLQSKRDLLLSISGVGETLAGVVLAELPGPDVLRSSAEVVAYAGLNPRRHQSGTCIDRATRISKIGNAVLRAALYMPALSAMRYNSAIVALVTRLKSRGRLKPKQIVVAAMRKLLVLCFGVLKTGRPFDAAIAMGG

SEQ ID NO: 453798 - protein, 364 aa, unidentified
MTTEQKRRTLFIGVDVHKDTHTAVGVSPFGEKLFEITVGNYQKDFRSLAEAAESVSARETLSPYFGLEDCSGFGERLSSFLLDEGYLVVHVPPILVDERRKNETHPEKSDSLDALGVAKVMLQRSDKLLPYTLTPETLKAKQIKEISVDREFLVSERTRLKNQLHTILHRLWNTEYRTTFKDPFSLKALRHWLSRTPKGADVFLVRIMKRKARRLLNLHEEITELEDELETLLKESGSTIQTASGCGVTIAAMVVGEIGDINRFHSPAALAKYAGCAPREYSSGKTHRHRKTRSGNRRLNCAFHRMALSQISRMGNPAAQKYFKKKVSEGKSKPQALVCLRRHMVNIVWMMMKHKTEYRYPQEH

SEQ ID NO: 453799 - protein, 373 aa, unidentified
MPKYSTAFGMDVHLRSTTVCALDADTGETVTRRFPGNPWGEIAGWMDGFPGPSLAAYESGYLGFAPQRELAGLGVECVVAAVSKIPRSAADSASKNDRNDAARMAKAILAHDISPVWVPSPEVEGIRDLAGAYDGATARLATAKQRLLAFLARRGFVYGGTTPAGNPRKYWTYDFLRWLDKVRPEDDGGVRALAALRNEVEAAAEARADLLSEYRAAADASPIAAEVAALQSIKGCAFALAAAFSAEVGDFTRFRSGRQVTAYFGLAPSQRSSGDSVRLGGISGAGNALVRKLAVEGSWCYAAARHQPKLMPRDTGVPLEIRMHGRKGSERLLRRREEMLARGMPAAKANAATAAELVRWLWALGMMCREGAE

SEQ ID NO: 453800 - protein, 407 aa, unidentified
MIFVGDDWSEAHHDVHVSDGEGRRLASRRFPEGLEGVAGFHSLMAGFVTDPSEVLVGIETDRGLWVQALLAAGYRVFVVNPLRVSRYRELHHLSGAKSDPADAETLADMVRTYRHQLRPATGDTELVAGINMLARTHQTLIWERTRHTNRLRSTLREYYPAALAAFTDLDHPDTLAVLDKAPTPAQGAALTITQLTATLKRGGRQRNVERRANEIQTHLRTPQLAASTTVAVAFGATTKATVAIIAEFNTQIAVLETELGTHFEQHPDAVIVRSLPGLGVILGARVLSEFGDNPNRYLNAKARKNYAGTSPITRSSGTIRVVSARWIRNKRLADAITRWAFCSLSTSPGCRQFYDKHRANGNTHNQALRALGNRLVGILHGCLTHQTTYNEHTAWNHQHPTPTTKAA

SEQ ID NO: 453801 - protein, 386 aa, unidentified
MQKLNDLSRSLTALEPDGTLIAVIEMSLSSWLVAGIVPGIERQPLKKLAVDESALLKLLHRWREEAEKAGRRIERIAVAFEAGRDGFWLARWLKARGIEAYVIHASSVAVSREHRRAKTDRLDTELLKRSFLGWLRGERDHCKMVEIPTMKDEDAKRPNREHDSLIGERSRIVNRMKAALVRLGIRGFNPKLKRASTRLDGLRTPEGEPIPPNALAELRRDMERRRLVNNQIRQIEEERLKRIEQAPCDGPHVMVRLLARVMGVGIETADMLVHEVLSRNMRDRRAVARYAGLTGSPDESGRKRREKGLARSGNTRVRRGMIQLAWRFLLHQKNSALTKWFRSRTENARGTRKPMIVALARKLLIALWRLVREGIVPDGVVLRAAQ

SEQ ID NO: 453802 - protein, 456 aa, unidentified
MAHNVARKLISSKVDSILPDDQSLSVLNLQNYQEVILLSFKILKNNCCGLDVHKTWIYACIGITDSNGRTEYKQARFSSFTKGLQELCDWLVKYNCNDVCMESTGKYWIPVFNILEKNNLWVTLSHPKYTKPQKGNKTDRKDAKWICDLYMCGMVKPSFIPPADIRQLRDLVRYRFKLTCMITGEKNRAQNCLTVSNFKLDDVFSDVFGKSSRSITEQILQHPGETFDVTPFVDGRCKTPIEEIQAAVDGAISTEQAVKLRQCLNHIDELEKHQAEIEREIFRLSDKYESILNLIRTVPGFDKNPLTAIQVLSEIGGDMSVFPTAKNLVSWAGCCPRNDQSNHKIKSTRISRAGFYFKPVLVQVANALIKSKKHTEFTTRYRRIKARRGHKKAIIAICRMILTAIWHILTDLKPYTPEGFLESRPVNDSKVLTTSQALNLLKQRGYVIKDDTVPVT

SEQ ID NO: 453803 - protein, 410 aa, unidentified
MEVLYPHCAGLDVHKDTVVACVRHMVNGSVRREVRSFKTTTKELLALSDWLAGEGCTHVAMEATGVYWRPVWHVLSDGDFTLVLANAAHVKNVPGRKTDVNDATWLADLLAHGLIRSSFVPDGQTQEMRTLLRTRKQLVRECSRHVQRLQKTLEDANIKLDSVISDIVGLSGRRMIEALIAGETEPGALAAMAHRRIKATPDELEAALRGRVTRHHRFLLQLHLQQIDAVNAAIDQIDQEVDAYVEPFRATVRLLTTIPGIDELSACVILAEIGRDMSRFPTAGHLISWAGLCPKNDESAGKRRSTRMRKGAPWLKTTLVQCAAAAARKKASYLQAQFHRLRARRGAKKALGALAASILTSVYHMLISGELYRDLGPHHFDQRAKAVNTRRLVTRLQNLGYAVQITPLAA

SEQ ID NO: 453804 - protein, 346 aa, unidentified
MNLLKQVLGIDVAQKELVVSLGRMNADLSIDLYAKRVFANKESGFIALIKWVGKLTDESIAVHYVMEATGVYHQKIAYFLDDRGYQLSIILPNKISSYMRTLDNKTITDSTCADAIAQFGLERKLDPWQRPNILYKKIQQLTRERSQVVDERVIAKCQLHAENAEAQPNDNSIKRLKSRIRFLNQQEKEIKQDIEACIKEDDAITKNIKNLTSIPGIGRLTAAIVLAETNGFELIRNKKQLTSYAGLDVREKQSGTSVKGKPRISKKGNRNLRKSMYLPALTAVKHINDYKELYARLVSKSGIKMKGLVAVQRKLLELTYVLFKNNTTFQNDYKQEKSATAKADTL

SEQ ID NO: 453805 - protein, 392 aa, unidentified
MIYVGIDVAKSKHDCCILNEKGETLTAFVFTNDKQGFEKLMSEIAMYSSDRDLSDAKIGLESTGHYSINLQNYLLQKRLCVRIYNPLSVNLLRKAQTLRKTKTDKSDCKFLATLLFSDENKSYSQTVLPLSELRNLTRSRHRLICMRSKLKLSLSRLVTILFPELPGAVWSVNQKSSYALLSEFPTAKDIANANIIRLTNVLSSASRGKYGREKAEQIRDLARNSIGLDSRAVGFELQQTIRLIQNLQSEIDLLDKEIKKIMKEIDSPVLSIPGIGYVLGAIIVSEIGNIENFSSPAKLQAFAGLDPSIYQSGQYNASNTPLVKRGSTYLRWGFMQAARLVAYRDTTFAAYQEKKLSEGKHFFVALTHVAKKLIRVVFYLLKTNQNFVPQLG

SEQ ID NO: 453806 - protein, 332 aa, unidentified
MAYDFVIGVDVGKYFHHACVLDPQGRQVLSKRINQHKGSLRKLFGQFLADNTSVLVIVNQPNNISRLTVAVAQHMGADDRYLPGLAMRQLSRIHVGNSKTDVRDAYVIAHAGLNLPDALRSVDRVEEVFTQPKVLNGIDEDLARAYTRQINQMRSALVGTNPAFEHVLRGQMIHRKWILHLLAKYGGPTKIRRIGKTRLAAFARSHKARNPEPVIHAMLAAIHTQTVSIAGAEYAELGVAMSAKDALAKLEHRKEIEAQVLKLIQDIPQTEILLSMPGIGPRSAAQILMTVGDMSDLPDAAHLASYAGLSPRTNQSGTSIMPNSPNRAGNKN

SEQ ID NO: 453807 - protein, 344 aa, unidentified
MQEIFIGVDSHRSTLAAAAIDPIGRVLDAAEFDNDARGHRTLLAWRRRFEGEVRIGIESSGNYGNALARMLFSADEDVFEVPANLSHREAKRQARGKSDPIDAVAIARVVAREEGLPRPRIDHAFEDLKLLSDHFDQLKRQRTQLMNRIHKALVVSHPGYDKRVGNLKAERHKTTVMNLVRKDHSVRADLVRRNIKEIWRLEAEVKSVRAEINELLETSGTTLTKEAGIGPVLAARLLGEVGDVTRFRSKAAFARLTGTAPLPASSGLTIRHRLNRHGNRRLNCTIHYIALTRRRVDPESKAFIAKRIAEGKTRKEAMRSLKRHLSNRIYRMMVEDADCLSRRT

SEQ ID NO: 453808 - protein, 353 aa, unidentified
MKRDQYMGLDVHQATTVVCVLNAEGKIVLETVVATEARALIRLVSSFSGPLHVSFEETTQSAWVNEVIRSFVSEVVVCDPRRAQRLREGSKGDRQDARQLAELLRQGLLRGVYHGHQRTRTLKQLVRSYETLSGDVQRTMVRLKALYREIGISTSGRGVYQLGQRDQWLARLEEPGRRQRAQWLYAQLHHLQPLRREAKRMMVAESRKHPASAVLETIPQLGAVRVAVLIATVDTPFRFRTRHQLWSYCGLAVVTHMSAEYEIQEGRPVRRRKPIATRGLNRNCNHRMKEIFIGAATGGSHHEPYRSFLEGLEKRGIRREMARLTLARKIIAITLTIWKKGEPFDPKKLNSAT

SEQ ID NO: 453809 - protein, 377 aa, unidentified
MTAMTHSTVGSVSEPVLYVAFELSAKQWKLAMTSGFGVAPWVRTVPAKDLRAVERAIAQGRQRFHIALDCAVVSCYEAGRDGFWIHRALTQLGIRNRVVDSASIEVNRRARRAKTDRIDALKLVRMLVRVCNGERDVWREVRVPAASYEAARHVSRERMALVQDQTRLVNQIRSWLATSGARWPARRRAAWWTLVTDWQGHALPRTLQARIARADARLAQLTAQIDELETQQQAAVAAAAPDSAVQRLVHLKGVATTGASTLLDEGLVWRDFRNRREIGGLLGFAPLPYQSGEVARDQGMSRAGNERLQAISIQLAWNWVRWQPLSALTQWYRHRFAEGGTRARRIGIVALARQLIIALWRYATTGVVPAGAILKGA

SEQ ID NO: 453810 - protein, 359 aa, unidentified
MSDAITKETTLTVGLDLGDRYIQVCVLDETGEVVEESRLPNKRAALERRFGAGEPLRVVLEAGTHSPWVSRLLADLGHEVLVANPRKLRLIYQNESKSDRVDAEYLARVGRLDPSLLAPLRHRSAQTQEDLAVLRSRMCLVRARTRLISHARGAVKSFGERLPSCGAEVFAKKAENHIPPELEPALAPVFSAIRELTDKIKALDALIEKTARESYPKTSLLTQVPGVGTLTAQCFLLTIEDPARFPKPRAVGSYLGLRPRQAESGSLRPQLRITKAGDDHLRRLLVTAAHYILGPFGPDSDLRRWGLALCEKGAKSGKKRAVVAVARKLAVLLLRLWQTGEIYEPLRNTNRREAARACA

SEQ ID NO: 453811 - protein, 284 aa, unidentified
MLTERTPAPATRFVALDVHRQYLMVGAVDSQQHVVLSPRRFGFAAFAEWAHVHLTHADAVVLEATSNAWLLYDQLQPLVSEVVVAHPQAVKLIAAARVKTDSRDTIKLASRLSANLIPAVWVPPQEVRELRALVTHRNRLVHQRTQAENRLHSVLHRHNFDPPPGTPFAVHQREWWLTLDLSLAEKLRVQQDLSLYQTLETLIQEIEAELGRLSTCDPWVKQVPFLVQLPGLGVLSALRILAAIGEITRFPSAKHLVGYAGEGGQRSPVGGDQSRGAHHQGGAQ

SEQ ID NO: 453812 - protein, 437 aa, unidentified
MLLCLNPNAAGVDIGATEIYIAVPEDRDPQPVRCFPTFTEDLHAAADWLKTCHIETVAMESTGVYWIPFFQILEARGFKVFLVNAHHVKNVPGRKSDVSDCQWLQYLHAVGLLRGSFRPEQAVCTVRSILRHRDSLVQMASSHVQHMQKALDQMNLQLHHVISDITGVTGVAIVEAILAGERNPHTLAALRDRRIKASADTIAKSLVGDYRREHLFTLGQSLEAFRHYQELIAACDREIAQYLEGFESKVDPPPAPTSPSKDGPQPKDSEPRFDLQTHLHRIFGVDLTKIPGINVLTTQTILAELGPDFSRFANGPALTSWLGLCPDNRISGGRVLSVKTRKVKNRAATALRMAAQSLYRSQSYLGHYFRRMRAKLGAPKAITATAHKLARIVYHMVTTRQAYDETICAHNELQNRQRLEARLRKQARELGLQVVAI

SEQ ID NO: 453813 - protein, 337 aa, unidentified
MRFCGIDLHSNNSVVVVTDDTDKVLLSRRCPNDLSKILALLAPHRDELAGVVVESTYNWYWLVDGLMAEGYDVRLANTVAMKRYDGLKHSDDETDAAHLAHLLRLGILPTGYIHPPAERALRDLARKRIQLVRDRTRHVLAVENILARSTGARLSATVIKRLAAEEVDALELTPDVVLAVQANLAVIATLNLEIGKLEARLLESVALRPDYARLLSIPGIGKVLATVIMLETGDISRFAQVGNFASYARCVDSVRISNGRKKGEGNTKNGNAYLVWAFVEASNFARRYSDEAKRFFERKKAKTNGVVATKALAHKLARASYHVLKTGQPFDVTRCFA

SEQ ID NO: 453814 - protein, 341 aa, unidentified
MSKTLYFVGIDVSNATFAASIFRADDKSVIIEESIANNTDGFVSFTVWLKEHNVTTSNSSICMEATGVYSEAIAHYLAAEGFKVTVEPPLKVKRAFEPCGHKTDAVDSKQIAEYAYRFSDELKPWQPADEILEKIRQLLAVREQFVKQKVAIKNAMHAYSKHIVQVGLIKKAHKETLAQLDKQIKRIENELSRLIGDNPTISQKTDILRSIPGCGMLLACNLMEITSCFKEISDHKQLAAFIGIVPYKYQSGTTVNKRPRIRHFGPPLTRKLLRLASVSVATHDKQFRAYYLRKVAQGKAKSLVLNNIANKLIKLACAMIRDNKRYIKEYSSVNPMYLKIA

SEQ ID NO: 453815 - protein, 416 aa, unidentified
MNYVGIDIAKTFHVVTIIDENEVKVFKKAFRVENEIDGYLNFIKKLDTVSIDKSNFLIGIEATGIYGENLLEFLKAQGYNVKLLNPFQTSRYREQTTMKKVKNDNIDSLMIALFIKDGKYSEGYVTDDEYQSLRTLYRNRTAIQNDMKDVKKRILTNLAVTFPEFEYITNPFTNIGLALLDKYPTAHHYKHSSIDRIVKVFRHIKGNNFNNEKAQLILNASKNSVYSGKAKDARAIAIRSSIRLLNLYNEEIDILEQEIFLLLEKQNISNEEFESNMKVDDKTTTLIDNLKSIPGVAEKTIAAIISECGDLTRFPTTAKFIGYLGLFPTENSSGNYQSTGHLSKRGSSIAKHALYMSSVSCMLHNSQLKQLYDTKKSQGKSKKEALIAVSRKLATIIYAIFKYNTPYNPNRVFAKS

SEQ ID NO: 453816 - protein, 344 aa, unidentified
MTMTTVGIDLAKNVFQLHGVDQHGKTVLKKKLKRHQLSTFFANVEPCLIGMEACSGAHYWARTLVNQGHTVKLMAPQFVKPYVKTNKNDAADAEAICEAVARPNMRFVTIKSPDQQALLSLHRARAGLIKTQTAQINQIRGLLTEFGIVLPIGKVAIRKHMPLILEDAENGLPDTFRQVLSRLYDHLTELSEHIEKFDLSLKEHFKHCELSQRIASLPGIGLISATAIIGTIGDGSEFKSGRQLSAWLGLVPRQHSSGGKNILLGMSKRGDAYLRTLLIHGARSVLIARSDKVPSESWLGGLINRRNKNVVAVALANKNARTLWAMLARDEDYNPQMYPDAFAG

SEQ ID NO: 453817 - protein, 458 aa, unidentified
MQNYYLGVDVSKGYSDFVLLDSAKCCIEENFQLDDTFDGHQTLYEVLSKFCTHYPKAQIYAAVESTGGYENNWFNALVKFQSSLPLNTARLNPCGVHNNSKAELDRNITDKISAENVAKYLIEHPEKILYQRQDALASLRKQWSFIKMLTKQKTQLLNQLESNLYTANPEILVYCKNGVPDWVLSLLSRYPTAVKLAKARKSSIALIPYVTPKKAKELVETAKKSIASATDQITEQIIKATVKQIKLILKSIETQTKIMAAKCSVPEVKLLKTFSGISDFSAIGLILEIGSVERFASAKKLASFFGLHPVYKKSGDGAWGFHMSKKGRKVPRQILYMVAMNAIQSNPLIRDIYLKHTEKGMEKMAALGLCMHKILRIIYGMLKNNKPFSPEIDLKNRATSTQGKTKSRREKKRRHQTFDGKAPISRRQTQKRKERKQSQSDNNAKDGIIKAPVPSLST

SEQ ID NO: 453818 - protein, 411 aa, unidentified
MRLFVGDDWAQDHHDIEVMDAAGTVLAKRRLPGGVAGMAQLHELIGAHLGEDAADAEVVIGIETDRGPWVAALAAAGYAVFPVNPLQAARYRDRHQVSGAKSDAGDAHVLADMVRTDSHQLRPAAGDSPQAEGVKVLARTHKTLIWERARQVQRLRHQLREYFPAALQAFEDLDAPDALELLAKAPDPARAAKLTRAQVAAALKRARRRHAADKATAILAALRGEQLGQPPALTAAYAAAVRALIAVITTLNEQVSVLEGQVGEHFGRHPDAEIYRSQPGLGPVPGARVLAEFGDGPHRYADGKARKNYAGTSPITRASGKRKVVAARFVHNDRLIDALMAQAFSALRVSPGARACYDAHRDKGLEHNDALRRVANRLVGILHGCLKTRTRYDEATAWGHRENPGQSPAAA

SEQ ID NO: 453819 - protein, 411 aa, unidentified
MENLIIVGIDWANQDHVFHLQVDGNRPVTGSFKQDPEEIEQLLEGWRKRFPGCTFAVAIETSKGPLINALVNYEDVMIYPINPAALANYRKAFAHGGGKNDPSDAKLLADFLQHYRQQLKPLRRDEPITRELGALTEDRRRLVDQRTAAGNELKAVLKRYFPAVLELEPAKIYADFLLRLVLKYPTLAAAQRAGKVRLRKLFYGLGKAEKIEARVEQLMAAKPLTEDETTLRVEARRAVALGELLQTYNQQIAIYDKAIKELVVQHQDYELFKSLPAGSHATQARLIAALGDDRSRYESAEALQAASGIAPLTTQSGKQRFVSSRWACSKFLKQTFHEFAGLSIMRCTWARAYYAMQRAKGKSSQMATRALAYKWQRILFSCWQSRTAYNEAHYMERLRATGSPLLAFIVE

SEQ ID NO: 453820 - protein, 423 aa, unidentified
MPQLWAGIDAGKTEHHCVVIDGNGTKLLSQRFKNREAAILTLMGDVASLPGGTDVAWATDLNHGGTGLLQSLLSSHEQPLFYISGRVVHHASGAYRGEAKTDAKDAVIIADQARTRRDVTLMRQPDEVTAELRLLSARREDLVHDRTRAVNRLRAILVHYFPSLEGAFNYATTRGPLVLLTRYATPSAIRRMGESRLASWLKGQGCWKSAAVAKKAVDAAREQTSVVVGEGAAARLVSRSARDLLRIRDEVAELDAEIEAVLQDSKSADLLVSIPGFGRRLAADFLAATGTDLAAFETPDRLASFAGLAPVPRDSGKISGNHHRPRRYDRRLLNACFQAAFIASRNCPVSRSFYDRKRQEGKSHKQALIALARRRMNVIWAIFRDQTTFNPTPPRPNDPVTPLLQHGPESPSRSRPTIALAAA

SEQ ID NO: 453821 - protein, 307 aa, unidentified
MRAAGIDVGKANLDLAWNGRPGVTRLANTRAGISKLVKRLQAAKMERIVVEATGGYEEPLLEACCDAGLWIARVNPRQARDFARATGELAKTDAIDARLLALMAAMFGDRLRRHLAPPVWQRELRDWLRRRGQVVVLLQAQKQQAAMAPPEVRKLVSRTVAALDRELAAIERSMKVLIQEHASPALRSSKGLGPVFQATVLALLPELGHLDRRQIAKLTGVAPMNRDSGQGQGKRRIRGGRAPVRVALYMATLSAVRWDPLMKAHYQQLRARGKLGKVALVACMRKLLGIVNARRRDELKMAGLALA

SEQ ID NO: 453822 - protein, 416 aa, unidentified
MNAVGIDVSSRKSTVAVLRPLGEVVCLPFDVTHDIAGLASLAEKLKALDGETRVVMEHTGRYYEAVAKALHEAGLFVCAVNPLLIKEYGANSLRRVKTDKADAVKIARYALDNWADLRDFTPMDAIRYDLKTLNRQFQLASKQRTASANNLIALLEQSFPGIRKCFDSPVRSDGTQKWVDFAHSFWHVDCVRKQPFPAFCERYRKWCKRHAYLFKLSNAEEVYALAKRAVVLTPKSKVVKVLVQEAANQLSSISRSVEVYRAEMDRLAAMLPEYPVVMAMYGVGKSYGPQLMAEIGDVRRFERKQALVAFAGIDPMPNQSGDKNVRSNKSSKRGSPYLRKTLFNVIRTYLQCAPQDEPVFQFLNRKRAEGKPFYVYMLAAANKFLRRYYAKLRDYFASLDTLQPVAPIPTILKATL

SEQ ID NO: 453823 - protein, 478 aa, unidentified
MKAQGGADTAAKAARPNRKQRREQQRKIWTDNPGLDVVHPNAAGIDVGNSEHYVAIAPEKSPEAVRRFGCFTADLRDLAQFLKAHGIVSVVMQSTGVYWIPLYDVLEEAGFEVYLVNARDTKNLPGRKSDVQESQWLLKLHTFGLLRNSFHPTSEIRVLRAYWRQRTEHIHTATECVQRMQKALTQMNLQLANVITDIMGLTGQKILRAILAGERDADKLAKLRNWRIQASHEEIVASLTGNWRAELLFTLKQEVDRYDFCQRQIGECDQEIEIHLNTLASRPRETARGAQPAMPPKKRKTAQGNSPEFGLGQELARIAGVDFTRIDGINVLTAQTIISEVGLDMERWKTEAHFASWLGLCPYNAVSGGKVLRRGTRKVVNRAATAFRIAAFTLRRSDSYLGAQYRRFRGKLGAPKAITAMAHKLAVLFYRMLRFGQEYVDRGQQFYEEKYRQQQISWLNRKAAQLGFSVIPAANDPA

SEQ ID NO: 453824 - protein, 359 aa, unidentified
MDIRDPAKRHVVGGVDTHKDLHVAAVVDERDRVLGSQSFATTRQGYRQMLAWMRSFGEVQRIGIESTGSYGAGLLRFVQTAGIEVLEVTTPDRHDRRRRGKNDDLDAQNAAHAAFAGQRTVTPRSRDGMVESLRVLSACRKTAVAARRVALQLIQNTIVCAPDGLREVLRSMTRMQLIRTLAAWRPDLTAYRDVEAAYRITFKSLARRYLELHDEIADLDVMIGAIVDELAPDLVARNSIGHVGAAQLLLTAGDNPDRLRSEASFAALCGTSPVPASSGKTIRHRLNRGGDRHANSALHIIAIGRLRTDPKTKKYVAKRIAEGHSKLEAIRALKRYIAREVFTLIMRRHKTINQTQIAA

SEQ ID NO: 453825 - protein, 357 aa, unidentified
MEKILKQSVGIDVSKESLALSLGSLNSALQKTFEAHADVSNDSKGFKQVHRWLQKQRATDGNVVVVMEATGVYHQGIAYFLHGLGYRVSIMQSGRVKRYAQSLDQRSKTDALDSRMLSMLGLERCLRAWQPPSEELQVLRTLSRERANLLKSRTVENNRYEAMHSGSHENTSVTRRYKRRLKLINDQIASIEEEMRALIAGNAVLSKKISDLQSIPGVRLITAACVVGETLGFADISNGKQLTSYAGYDVVQRESGSFRGKTKISKRGNAHIRAALHMPSMTCVRCNPTLKTFYQRIKPTKEKPIVALVAVQRKLLILMYTLWKHNAVYDPLYETKKQQKLGALAAQDNETENCITS

SEQ ID NO: 453826 - protein, 351 aa, unidentified
MSICEKTYYIGLDVHKNYSTYAIMDKEGNLFKEGNLINDELSTKLPSFVEGRKILTMETTRNWYAIYDTLEDKFDRIYLANTYKTKIIAEAKIKTDKIAAKHLADLTRANLLPYAYIPPREVRDKREILRCRFSLVKMKSIIKNKLHAVLSKNGYICPYTDILGIRSIEWLKEISERFYFTYRMEINSYIEIAKLIKDKISDIDKQIKEMAMESEEAKIVESHPGIGYYLSLLITTEIVDIKRFANVKKLIKYSRLAPGVYSSGGKRYYTHLVKEGSKWLSYGFVEAAKSIIRSRSDEEMVEYYSRIKSKHGHGAATISLARKVLINVYYMLKYRRRYEEFKANRRGQVAS

SEQ ID NO: 453827 - protein, 353 aa, unidentified
MKPKTESDTALPMVIGVDIGKEVFHLVGFGGDGKIVFRRTIKRLGFAAVFEKVPPCIVGMEACLSAHFVSRTLRTLGHEPRIIPAIYVKPFVKGQKNDYNDAEAIAEAALRPNLRFVQEKSQDQLDLQACHRVRARLVSRRTATINQIRAFLIEQGIAVRSGPRALRTSLCAILENRKDEISPRMARLILDLYKDWCHLDERIDTVTGEIEELSRVEAKCQRLMTVPGIGPVISTGLVAAIGSGEAFERGRDFGAWLGLVPRQYSTGGRSVLGRISKRGSKYLRTLLIQAAKVLLMRPHNWPRYSFGAWLKTASERLHRNKLAVALANKLARIAWSVLRHDKAFDTHLETAAI

SEQ ID NO: 453828 - protein, 404 aa, unidentified
MSRLYVGLDWGGERHAVCVVDEAGKIVAHFAVTHDAEGLGSMVKRLAKIAPAAQLAVAIERPSGLVVDTLVGAGHPVVPVHPNVVKASRPRYRAAGGKHDLGDAYLLADLLRTDGHRFRPLTPQSDSVKALRALVRSRDDLVAQRVALANQLRSLLESFWPGAAAIFADIDSPIALAFVRRYPTPQRAAHLGEKRLAAFLAQERYCGRRGVSELMARLRDAAAPVCSDLEAEAKGELVQTLARVLETLVVELGKLTSRIEHDAQQLPDGKLVMSFPRSGRLNAAQILAELGDVRERFQDEEQLAAEAGVCPVTYESGKSRGVGFRWACNHRLRVAITTWADNSRHASPWANSVYARARSRGCDHPHATRILARAWIRVLWRCWTARTLYDPGLHGGSKRLLAAA

SEQ ID NO: 453829 - protein, 339 aa, unidentified
MKLTTVGVDIAKNVMQLHYIDAETGEIVNKPVKRAAFLEHFANRSPCLIGMEACGGSQHWARKLIAMGHQVKLMPGKFVKAFVMGNKNDATDARAIWMAAQQAGKSVAVKTETQQAVLGLHRMREQLVKFRTMQINSLRGLLTEYGEVMGKGRAALDKAMPDVLERLVDRLPRILLDTLREQWNGLTELDKQIAEIERRLQAWLREDKACKAIAAIPGVGLLTATAAVATMGDAKTFKSGREFAAWIGLVPRQTGTGGRVQLLGISKRGDMYLRKVLVHGARSVLCLAKEPGPWVEGIKKRRPLNVAVVAQANRMARTIWAILAHDRVYEKDYVSVKPV

SEQ ID NO: 453830 - protein, 355 aa, unidentified
MDSKKYIGMDVHKESISIAVMNGAGKIVMECIIETKASMILQFIDGLRGDLQVTFEEGTSAAWLYDLLKPHVTKLVVCDPRKNKSMREGNQSDKIDARRLAELLRLDHLTPVYHGEHGLRTLKELVRTYLTVTKDLTRVMSRVKAIYRSWAIPCTGKQVYAQRHRAEWLGKINEPGVHRRAEFYYQQLDALRVVRQEVRRDLLAESKKQKAWKRLCEIPSIGPIRAAVLLGILQTPHRFRTKRPLWNYGGLAIEMHSSADHRKVDGQLQRSRKNVLVRGLNRNCNHDLKNLFKGAAAVASSKPGPFQEFYTALLAKGMRPEMARLTLARKIATIVLIVWKRGVCFDAQHLKPQTA

SEQ ID NO: 453831 - protein, 422 aa, unidentified
MLHDSEDTEEIIERVAGLDIGKAELVACIRVPNPDRPGRRAQEITTYSTMTRSLLGLADRLGELGVTRVVMEATSDYWKPVFYILEAKGLDPWLVNAKDVKHLPGRPKTDKLDAVWLAKVAERQMIRPSFVPPPEIRLLRDLTRYRADLVNSRTAEKNRVEKLLEDAQIKLSVVASDIFGVSGREMMAALLAGQRDPKPLAQLARSRMRAKIPLLEEAFVGNFTDHHAFLLRTMLARIDEASADIAAVETRVEEVIAPFAHAVEQLDEITGVGLTAAHVVIAEIGIDMTRFPTAAHLCSWARFAPGVTESAGKNKGRGTTGHGNPYLARVLGEAAVAAGKTDTFLGERYRRIARRRGKKKAIVAVGRSILVIIFHLLSDPKARYHDLGSDFYDNRIGPDRKKRNHVRQLESLGFKVTLEPAA

SEQ ID NO: 453832 - protein, 347 aa, unidentified
MTVRIERRLVFGGIDTHSDTHTGAVVDQVGTVLGTETFPATGSGYVGLAVWMMSFGQVVKVGVEGTGSYGAGLTRHLQSVGVDVREVIRPNRQHRRRHGKSDTADAVAAAKAVLNGDADGQPRGGNGPIESLRMLKIARNSAVKAATQAANQIRMVIISAPVDLRASLEHKTMIQITRTAASYRPGDPTDPHQAAKHTLKSLSQRWQTLKQEIIGLDHHIQQLVAATAPPALLEETGVGIQTAATLLITAGDNPDRIRNEASFAALCGTSPIDASSGRQQRHRLNRGGDRQANAALHRIIIVRLRYHQPTIDYMNRRLKEGKTRKEIIRSLKRALARNLHHHLKTTT

SEQ ID NO: 453833 - protein, 352 aa, unidentified
MMIIGCDFHPRFQQISFLWEETGECGQRRLMHTAEAEQYYRGLSGARVRVGIEATGSYGWFRRLLSELGHELLVGDATQIRASNPRRQKTDKRDAEHILGLLIQDRFPAIWQPPAENEQLRQLLLHRSRLVRLRTRVTNQLDGMAKNEGLLIPGGWSGKRRKVIEALPLPGWYGERRQDLLGLLDRLEERIAPLNKAVGQAAANNAEACLLMTHPGVGPVVSLAYVLTIGNWQRFPRGKQVGSYLGLIPSEDSSSDKRRLGHISKQGNTLLRWLLVEAASTAQRYDPSWHRQYLRLSMSKHHGVAKVAIAHKLAVRLYWMLRSGEDYQQVRERGSHARQSECPGGRSKRPIE

SEQ ID NO: 453834 - protein, 342 aa, unidentified
MEKATIIGIDLAKRVFQVHGATSDGNVAFRKKLSRSKLLTFLAAQPHCIVAMEACATAHEWGRVIGQLGHTVRLVPPVYVKPYVKRQKNDAADAEAIAEAASRPTMRFVAVKTEEQQARSMIFRTRDLLVRQRTQLINALRGHLAEHGVVAAQGEANLQPLANVVNDIESSLPPIVRDLGRLYLEQIDLLAEKIAEIEKTLRREAARGEATARLQTMPGIGPITAMAIEAFAPPLETFKRGRDFAAWLGLVPIQHSTGGKQRLGRVSRMGQRDIRRLLIIGAMAVVQWASRKGPPEGSWLAGMLARKPRMLVAMALANKMARSAWAMLTKREDYRIPTVAQA

SEQ ID NO: 453835 - protein, 349 aa, unidentified
MTEHLAGVEYVVGVDTHKASYTAAVVSRAGAELEVATVASDAFGHKRLLAFAQRLGPGQRLWAIEGTGSFGRGLTSFLLEHGEAVVEIDRTARPARRNGAKTDALDATRAAREALVRPHLAQPRRRGEREALRVLVRTRTTAVRARSIAICHLKSLIVTAPAQLRDQLRNLSDLRLAPKCARLRTALHHTPEHRATIAAIRSTARRILFLEAEAEDHASAIELLAQQIAPQLLAECGVGPLTAAELVIAWSHPGRLRSEAAFAQLAGVAPIPASSGQVTRYRLNRCGDRHVNCALHQIILARLGHDADTKRYAARRTKEGKSPKEIKRCLKRFLARRLFRLLEGSAVAS

SEQ ID NO: 453836 - protein, 433 aa, unidentified
MKVKYEDRQKQKVIAITTDTLVVGVDIAKNYQWARFVDFRGIEHDRALKFKNSKGGFETILARIREICKKENFAKVVVGMEPTGHYWKAFANWLEKQDGIKVVLVNPYATKQAKELDDNSQTKSDKKDALTIAKLVKDGRYFELYLPHDVYGELRVLSTTRTGLNKRKNVLKNTITAVMDEYFPEYEEVFKCPLSGKASRHILKTCPFPKFILGMGEDGVTDEIKRSVKKSVGRKKAVQLVEAAKDSIGVDYGEEAARLKLRLMLEELELLEKQTEELERQMEDTLQQTDYADFLLSIKGIGIVTLAACLGELGDPTRFENPRQMSRMAGYNLVEDSSGKNKSGTKISKRGRKNLRSVLYQMALTMVAVNEEMKQLYHYLKTREKAPLRKMQALIVISKKILTLVHTLARKKENYDPVKVFGHVRREQLKAAA

SEQ ID NO: 453837 - protein, 424 aa, unidentified
MRFIALDVHRDFCEVAIAEGGQVRRGGRVETTPATLELFAGSLAADDQVVLEATGNALAIARIIEPHVGRVVLANPKAVKNATQTAKTDKLDARTLAKLLAAGFLPEVWTPDEQTRVLRRRISRRAQLVRQRTREKNQVHAILIRNLKGRSPATDVFGAAGRRWLAAQELPADEREMVEACLRGIDFLDHEVAAIDRALAKLVLASSELRRLLTLPGVNFVTACALLAAIGDVRRFPTAQHLVSYLGFDPRVRQSGSEPARHGRISKQGPGETRHVLVEAAWHAARTTGPLRAFHERVASRRGRNIATVAVARKLTVIAWNMLSRGEDYAFARPSLVREKLRRLELMTGAEHRKGKRNPVRVFATREQHRLDKELANQAERAYRRLVQDWQPAIKGTGAAPGRASRGPSSGQAARQETAPPPAL

SEQ ID NO: 453838 - protein, 351 aa, unidentified
MMLIGVDYHPSFQTIAFFVEETGEYGEQELNHSDGQAERFYRDLKQRGICVRVGMEATGHSRWFERLLAELGFELWIGDPAEIKAKRVKKQKFDREDARLLLRLLRENNFPQIWVPDPENRDLRQLLWHRHRLVQMRTRIMNQLHALAMNEGYCWKKKLFSDQGRAQLEKLALAPWASRRRQELLELLDRLNPTIEELTAVVEREARKRPEAKRLMTHPGVGSLTALAYVLIIGTPTRFQRGKQVGTYVGMIPCEDSSARKQRLGHISKQGNSLLRFLLVEAAQAAARVHPDWRRRYLHLAMRRHKSIAKVAMGRRLAVRLYWMWRNGCEYSPSLEFGSYAGQLETGNGVK

SEQ ID NO: 453839 - protein, 343 aa, unidentified
MQTITAIGLDIAKSVFQVHGVDADGQVVVRRQLKRRYVLAFFQKLPPCLVGIEACASAHHWARELQALGHTAKLMPPAYVKPYVKRHKNDAADAEAICEAVTRANMRFVATKTPEQQSCLTLHRARHLLMRQQTSVINAIRSHLAEFGIVAPVGRNGVEQLLGVVADSNDKRLPEVARACVAALGAQLRVLKVQILEFDRMIRAWHRSSEASMRLDQVPGVGPVLATALIASVADPKAFRSGRDFSAWIGLVPNQNSSGGKERLGNISKRGDRYLRSLFTTGALAVIRYAKIHGTKHRPWLTSLLARRPTKVAAIALANKLARMAWAMMAKGERYKEPAALAA

SEQ ID NO: 453840 - protein, 385 aa, unidentified
MITPKDRQVRTFGTMTQDLLELGEWLVAEGVTHVAMESTGVYWKPVFNLLEGSELELLVVNARHIKAVPGRKTDVKDAEWIADLLRHGLLQASFVPNRDQRELRELVRYRRTLIEQRAHEVQRVQKVLEGANVKLSDVATDVMGVSGRAMLRALIEGEQSPQALAEMAQGRLKRKRGSLEKALRSSVGAHQRYMLGHLLEHIEFMEREIKELDQAIGERMRPFEAAIARIDEIWGIGRRTAEEILAEVGLDMSRWPTHKHFASWAKVSPGNNESAGKRHSGRTGKGNRWLHSTLVEAANNVSRNRASYYGAQYHRIARRRGRKRALVAVAHSLLTAVYHMLRDGTVHQDLGAEYFDSLDRERATHRAVQRLRRLGYEVTLRPVAA

SEQ ID NO: 453841 - protein, 320 aa, unidentified
MLSFCGIDVSKDRLDVMVLPDEYSSSVPNDPAGWAILVEQLRGFSITAIGIEASGGYERGAVRSLQAAGMPVRQVNPFKLRQFAKASGVLAKNDPLDARMIASFVGIMPTRPAQRTTPAAEQLVEMLAVRRQLSAEKTAAENASRLLEDLMLQRLSRRRIARLAADIELLDKRLVESVATDATLAHRYRLLTSMPGVGPVLACTLIALLPELGGMSRKQVAALVGVAPYAFESGTLKGRRSIWGGRANVRQVLYMAAMSASNWNPVLKLFHDRLKGAGKLPKVVIVAVMRKMITTLNAMVRDDIAWADRLSGRHSVTTAR

SEQ ID NO: 453842 - protein, 346 aa, unidentified
MEHYAGIDVSLESASICVVDASGRIVREAKVASEPEVLIRWFGGLGIAVARIGLEAGPLSQWLYAGMRDVGLPVELLETRHVRAAFKAMPVKTDRKDARGIAQLMRLGWFRPVHCKSLPAQEMRALLATRKLLQTKNHDVEMSLRRMLRGFGLKVGPTTPRTFPSRIRELVVGHATLSTIAEALLAARGALFEQWQKLEKRLRSLARQDRRVKLLMTAPGVGPIVGLTYASAIDDPGRFRSSKAVGAHFGLTPKKYQSGETDVTGRISKIGDSGVRTALYEAANVILTQPVKGSTLKSWGMRLAARAGMRKAKVALARKLAVVLHRMLASGTTFLADKAAPAAAHQ

SEQ ID NO: 453843 - protein, 341 aa, unidentified
MFYVGLDVHTTQITVCVLKNNGKVHKRWTVRELKQLIETLSKLTEPFQVCFEASCNYGWLSEALKKVALRVVVAHPGQLRLIFRSHKKNDRNDAEKLAKLLYVDQLPEVHVPPADVRAWRELVTFRKRTIEKRTRAKNGIRALLRSLGIKAPTRPGLWTKAGMQWLKELTFEQSLLAIKRDILVQEIDFLTTQVQRLETELKKFSRDNPAVFQLQSIPGVGLRTAETMVAFIDDPHRFKSSKQVGAYFGLVPTQDQSSDKNRLGHITRQGSAAARAMLTEAAWQAIRRSATVRAYFERIQRDDPARKKIALVATSHYLSRVMWAMLKHGTLWKEAVPAVSA

SEQ ID NO: 453844 - protein, 411 aa, unidentified
MRVHHNVCCRIDVHKKSVTACLMWGPADKEPEFEIRRFGTMTRELQNLAEWLKQAGCEAATMESTGSYWRPVWNVLEGQIAKLILANAQHVRALPGEKTDRKDGKRLAELTRYGQVRPSYVPPRAILELRDLTRYRSKLLSAGSSERNRIQKVLEDANIKLGSVLSDVFGVSGQKMLQALVKQDSVATAKVAQLAQWSLKPKIEAIQQALEGKLTDHHRFLIDVSMRHMRFIEEQLIRLDEEIQRRLQPYQEEYALLQTIPGIKETGAARILSEIGADMSPFADGDHLSSWGSVCPGNNESAGKKFQSKIRKGNVHLLSALTECAWAATKKKDCHFRNKYYRLKSRRGSQRAIVAIDHAMLKCVYVVLSQRKPYEEPKPTSLTEAQKQRKASSLCRQIRALGYDVKIQKTA

SEQ ID NO: 453845 - protein, 384 aa, unidentified
MKQLKSLEKNEVIFIGIDLHKRAWHVTIRTAEIELFSGSIPGTWEHLHNLLNRYKSSNQIAVYEAGYFGFWLYDKVVEHGIKCIVTPPSLIPIEYGNRVKTDRRDSRKLAHFLAKDLLKQIYVPTVKERYHRQVIRRRRQLIGDRVRVQNRIKAELRLNGVNLPEPVGKWTEIYFDNLCRIKFSDRWMQESFNRLLEQYVFLDNQITKQTQLLKELAEKSLYKKRVEILRSIPGIGIISAMELLLELQDINRFRRADQLAAYVGLTPSQYSSADKIRMGRITCIGKNSLRAILVQAAWCLIRKDGIMRERYERIKARSGGKRSIVAIARQLLIRMRRILLDGVHYVPGLVSPSGMVETPRLQAKKSLYLSLCDVIKQEPIPRQI

SEQ ID NO: 453846 - protein, 371 aa, unidentified
MKDTLKYVGLDVSKEKIAVAIAEEGREEPRYFGMIPHTTEAIKKLVKKLGDTESLRVCYEAGPTGYPLCRLLLSLGVHCDVIAPSLIPQRPGERIKTDRRDSIRLAQLYRAGELTNIYVPTPEDEALRDLVRSREDAKEDELRAKHRLTKFLLRNNLKPLPGVNKWTKKYREWLDALKFEISALRVVFQEYYHQLKEIEQRILRLEKEIGIQAKEGIHAPTIQALQALRGVALITATSLVAEIGSFKRFATPRQFMAYVGLIPSEFSSGESRRQGKITKTGNRHVRRLLVESAWSYRYQPAVKGELKKRINGLEPTIQAISWKAQNRLNKKYYRLLSRGKESGKAITAVARELAGFIWAITNELEDTRSRT

SEQ ID NO: 453847 - protein, 347 aa, unidentified
MRFYNRQHRHYCGIDLHVKTMYVCILGATGQVLVHRNVKATPDAFREIVAPYREELVVAAECMFTWYWLADICATEGIAFVLGHALAMKAIHGGKAKNDKLDSFKIATLLRGGLLPQAYVYPAAMRATRDLLRRRLHLVRKRGQLLAHIQNTRAQYQLPEFGRRLAYPANRTGVSEHFPDPIVRKSIDVDLALLERYDGLITDLELTIVREAKQHDGDAFHRLRSVPGIGKVLALTILYEIHDIARFDRVQEFASYARLIKCAHVSAGKVHGSGGAKMGNVHLKWAFSEAAVLFLRHAPGGKTFLGEIEKKHGKGKALSILAHKIGRAVFYMLARGTVFSIEKFRAA

SEQ ID NO: 453848 - protein, 376 aa, unidentified
MREKLRFLGLDVHAETIAVAVAEPDGEVRSLGTIANREDSVGKFIKKLGPAEQLRAGYEAGPTGFVLYWQLTQLGVECAVVAPSLVPKKAGDRVKTDRRDALKLARSHRSGDLTAVWVPDEDSEALRDLVRQREAAKQDQLRARHRLTKFLLRTGRRPTLGLKAWTERYMAWLEQIRYTQPAQQATLVDCLNEVEHMSARVKRLEEAILEVVKLAPQSMQEVIRGLQALRGVAHISSVTIAAELGNISSRFESARKLMGYCGLFPSEDSSGKRIRRGGITKAGNAHLRRIVVESAWSYRHLPRVGAKLRKRQQGVPAEITEIAWKAQNRLHKRYMKLTMAGKDQRKIMTAVGRELLGFIWAIGIKAEAACQQQLAA

SEQ ID NO: 453849 - protein, 320 aa, unidentified
MTYIGIDVSKDSFVAAYPAKSGYTTTTFPNTTSGVRRFIQSLTEDCHCVMEATGNYSMLLLYLLQESDIAVSMENPQKIKHFARAMLSTTKTDDIDAKLIAKYGEKMEPQPYKIPSESVILLKQKRTVLRQLKKQLTMMINLQHSLSVLPKQDPTAKVATEQTIKFLRKQISKMEEEITKLSNKEFKRQMELLTSIKGIGEHIAAAIITATGGFTYFSSAKQISRYLGLCPTYEQSGTSIHFKGHINRNGDTHLRSQLYVVAFASIRFNTACRETYERLRSRGKSGKAAIIAIANKLIRQMFAVVMNDRPYIDGYVSSLA

SEQ ID NO: 453850 - protein, 354 aa, unidentified
MATTSRQKTLAFASIGIDIGKDVFHLVGFDLEGRLVLRKKIKRLALVSVFEHLPASIVGMEACLSAHFVSRTLRKLGHEPRIIPAIYVKPFNKGQKNDYNDAEAIAEAALRPNLKLVKEKTQDQLDLQALHRVRSRLISRRTATINQIRAFLIEQGIAVRTGAHALRQSLFAILENRADEISPRMSDLIVGLYEDWLWLDERIESITGEIEMISKAEVDCQRLMSVPGIGPIISTAVVAAIGSGEAFGRGRDFGAWLGLVPRQYSTGGRPILGRISKRGSKYLRTLFIQAAHVIMMRPHNWQKFSFGPWLTEAATRLHRNKLATALANKLARIAWSVLANRKSFDANRNQIEAI

SEQ ID NO: 453851 - protein, 409 aa, unidentified
MKIAGIDVHKKVLMVVVMDSSAPEEKPARRRFVTLPSELQRFRMWLQEQGVEEAVMESTAQYWRSVWLELEPHMRLHLAQAFSNRAPRGRKHDFKDAERLVRRLIADELILSFVPDGEQRIWRSLTRMKVQLTRDRVRLQNQMECLLEEMRIKLSIVVSNLLGASGHRILHALAQGETDPKKLAELGDERLHCTEEQLVDALTGRVQPMHREMLALQLQRLQLIDQQMAQLNRMIAQAMKSHQDAVIRLAEVPGLGVDSAQQIIAEVGAQAGTFSSAAELTSWVGTSPGKEESAEQNHSSRCAKGNKYLRRVLNQAAHAALAKKGSHFQTVFRRLLPRLGYQSAVWAVAHRLCRVVWKILHEGVRFIEQGREVGPREKKKRAQMLARALRKLGYEVTITPINQLAAKPA

SEQ ID NO: 453852 - protein, 340 aa, unidentified
MGDITTIGLDLAKSVFQVHAVDEMGSVVMRKRLRRSQVLAFFAEIPPCLIGLEACATAHHWARELIALGHETRLMPPNYVKAYVKRNKHDVADAEAICEAVRRPSMRFVPIKTAEQQSALMMHRARDLLVRQRTMLVNALRGHLAEFGLIEAQGLHKVAKLIAIVTNENDGRVPDIARQVLQVMVHHIEDIQVRIVGLEKQVLAWHKSNPVSQRLATIPGIGPIIATAIAATVTDPNTFRSGREFAAWLGLVPRQNSTGGKARLGGISKRGDSYLRRLLVNSAHTVLLCSKQAKTNPWLTSLLSRKPRLVAAVALANKTARVAWALMSRQDTYRHAAATA

SEQ ID NO: 453853 - protein, 306 aa, unidentified
MQNITLISIDLGKHSFHIHCQDKSGKVLLRKKFTRTKLIEFLAGCASSTVVMEACAGAHFMARRIADLGHEAKLISPQFVRPFVKSNKNYFVDAEAICEAASRPSMRFVQPRTEAQQAMRALHRVRESLVSDKVKMTNQMHAFLLEFGISMPTGVAVVKRLSTVLAENELPPYLAQLLMRLHAHYIYLVGQITELEIALEQELSRDEVGQRLQTIPGIGPITASVLSSQLGDGKQYSCSRDFAASTGLVPRQYSTSGKNTLLGISKRGDKNLRRLLVQCARSFIQRISQEGWRIGSGRCWQENTPA

SEQ ID NO: 453854 - protein, 383 aa, unidentified
MDQCAPYPLRGRAARDGVCVSVRVLRDVLRKADDMNHNVAGIDVHKKVLAVAVGKATDDALVFERKLFGTVGRSLAELAEWLKERGVKEVVMESTAQYWKPVWLALEGSFDLHLAQARSNLAPRGRKTDFRDAERMVRRLLSGDLTLSFVPSAEQRQWRLLARSKYQLRRDRVRLQNQLEGLLEEGRIKLSSVVTDLLGLSSLRILRALAAGENDAVKLAALADKRLRVSGEDLAEALRGSLTRIQRLLLNQFLTRLDAIDGQIRELDRTLAEEMEQYSDAIHRLSQIPGVGPDAAAQIIAEIGPKAAAFAAPEKLASWVGVCPGRQESAGESTSNRSPKGNRPMRRILTEWPSPRSRPKTATFRKYSEGWYPVWASTRRFGR

SEQ ID NO: 453855 - protein, 366 aa, unidentified
MKTIAYVGIDYHVNVLAIAVVVNGQKGLYETIRISNNDKTIKRYMKKLSNTFQIKACYEASNSGYAFQRKMALWGYDCVVIAPSLIPKKPGNRRKNDFRDAKDLAQNYAKDMLTKVHLPSEKEEALRSLIRCRLSFKESAKRVKHQINSLLLSQGFRWPKSKWTQQHRKWIFQIKLPVRHLQQALDEYFSLLQYLESRLDYLEQEIEQIASSSFYASSVNKLKAFKGISTLTAMVLIAEITDFRRFASPRALMAFLGLIPSEHSSGDKQRGGPITKTGNSRCRKLLIESVQHYSKRPNISNKMRQELAQVDPHSANIAIKSLKRLHKRYWSLTMKGKIRPVVITAIAREFVGFIWSIMQPVPVEAC

SEQ ID NO: 453856 - protein, 501 aa, unidentified
MAQRIVASRREVGEHVKESRELFRRPSLAAEGVNVNILYRRCAGLDVHKKSISACLRNRVHGHKVDVKTAEFGTTTQELERLRDWLKEHRVKHVAMESTGVYWIPVWNVLELARYGFDLMVVSPQQVRALQGRKTDRIDAQRIAEFLQYGLLRGSFVPPRPIRELRDLTRCRVHLQQDRNRVINRIGRLLETANVKLGSVISNIVGASGLSILQAVARGIRDPEKLAGYKVGNLKCTHEELVRALDGRFNEHLRWLLRDLLDKLAYLDRKLAELDARTRESMEPYMPVVRRLCTLPGVDYLAACAMVAEIGVDMSVFPTANHLASWAGLCPGNHESAGKRLSGRTRKGSRYLRRLLIQNAWGVARRKNCGLTAVFYKIASRRGMKKAAMAVAHKILVIAYYIIRDAVEYKDPGGDYLDRRDPERTAKRLLARLERIGFPVDPNLKAILATRRHRSKAPRPPIPLEQASGCPQCAGWGIPCIHARNQKRPPESGASNSEHSG

SEQ ID NO: 453857 - protein, 400 aa, unidentified
MSVVGWDWASRAHDVTVLDDAGAVLDRWAFPHTEAGWVTALARLRRHGDPGGLPVIIEKTSGLIVDRLLAAGHPVVPVHPDSFHAARPRWGASGAKSDPGDSYKLADYLRTDRHRLRRLEPADAGLRELQALIRLREDQVRARTAATSQLWAMLGNYWPGPRDLFCSLASPIALAFRTAYPTPQAAARPGEARMAAFLRRNSYRGGKSPALLLARLRAAPLAPVALPAATLTAMAGAHVRQLRSLQAAITGIEHLIATRVAAYPRTRLLARLPGVGTLNLAQLLAEVGPILDRASSAGQAASECGTAPVTRASGKTAGVYFRWAASTRARKAITAFAHNARMQSPWAARLYADARARGKRNPHATRIVAPAWIRVIWACWHTGTPYDPAAHRAARQALTS

SEQ ID NO: 453858 - protein, 353 aa, unidentified
MSDDKYIAFDVHQATTVVSVLNGAGREVSATILPTQAQPLLGFLQGLRGKLHLTFEEGTYSAWLYDLLEGRVGELLVCDPRHNALLKEGNKTDAGDARKLAELLRAGMLRAVYHGSRSLRSLQELACSYEALVQDSTRVMNRIKAFYRSRGIDCAGRGVYTRRQRASWLERLPAGASRLRGELLHDQLDDLRSLRRKARRALLEESRKHTVAARLREIPGLGPLRVALLIARVQTPHRFRSRRNFWTYVGLGLVRRGSAEYGLVGGHVVRRARAVNPRGLNPNHRPELKELFKSAALTAIRRPGPFKDYYDPRAQQGVDPAILRVTVARKLAALTLSLWKKGGHYRAEGVKQA

SEQ ID NO: 453859 - protein, 411 aa, unidentified
MDKIYDKCCGIDVHKKLIVACFRCGKKQEVREFGATTRELLELADWLKDGGCEMVAMESTASYWKPLYNILESSDLNAIVVNARHMKAVPGRKTDVKDAEWIADLLQHGLLQPSYIPDKDQRELRELVRYRKSLVGERTRELNRLQKMLEGANIKLSGTVSDINGKSARSILEYLLTGKSIDGSKYDEMYEQKIIAHNLKATKEQIVDDLNGVMSPLQRRMMKELLVHLDELNIHIKNLDDEIDNFMKPEEKQASQAIQDVTGIGNTSAQAIISVIGSDMGRFPTDRHISSWAGLCPSDNESAKKRKSGKTRKGNALLRTTLITCAHAAVKNKKSYFYAQYVRISAHRGPKRAYVAVAHSMLISIYHILKDGVVFKDLGANYYNQFNKERKINAYLKKLKALGWEAPIVAA

SEQ ID NO: 453860 - protein, 372 aa, unidentified
MNYNTVYVGMDVHKESFTFCAYTIDAEKGSHFQRTEADYKNVLKYLEFLRTVYGNDANFICGYEAGCLGYTLYHQLIEHHVNCVILAPTTMLEQCSRRRIKTDRRDAEIIAKCLAQHNYSPVHIPTATDEETKEFLRMRDDHKLALKKVKQQILAFCLRHNYRYDGNSHWTAAHIKWLKSLKPEALYKEILDEYLLTYTTLSDKLERLDKRIEELASKDEYRESVKKLCCFIGIKTHTALSVLIEVGDFQRFASAQKFASYLGLVPGEDSSGDEQTRLGITKAGNRHVRMLLTEASQCYARGQIGFKSKELKSRKAGNSPQVIAYADKANERLRRRYYKMVLGKSKKHNVAKTAIARELACFMWGMMTDHIT

SEQ ID NO: 453861 - protein, 393 aa, unidentified
MIQRKNAESEPVRIKKFASFIAISGLPACLNPDPDSRLASIVKVIGLSSSPFFLKSVKDKRIENFYFIGVDVLKKKLNFCVMFEGKVVHEEETSNHQGAIMSLLHHLEEDYGIASGQMLVCAEHTGQYTFPLACACKAVECRLWLENAAEIKYSSGVQRGKSDKVDAKRIAIYASRFQDKVRYYERPTEDIERLKQLESERTLYVTDFAKYKGQMKDQKEYMPKSLYERKMKRLQALMDDLEEAIQSITDEMDEVIASCPVLFRQRELLMSIDGVGRVVATNMIIATEAFTRFDDPRKFNCYAGVAPFSYSSGSSQHSKARVSHRADKVMKRLLHLAAVAVTHRIGGELKKYYERKVAEGKNKMSVINALRAKIVARMFAVIKRNERYKPILS

SEQ ID NO: 453862 - protein, 341 aa, unidentified
MLIIGCDYHPSVQQIAWIDTATGECGERRLTHCAEAEQFYRDLKQKGVRVRVGMEATGHSRWFERLLAELEFELWIGDPAQIRAKQVRKQKNDRRDAAHLLKLMLENNFPQLWVPTPQVRDVRQLVLHRHRLVQMRTRVMNQLQAIAMNEGVRRKRGLWTRQGRAQLEGLQLPPWTSRRRQELLEVLDRFNPSIDELTKAIEQEAQRRPEVERLQTHPGVGPITALAYVLVVGTPERFACGKQVASYLGLIPCEDSSADHWRLGHISKQGNALLRFLLVQSALSAAHLEEEWRRKYVHLSMRRHHAIAKIAIARKLAVRLFWMWRRGWDYEQLKKFGANAG

SEQ ID NO: 453863 - protein, 395 aa, unidentified
MFIVGIDVAKRSHEVCMITSDGQTVQRPFSIRNNCTGYNLMLEKIRKHTNIKSQIVFAMESTAHYWLALFTRLRKDGYHVILLNPIQTSAMRDMFIRKIKTDAKDSFIIAELIRFGRYAESNVAQDRLLALKELCRNRFYLVDMAGDLKRKLVALIDRVFPEYEAQFDTIFCKSSVALLKKYPTPQKLSNAHLDKLTELLWNSSNGHFGEWKARELKELARNSFGVEDCDGAYSTLILLMLDQIQSLSGKADALEKEISRLFQSFDTTVTTIPGVGPIIGAVILGEVGDISRFSSADKLAAYIGVDPSVNQSGEFQAAHAHMSKRGSPYLRRCIWMASQVAVQRDPMFRAYYEKKAAEGLKYMTIIGHVTRKMTTVIFAILRDHKVYEPVLPTAA

SEQ ID NO: 453864 - protein, 373 aa, unidentified
MNNNTVYVGMDVHKDSFFLCCYTNEKEKAEFPQKADAHYSKVINYIEAMRFHYGDDALFICGYEAGCLGFTLYHQLTDHKVKCVILAPNTMLQQKGRKKIKTDKRDAALIARCLAHHDYSPVHIPTDQDEQTKEYIRMRNDHKTALKKIKQQILSFCLRHNYRFDGTKKHWTQAHLKWLRSLKPEGLYEEILKEYLLTYDNLTDKLERLDKRIEELSADEAYHENIKKLSCFIGVKTVTALSILTEVGDFRRFSSARHFASYIGLTPGEDSSGDDKKRLGITKAGNRHVRSLLVEAAQHYGRGEIGYKSRVLKARQEGNAPEVIAYADKANERLRRRYYRMVLKNNKKSNVAKAAVARELACFIWGMLTSNEG

SEQ ID NO: 453865 - protein, 424 aa, unidentified
MNLTQNDRLKQVTSDTLIVGVDVGSQTHFCRAFDWRGFELSRRVFKFSNTGMGFLTFLRWAEELMNKTEMKKVIVGCEPTGCYWLTFQKFLQDHDIQLVTVNPFTVNRSMELDDNSPEKSDLKDPKTIALLVKDGRFSTSYLPRGVYAEIREASVCRDQIMKQHVRLSNQIQGWLQKFFPEYFECYTDWDSTSGLMLLREAPLPQDILKIGAGGINQIWRDAKVRAAGIKRAQTLVEAAQNSVGLEAGEAARLEIWVLVNDYILKAEQLKRLDEYLEEKIKEVPNVEKLLAIKGVGMSTVIGFIAEVGDIGRFTDPKQIQKLAGLEIVKKSSGKKKGQPRISKRGRRKLRRTMYESARALMTWNPAFQDVFLYYRNRTKNPLGGMQAKIAVACKAIRIFYVVLQTGCDFDEEKFRKDIIRPEAA

SEQ ID NO: 453866 - protein, 359 aa, unidentified
MFAVTNAIPMDVIIGVDTHKDVHAAAAISGAGVYLATITVPASSNGYGALEAWAKSMGAVQAFGIEGTGSYGAGLSRFLRERGHTVVEVNRPNRQLRYQQGKSDAVDAESAARAVLSGQAVGQPKSGTGTVEMIRHLKIARDTAVKARTQAMQTLKAIIVRSPDALREQLDQVSGKMTLLRRLAALRPGPLTSTLASAKASLRSIARRWLLLDAEIKQHDAHLETLTAARAPELLEAHGMASGTAAEMLLLVGDNPERIHSEAAFAKLCGACPIPASSGKTIRHRLNRGGNRQANAALYRVVIIRMRGHQPTLDYVRRRAAEGKSKSEIIRCLKRYVAREIFGYLCRKPALADEAATSS

SEQ ID NO: 453867 - protein, 373 aa, unidentified
MGWTGRAYRRTLHEGRPARGTEPCPQLPLPPVATLGIDIGKNSFHLIGLDARGGIVLRQKLSRGQVEARLANMPTCLIGMEACVGAHHLSRQLLALGHVVKLIPVQFVIPFRKSHKNDFRDAEAIAEAVQRPTMRFVPTKTVEQLDLQALHRVRSRLVGQRTAVINQIRAFLLERGIAVRQRLRSLRQALPDILVQRTDVLTPRRTHMIEGLMQDWHHLDDRIEAVTEEIQALVAADEACQRLMSVPGVGPIIASAMVASIGNGAAFSRGRDFGAWLGLVPRQNSTGDRTVLGRLSKRGNSYPRSLLIQAARVLLLWPAKWRQHSFGEWLTAASMRLHHNVLAAALANKLARIAWSVLSQNRTYEPRTAAMMG

SEQ ID NO: 453868 - protein, 394 aa, unidentified
MDEQESPRVVIGMDPHKRSVTIEVMTADESVVGGGRFPTDAEGYTRLPAYARQWPERVWAVEGCAGIGKHVADRLVADGEDVVDVPAKMSARVRIFATGQGRKTDATDAHSIALVGVRMSGLRPVINDEQLEVLRMCVDRRRSLGEEHTRKICQLHKLLLELIPGGAKTFLSATQAKELLKKVRPTTAAGKVRKAHALELTADLATIYARTKAADKELKALVAETGSSLMDLHGIGPSGAARLLVEVGDITRFPDRNHFASWTGTAPIDASSGEHVRHRLSRGGNRQINRVLHVMAIVQLRTRTTEGRAYYDRKKAAGKTSMEALRCLKRRLSDLVYKAMLDDLARRATTGPGGQRGDDSDSSATGSQPAAGSSDKPLPGPATTKPRTTLPAAS

SEQ ID NO: 453869 - protein, 407 aa, unidentified
MPRTSRAVIGGVDTHKDVHVAAALDDHGVLLAATSFPTTSAGYENLRRWRAGFGPLQRVGVEGTGSYGAGLTRHLRAAGIDVVEINRPNRQLRRRRGKSDTVDAEAAARSVLAGQAAGIPKSSTGPVEGLRALRVARRSAVKARTQAGNQIRDVIISAPQELREQLGRLSLGAQVARAATWRPGPASDLLQATKRSLRHLARRHRALSTEITELDRDIAGLCAHTNPALLATDGVGPEVASTLLVAAGDNPDRMHSEAAFAALCGASPVEASSGKTIRHRLNRGGNREANNALWRIAMVRLAHHHPPTATYVRRRREQGKTDREILRCLKRYIAREIFNVLTNPNKVPRATELRQHRLAAGISLTAAANQLGTTAIRLSRLERGILHAAELATTYQNWLNAQPPHAA

SEQ ID NO: 453870 - protein, 330 aa, unidentified
MTCFLGVDVGKTTLVAAIWQDGQGRVLGSFPNTPDGFGALVAALPAGPPVRLVLEPTGGYELALATWAAAQGWMVCRPNPRHVRDWAKGLGRRVKTDRQDAIILARYGAEREPPAWTALPAEVSELESLLRRRDDLEQMIRQERNRQQQLTGRPGVAQAVPPSLQKVLGALEEALAEVEAAIAAHQRQHAALAEAVRRVQTVPGIGKRNSLWLVVVLYRWHTLTGGVGTAKGLTAFLGLDPTLHESGTSVRGPRSISRMGMAQVRRLLFLGALGGVRGKNPLRDFYQRLVGRGKPKVLALVASARKILGWAWAVFQHQTTFDPAKVAPAS

SEQ ID NO: 453871 - protein, 354 aa, unidentified
MSQKLNTAITVAGIDIGKNSFHVVGLDKHGAIALRQKWSRGQMEARFANMPLCLIGMEACVGAHHLSRKLQALGHDARLMPAKYVRPYSKGQKNDFRDAEAIAEAVQRPTMRFVATKTADQLDLQALHRVRERLVGQRTGIINQIRAFLLERGVAVRQGLRFLRAELPTILATRTDVLSPRMLHIIEGLADDWHRLDERIEALSSEIGALACGDPACDRLMTVPGIGPIISSAMVAAIGNGAAFAKGRDFGAWLGLVPKQISTGDRTILGKISRRGNRYLRVLFVQAAWVVLIRPKSWERYGLKPWIEAAKKRLHHNVLAIALANKLARIAWAVLNKERKFECIRTNKMSPRAA

SEQ ID NO: 453872 - protein, 385 aa, unidentified
MPDVTPCLHPGDVRRWVAIDQHKFSIVAGVLPPDGGKPEVCRIETTEKAIRRFIEKLGGPAGLSVCYEAGPGGFALWRLLTKLGVGCDVVAPSLIPVRAGDRVKTDRRDAKKLVSLYRAGLLRFVHPPTAELEGLRDLLRARDDVRLARMAARNRVLKQLLRHGRIFREGKTAWTKLHRAWLARQRLDDPLAHEALEQLLIHLDGIERQLATLDARLSEIASGERWAGQVAILTRFRGVSTLTALGLIAEIGDFHRFSHPRELASWLGITPSEYSSGPQQHRGHITLSGNRHARRLLIEAAWHYRHAPRRPAAGPPPDERAWQAQVRLHHRHRHLTEHGKRSTVANVAVARELIGFLWAAMTDQPLRATDTTTTTANHELQETAA

SEQ ID NO: 453873 - protein, 427 aa, unidentified
MSQPKESLVREPEFAAYVGIDWADKKHVWSLQVAATGKREEGEVEHSPEAVEEWINGLMVRFPEQQIAVCIEQSRGALLNMLSKYEQLVLFPVHPATVSRFRAALYPSGSKDDPKDADLVLDLLVHHRKRLRRLEPDTVATRQLRFLVEQRRSLVDQRTAQSNRLTGALKQYYPQILKWLEDPASPLVAAFLARWPTLEMLQKVRPGALIRFFHQHNCRSEALIQQRLEQIRKAVPATRDQAVIESCMVQVHWLCQIIALLSRAIADLDERIRSVAQAHPDYAVFDSLPGAGTVMVPRLIAAFGTQRERFSNASQVQSFSGIAPVRESSGPAEWIHMRWACPKFLRQTFHEWAGHSIAHSAWAQAYYRQQLAKGNGHHAAVRSLAAKWIRIVYRCWIDHTPYDEHIYLNSLRRHGSPLVHAIAKAAP

SEQ ID NO: 453874 - protein, 363 aa, unidentified
MDVHKKTYSLCALLKETGEIIGETKIPADVSLIIKFIENAKKSVDSDDVQIKTGYEAGCLGYSLYWQLAAKGIECDILAPSTMHRSAKNKVVKNDRRDAKNIAANLANGTYKSVYVPTDEDVEIKEYIRMMHDFKIELKKVKQHINAFLLRFGHHYPGKSKWIPAHIKWLKELELSDMYREILDEYLSQLEILSEKIERFKHRLEELSQKETYNEKIGQLRCIKGIDTTAAMTMHAETSDFDRFPTANAFASYCGLTPGEDSSGESYHRLGITKQGNSMIRTTMVEAAQVLVRGTIGKKGKKVKSKQKDQDVKVIDYADKAVVRLQKKYHRMIFRGVKRNIAITAVARELACFVWGIETGHIS

SEQ ID NO: 453875 - protein, 393 aa, unidentified
MNTTTKTGSTTASTTTILAIDLGKYKSVACVYDEAGGEFRFTTFDTTRSEMHRLLTRERPAVVIIEACLLAGWVHDLCAELGIRCLVANTASEAWKFKHLKRKTDRDDAQRLAQLYLLDQLPTVTLPPAAVRQWRSLIACRQVLVGRRIAVQNRIRALFVAQGLPAPRGAKAWAGTGLAGMASWAKPLGDCAADELWRGLLELSLTEYRQLCELIDQAESKLDALGKQQADVVLLQTAPGLGPRTAETVAAYLHDAPRFQTGKQVSAYSGLVPRQHQSGEMDRRGRITKRGPALLRKMLVECAWCMIRYNAWARGVYLRLTGGGQRRKKQAIVALARKVLVRCWAMLRDRKPWHDPQTGPKPTLPPSKQRRQAEAQQRRQDKQQAALAQRTTS

SEQ ID NO: 453876 - protein, 315 aa, unidentified
MTEGERFVGIDVASTHVDVCVRPSGEAKHFATDDGLEELVAYLTSQGPTLVVLEATGGYETPIAAAIATAEMAVAIVNPRQVRDFAKATGRLAKTDAIDAAALAHFAEAIRPTARPMPDEESRELSALVTRRRQLIEMRVAEQNRLRICATKKLKKDLEEHIKWLQKRIKDHDTEVGQRIRQSSVWRDKDDLLQSVPGVGKTFSATVITSLPELGTLDRRAISALVGVAPFNCDSGKMRGKRAIWGGRADVRAVLFMATQSAVRHNSRLSALYKRLVAAGKPKKVAIIACMRKLLTIANAILRDGSPWEPEKNLT

SEQ ID NO: 453877 - protein, 419 aa, unidentified
MSKQPVELAAFIGLDWADEQHAICLQEAGTTRREPLKLDQTPEALQAWIQQLRARFGGRPVAIAVEQARGALIYALMQVDFLHLYPVNPQTLAKLRQAFYPSGAKDDPGDAELLLEVLLKHRNHLRVWVPDDVLTRSIQLLTEGRRKLVDERTALTNQLTAALKMYFPQALDWFGDLHTARACAFLQRWPSLQQLKAATTSSVRKFYRRQGYRGEDKLEQLIKNIQQAQPLTEDPAVVLASTMMVHALVKQIPSLTDSIEEYDRQIASLFKEHDDSTLFGSFPGAGPTLAPRLLAAFGSDRNRFEYAAEIQQLSGVAPVTQKSGQACWVHWRWACSKFLRQSFHEFAGQSILKSVWARAYYQQQRQRGNSHHAALRALAYKWIRIIFRCWKDRTPYDEATYFKSLQLRGSNLASALKTI

SEQ ID NO: 453878 - protein, 350 aa, unidentified
MLIIGCDLHTRYQQIAMLDKETGEVVEHRLEHESGETRAFYASLPCGAVVGIEATTPAHWFERMLTEFHHELWVGDAAQIRAMSVRRQKHDPRDAWHLMDLMASGRFPRIWTPSPRERDLRQLLAHRDKLVRIRTAVKNQLHALALSQGLCRGHRLWSARGQAELQSLTLLPWAGRRRQDLRELLTPLDTTIAELDKAVAREAEAREEVKLLMTHPGVGPVVGLAFVLTLGAIERFPRSKQVVSYLGLNPREHSSGGRQRLGRISKQGNVMMRWLLVEAAQTAARFDPELHRRYHRLKFRRGSSLAKVAIARQLAVRLYWMLRNQKGYAQLVRMQGSPGSGVVDPGPSTN

SEQ ID NO: 453879 - protein, 427 aa, unidentified
MARQRKGEKHMTRMSRQWFAGVDWASSKHDVTLTDDSGKIVGRRIFPHSGDGLAQMADWLLRETGATPADVHVAIETPHGPVVETLLERGFSVYSINPKQLDRFRDRFTVAGAKDDRRDADVLASSLRTDGKAFRALAPADPAIVELREWSRMADQHGRDLRRYVSRLREQLQRYFPAFLALGGDDDAAWKLALLELAPTPAMAASLPRAKVARLLKAHRVRCHDADAVLAILRAPAPAVSEATIAAASAHVRAVLKSIRLAAEQLKEANATLDRLTDALAKPEENTSGQIVQRDAAILRSSPGIGRIILATLLAEAPQAVHERDYHALRCHGGIAPVTRQSGKSRYVVRRLACNRRLRNALYHWARLAIQQDARCRAKYEALRARGHSWARALRGVADRLLYVACAMLKAGTLYDANNGSEAIKPT

SEQ ID NO: 453880 - protein, 355 aa, unidentified
MQKYKLSFKGQNIYVGIDVHLKTWHVTTLTESGCKYSFAQHADAKELFDRLSKKFPDAHFKSAYEAGFCGFSVHYALTELGFENIVVHAADIPTTGKEKALKTDAVDSEKIAWALKRGELTGIYIKDKRYMDDTNLMRLRQRFIMDLSRQKNRTKHLLYTQGVTYPKRFSKNCTHWSRNFMKWLREEVELLSEQKLSLLLLCDQVENTRKAILKVTREIRRLSTTDRYKKNYDLLTSVPGFGLTTSMSMLTELDINIMRFSNERSFVAFLGLIPTCHDSGEKKVSGEKINRGNKQLGPLVVEASWVAIQRDPELSAYYSNCCQSMKPHKAIIKVARKLACRAYAVLKTKTRYALP

SEQ ID NO: 453881 - protein, 410 aa, unidentified
MLKIVYPNCCGIDVHKTFVVAVIAITNNQGITEYHRKRFSTFTNGLTQLRDWLEYYSCFDVCMESTGKYWIPVFNILEEQTNVCLAHPKYVKAIRGKKTDKKDAQWIADLFKHDLVASSFIPPLKIRQLRDLFRYRMKLTQLQVGEKNRYQNCLTWSNLQIASVVSDVFGKSAQAIIIKSILDNPQDKPNIEQLVHKRMKNKVQDLEIAMEGALTPEQAEKIRVIKAHYDALAISKEDLEQMIRELGQDYQHQVKLIQTVPGFKEDLSALRIISEIGCDMTVFDSAAKLCSWAGLVPANNESAGKKFSTRISKGGKYLKPFLVQVANAVVKSDKHPELRNKYLKLKKRRGHRKAISAICRRLLVSVYQVLRKQEDYNPVLQGLTEIRNPDKTMSVQDAVRFAQQHGFNVA

SEQ ID NO: 453882 - protein, 341 aa, unidentified
MSIKTLGIDLGKTSMHVVGLDADGKPVHRKKLTRTALIRYLSNLAPCRVAMESCAGSHDIARKADAMGHDAVLLPAQFVRPYTKGQKNDNSDAEAIAEAATRPTMPTVSIKDATQQEIQFLHRTRQGWIKQRTETANRVRAMLLEFGIVVPQRILNLRRALPGILEDAENGLPDGVRQLVGDHWQQLQELDDRIADITQRIERIPIKDARAARLTSIPGIGPMIATAMVAAVGDGTQFTQGRGLSAWLGLVPQQFTTGGKPRLLGISKRGNRYLRTLLIHGARAVLQQAHRGDDALRRWIQQVNGRVHRNKAAVALANKLARVAWAVLTRGETFRASAAAA

SEQ ID NO: 453883 - protein, 464 aa, unidentified
MRKARRSGRKPGKKIVDVTAGLEILRPHAAGIDVGNAEHYVAVPPGRRDPSVQTFGSFTADLHRMAQWLRACGVETVVRQATGVYWVALYEVLDSYGLQVQGVNARYTKTLPGRKSDVQECQWLQKLHTFGLLNNSFRPPEQIRVLRCYFRQRENLVQQAGTCIQQMQKVLTEMNLQRANVISDLSGVTGMRILQAILEGERDPYKLAALAAPGIRASRKELAQSLQGHGREELLFVLQQTHDLYLTFLPKISQCDGGIETHLQAMEAKVDEVARPLPAARPKNRLPKRKPIPPFDLRAELHRVAGVDLTQIDGINVQTAQVVISEVGVDMTRWPNEHHFSSWLGLAPNNDITGGKGIRRRPKKVLKRAARALRLAAQSLHHSRTALGAKYRRFRGRLSAPEAITAMAHDLARLVYRILRFGTEYHDKGLEHYERRYRETQIKWLQKQAAMLNMQLTPAQAVAR

SEQ ID NO: 453884 - protein, 409 aa, unidentified
MVHARCAGLDISKRDAKVCVRVAGAGRRKTVETVTTWASMTSQILALRDHLIAERITCAVMEATSDYWKPFYYLLEDAGFDVLLVNARHVKNLPGRKTDVADATWLAQLGAHGLVRASFVPPEPIRQLRDLTRARTAITRERSREVQRLEKLLEDAGIKLSAVASDILGVSGRAMLESLIAGNNDPAALADLAKRRLRSKIPALTEALTGRFTDHHAFLAQVHLDLIDQHTAAIDDITTRIEATIAPFHGFRDLICTIPGVSTLTADVIIAETGADMTRFPTAGHLASWAGTTPGHNESAGKVKSSQTRPGNPYLQGALGTAAMSCAQNPRTYLGARYRRIAQRRGPQKANVAIQHSILIAIWHMGTNGCLYDDPGADYFNRLHPERAKKRAISQLEAMGYHVTLTHAS

SEQ ID NO: 453885 - protein, 430 aa, unidentified
MDDREIIRLEQFRQLKKEIRGSEEHLIVGIDVAKQKHNAFLGTATGKTLLKRLVFENNREGFEKLLMHVESISASNGHKRVTFGLEPTADYHKPLAEFLINREHNLVLVSGVAVKRNRELLDGRWDKNDMKDSANVADLISQGKCLFYEYPTHVLRDLRSLLSLKRKFKKIEHGFRVRIRNHLLAQYFPELDRYYGHSDSENLAIVKWCLSPSKIAKMKYEDFFRLVTTRDRGLIQHQRLKAIWDSAHSSVGCSAGTATEFEAGILVDTLKQVRETIGNINEKVIEICVLFPEYKYLLSIPGFGPDVSAIVLAAIGDPFRFESGNQVLKTAGWDLSANRSGRRSDSVTPVISKRGKADLRYALYQAALIASTRNKHFTSWFIEKLKGREKEKGIKTKMRVKLAAKLLIIAWTLMKKKEPFNPELLKVKKN

SEQ ID NO: 453886 - protein, 317 aa, unidentified
MQESSIGIDVSKAKLDVYILPEKKFFTVSNDKKGFKALIKIFNQTNVRLVILEATGGYELACAYALIEKDIPVSIINPKRVKRFAGAKDLNCKTDKVDAKLIAEFAAVMKPEQRELLSKELRELKELINRRSQLVDEITTEKSRVETVMSKLVIKDIKSHLKQLKARIDRIEQEIKIRIKENSQCKFLYDFYISFVGIGDITAAALIANMPELGFLNRNEIAALLGVAPYNSDSGQKSGKRFVKGGRKDMRDIFYMATLSACFHNPVIKDFYRRLLAKGKMQKVAITACMRKFITIINAKLKELIVFDHFLSFSTCI

SEQ ID NO: 453887 - protein, 385 aa, unidentified
MERNDLSRALVAFDQNSTIVAVIELSLNTWLVSGLVPGVKRQPLKKQTADPERLVALLHRWREEATKAGRAIDRIAVAFEAGRDGFWLARWLRARGIEAYVIHASSLAVSREHRRAKTDRLDTEALMRAFLGWLRGEARHCRMAAIPTLAQEDAKRPSREHVSLVTERTRLVNRMAATLVWLGLPKVNIKVRQAAEHLAALRTPEGEPVPPNTLAELRRDLERLAVIRAQIKAIEQARLERLQSAPAQGTHPMILMLAKILGLGIETADMLVHEVLTRGLRDQRAVARYGGLTGAPDESGNKRREQGLAKAGNGRVRRGMLQLAWRWLMFQKDSALTQWYRSRTADGRSDTRKTIIVALARKLLIALWRYVTTGELPQGVVLKVA

SEQ ID NO: 453888 - protein, 363 aa, unidentified
MFTERTSVGLDVHARSVAAAAIDGVTGEVWRTRLTPSYDHIRSWIAALPGPVAVAYEAGPTGFGLYRALTDAGVRCEVVAPSKLQKPCGDRVKTDARDALHLSRLLRLDEITAVSVPSADQEAARDLVRAREDCRGDLMRARHRLSKLLLRHGIVYSGGAAWTGAHDRWLRTVAAPRLRAPATQMAFDADYDHVLTMQARRGRLDAAIEHMATACEFTPIVRRVSCLRGVNTLTSFALAVEIGDWKRFTGNTIGSFVGLVPSEFSSGLARVQGSITKTGNTHVRRLLVEAAWHHRARYHVGAVMRARWDQAPAAARARGDQGNRRLHGRWIGFLERRKRPTVANVAIARELAGWCWSLAVMDD

SEQ ID NO: 453889 - protein, 338 aa, unidentified
MKTTTVGLDLAKNVFSLHGTDAHGNVTLRKTVRRSRLLELFAQLPPCVVGMEACSGAQHWSRRLLALGHTPRIMAAEFVAPYRHGGKNDSNDAAAICEAVTRPSTRFVPAKSVEQQAVLAVHRVRQGLVEERTALANRLRGLLAEYGVSIGAGIDRLRRALPEVLADGDNGVPGLAREVFADMGDHLRELDARIGLYDRRIAALAQASEPARRLMRVEGVGPVTATAIVASVGDAKVFRNGRQFAAWLGLVPRQHSTGGKQRLGTITKHGDVYLRTLLIHGSRAVLRVSSRHDDAKSRWVQNLRQRSHDNVAAVALAAKHARIIWALLARGHQYQPAT

SEQ ID NO: 453890 - protein, 351 aa, unidentified
MVIIGVDAHTRSHTAAAVDEHGRELATLTVGAGTDGLEALDAWIAERGPVQLVAIEGARGFGLPITRRLLAAGAEVVDVPTHLTAFGRRSSRSRGKDDESDAVTIARIALREPGLPRLRLSHLAADLKLLVDARDQVVAEGTRVRNRLHALLLALAPGYRDSTGALATAAALRRARRLVRAAEASDPVRARLALEAIRRLRAVEAEAGELEADIRALVDASGAPRLLAICGVGPIVAAKILGETHDVGRFPTAAAFAAHAGAAPVPASSGTTSRHRLNRGGNRQLNRALFTVAMVQARWDEQGSAYLARKRAEGKSPAEARRCLMRHLAGVVYRAMVLDAAAREHAPSRAA

SEQ ID NO: 453891 - protein, 351 aa, unidentified
MWFIGVDAHRALLVAVAVDDAGKDRGTWSGHNRDASWNELLIWAEELAGDTARIWGIEGSGNQGWGLAQRLVGQGEVVVEINARLTAESRNRSRRRDKTDEADARAITRVLRESADELPRVKLADSTSPLAILTRERESLQADITRQRNRLHAALLRVDPAYKQRIVASLTKSAGLEAVLDWDETELGPTEQVQLQSAQRIARRLLSLLADLETVSAELTARSRPVTGPLTSIFGVAELTAGMLAGYLGPDLRFASDAQVAQYAGVAPLEASSAGGTRHRLNRTGHRKLNELIHRIAITQARQYQPARDYVARRRADGKTWREAIRALKRYIVRAIYTQWKECLRLIGYSI

SEQ ID NO: 453892 - protein, 327 aa, unidentified
MTQPVLGIDISKATFDVVLLVGEKKIHHQFANNPEGFKQLNIWLHRNEASKVHACMEATGQYGDKLATYLYHGGHDVSVVNPARIKAYAGSRLRRNKTDKADAELIAYYCLKENPALWSPPETDFRDLQAIERYLEDQQAMLRQEQNRLESGVEAIWVVRELEKHIQFLKERIVETKKAMQDLIDTNARMKQQRDLLVTIPGIGVLTAAKILGEIRDITQFESARQLAAYAGVTPRHFVSGSSVHKKSRITKTGNINIRRILYMSAVSAKKYNQIVAPFCLRLLQKGLTPMQVVCAAIHKLLHLIFGILKTGKAFDPNYLQIPALTP

SEQ ID NO: 453893 - protein, 430 aa, unidentified
MAPISGECMMDNGRRWFAGVDWASQEHVVSLCDDLGKKIGERKFPHGGTGLTDMIAWLLKASGGKSEEIHVAIETPHGPIVEALLERGFNVYSINPKQLDRFRDRFTVSGAKDDSRDADVLADSLRTDTRAFRKLSIAEAAIVELREWSRIDEELKVEHGRLTNRLRHQLWRYYPQMLGLADDVGANWFLDLFEAAPTPEKAASVREKTVARILKSHRIRRFDAAHVLAELRKPALTVAPGTIEAATARIRGLIERIRLINGQLADAQRQLDRLCKTLSQPVADDDGETAPGQKTEQRDAAILDSLPGVARTVLATLLAEASDTLQRRDYHALRALCGSAPVTRRSGKSRMVLRRHACNQRLRNATYHWAQNAIQHDAISRAKYDALRAKGHGHARSLRSVIDRLLKVACAMLNSGTLFDPEFASKRAIG

SEQ ID NO: 453894 - protein, 387 aa, unidentified
MAAVMIGVDPAKRSHAMAVLDEREHQLAALQVGNDSAGYRDMVRLARRWPERTWAVEGAAGVGVQLAQRLVADGETVLDVPPKLSTRARIFDVGHGRKNDPGDARTVAVVAIRTSGLRRVVPDDEMVALRLLSERRRDLVRSRTQTVNHLHQLLMELIPAGAQRNLTAKKAKGLLATVRPRDVAGRTRRQLAVDLVEDLAGLDRRLKELDKRLKAAVAATSTTLTEIRGVGTATAAMILGEVGDVRRFPTRHHFASYTGVAPIEVSSGEIERHRLSRAGNRQLNHALHIIALSNKRCDPQGGTYYAKKIAAGKGKKGALRCLKRRLSDSVYRHLIEDQQQRTQRSPGGHLGATLQSSAAGSHPNTDTSEQPHTGLHKNPTPVLPASA

SEQ ID NO: 453895 - protein, 386 aa, unidentified
MPQPNDLSRSLAILDQNRTVIAVIEMSQSSWLIGGIVPGIERHPLKKIPVNEEALLQLLQRWRDEAVKAGGTITRIAVAFEAGRDGFWLARWLRARDIEAYVIHPTSVAVSREHRRAKTDRLDTELLKRVFLGWLRGEPDHCSMAAIPTLDEEDARRPNRERENLIGERTRIVNRMQSCLARLGIRAFRPTLRKAADLLASLRTPEGELLPPNTLAEMRRDMARLHFVVEQIKEIEVARRDRLQHAPEGQCSAMVRLLARVIGIGIETADMLVHEVLARNLRDRRAVARYAGLTGSPNESGSRRREKGLARAGNARVRRGMIQLAWRFLMFQKDSALAQWYRARTLDARRGTRKTMIVALARKLLVELWRLVTTGQLPVGVALRAA

SEQ ID NO: 453896 - protein, 351 aa, unidentified
MRRPKDKLIAGIDLHGNNLVIGVINQDGKRITHRKLDCELEQVEEFLRPLKPQLQSMAVESTFNWYWLVDGLQAHGYPIDLANPAQIEQYSGIKHADDKHDAFHLAELQRLNILPQAHIYDAELRPVRDLLRRRTNLVHQRTALMLSFKSLYSRTTGAEMPLARLKQMSPKEAPGLYEHPANQLIAQIQLEHIEGLDRSIARIEKAVLACAREIPLYEKLLTLPGVGKILGMTITMEVGDIGRFPTDGNFASYCRAVDSRRLSNGKQKGENNQKCGNKWLAWAFVEAANFARRSDENCRRWYDRKQAKTSTVIATKALACKLAKAAWHVMAHKTDYDPRRMFPELAPSQSK

SEQ ID NO: 453897 - protein, 345 aa, unidentified
MTEAYDGRQVVGMDLHRRRSVLVRMTEDGRKLETVRIENSPAALRAVIARAGNNPRVVVEATYGWYWAVDVLEAAGAGVHLAHPLGVKAFSYRRVKNDERDCADLADLLRLGRLPEAWIAPEPVRALREITRFRHKLVGQRTSCKDQVHAVLAKAGIPVTRSDIFGRGGGIWLDGLPLPQPYAGKIASLRALIAVLDGEIARLEEQAPAMLAGDRGYAAIRQLPGIGPVLGAVIAAEIGDITRFRNPGQLASWAGLTPRHYESDTRVIRGRVSKQGSRMLRWALVEAIQRQPAGTKPRQVKDAIIARRGPDARGIAKTAAARVMLTQVFYGMRDGYIRRAASQAA

SEQ ID NO: 453898 - protein, 345 aa, unidentified
MPSIAGGLDIHRKQITFDYAGLDTGEVQCGQVTPAGREHFRLWLAGRFEHPEDVAFAAGACTGWRYVAGELAAAGIGAHLAETAGTATARGKKRRAKTDRADARLMRDLLAGGRLPECWIPPPQVLECRALLEAYHDLRREHTAWIQRVHAALFHQGAPVFHDLSRAGAPAELAALARARLSPAGQQQVMLCLRMLEATGGELDGLRRQLLAAARHLHGAKVLADSIYGVGPVTALALTCWLGGAGRFTSARKAVRFAGLDITACSSDGKRSPGHLSRQGPPVLRRAVYEAGRTHARPAAPDHGYYAAVKDRKDGKRAALPEARKIIRRACHILAQLGDDALATV

SEQ ID NO: 453899 - protein, 420 aa, unidentified
MKVVYQTCCGVDVHKSFLVATIIKTTSGVQPSYTKKRFSTFNNSILQFKHWLIENNCHDICMESTGKYWVPVYNLLEDTINVTIANPKWVKAVKGNKDDTKDSKWIGDLFRLGLVPGSFIPKKDIRILREYTRYRYKLTSCKSSEKNRFQNALTVCNIALDSVVSDVFGKSATSIIDYLIEQSDNSIKHEEISSRLLRSLKSKSDSVIESIEGYQMSDSQKYRMRLVRAHMNYIISTINDIDTMIDSLIAPYENAVQLLCTIPGVDRNSAITILSEIGTDMSQFSSSKRLCCWAGLTPGNNESAGKKKSVRITRAGVYLKPALVQCAHAAVKSDKSPYYKLKYERLIKRRGKKRAIIAIARMMLTAVYHMLVTGEIFNPSDLYKVDMPQPLVEKQKLKAIKQALKLLKSEGIIPDSLEAS

SEQ ID NO: 453900 - protein, 372 aa, unidentified
MAIGITWVGLDAHKQFINVAMRTEGGDFVEWKVANEPRAVKRLAKKLVREAKGSEVRCCYEAGPCGYALQRQMMEAASVVVEVIAPTLIPRKPGDRVKTDRRDARKLCELLQAGLLTEVRTPTEEDEALRDLSRCREDLTEDLMRARHRMGKMLLRRNIRYTGGTKAWTRKHRDWLRSLSFENAALEAVFDDYLLAITQLEERIKTVDAQIETAAAQDAHRGAIGWLRCFRGIDMVTAFGIYSELYDFRRFESPRKLMGYLGITPSEHSSGGKPNRGAITKTGNGHVRRLLVEAAQHYRHRPSTGVKLRKRREGQPGGVVAIAEKAQHRLHRRYHRLVLRGVASNKAKIAVARELAGFIWAAMNHEQLGQAA

SEQ ID NO: 453901 - protein, 316 aa, unidentified
MEHAAKEASFVGIDVSKDRLDIHVRPSGRAFAVARDGTGLDQLVDDLRHLAPALIVLEATGGFELTVAAALAGAALPLAVVNPRQIRDFARATGRLAKTDALDAQVIALFAERIRPEPRPIASADRQVLAELIARRRQVVEMIGMETNRLHQARNPRVQRMLRATLKTLKAQLAELDRDIDDTIKRSPVWQAADDLLTSVPGVGDVTSHTLIADLPELGQLDRRRIAALVGVAPINRDSGQMRGRRTIAGGRIDVRNVLFMATLTAIRWNPVISRHYQALVDRGRPKKVALVACMRRLLGILNAMIRSSTPWQCAA

SEQ ID NO: 453902 - protein, 465 aa, unidentified
MKSKTNKSKKRKQKISIDQGWAPVNGHAAGIDIGAREHWACVPPVAASNAVRKFGTFTADLEALADWFQACGVTTVAMEATGVYWIPVFQILERRGLQVLLANARQTKNVAGRKTDAQDCQWIQRLHTYGLLQGSFRPADAYCVVRTYLRYRDELVGARSTQCQHMQKALQQMNLQLTQVLSDVTGVSGLAIIGAILKGERDPVKLSQLVDRGVRATPAAIQKALAGDYRPEHLFVLQQAFALYHTYEEKIQACDQEIVREVAQLPDRVDLSRQPLPARKKGRRAVLDQMAGQDMREALYRKTGVDLTAIEGIGPLTSLVLFTEVGPDVSRFPTEKHFSSWLGLCPDNRISGGQVLSSRTRRVVNRATDALRMAATTLERSPSALGGYLRRMKARLGAAEGVTATAHKLARIIYRLIKHGEAYVRQGMEDYEAKFRARRLAALKKTAKTMGFELIQTQALPSGVS

SEQ ID NO: 453903 - protein, 418 aa, unidentified
MKKSETFKLKSISSDTLLATVDMGMDSFTGYARCPDRSEIKTSDYANNHGGFQAYWEILVRTMEIKGLKQIVLGFESTGPYARPLMHFFEGKRVRLVQVNPFHTKKLKELTGNSPNKTDQKDPKVIADIIELGHSLSVVIPKGAAAELRQLSEARERANKRLTALFNQLHSLVFFSFPGFLQVIKDIKTKSALHLLKHYGNPQDLLALGPDSLIQVIKQISRGRFGPEKARALFEAATIWLSSGEGCDSVDLEIKEMVRAIENERSFVAQLESRMPQYLKQIPYSSLLLSMKGVGLITVAGIIGEVSDFTHFKTQKEILKLAGIDLYEISSGKHKGQRRISKRGRPLLRKLLFFAAMNTIRKGGTMHQTYQKHLTKGMPRIKALIAIARKLLCIMLALTRTQSVFSVNRKTGFTAAAV

SEQ ID NO: 453904 - protein, 360 aa, unidentified
MEKAHIITYSVTNAKGGSFMTKKVYFVGIDIAAADFTASIYQSPEQPVTTKEGFANTFDGFIMFGSWLESQKVHSSRCVICMEATGVYGEGIAYFLFTQGFRVSVEPPLKVKRAFDPVGHKTDPVDSRQIAEYAYRFRDELTLWRPKDEVIEKIRQLLAARELFTKQSVAIQNALGAYKKHVVQVSLINNAHGRILKELKKHIADIDKELAQLIRKNPTISQMNNQLKSLPGFGLLLSSNLIVLTGAFHDITAYRTLAAFLGICPYQHQSGTSVYKRPRIRHFGPAYARKLLTLAARSVVAHNSVFKTYYLRKLAEGKAKKLVLNNIANKLIKIACAVIKNNSRYVSTYRSVNPMCLISA

SEQ ID NO: 453905 - protein, 342 aa, unidentified
MQKYIGLDVHKKFLFAVVLDSKGDLISEKKIRNDPYELDKFFKGFDKDSNIALESCSCWEYVYDYLADMGFTNLVLANPSRVRLIATSKKKTDAHDARILADLLRTNMLPTSYAAPNIVREQRQITRHRASLGRLKGVIKNKIHAILIRNGINQEFSDVFGQEGINYLMSLELSIIDRYQMDQYLELIRHYDVQIKKTEERIEDYVAYTPQIKLLMSIPGVSYYSGLSITGEIGDIRRFSSARKLISFAGLNPSVSQSGDKCYMGHIAKQGDKHLRWMLNQCSNVAVMHDSTLAKIYQRIKKRRGHNIAITAVSRKMLCFIYTMLTHNIEYHTLQIHKAKAS

SEQ ID NO: 453906 - protein, 315 aa, unidentified
MTITSEEYVGIDVAKDKLDLAVLGQKATSEVFNTKRGITAVVKKMCQLNPKLIVVEATGGYEEALVLALYEAGMPVALVSPQRVRQYAKARGLLAKTDKLDAQNLAEYGKHIQPRLFVAKSEEGRRLSAIIGRRRQLADMQKSEKNRLRTAYLEMKSSIQTVIDCLEAEIERLDEEIRNFMNEHENFKEQEELLRSAKSIGPVTAATLLADLPELGKLDRKQIAALVGVAPINQDSGKKRGYRKTKGGRPEVRSVLYMSALSGIRYNPIIQAQYDQLVKRGKEKKVAITACIRKMLTILNAMMRDQQPFRKVSML

SEQ ID NO: 453907 - protein, 374 aa, unidentified
MNTIYIGVDFHARQQTICYLKTETGELVTCELKHQEKQKVRAFYAQFHGQVIVGLEASGYSPWFERLLEELGCEVWLGHATEIRRRARWRQKNDRRDAELILDLMLHDEFPRLHRPAVQSREVLRMLRYRQKLIKIRTMSKNSLQALALQSGLAKGSRLFTQAGQQELSAAVMSPVMHWQREHWLQLMQPLNQQLLETMSWFKVQSKGDVCITRLRTHPGIGLLTSLCILHTLQPVSRFRNTRKVAAYAGFDPVERSSAERKCFLGISKAGSRVLRYLLVEAAHTAIRKDEELKRFYQRLAERRGRPKAKVAAARKLLIRAYIMLRDEIDYAEFRRRAVAARLARRGQRPNVPEVLIGQPASADHRDELTSASQ

SEQ ID NO: 453908 - protein, 339 aa, unidentified
MNSKAYWIGLDVHKKYWTVCILDEYNTPTHFDITCGDYVSETVNRLISKINQLDIKGDFNSVYEAGPWGFAPHGELNKAGFYNTIVAPHNVPKSSKDLKWKNDKNDAYNLAYFLMHGRLESIYIPLEEEVHLKTLVKTRRTLVNERTRIKVFIKQRAMGFGININSSISLKRATLLLREIEKLECFNPCMKDSIKRWEKLNNQIINLESRIDNYLKSINYQHLYVKLLEIQGVSQFLAADLIAYYGNVSRFPTFNAFKSYSGLVPYQAQSGAVNNLILGKKDYKRPTVRSTYNNAAKSLIQHNPKYKLKYQQYKSTNPKNAFIKVQQAFAKEIYPLWQC

SEQ ID NO: 453909 - protein, 351 aa, unidentified
MFIIGVDYHPSFQQIAFLDQGTGECGERRLNHSDGEAEKFYRDLQQRGVSVRVGMEATGYSRWFERLLAELGIEVWIGNAAEIKTRRVRKQKTDRLDAQLLLKLLLENNFPRIWVASPENRDLRQLLWHRHRLVQMRTRIMNQLQALAMNEGQRRKKKLWNEQGRAQLEKLPLATWASRRRKDLLELLDRMNPTIEELTRAIEQEAKKWPAVLRLMTHPGVGPLTALAFVLIIGTWERFPRGKQIGSYIGLVPSEDSSADHQRLGHISKQGNALLRFLLVEAAQAATRCNPDWRRRYFHLAMRRQKNIARVAMGRRMAVRLYWMWRNGCEYSPSLEFGSYAGQLVTGHGAK

SEQ ID NO: 453910 - protein, 365 aa, unidentified
MTSFIKQCVGVDCAMEELVVTVAGLTESLFVQEIGFTKVANNKTGFLKLFSWIKSLTSKGIKPVFVIEATGVYHESFAHFVVDYGYDISVVLPSKIKHFRKSLDIKTDNDKTASFGIAHFGLSRKLDLWKKPDPTFKALRSLIRERNQLLEESTSANNQLHAVNHSDEQNPRVIARLQARITFCKKQISEIEKDLITAISDNQSLKSRLENLCTIKGVGLLTTIAIIAETDGFALIRNKRQLVSYAGFDVVEKQSGISVRGKARMSKRGNKNIRKALYFPSMSAVRHDPGMKNDFARIVSRSGIKMKALVAIQRKLLVLIYTLWKKNEPFDPHYNKNEDFENKSGWSSLTNPTELAVAALEDKNN

SEQ ID NO: 453911 - protein, 316 aa, unidentified
MADTLVVGIDVAKDSFQVASNPSGLNLSLLNDPDGRQKLLDTLQAYRITLVVLEATGGYERGLVADLLQAHYNVVVANPRQVRDFARGMGQLAKTDPIDASVLAKFGRIVAPKPRPQPTEQTMDLAELVSRRQQLNGLLTQEANRLPMARHIKVRKSLQKVIRTLEQQIIDLDKLIGDNIQSDDGLQRKDEILQSFKGIGPGTSAMLLSHLPELGQLNRQEIAALAGLAPWDVQSGKWAGQSRVWGGRKEVRTMLYMAALSAIRWNQVIQTFYQRLISKGKKFKVALTACMRKILVILNTLLRNDSLWLPTSIKNT

SEQ ID NO: 453912 - protein, 323 aa, unidentified
MQGKEPSQQSAMARVYIGIDVCKARLDVYIYPLDKRLVVANDAAGLKQLKKAVAKFDVALVIMEATGKFHRLAHRNLHDSGFKVAIVNPLRSRKFAEAIGTLAKTDRVDARMMAIMGESLTPDAIAPPPELIEDLQELARGRESFVDDRTAVLNQIGASKSAVLIAELKRQLRALDTAIDNLEAEIERRIEDDPVLARRFEILTSIPGIGRVAATALIAGINEIGQLSAKEVTMLVGLAPIACDSGQHAGKREIRGGRKHVRTALYMPANSAAQHNPDIKTFYDRLINRGKLPKVAITGAMRKLLILANTLVRENRLWEPRHA

SEQ ID NO: 453913 - protein, 411 aa, unidentified
MITINTLYVGIDVSSKSNVVYLMLPNGDKHSNFSVANSHEGSTQLVKRILSALTSHSLDTVLIGLEATSVYGDNLVYFLREDATLAPFNRKIHVINPKQVKKFHDAYNDLPKNDYVDSFVIADCLRFGRINKEVYLGDYRYKALQNLTRARFFAVQNLVKEKQRFMNVLFKKYSTMTQEKVFSDAFSTTALAVYDEFESAEALANMDLHELTDFIIEKGKNRFPDPDAVAKAIQKAARSSYRLPKTVNDSVNQVLSISITSMKALESQIKEFDKAIKAQMELLPNVLISIPGIGPVYSAGIMAEIGDINRFNSQAALAKYAGLAWKQHQSGGFESEVTRLIPSGNRFLKYYLCEAAFSLVRCDKEYSDFYHLKYKEVNRCQHKRALALTARKFVRLVFRLLKDNRLHCPAK

SEQ ID NO: 453914 - protein, 346 aa, unidentified
MEYIALDVHKKYTWARVENTQGERLYESRLAHAHGTIKNFVHRWSEGSPVAVETVGNWYWVVDEIEAGGGMPQLVNARLAKVMMGMVNKSDKLDARGMNRLQRTGTLPTVWIPSSSVRDARELPRTRMVLSEQRTQLKNRVHATLAKYGYVVEGVSDAFGKRGRQIVMELSSELPPHTQQALQRVLDQLDYVGKNLKAIEAEMIKVFAPCPQTTWLKTLPGVGEILAVVIWTEIGSIERFSRAEQLASYCGLVPREHSSGGKFYYGSVRRDVNVYLKWAFVEAANSSILNRERCGYDHISRLYQRIRARRGHNKAKVAVARHLSEASFWMLKKAEPYREPVSSTQR

SEQ ID NO: 453915 - protein, 310 aa, unidentified
MGVHVGIDVSKQHLDWVLGAEGRVERSSNSPAGVRRLVSKLSSVELASIIVESTGGYERRLTEALAAADLPVILVNPWRVRRFGEGLGVLAKTDPLDARVLALFGERARPPRRPLPGPRQREMADLVRRRRQLIAMIVAEKNRLDTASKVIRRDIQSLVQLLERRVAKLDRRIDQAIAADADRAENWKRLQTVPSVGPGVARALIVDLPELGALGRRQITSLVGLAPFAKDSGKKSGYRKIRAGRAAPRTALYLAAMNGSRFNPVLKAMYQRMIAAGKPPKVALIALARKLLTILNAMLRDGTDWAETPS

SEQ ID NO: 453916 - protein, 314 aa, unidentified
MYYYIGIDVSKKVLNIFDGKKDLIFDNKENLSSFKKYLKKRYPDFSSLVILFEATGIYSYHLKAFCATHMVKVYIINPQASHNFAKSLGTRSKTDTTDAQTIWAYHKLIGEKDISIPKVDRMIITLSSYLASYRLTLKQRLSLANHLEGVKDKTLYRLLKKELERLCKLEQELLIRMDTYIKQYPQLKEDYQRLLSISGIGKKTAISLLTLFHTYPDTNRNQITALIGLDPIQKQSGTSVHGRSRISKHGNQMIRRCLYMPTLSSIKYNHKIKVFYERLVSKHKPKKVAVIAAMRKLLLIAHAIYKNKTVYVPG

SEQ ID NO: 453917 - protein, 337 aa, unidentified
MSVASPLIGSFFFAGVDVSLKTLDLCLLDSAGKLLLRRVFENTRAGVRQLVALLKRQPLCVRVCLEPTSRYHELLAKKLYASERCVTLLPNPRSVHDFAEAISRRAKTDRADAETLATMARCLPLEPWAPPAEELSALNEIATRITQLTRNRTQEKNRLKLYMLCSTPQPVLRDLRSHIVLLKRRGEALEQQALLVIQKSPLLAKRYRQLLSFCGIGQTSGIQLLAFLSMLPASLNKCQWVACAGLDPRPKDSGQSSKPRHISRRGSYKLRAALYMPALVAARFNPPLRAYYERQIATGKKPLVALSALMAKLLHIIWAMWHHDQSYDPTRPGPKES

SEQ ID NO: 453918 - protein, 432 aa, unidentified
MNPISVSSPPSKVAAWVGLDWADQQHLVCLYDVGTGQTELSCLEQKPEALQSWLGQLRQRFGGQPVAVVLEQARGAVIYALLSADFLVLYPVNPQSLASYRKAYVTSGAKSDSADAVLLMEMVRNSPQRFRSWTPDDADTRSLQLLTQNRRQLVDQCTAFTNQLTGWLKSYYPQALELAGELDSLQACDFLEKWPTLEALQQARPAQIRKLYLDYGKPRPESLEQRLEQIRRARPLTTDLAAVLSGTMMVRALIEQIRPLRATLERFDQQIAALFRKHPDRLLFESFPGAGAVLAPRLLAAFGTDRDRFESAQDMQQLSGIAPVTEQSGKQRWVHWRWACSKFLRQSFHEFADHSRKWCDWAKALYQRLKRTGKGHHAALRMLAFKWIRILFHCWKTRTCYDEQVYLKSLEKRNPTLWAETQALPPRKKKAA

SEQ ID NO: 453919 - protein, 402 aa, unidentified
MNAVGIDVSKGKSMVAIMRPFGEIVSAPFEIKHTASDIHSLVELINSVEGESRIVMEHTGRYYEVLAHQLSKANLFVSAINPKLIKDFDNDSLRKVKSDKADAVKIARYALDKWQNLKQYNVMDELRNQLKTMNRQFGFYMKHKTAMKNNLIGILDQTYPGVNTYFDSPARSDGSQKWVDFASTYWHVDCVRKMSLNAFIDHYQNWCKRKKYNFSQSKAEEIYGKAKELVPVLPKDAITKLIIKQAVDQLNSASTTVESLRTLMNETASKLPEYPVVMAMKGVGTSLGPQLMAEIGDVSRFTHKSAITAFAGVDPGVNESGSYEQKSVPTSKRGSADLRKTLFQVMDVLIKTHPQDDPVYQFLDKKRAQGKPYYVYMTAGANKFLRIYYGRVKEYLASLPES

SEQ ID NO: 453920 - protein, 353 aa, unidentified
MKYVGVDWAYRRAQWCALAAGGEIAGEGGIAADRDGLARLVLELGDEVKACLEMMSGALWVRDELVACGWQVEVADARKVKTVAPLAAKTDKVDARLLAELCRRELVPGLWLPSLNERALRERLRRRMHLVRLRTSAKGRIFGLQTQWGVRVSLARLRRADGLSLLERAGVPEVWRRSVGECLALIDFLDARIAPLEAELRPFAQADPRAVLLDTIPGVAELLALTIAVEIGEIDRFTRPEKLVSYGRLAPRVRQSGDGRARSGPLSKSGSRLLGWAAVEAAQQAWRETNPWHQLYLDVGRRSRHTNAAKAAVARKILIAAWHMLSRNQPFKPASRTTTGTSVPASSRLALAA

SEQ ID NO: 453921 - protein, 480 aa, unidentified
MTLVTFRSSPEVCVVSLTNSQRSSPTAIYMAFAETTRIVASAPVAIRIETFRLEGDMTREMADYAALVGIDWADRKHDLCLQAAGSEKRERLVLEHRPEAIDEWACALRVRFSGQPVAICLEQHKGPLMAALSKYDHLVLYPINPLLVATRRRGLKPSGAKSDIADAEIILDLLTDNSAKLRPWHPDNARTRQIQALVEARRTLVENRVGTTNALTANLKLYFPQALGCFDDLASGLACDFLTQWPSLGQAQRAREATLTTFFHQHGVRGEDLIMRRIAALRAAMALTTDSGILVPALLRTKTLVAVLRAQLDGVSDYDTAITKAFDAHPDAALFASFPGAGPTFAPRLLAAFGADRERFASARAIQEYAGVAPVTEASGQSHWVHWRYACPRFVRQSIVEWAGMSIRYSFWARTYYQELRERGKAHNAAVRALAFKWLRIVFRCWQDRKPYDEAKYLLSLQKRQSPLLQAAAKPLGQPA

SEQ ID NO: 453922 - protein, 412 aa, unidentified
MEVVYPRCSGLDVHKRFVVGCLSLIQDGQRHKELRQFSTMTSEILALKEWLKAAGCSHIAMESTGVYWKPIFHVLEGEFEIFLVNAQHMKAVPGRKTDVKDAEWIADLLQHGLLKASFIPSSEQQAVRDLTRTRMRLIQERNRLVNRIQKVLEDANIKLASVVSDVMGRTGHAILTALVAGQEDPECLAHLAQGKLVKKQEQLKAALQGKLTSHHRVLLQELLQLIGTLDRSITRLDREIAARLRPLDGLIERIDEITGLSRRSIEVLLGELGWDMSRFPAAAHAASWVGICPGNHETGGKRLSGRIRQGNRWAKTVLIQAAHAAAQTQTYLGEQYRRISARRGAKRAAVAVGHSILVIFYHMVKTGESYLEKGADSFLTADKHKIQQRLVRQLERLGNTVILQPKGVAASA

SEQ ID NO: 453923 - protein, 323 aa, unidentified
MKKDIKYFGIDISHLVFDVTDSDGNYYQFKNNPSGFKKFIRLTDINSHCVMEATGYYHYQFAYFLLESGVKVSVENPLAVKRFIQMKLTKNKTDKSDSKLICEYGKQVELKLWRGNSKHQTECLQMTRLLSVYTKQSTMLKNKLHGEAVLGNPSKAVMQSLKRSLKHVQQEMKNLEDKLLVLVKQVHQDVLTRLKTIPGIGNKTSLMLVVLTDGFERFTSGSELCSYAGLTPIIRQSGSSVKGRPRISKMGNQKLRDLLFMCSFNACKYNKACRDIYERLVAKGKSKKLALIAVCNKLLKQAFAIAKSGLIYEDTYRSTLVKS

SEQ ID NO: 453924 - protein, 314 aa, unidentified
MSTNDVYVGIDVAQNTFDVAVYDSSEHWTADNTASGIADTVARLQALAPTLVVMEATGGLEHGLARMLADVGIDVAVVNPSRIRAFAKAIGRLAKTDRLDAQVIAYFAQAVKPEVRVQPSADAYEQKELLSRRSQVLGMITAEKNRLHRASPGVRTHIMAHITWMEQQVAEIDRALDEKLAADKAYRQRKQQLCSVICVGAVTARAVIIGLPEIGQLSGKKISALVGVVPYNRDSGQFAGKRFVSGGRAAVRTALYMAALVGTRWNPVLKELYQRLIKAGKCKMVALTACVHKLLLILNAMVRDGTFWQPAKAS

SEQ ID NO: 453925 - protein, 399 aa, unidentified
MPANLRPHSNRCFAASEQPVLYLALELGWDSWKLGFAPGPGPAPRLREMPARDVTRLLLEVAEAKRRLRLPADCPVVSCYEAGRDGFWLHHCLLTHGIQNLVVDSSSIEVNRRQRRAKSDRLDAAKLLSMLLRYAGGETTLWSVVQAPTVEQEDARQLHRELLTLQQEATEHTNRIKSLLATCGLAIEIDRHFPKKLKELRQWDGRPLPEALHQRLLREFERLQVANRQARQLQQQRAKEVREREDSTAIEQVRKLLGLKGIGIRSSWLYVHEFFAWRKFKNRREVGSLAGLAPTPYSSGQTNHEQGISKAGNKRMRWMAVEIAWGWLHFQPDSDLSRWFHARFGRGSSRQRRIGIVALARKLLVELWKYLQTGVPPAGAVMADWRPKAIMTTRSLKVA

SEQ ID NO: 453926 - protein, 417 aa, unidentified
MLKIVNKNCAGIDVHKKIIVVTIAKTNEQDITNYQTKSFNTFTEDLISCRDWLVSNGTFDVCMESTGKYWIPVFNILEEKCKCIITHPKYVRTIPGKKTDKKDSIWIADMFKHGLVEPSFMPTADIRQLRDLMRYRNKLINIRSGEKNRFQNSLTMSNVQIANVVTDVFGKTSQSILKLMLSNPNLTLDDITPLLCKNLKSSPEEILKSINGNFDESQSSKMNIVLKHYDSINECIDELEERILKLALQYSTEINLLLTIPGIKEISAIFIIAEIGTNMNTFVDDKHLCSWAGLTPRCNESAKKKKSVRITKAGIYIKPLLVQCALCAIKDNSCPYIKARYESLKRRRGHKKAIIAIARLLLTSAYHILLTGEVFDYGRFENLMNKNFKSHKNIQNTPEEMISYLTNLGYNITLQNT

SEQ ID NO: 453927 - protein, 319 aa, unidentified
MAQNDLVVAGVDVAKDKVDVCIRSLSLRRTFASTAEGRRELASWLRRQKVGKAVMEASGGYEREWAKALRDTKIEVRIVDPKRVRSFAQSAGRLAKNDTIDAEMIAWFAETFDEARGQAYDATREQLRQMVHARQALKDMQAKLENQGEHALPAAVQRMHARILKTISVELVKFEAAISTMIQATPHFTELAEIIESVPGLGRTTSAALIAAMPELGQANNKIVAALLGVAPYDDDSGRRRGERHVKGGRRRTRNAFYMACLGAATRHNPVLKAFYDRLVAKGKEKKVALIACMRKLISILNVMITRRQKWDANRYALS

SEQ ID NO: 453928 - protein, 411 aa, unidentified
MSESDNPAAPTYAVFCGVDVGKAEHHACALDPSGAKLHNKALPNDEAALTAVLSGLTAHGRVLVIIDQPASIGALTIAVARNLSIDVAYLPGLAMRRIADLHPGEGKTDARDAYIIADAARTMPHALRRVGTDDETLAGLGVLVGYDDDLAAQFTRLSNRLHDALLHVHPALERLLGKHIERGGVIDLLVDAPTPAALRALGEDGIRTVMATRSPRLAKTLPATILAALDAQTVVVPGTTEFGRVIAGVATQLRQVRTERTALAADVEVHLATHPLAEVLTSMPGLGVRTALKILTIVGDGAAFPTAGHLAAYAGLAPVTRRSGSSIRGETRSQRGNHALKSALFLSAFASPADPTSRAYYDRKRAQGKRHNAALICLARRRVDVLFAMLRDAKPYQPPITTSPAPDTLAA

SEQ ID NO: 453929 - protein, 448 aa, unidentified
MSKEKLKMDIINPNAAGIDIGSRSHFVAINQEHADVKEFGVYAQDMKALVDWLFENNVKTVAMESTGSYWQNLYAELQNSSIEVILTNGKFTKNIKGKKTDVLDCMWIQRLHTLGLLSGSFLPDLQTEYLRTLVRHRGNLIQTTSKASKRMSQNMRLMNLRLDVVVKDIVGLTGLNIINEICNGETSGEELAKLRHGNCKKSEEEIAKALQSNNRQDYLFVLKQELKKYQDAQQLILECDAEIKKLLDEFIDQDHVKKSLYIDKKAHKRINKNTPKNIDLNLIAYQYFDGIDLYAIEGFSHGTVLTLMSELGEKGILKFQNAQHFTSWLRLAPNNKISGGKVLSSRTPKGSNRLKIALRQAANTIGNLKDTHLSNFFNRVAYRKGRSVAVSATARKLATILWNMLYKNEQYSPPTIYEYLDQKRKRKVLELQKQIANLDARMSKVKPV

SEQ ID NO: 453930 - protein, 420 aa, unidentified
MVEDVHWFVGIDWATQSHRVCLLDAKGRRVGEREFAHGGAGLTELRDWLLEKTGGVPGQIAVAIEMPHGPVVEMLLEHGLVVFAINPKQLDRFRDRFTVAGAKDDSRDAHVLGDSLRTDRKAFRRLAPDNPVVIELREWSRIADELQQERTRLANRLRQQLWRYYPQAAELTDDVGDDWFLALWHKVPTPAAAAKASEKTIARILKDHRIRRLDAATVLQILRKSALFVAPGTTEAACAHIRSLAARMRLVNQQTKEAHDALDGLCARLGAQDEENSSGQRREQHDVTILRSWPGIGRIILATLLTEAAQPLQARDYHALRALAGVAPVTRQSGKHRFVIRRLACNKRLQTAVHHWSRVAIQRDTAARQRYDALRQRGHGHARALRGVGDRLLSALCTTLKRQTVYDADHRSSQIVAAKR

SEQ ID NO: 453931 - protein, 354 aa, unidentified
MKSPTIDFTGQDLFVGIDTHDRQWKITVRTQNIPLRTLSINPDPKDLRNFLHKHYPGAHYSSVYEAGFCGFWIHRQLREYGINNIIVNPADVPTSHKEKDYRNDVIDSRKLARELSKNNLIAIYVPSELEQHFRSLSRVRAKTSQNITRVCNRIKAHLHFNGIKMPLRSETSHWSARFIVWLENVEFSHQPGKDALMLYLEELKEHRQRLLKVMRLLRQYASEAHLKPLFELLYTIPGVGFITAITLFTEIMDMKRFSSLDHLASFVGLVPSISSSDDKTTQKGLTNRKNRYLKHLIIESAWIAIRKDPLLLAKYENLCRRMKSQEAIVRIAKKLLSRIRYVWLNHQPYVIGID

SEQ ID NO: 453932 - protein, 343 aa, unidentified
MECYIGLDVSLKQTSICVVDRTGSVVREGVVDSDPESISGYVRSKAPNTVRIGLETGPTSTWLWTELKRLGLPVICIDARHAKAVLKMQINKSDRNDAIGIARIMQTGWFKEVHVKDIDSHSVRALLASRALLVKIKRDLENHVRGLLKNLGLVIGRAKFNVFAVRTEELIKDRPELVAVVRPLLEARTAVERQVSELDRKVMKLARRDAQVRRFMTVPGVGPITALAFKATIDDPARFARSRSVGAYVGLTSRRHASGEVDWSGRISKCGDAMLRSYLFEAAGVLLTRVPKWSAVKAWGVKLTKRNGLRKAKVAVARKLAVILHRMWIDGTEFNWSNKEIAA

SEQ ID NO: 453933 - protein, 374 aa, unidentified
MSHCTTKFVGLDVAKDSIAVAVADEGREAPRFLGKISYDLGALRKLLSRVGEPELLEVCYEAGPTGYALARWLRAMGIRCHVIAPSLTPQRPGNHVKTDRRDALMLAQHLRAGELVTIVVPDEDDERVRDLSRAREDAKEDQHRARQRLLKLLLRRQIREPEGIKTRWTKQYVRWLDTLAFEHETDQLVFQEYLQTIKECDGRIERYETHMLRLIEASPLDALVHILQGFRGISAINAFTIAQEVFTFGRFSEAGQAMSYAGLVPSENSTGQTTRRGGITKAGNPHLRRVLIEAAWSYRHKPGVKRDLKKRLEQLPPEVQRISWRAQTRLHQKYMDLVFQRRKHPNVAAAAIARELVGFLWAAAQVVRSPSQTA

SEQ ID NO: 453934 - protein, 463 aa, unidentified
MAKKTTTSRKGKSKAGKNVLERINLNAAGIDIGANFHLVAIPEDRAEENVRKFGPFTSDLHQLADWLTEHHIETVVMESTGVYWIPVFQILEQRGFEVKLVNAAHVKNLPGRKSDVSDCQWLQQLHTYGLLNGSFRPKDEVCVLRSFLRLRDTLVKDCSSHVLRMQKALTEMNVQIHRVLSDITGYTGMAMIRAILAGERDALKLAQMKHPLVKASTQQIVKALEGDYRAEHLFALQTALELYDAYQLKITECENKIEQQLEQFDSKLDFEQVLEQSGALKTRSAQVRLQLQRQAHLSSVCGVDLTRLPGLSTLAVEVIISETGLDMSCWKSEKHFCSWLKLCPDNRISGGKLLSSRPRKTKNRAAAMFRLAAQGAMQSKTAIGAFIRRLKARLGAPTAINAGAHKLARLFYRMLKFGATYVEQGQAYYEHKYKDRLLRNLSKRAKEFGFQLTPLEPATDLVS

SEQ ID NO: 453935 - protein, 358 aa, unidentified
MQKYKISFKGQKIFIGIDVHMKKWDVAIAPEVGIVKRHTQKASAKELFDFLKKHYPDGDYLAVYESGFSGFSTYYALKDVGIDCIVIHAADVPTTQYEEVMKTDRVDSVKLVRSLKAGLLKGIYVREKENIDDRSVVRIRKTIQKQLSGYKARVKHMLHCNGVLFPERFEKPGSHWSKAFIKWLKEDVRLLSSSRNSLDLLIRQVETIRITLLEATKMMRLLSQTERYKRKFDLLMTVPGIGVAVSMCILTEVYDVRRFHNEKQFAAYLGLIPTSHSSGDKIAHGEMTFRGNKQLGPMIIEAAWITICKDVGLGSLYLRYKERMKPQEAIVRIARKLSNIIFAILKNEKEYVPYYTGN

SEQ ID NO: 453936 - protein, 407 aa, unidentified
MEVLVDRGAGLDVHKESVTVCVMTTEERTAAKTLRRFSTFHRDLLVMREWLVQMGVTHAAMEATGEYWKPIYEVLEGSMELLVANAQHVKNVPGRKTDPQDAAWLARLLRHGLLRASFVPSRPIRDLRDLTRLRRKTIDMSGRIQNRAHKVLEACGIKLGSVMSDVFGVSGRAILKELAANRTDPAALAELAQGKLKKKKREIRDALEGSFCAHDAILLEHQLILHEQLQRRRTKIESQLGTLAAPYDELLCRLDLMPGINRDAAIEILGEIGNDMSPWADHHRFAAWAGLCPGNHESAGKRKNIAVRKGNHFLKSILVQGATAAVKTKGSYYQAKFSRLCKRRGYKRAIVAIAHSMLIAIYYMIREERQYQELGAHCFDKRSTQSKAKSLVKQLERLGYNVELRIA

SEQ ID NO: 453937 - protein, 307 aa, unidentified
MFVGIDVSKDRLDVHIRPTGEVFAVARDGAGLEQLVGKLRTIAPSLIVLEATGGFETVVAAALAAAGLPLAVVNPRQIRAFAKACGQLAKTDKLDAAVIAHFADAVQPPARGVPDEAARALAELLTRRRQLIGMMTAERNRRRQLTQPRLVRTVDQVLATLQLQLSAIDTDIDTAIRATPAWREKEELLTTAPAIGAKIARTLIADLPELGALTRRRITALVGVAPFNHDSGKRHGKRAIAGGRSSVRAALYMAVLVAIRRKLPLAATYQRLRAAGKPAKVAIVATMRKLLVILNAIMRDKTARHGI

SEQ ID NO: 453938 - protein, 355 aa, unidentified
MKYYTSSTQFNCGIDLHAHQMYVCLMDRDGKKLVHTNIRNNDFEYFLKLVAPYRHDLTVCAECMFGWYWLADACQGAGLHFVLAHALYLKAIHGGKNKNDRIDSEKLAHLLRTNLIPPAYVYPAAKRPLRALLRQRILYVWRRSELLSRIQSHQLAHNRPTLRQTRPNRQPWTEQLLAQEDHPLGQLALQNDLALIGHYDRQLALLEKQLLQLTKQTASRDFTLLQTTPGIGEYLGLTILHEIGDIARFPTVKDFLSYCRLVKGTVASAGKIKGLRGAKLGNPYLRWAFGEAAIIAKRDHALLGPLAQRLEARMGGNKFKANTVLAIKLARAVYFMLKSHTVFDADRLVAALSPN

SEQ ID NO: 453939 - protein, 350 aa, unidentified
MKIIGCDFHTRYQQIAMMDEATGELIERRLDHESGEAHAFYRDLQGPVRVGIEATGPIRWFERLLAELGHELWIGDSAKIRASEVRKQKTDQRDALLILDLLLAKRFPKIWVPTPAERDLRQLLWHRHKLVCMRTMLGNQLHALAMSEGLCRKKKLFTKKGRVELLHLGLGPWASRRREELLKLLDQLEPAIAELDRAVLEEAQRREDAVLLMTHPGIGPVTSLAFVLAIGPIARFSRSKKIASYLGLNPSEESSGGRRRLGAISKQGNTMVRWLLIEAVYPAVRKDPALRQDYQRLKFRRGHAVAKVAIARKLAVRMYWMLRSGAEYARLVRRQGSPGATLMDASSSLG

SEQ ID NO: 453940 - protein, 339 aa, unidentified
MNRIVIGVDIAKRVFQLHWVEPQTGEIVALQLKREKFLEHFANRSKCLIGMEACGGSQHWARSLQELGHEVKLLSGRMVKPFVVGNKNDAADARAIWTAVQQPEIKAVAIKSEEQQAVLALHRMREQLVKFRTAQINGLRGLLTEYGEVMPQGRAGFKRDIPGALGRLADRLPAIVMETLREQNVRLGELDEQISQIERRLRQWQREDSATQRIAAIPGVGLLSATAAVATMGDAKAFKSGREFAAWLGLVPRQTGTGGRVRLLGISKRGDKYLRTLLIHGARSVLTHSKSPPEWLSELLKRRSKNVAIVAMANKMARTIWALTAHERAYQSGYVNRPA

SEQ ID NO: 453941 - protein, 454 aa, unidentified
MTVPKPARLRVDNLPTVFPNAAGLDIGSAEIVAALPPDRDVTVVRTFSTFTADLRQLVTWLLDHHIDTVAMESTGVYWIPIYEMLETAAIRVYLVNARHFKIVPGRKSDYNDAQWLQKLHALGLLTGSFRPDDEMCVLRSLLRHRAQLIEHRSPHILHMQKALKLMNLQLPEVLSDVTGVTGMAILRAIVAGERRGDVLARLRRPGCRRTEEDIIQALTGTWRDEHLFVLAQSLDLYDFYTTKITDCDHRLDQQFSSMKPRFDVEGEPPAPPTSRTKKNSNSKNQPTYNVRAHLVRILGIDLVDVIGISESLAQTIIAEIGTDMSSFPTSKHFCSWLGLAPHNDISGGKVLRSRVIKVHNRAGQALRQAAQSCSRSHSLFGAFYRARSARSSSEEAVVATAHKIARVIYHMLTCHEAFKPESIRAFDQKRQQREVKHLQKRAKALGFILQPVTA

SEQ ID NO: 453942 - protein, 344 aa, unidentified
MLYVGLDLSRKRLDWQALSPAGERLGIGEVPPDGDGLRGLVRRLGDADVLAVIESMSGARFVHDRLELAGWDVRIADALKVRGIAPLACKTDRIDCWVLAELARLGLVPEIWLPSPRVRAERERARFRLHLVKHRRALKNRIHSILFQYGVPNPTSDLFGLGGRRLLARLALPEPWSSTLAASLALIDTLDEQIERCEGELRALGAEHPYVPLLLTCPGIGWVLAFTIASEIGDISRFASARKLVGYTGLCPRVDQSGERDRRGPLRKNGPNHLRWALVEAAHSAARHPHYRPIRERMRARHGQKRGTKLAAIEIGRRLAEAIWHMLTRTESFAPAGASASLAA

SEQ ID NO: 453943 - protein, 424 aa, unidentified
MKLVYPICCGVDVHKKVIVATIVSTDNVGISTYQQKSFSTINCDIEKFHKWLIESNCYHVCMESTGKYWIPIFNYLENDIDVCLTHPKYVKAIKGKKTDKKDSKWIADLYKFDLVKNSFIPPKEIRELREISRYRFKLVCMKSSEKNRIQNSMTVSNIGIANILSDPFGKTATEIISYLLNHTSESFDEKACRKLIKKGAKAKSDEIINAINGYTIEPDQRLKFELARGHLDYLDEMITKTEVELYIRIKPYWKLVELIAAMPGMTEISATLILAEIGADMSVFEDAKHLTSWAGLAPSNNESAGKKKSIRIAKAGQYIKPLLVQCSLAAVRCKKEPYFAIKYQHIKKRRGHKKAVIAIARMMLVCIYHIISEEKSFNPTDYAELMDPHSHVDKVTLNEANVFAYLQEHGYDISLIMKNCNDNY

SEQ ID NO: 453944 - protein, 337 aa, unidentified
MSRIKDIRKSVDIKHMYVGLDLHKATINATVMDENGTVLNEVKIKSEPDSLRNFSDSIPLGSDIVIESSSTWYWAYRILSERHNVTLSNPLKTKAIAESKVKTDKVDSLTLANLLRGGYIAESYIPPMELMQLREMVRYRASLVRVRSIIKNRIHAHLLMYNIKINASPFTKEYIKTLRELNDYKINGYLNVLEVLNKEIDEISNRIKEIANDNEDAKLLMSIPGISFYSALFILSEIGDINRFPDSGHLVLYAIAPSTRSSGNKVYHGPITKQGSSYLRWILTQVTWANIRKEPNGTVGNFYSKLKKKKGSAKASSKAKMLRIIYWVLKEHRPYQS

SEQ ID NO: 453945 - protein, 416 aa, unidentified
MEQLDTLYERVGGLDVHKKSVVACRRRLTPSGRVEKEVATFGTTTPDLLALLAWLQEWAVTHVAMESTGVYWKPVWNILEGHVELLLVNARHLKTVPGRKTDVKDCEWIAQLMQYGLLRGSFVPSPDVRQWRDLTRHRTQLMGQRTSVVNRIHKVLEDANVKLSSVISDIMGVSGLRMLRAIVAGESDAAVLSQLGDPKLRASQEALQASLQGKLTEHHRFMLEGLLDQVAFLDAQIARLDRRLEEQLRPFEAQLQRLDTIDGIDRVGAQSLLAELGPDMAQFPDADHLSSWAGMSPGNDESAGKRRSGKTTKGNKWLRRTLSQAAWAATKRKEGYLSAQYRRLASRRGKNRAIVAVGHTILVAAYYILKDEVEYHDLGSDHFDRLRRERTVSNLVSRLQRLGYHVALEAIESDAA

SEQ ID NO: 453946 - protein, 363 aa, unidentified
MEVVHRRCAGLDISKRDAKVAVRVVGGGRAGTKTAVRTWSSMTREILALREHLITAEVTCVVMEATSDYWKPFYYVLEDGPWELMLVHARHARNMPGRKTDVSDAAWLAQLGAHGLVRGSLVPPAPIRALRDLTRTRTALTRERDREVQRLEKLLEDSGIKLSAVATDIVGVSGRAMLEAIDQVTTRIEDAMAPFHDVRDLICTIPGVSTLVADVIIAETGADMTRFPSAGHLSSWAGTCPGSNESAGRVKSTRTRPANKHLKGALGVAAMSAARTKGTYLAAKHRRIAARRGPLKAVVAVEHAMLIATWHMLTNHTAYADPGGDYYTRLNPTKVKDRAIDQLRAIGYDVTLTPRELATPQVQ

SEQ ID NO: 453947 - protein, 415 aa, unidentified
MNQRTAEPGLFIGMDWADQKHDIYIIDRHGKGSNQLLEHSVENIDAWVGEMLRLAGGQPIAIMLEQSRGALIHALMFREDVLLYPINPKQLARYRESYPGGGKNDPIDAMYLARMLRERITTLKAWQPDDENTRLIANLSRQRRKIVDGQTKLRLQLKALLKSYIPVVLELFGKDHQLPLLLSVLCRWPDPRKLRRADRQLIRRVLSDHSVRNEGQQNEIIERIRAAQLLTRDDALITPSAMAAKLLANQIQQAQKTIKEFDAKIDQAMKQHPDAHLFTNLRGAGNALAPRLLCAFGSQRNRWEDADNLASFSGIAPVTYKSGKSCAVHRRLACPKYLRQTFHEFADSARRHCPWSKARYRMLRDRGMKHHAALRKIARSWIRILYRVWQTGVPFDCDRYIAKLQQRCPEITQEN

SEQ ID NO: 453948 - protein, 360 aa, unidentified
MRYAGIDISNNRLDLCVVDETGDVVHRDELANNEAGYEELTELLTPEDPIGLEVGTLAYPVHDFMVERGYTVRLGDSQRMKTIWQCDQKFDGKDAFEIADLLRIDKFPEVHIPDPDVLEARELIRARKDVVEQCTQAKQRLGSYLRREGIDPPFGSDALYGEKGRAWLREQDLDAKKRSLMEAHLAQIEALEPRVEELDEMVAGLIVDDAIVDRLVSIPGVGLHNAAVLRFEVGSMERFDTIGHFRAYAGGAPRNRQSGGPARQEGPVRRCNKRVKAAVGIAAESAAVKTKGENPVKAIYRKQRGKGKPRSNALGHARGKMCNTIYAVWTKGEECRWGSEATAENKRLKIKRLARRGSAS

SEQ ID NO: 453949 - protein, 395 aa, unidentified
MEYFAGLDVSMEETHVCVVDRDGVVTHQAKVASTPADIAQELAKAPACRRVVFETGRMAPMLFHGLADHGVPVVCVESRQAYQALKSLRTHKTDRNDARGLAHLARTGFFKPVHVKSLPAHAVRSLIIARKKLVGQRVTLENQIRGLAVVFGVRLPRALSPAFIEQALRSSEGIAGLSAAMRGLIGARAAVLAAVAAIDADIKRMVRASDACRRLMTIPGVGQLTALAFTAAVDDPERFRRSRDVGPYLGLVPRRYQSGEVDYTGSISKCGDRRVRTLLYEAANVDADALQAAPEAEGLGSGHREALYDAQGPHRSRAPASDHHARDAAAGHRVPTCVAADITGQEAEPSSRAGATPEGGSRRWRRFCSMRPCADCAFNRAALHPADPIKCRTST

SEQ ID NO: 453950 - protein, 358 aa, unidentified
MQTQSNKIDFKGQKIYAGFDVHLKSWKVTIMTKELTHKTFSQDPKPEVLVNYLTKHFPGGTYYSAYEAGFCGYWIHNQLRELGVNSIVVHAADVPTTGKEKVNKNDKRDSRKIARALRNGELNPIHVPSVATVEDRGLVRLRSTKVSELSRYKCRIKSLLYLHGIEYPESFSSTHTHWSNRFNQWLKGIEMTGPSGKATLDDLLESSNHLRTALLKVTRQIKELSKTDTYKARQELLRSIPGIGYITAMIILTEIETINRFANFDKLCGYIGLIPSTNSSGEKEKVGNLTPRGHTLRSAIIESAWVAARLDPALCKSYHDYCKRMEPNKAIIRIARKLLSRIMCVLKTNKPYVCSIVK

SEQ ID NO: 453951 - protein, 338 aa, unidentified
MYYTGIDLHKFSSYLTTVDSSGAIVKSENLKNVAHNFVQYFNSIPGEHKTTVESTMTWYWLNDLLSSINVPLVLAHAKYVKAIAYAKVKTDKVDSHTLAQLLRMDYIPAAHKISNDNRTLRDALRARLKIVQRHTSVTNSMHLLLAKYNYDSPTQLTGIPKFQFEQLSEVEELLNDQMLDLEKQLYPFLIPNDDIQRLLWIPGIGKMNAFTILLEIDDINRFPDVKNFFSYCRLVPSARNSGGKSKQRSSKDGNKYLKVAFSDAAIHAVQYYPVIRKYHNSLLRKKNKNIAKTIIAKEIAEIVYHVLKNKSNFNNKFRGQVLEHKKSLQWPRVVNPYA

SEQ ID NO: 453952 - protein, 418 aa, unidentified
MNEDGDTRGSRRYIALDIHKEYSVIGGVDREGRVVLHAVRMEHADLEGWLKKNLRSTDHVVFESTTNAWHVYDLLEPLVERVVVANPAKVKQIANARVKTDVRDTFILARLLAANLVPDVWVPPAHVREMRQLLSQRRQLVETHTQIVNRMHSIAHRHHLQHERGKRFNEKNTLWQKDKRLSRVEQFQLELEMENCAYMEKQISRIGKEVAKMSHQKPWAESMTYIMQLPGFGIITGMTVLAAIGEIQRFESARHLASYSGLTGGLDQSGTHLVQKGITKEGRKELRWAMVEVAQRAVKSDPHWTRKFQEMEKRMHRNQAIVAIARRLLELVWYVLTRRQPYRHFSQERIAYKYLTWAWQMDEAARDGLTRQQFARYYLMRLGIGHDLTRIALNPNYPRKLASEAELLALRPELNHIE

SEQ ID NO: 453953 - protein, 367 aa, unidentified
MTYTLKAAPAASAIELKSEKTAKAKRILLGVDVHLRGYQAARKVDNGVIGVVDTFRSEVELLLHVEKQRPRAEQVVVVYEAGPLGYTLYRKLKAAGVLCYVCAPDGAEQRRKRRKNNKIDARNLTSKLFNYLNGDKEALPLARVPTEAQEELRLSSRQHDQLVEERKCLGAQGNAVLLGQGFGSWSNWWRPKAWTQLSNLVPAWLLERLQIWVDVLKVLDEKIAQAKAAFARSCHGPRPKGVGALSQMQLQSEVLDWSLYSNRRKIACLAGMVPSEWSTGDKERRGSITKVGVPALRRIIVEMVWRIVLFQPQYKPVQKWQAVLRGSNPALKKKAVVAIGRQLMVDLWRLQTGRVTAQELNLVMVEA

SEQ ID NO: 453954 - protein, 404 aa, unidentified
MQAGIDWASEHHDLCVLDDDATIVRRLRVSHSREGLAKLVIELAAYGDPGELAVAIERPDGVLVETLRDAGHPVVAIPPAAFAAARGRWSSSGTKSDQADAYQLADFLRTDGHRFRTLEPFDDTTRQLRSLVRARADHVEARVAATNQLAALLAEHWPGAGVIFARLDSEIALGFLDDYPTPASASRLAEKRLEAFLRRHAYCGRKTPAELLERLRSAPVVPRPLDPDCVRELVRNQTRLVRTLLGTISNLDAAIAAIISNHPKAAVIQSLPRSGTISAAQLLAEIGPILDRAPTAEHAAAEAGASPVTRTTGKQRHGAHFRYATNPKPRQALMLWADNSRHGSTWAMHTYREARLRGCRHPHAIRILARAWIRILWRLWHTNTTYNPHTHRNAEALRQRISLT

SEQ ID NO: 453955 - protein, 343 aa, unidentified
MEEITTIGLDIAKSVFQVHGIDARGEVIVRRQLRRRQVLPFFSRLTPCVIGIEACATSHHWSRELQALGHDVRLMPARYVKAYVKRGKNDAADAEAICEAVGRKTMRFVETKTREQQAVLMLHRTRHMFVRQRTALINAIRAHLAEFGIVAAVGRNGVDALLKVVADPKDVRVPEVARKCLNALGHQLEMVKAHILDFDRRILAWHRTNETSQRLGAIPGVGPALATALVASVSDPKAFRSARDFAAWVGLVPKQNSSGGKERLGGVTKQGDRYLRSLLTAGALAVIRYAKIHGTKHRPWLTALLARRPTKVAAIAFANKIARIAWAMMVRNERYKEPAALAA

SEQ ID NO: 453956 - protein, 341 aa, unidentified
MFYVGLDIHTKHISICVLNQDGKVHRRDQVRQVDQLVRVLEGLPDRFEVCFEASTGYGRFFELLSVRACRVVVAHPGLLRLIFRSKHKNDRRDAEKLAKLLYLGEVPAVHVPTADVRAWRELITFRQRLVQKRTRAKNGVRALLRCLGITAPRRPGIWTAKGLAWLKQLEFSQPLQALKRDLLVQEIEAFSQQLARVERGLAAYSRDNLSVWQLRSIPGVGLRTAEAVVAFIDDPHRFAHSKKVGAYFGLVPSQDQSGETNRLGHITREGCTAVRHLLVEAVWQALRRSATVRAYYERIQRNDPDRKKIAVVATAHYLVRVMWALLKNGTLWKEPGAQVAA

SEQ ID NO: 453957 - protein, 388 aa, unidentified
MYLVGIDISKYKHNCFIATEAGVILKEFIFENNRSGFKLFHKSLKNLDQTQDIRIGLESTGHYGTNLKQFIAASGYTYIEFNPYLTHQFAKAMSLRRTKTDKVDARTISNMLGSVDYKTLHTRFYHINELKQLVRDRDDILMNRSKTLVKLTNVLDIVFPEFKPFFNKRFSTTARFILKKYKSAKKISTLTMLDFDSLRSLSKGKFTYARFSHLKSLAKDTVGVQSPVYTGRIVSLLKDYDYFDQSLEHIDQNIISLFSNVETKLTTIPGLGIIQAATIYAETGDIRRFPNPQKLIAFAGFDTSINQSGISEHHGKLVKHGSPLLRKTIWVYALTALKSMPIFHDYYRKKRQEGKIHKVALTHVCRKLIRMIYHIEYHQIDFNEQLMK

SEQ ID NO: 453958 - protein, 366 aa, unidentified
MPGVTSPAGLIHVGMDTSKNTIVAGILMPGEEIPVIDRIWNAEGSVRHLVSRLGDPAALRCCYEAGPCGFELHRLLASMGVACDVVAPSLIPRRAGDRVKTDKRDASRLARLHRAGELTPIRVPAEAEEAVRDLVRVRAALLADRKRAQQRITAMLMRHGRIWRHGSYWTQAHEQWISRQCFDEPALAAALAHYRAALDTRRAELDAVEAELAPWACREPLAPAVARLGCYRGIAALHGLTLAAEVVDWRRFASARAFMGFTGLVPGEYSSGERTRRGKITKAGSEPVRTALVEAAHACQHQPAIGVVLRRRQHDASPETLARSWKAQRRLHARYKAMTARGKPPGMAITAVARELAGFVWAEMTS

SEQ ID NO: 453959 - protein, 386 aa, unidentified
MAHSTNIPQHSIDYDQTLILAIELSNKSWVLAAQVPGLSQTKAKRTIEPDKNHLLAAIDGYRSRAAAAGRSVKRVITSYEAGWCGFWLARWLMAHGVEVHVVQPSSVPVDRRMRRGKSDGIDAELLLRTLLAWLRGEPRVCSMVPIPHEADEDARRCVRERSELVSERVGLVNRIGAVLATLGTDDYNPLLQSRRRRLIELRTGLGDPIPPNALAKIGRLLTRLELVLTQIAELELERDAVARADAPDQAGRMIQQLISLRGIGVQSATVLVREAFVRRFANGKALGSYAGLTSTPYSSGGIDREQGIGKAGNRRLRTVMVELAWLWQRYQPGTAQVVWFRERVGSTGRRLRKVMVVALARKLLIALWRFVIDGLMPEGAVTKPSI

SEQ ID NO: 453960 - protein, 327 aa, unidentified
MVTTMNAIIGIDVSKDTLDANCARGQRRQSKTFDNSPDGWKLLLAWLKAMGSKQAHVCMEATGRYSLGVALALHDAGHVVSVVNPAQIRDFARTKLGRNKTDKVDATLIREYAELFKPAPWAPPSPAMRRLCELQTVRAGIVSNRAEWKNRIGSGLGDRTATTLAGATIDHLTAQLEAVDKAISETIDQDTELRGRRDLLLSVIGVGETLAALLLTELPEPGVLRRSGEVVAYAGLNPSHHRSGSSIDRPTRISKIGNATLRSSLYMPALSAMRFNPPVAALVARLKSAGRLKPKQIVVAAMRKLLVLCFGVLKTGKRFDPAIAMPA

SEQ ID NO: 453961 - protein, 414 aa, unidentified
MLKIVYRICCGMDIHKSFVVACIASTSEQGVTTYKSKRFSTFTGDLRRCADWLSENNCKDVCMESTGKYWIPVYNILEPTCNIVLAHPKYVKAIRGKKTDKRDAKWIADIFKHDLVSGSFIPPADIRQLRDLFRYRWKLTNFTTGEKNRAQNCLTVSNFKLDDVFSDVFGKAASAITAWILEHPMEKITDISAFRTKGMKATDERVLSAVDGEMCEEQAEKLRIIRSHMSSLQLCKLNLESLILSTAEKYLPQLNLVVTAPGIQSFAAIGIISEIGVDMSVFPTSKHLCSWAGLTPQNNESAGKKKTTRISRAGAYIKPLLVQCALCAIRAKQFPEVRNRYLALKKRRGHKKAIIAIARMLLTAIYNMLKKNEPYNSELYRKSDRPPVHREVSVAEAIFILQRQGYLVAAPPTV

SEQ ID NO: 453962 - protein, 394 aa, unidentified
MHKDTHCAVVIDCWMNKLGEVNFENRPSRFPAFVEDVRKICGTKEIVFGLEDTRGFGRNLAAYLVGRKFEVKHVNPAYTSAVRLANPIIYKDDSYDAYCVARVLRDMVDTLQDAKHEDIFWTIRQMVKRRDLIVKSNVMNKNQLHSQLAYSYPSYRKFFAMIDSKSALCFWENYPSPEYIWNTTPEEIYQTIKPVHQALKIQRIHEIISMIERDGDTRKDYQPERDFIVRNIVKDIRNKKELIAEIDDELRKLIPLTGYKLHTMPGIDLVTEAQIISEIGDINRFPDSDKLARFMGLAPVQFSSAGKGKDQRCRNGNRALNAIFHFLAIQMVAVSASGKPRHPVFREYFEQKVKEGKNKPQALVCVARRLVRIIYGMMKTKTEYRPFEKADDKN

SEQ ID NO: 453963 - protein, 344 aa, unidentified
MTYYTGIDVSLRSVSICVVNDKGEVCFEAKVAAEIATIVECLHRFDRDVKSVGFEAGTLTQYLTYGLQAAGFEVVCLEARQVSVTLAAMRNKTDRNDARGIAQILRTGWYSRVHVKSLHSHQVRALLASRKVILKKCVDLENELRGLLKVFGIRLPSRVGHGAFDTELRETVSGDEMLACALVPLLDARTVLYKTYLKLDNAVKGLVRADPICRRLMSIPGVGPVTALTFKAAVDDPSCFKSSRTVAAHFGLTPRRFQSGEIDNPGHISRAGDADVRSALYVAAHSLLTRNAQWSSLKSWGVRLAKTRGHRRAVIAVARKLAVILHRMWLDGSEFRWGSVPTQA

SEQ ID NO: 453964 - protein, 357 aa, unidentified
MKKLFIGIDFSKEKLDATIILACGMNEIGSREYGCFPNNTTGYRKLCNWVKTNAWNTIAEEWLFCGEDTGSCSIGLSKWLYGKGYDIWIENAYAIKHSSGIQRVKNDKADSAIIAEYAWRQQDKVVPFEPLNESLAQLREVFLYRHKLVGQRVAMELRKEDKSQSNKSKAISFINRKSKHLIAEINKTIAECDKAIDSIIEADEELKENYAIITSIKGVARQNATCMLVYTNNFKKFGYDPRKIACYYGVAPFGKQSGTSVNTPAHTSHFANKLIKSLLGQAAHIAKIYNPEIRDYYQRLISKGKKPQVALNNVKNKLIRIIVALVRKKVPYDQNTYKYYEEREVIERKKNEKLIYC

SEQ ID NO: 453965 - protein, 323 aa, unidentified
MNTNTLQNINIGVDTGKSQLDIYIRPLDVFFTVPNNDKGIKQALTTIKKHNPQRIVIEATGRLEMPFVLACTEAKLPIVRANPVHIRRFAGAIGRRAKNDRLDAQLIAHYGEAIKPDLTVIKAKNIRLMSDLVIRRNQLLAMQTMEKNRIQILPKHLHSTMTPILTAIKNQVSKIENKLVKLIEDCPEYQTKNTLLQSVPGIGNIAAASIISNVPELGYITNKQAASLIGVAPITRESGRYKGKRVIQGGRAQVRTVLYMAMMSAMQCNPVFKDTYARLLEAGKPKKVAIIACVRKMVVILNSMLRDGIMWDQNIAQNKGLTP

SEQ ID NO: 453966 - protein, 419 aa, unidentified
MKKHSKSSQRSEPTLKRTKARGPVQRDAKEVLTEVLGKLTAKLDAPAKLDAPAVSTSAKENRRGDTIGPNRDRLTVGVDLGDRWSQYCILGLEGETLTEGQLRTTQEDVRGFFQALSVARVVIEVGTHSAWVRDVIREWGHEVLVANPRLMEGSKRRKRKSDRIDAHKLARLGRVDPQSLYPIRHRSREVRQDLVVLRARDALVSVRTELINTTRGLVKSMGTRLPRCSSPSFADKVKDAIPVEVKEALLPLVQLVETVNECITRYDQKIEELGREKYGHTTLLRQVKGVGPITSLAYVLTLEDAQRFSNSREVGPYLGLVPKQEDSGDSQPQLGISKTGDRMLRRLLVGSSQYMLGAFGPDSDLRRYGLRLCERGGKNAKKRAVVAVARKLAVLLHHLWVTGDVYEPLHHRGAETRIA

SEQ ID NO: 453967 - protein, 418 aa, unidentified
MKKHSKSTQRSEPIVKRTKARGPVQRDVKEVLAEVLGKLTGKLNAPAVSTSAKEDRKGNTVGPNRDRLTVGVDLGDRWSQYCILGLEGEKLAEGQLRTTPEDVREFFQALTAARVVVEVGTHSAWVQDVISEWGHEVLVANPRLMEGSKRRKRKSDRIDANKLARLGRVDPQSLHPIRHRSREVRQDLVVLRARDALVSIRTELINTTRGLVKSMGTRLPGCSSPSFAEKVKDAIPIEVREALLPLVQLTKTVNDCIARYDQKIEELGQKKYGHTTLLRQVKGVGPITSLAYVLTLEDPQRFSSSREVGPYLGLVPKQEDSGDSQPQLGISKTGDRMLRRLLVGSSQYMLGAFGPDTDLRRYGLRLCERGGKNAKKRAVVAVARKLAVLLHHLWVTGDVYEPLHHTGAESRTAQATAA

SEQ ID NO: 453968 - protein, 347 aa, unidentified
MTKLIRIGVDTSKSVFQLHGVDEAEQPLLRKKLRRAQMMAFFAKLEATKIGMEACGASHHWARELEALGHEVVLLPPQYVKAYLKRGKNDAADAEAICEAMSRPTMRFVPVKDAHRQAAQMLIGLREAALRHRTRVSNTIRGHAAEFGLVVPKGLAHIEPLLERAAADEMLPLLAREMFALLAEQFRRVDAEAKAITAKLMAYHRDHEQSRRLAEVPAIGPIGAANLTIKVVDPKAFRSGRDFAAWLGLTPKDHSTAGKTRLGVITRAGDEALRCLLVSGAMAVIQQANRGRGHRPAWLVELLKRKTLKQAAVALANKTARIAWKLMVSGERYQQPLQEISTAPASA

SEQ ID NO: 453969 - protein, 339 aa, unidentified
MVKVATVGLDIAKQVFQVHGADRTGRGVLRRKLRRNEVIRFFSELPPCLIGIEASGSAHYWARILNGLGHTVRLMAPQFVKPYVKSQKNDANDAEAICEAVARPSMRFVPQKSIEQQDLQCLHRVRSRLVACRTQLINQIRGLLAEYGIVMPQHPGQVRRGLPAVLEDAQNQLTGFGRELFQSLYQELAELDVKITDADARIQIAFQNHPDCRRIAAVEGVGPLIATAVVAAISNGHAFANGRQFSAWLGLVPRQNSSGGKSRLLGISKRGDPYLRTLLIHGARSVVYRAKAKSDQRSLWIIDKQQRLGTTKACVAVANKNARIIWSLIAREQEYRRAA

SEQ ID NO: 453970 - protein, 425 aa, unidentified
MNFNTNEKINQVSENTLVIGIDIAKHKHYACAIDDRGRVLQKSFPIVQSRIGFEYLYERLMALKATYDKHEILVGFEPTGHYWMNLAAFLTNYGIPFVMVNPMHVNRSKELDDNLQTKNDQKDALVIARLMRDGRFSYPRHLEGIEAELRNGATLRSKIQEDLNALQNRIIRWLDRFFPEFTQVFKSFGKMAYAVLEMTPLPTDIVGKSPEELLFLYRQVDGMKCPQLPKAKQLVKVAESSIGLTEGLVMAKFEIATLLSQHKMMQAQLEELTAQLVEQAKQMTEYEYLASVPGIGDVTIVDLLSEVGSLAQYTHPRQLIKLAGLTLRENSSGQQKGQKRISKRGRRKLRALLFRVMMPLILHNPAFKQLHEYYTTRTINPLRKKQSIVVLCGKLLKILHALCKKKTMFNEHQMMTDFASLQTAA

SEQ ID NO: 453971 - protein, 359 aa, unidentified
MQQIVQGRMLVGIDVHKDTHTAVGVSPFGEKLFELTVGNYQKDFVDLTAKVEAAARDAKLSPYFGLEDCHGYGERLATYLDAVGYSVVQVASTLVDRQRHTNTHPEKSDSLDAQGVAEVMLRKSDKLPRYTVTEASTIAKDIKDVAKDRENLVLERTRLKNQLHDLLHRIWNTAYREKFIDPFSQKAMRYWSRAQCKDASLFLMRTMKRKVRRLQALHIEIKELDHELVRLVKESGNTIATASGCGVVVASTIIAEIGDINRFRSPGALAKYAGCAPREYGSGKKQRYRKSRSGNRRLNSAFHLMALTQISPTGNDKARAYFRKKISEGKTKSQALVYLRRQLVNVIWCMLKYKTVYRS

SEQ ID NO: 453972 - protein, 365 aa, unidentified
MDDPRQIREQVTLGVDTHAELHVAAALDERGRLLGTCTIATTPTGFAELVRWTAQYGELARVGMEGTGSYGAGLARWLRARDVAVVEVDRPDRRTRCRRGKSDSVDAEAAARAVLAGTATAQPKAGNGAVEMVRTLRVARQSAIKARTQAANELHALVVTAPDAMRAQLRRLKVPQLVATAAAFRRSPGLTTPTAATKLALKSIAMRYQHLSAEINELDQHLDQLVAAAAPTLVSIKGVGTDIASTLLTIAGDNPERLASEGAFAHLVGVAPIEASSGKITRYRLNRGGDRQGNRALYLLAVGRMGWDPATRAYVARRTAEGRTKPEIIRCLKRYIARELYPVLVAMTPDAHTRPVVQQVPSGRP

SEQ ID NO: 453973 - protein, 310 aa, unidentified
MNKQHKAHSPVVGGVDTHKIIHVAAVVDEHDRVLGSKTFATTTHGYKSLLTWMRSFGELERVGMECTGTYGAGLLRYLQRCDVKTLEVTSPDKTARRKRGKDDVIDAENAAHAAFAGIRTVTPKTRDGMTESLRVLKVCRKTAVAARRVALQIIQTQIVSAPDALRDHLRSMTRMKLIRTVAAWRPDLTGYRDVTMAYRIALKSLARRYIELHDEVAELDVMIKAIVDDLAPNLIARRSIGYESASQLLITAGDNSERLHSEASFAALCGASPVPASSGQTRRYRLNRGGAGQLTAPCTSLQSVGYTTIL

SEQ ID NO: 453974 - protein, 342 aa, unidentified
MYYIGLDVHKKMISYCVKDASGQVHQEGKVGATRWELNGWMKTLPQPWTVAMEATIFTGWIYDHLLPHAQQVKVAHPLMLRAIAAAKKKNDRIDAGKIADCLRCDFLPECHMASTSIRDRRRTLRYRHLLVRQMVQMKNRISGLLMETGVSYNKQRLHKVRYFRELLSTNEEVNESIRPLLRLSRDSIVRLQKTEYALVSSLQRDPLLAERIRRLRTVPGVGPITALTWALEIGDVSRFPSIREAISYCGLCGDEKSSADKVTRTPLSKQRNKHIQRVLVEAAKLAPRQDHDLALVYETAKQKGNGNRATLAVARKMVAYLLAVDRGQRDFVPAEAHRSAAA

SEQ ID NO: 453975 - protein, 366 aa, unidentified
MKKTITVQAFQKEICKEQKLTIGLDLGDRWSFYCVMDEAGQVILEQKLPTTSEAMKQTFGKIPRSLIALETGTHSPWVSRLLTELGHEVIVAQAQKVQLISKSNRKDDRHDARTLARLARIDPELLGPVRHRSVKAQLHLTVIRARAELVSARTALVNAARGLVKSYGQRLPKCGTYQVSRELATALSTELRDVLEPLLQAIESLNERIQEYDERMEKIAKEVYPEVSLLKQVKGVGTQIALTYVLTIEDPYRFAKSREVGCFLGLRPGRRNSGESEPQKGISKEGDRYLRTMMVQGAHYILGPFGEDSDLRRWGLKLAERGGNNAKKRAVVAVARKLAVLLHRLWVGGEVYEPLRNSQKAMRAVA

SEQ ID NO: 453976 - protein, 338 aa, unidentified
MIVIGLDVHKQSVTAVAVDEAGRPLAEKVIAVGSDELLGWAAALDAGRLWAVEDCRQLTGWLERQLLGVGEELVRVPPKLTVPERRAGRTRGKSDPIDALAIARAAIREPNLSRPRPDERVYREIKLLVDHRDDLVDQRRRTQQRLRWHLHQLDATYEVPLRMLSRSLHLDRVGRWLARRQQELQVRLARELVTTIRQLNRAIADLDQELGQRTAEVAPSLLELPGCGTVTAAKLLAEIGPIDRFQTDAQLARHGGVAPLEASSGRTQRHRLDRGGNRQLNAALYRIAITQARYHAPARQYLERKRNEGKSRREALRCLKRLLVRVVFNTLKASPALT

SEQ ID NO: 453977 - protein, 342 aa, unidentified
MQITTYGLDLAKRVMQLHWVDMETGEIHRKQLRREALLEFFANRQPGLVAMEACGSAHYWGRELRKLGHEVRLVAAQFVRPFVKANKNDAADAAAIWETVQRPDMCFVAVKSEEQQSVLALHRMREQLIKIRTMQVNQIRGLLCEFGADLPQGRQRGLKEVPDALANLEDSVSPMTLDTVRRQLKRLDELDQDIADIEKRLTLWKKDQEAVIRLMAIPGVGLLTATAIIATVGDMKSFRSGREFAAFLGLVPRQSGTGGKVRLLGISKRGDVYLRTLLTHGARAVVNFQIKNRNPWIDKLLSRRPHNVAVVAVANKMARTIWALLVKNSEYDTNHTALKAAA

SEQ ID NO: 453978 - protein, 419 aa, unidentified
MKSARNTLPEEPAGDVTCGIDWARDDHAVSVVDARGREIHRCTAGHSAAGLRELIAVLARHGAREAAIERPDGPVVDALPGAGITVVVISPNQVKNLRGRYGSAGNKDDRFDAYVLADTLRTDRARLARLTPDSPATVALRRACRARKDLVAHRVAVANQLRAHLQLAFPGPAGLFAEIDSPISLRFLARFESQDRAGWLSPKRLAAWLASVGYCGRADPGDLYARLAAAPRGATGDDGTAQACVTRALLTVLTTLVEQIKALSEQIGEQLALHADRHVFTSLPRSGTVRAARLLAEIGDCRARFPTPESLACLAGAAPSTRQSGKVRAVSFRWACDKQLRDAVTDFAGDSRRASPWAADLYNRARARGHDHPHAVRILARAWLFVIWHCWQDGAAYDPARHHALQRILAAQAAAAQAS

SEQ ID NO: 453979 - protein, 412 aa, unidentified
MLKIVYPICCGIDVHKGFIVACIASTNEQGVTTYQSKRFSTFTNDLRRCAVWLAQNHCKDVCMESTGKYWIPVYNILEATCTIVLAHPKYVKAIRGKKTDQKDAKWIADIFKHDLVSGSFVPPADVRQLRDLMRYHWKLTNFTTGEKNRAQNCLTVSNIKLDDVFSDVFGKAASAITTRLLESSEPFDVAPYLTKNIKAPVEKIQAAVDGEMCAEQAEKLRIIRSHMDALELCKLNLQSLILTTAEKYLPQLNLVTTAPGIQAFSAIGIISEIGVDMSVFPTSKHLCSWAGLTPQNNESAGKKKTTRISRAGTYIKPLLVQCALCAIRAKQFPEVRRRYLALKKRRGHKKAIIAIARMLLTAIYNMLKKNEPYNPELYCKADRPPAHREVSLEEAIYIIQRQGYLVTAPPIS

SEQ ID NO: 453980 - protein, 411 aa, unidentified
MDHQNYVFVGVDTHKNQHTACVLDCFHQKLGLTQISNNPAHYQNFIQDINSFKTPDKKIIFGLEDTQGLGHSLSQWLLDQGYTVKEINPALTKRERHHSANPDKSDEIDSEAIANVLLTDLNKLPDALYDANFKAIRQLNNQRQTLVKERTILKNRFHNLIHQQYPEYKELFSDPFGKTAMAFYEEFPHPSDLNYYGETRLQNFLEDQVKSIGNNKAATILSFVDKDKKETADAKARNTIIKSTIEHLRLLEKSLEKINNQLKKAIEKSQYQLTTMPGIDFKLAALFIANIKNIDRFESASKLARYAGLAPVEHSSGTSKKLGHKKYGCRDLNHAFYMLAFEQVGKTKNSKIKNPVSYKYYQKKLKEGKSRAVALTCLQRRLVDIIYAMMRDRSAYKLPENIDYEVLNKAG

SEQ ID NO: 453981 - protein, 331 aa, unidentified
MDNQIDLKYYIWRYSHALCGIDVAKNKHDVTALNVSGKTVLKPLTFSNNKAGFELLDLSLRQLNQDYLIALEDTGHYAFNLLNFLHEQGYKVYTYNPLLIKKFAKSLLLRKTKTDKKDAHGIALKLLSDPNREQFQHDNRQVELKILARHIHRLKKKQSDWKVQYTRCLDIIFPELDKIVGKHSEYTYQLLTCYPNPQKRLEAGFDKLIEIKRLTASKIQDILSVAPRSIGTTSPAREFEIIENIKHYKRLIDKAETCVNDLMAEFNSVITTVTGIGNRLGAVILAEIQNIHAFDNPAQLQAFAGLDSSIYQSGQIDLAGRMVKRGSPHLR

SEQ ID NO: 453982 - protein, 421 aa, unidentified
MRAIGLDVHRDFCEVAISEAGEVRSAGRVAARPDALELFAQSLTSDDQVVLEVTGNAWEIARIIEGHVKRVIVVSPSDTGIRQARAKTDRLDARTLAKLLAVGSLDSVWMPDERTRVMRRRLARRSQLVAARTRAKNEVHAILMRRLKGRPEVSDLFGKQGRAWLAELELPVEERETLDSGLRQIDFLDGEVALVERAIAHDALNWPDARRLMTVPGVNVIVAVTFLATVGDIHRFPDRRKLVAYLGLDPKVRQSGDAPAAHGHISKQGSSQARHALVEASWSAVRTPGPLHAFYQRIRARRGHQVAICAAARKLACMFWAMLWRQQDYAFGQPSMTARKIRRLEITAGAPRRQNSRGVWAAAIAMREAERDLARQAEQAYAQTIRDRQAAGAIKAGASATPGHASKKPSKGTAARQTTSP

SEQ ID NO: 453983 - protein, 363 aa, unidentified
MVESTTVTVGLDVHARSIRLAAVRADELLEERTLPYDEEAVERLLRRWPLVRCCYEAGPTGFGLYRHLVERGICCEVVAPGLVPQRPGDRVKTDPRDARKLARLLAGGLLEPIHVPSPELEAVRDLVRAREDARLDRMRDRQRLSKFCLRHSRLLPTSSWTVIRRKWLGEQRFEHAAEQTTFDTYLHAVDLVDRRIEMLERAIRETAEQGPWSDLVAKLRCLRGIDTLTALAVVAEIGDFTRFRTAEEFMAFVGLVPSEHSSGERRRQGSITKVGNSHVRRLLVEAAWHARRRPKVGYDLSRRQRGQDAVVVERSWRCQQRLHQRWQRMAGRGKPQQKIVVACARELAGFVWAIATDQPLRSL

SEQ ID NO: 453984 - protein, 414 aa, unidentified
MKNTATAKAPTVHFDQLVSRGCGLDVHEKNVVATVDGEGLMKTTRTFDTYTSSLNELREWLLEHGVTHVAMESTGVYWKPVFNILDDAFKVILVNARHLKNVPGRKTDRNDSEWICRLLLAGLLRASFVPEENIRQLRDLNRYSTKLTRQLAAEKNRIQKVLEDANIKLSSVVSSTSGVVATGIIDGLMAGRTDLEALIEEHYHGRLKVSKAELLKAITGRMTDHHRFMLEQIKHHMAYLESRIAVIRQEVDRLLEDEQQSIGLLISIPGVKTVTAVKMLAEIGTKPGETFGDPKRLAKWAGICPGNNESGGKKLSGRTTNGNKYLKSLLVEAAWAATRTKGTYLRAKYDSMAARKGRKKALLIIGHKILKAAYIVLTARLSYMAYSVEEFEKRRNQKRIVHLQNELKGLGIEV

SEQ ID NO: 453985 - protein, 445 aa, unidentified
MERRVRGPGRHERPGPTTPTPNACLNTVHRSAASPSVDHDDQTIMPHSSPTQPTNSAPVLGATGRAVGLDIHPDSFAAAILDGRDPLQARVAHSITKQPLDALCAWAARHTKTADVLIIEASANTFAVAERLQAIGRQVYILESHRAGQIGKSYLANDRVDAVKIARIYLSGLSIKVWQPDAATRQRRELLSTYQRCVQDSTRAQQHLRSFLNEYALRLPKGFRLCRPEALARLLSLKGWSPRQKLLLEEMHGSLIATRERRTRLRRLMALEIEQTPDFLRLYKLAGLSLVTTYALVAIIGDIRRFATSRKLVSYLGLNPSVVQSGTSDTGGALHRHGRGSLRALIVQASKRLLTTTNPLQKWGLTVALRRGRNKAAVAVARKLTTAIWHVLQGHWNKTLEETTTLLTKLDKLATALGLPTLQELGYASKVAFRDQKLEVLRTHP

SEQ ID NO: 453986 - protein, 375 aa, unidentified
MKNKTGTVSDNKQVQARVRSQSKARVKLGLDMHYRQVTVAMQEEDGAIKALGKMSHDGFSNWVEQKLQAGFELYSCYEAGASGYWLHRDLEGLGVKNLVVAPKAMGQDRRQKTDRRDSAELVDALDRYLRGNGKALNPVAIPSVEVEEKRALIRYHRQIMADRNRCEARGKGLLCAQGIEVRGKWWQSQSWQELKTHPRLKSWMQAQLEGWRKKRLALETEQQSLRRQIEALAPALLPKGVGAYSAVALEYELKGLARFQRARALSSYTGLCPGIHSSDGRGREGSINRCGNAAVRWNLVEMVWRLLKWQPQYEPVRQLARGLLKSKRARKRLAVKAARQLAIDLWRLHTGRATAQELGLIMQPTTQKPTSRTQY

SEQ ID NO: 453987 - protein, 319 aa, unidentified
MHCIGVDVSKQELVTFDGTTERVFANKPGLAAFRRFVGSAADVVIVFEPTSTYSRRLEMLCRTERIACCQLNPRVVPHYRQVGKGRSKTDKTDAELLYRYGIERGQEEAGQLTNDALAQAVAARLACHRVVQKARVAYQGLLDALEHDPATEKGLLGGLRREIAELKAREARQLEEAQAVVAADADAAKRFDVLLSIPGIGPMTALTLLALFRKYPDVNRQQLVALGGLDPIQVQSGTSVHGKSRISKRGNREVRKCLFEATLSAARFNPGIRSIYRRLKEEGKPDKVARIAAARKLLLLAHAIYESGEAFRTPAEEVT

SEQ ID NO: 453988 - protein, 427 aa, unidentified
MNYTQNHKISQITTSTLIIGIDVAKDKHVARAQDDRGIEFGKRLIFENRFHGFQTLLDWMERLRKQNHKDHVIFGVEPTGHFWLSLAYFLKAKGYDFVLVNPMHVKKSKELDDNSPTKNDTKDAKVIAQLIKDGRYSVPNLLDGIYAELREGAKLRDQLVKQLMITDGRIQNVIQRYFPEFFDVFKDWEGKAALCTLKSFPFPSQIKEMTPEEVLEKWKTQVKRGVGIKKATKLVEAARKSIGIQVGMKFAKREIDCLLEQYELYNQQIQQLDQELESLVEDLPGARQMMAIPGLGKTTVALFFAEVGDITKYSHPQQLVNLAGLSLKEHSSGKFKGQTTITKRGRKRLRRALYLAIRPLVVHNPAFKALHQYYTKRPKHPLKKQQSLIALCCKLLRVLFAIGNKQCDFDGAKLLQGLPQIETLQVA

SEQ ID NO: 453989 - protein, 408 aa, unidentified
MNTLYVGIDVSSKSNVVYLMLPNGDKHSNFSIANSHEGSTQLVKRILSALTAHSLDTVLIGLEATSVYGDNLVYFLREDATLAPFNRKIHVLNPKQVKKFHDAYNDLPKNDYVDSFVIADCLRFGRINKEVYMGDYRYKALQNLTRARFFAVQNLVKEKQRFMNVLFKKYSTMTQEKVFSDTFSTTALAVYDEFESAEALANMDLHELTDFIIEKGKNRFPDPDAVAKAIQKAARSSYRLPKTVNDSVNQVLSISITSMKALESQIKEFDKAIKAQMELLPNVLISIPGIGPVYSAGIMAEIGDINRFNNQAALAKYAGLAWKQHQSGGFESEVTRLIPSGNRFLKYYLCEAAFSLVRCDKEYSDFYHLKYKEVNRCQHKRALALTARKFVRLVFRLLKDNRLYCPAK

SEQ ID NO: 453990 - protein, 340 aa, unidentified
MTPIRIGLDIAKNVFQVHGVDDNGTVVIRKRLRRPDMLGFFASLPPCLIGIEACSASHHWARELIRLKHEVRLLPARYVKPYVQRGKSDALDAEAICEAVSRPTMRFATIKTAEQQAVLTLHRARELLVKQQTMLANLIRGCLGEFGIVAPLGIRRVSELIAVINDDADTRILPEARIDMRAAADQLCDLQKRIKEIEQAIRAWHRSNEASRRLATIPGVGSITASAIVATVANATEFKSAHHFAAFLGLTPRQCSTGGRQRLGRISKQGDVYIRRLLVLGGTSLVRYARGAGGSVWAEQLLARRPTRIVTVALANKAARVIWALLTRGGVYRASQPQAA

SEQ ID NO: 453991 - protein, 414 aa, unidentified
MKLFVGIDVSSDELEVCFMNAEGDTLETFQVKNDLYGASHLRDHIVAASDKLSCSEIHIGLEATSVYSWHPAMFLHEDESLRQRKTKVFTINPKLIHKFREAYADLDKTDRIDAWIIADRLRFGRLKTTIVMQEQYLALQRLTRMRFHLVHNLTSEKQYFLQNLFYKCNAFRSEVDSSVFGHAILEMLSEKYSLDEIANMEVADLADYLKEKGKNRFPNPDHVARCIQKAARASYRLSKVVEDSIDIVLGTSIQSIRSIQAQLKELDKAIARILEGITCATCLRSIPGIDLVYAAGILAEIGDIERFSDQAAVAKYAGLTWRRHQSGSFEAEDTTRIRSGNRFLRYYLVEAANSVKNRDPEFGEYYRKKYKEVPKHQHKRALVLTARKLVRLVDVLLRNGQLYTPRRKVNNAEE

SEQ ID NO: 453992 - protein, 332 aa, unidentified
MVAGTHGSLNKAGSTKMTQISTTAGIDTSKAKLDVAVHGRAEHWQVDNSPAGWRRLAAALTSTAVTRVGIEASGGYERGVVGYLRDKGFVVVMLQPLQVKAYARLHLRRAKNDRLDAVLIAACAAMIDQPRIEPDQRLAALAQHLTFVEQIEEDIARFKVRLEHVDDPRHRRMVVADIARLKARRLIELKRIVAALRAHDDLARRLDLVLSVPGLGERTAIALIIRMPELGRVSREQAAALAGLAPFDDDSGKHNGERHIAGGRRRLRRSLFAAALPAAFHWNKTLIELYSRLTKRGKAHNEALIACARKLLIYANTVVQRGTPWTERPLTV

SEQ ID NO: 453993 - protein, 341 aa, unidentified
MSTVTLIGIDLGKHSFHLHGQDSAGRRVFRKKCSRQQLFTLLGNTPRSTVVMEACAGAHWMARRIQALGHQAKLISPQFVRPFVQGNKNDFADAQAICEAASRPSMRFVSVRNEAQQTISALHRVRESLVRERTGVINQIHAFLLEFGISLPRGQAIIRRLPAVLAEHELPPRLVALLERLQAHFKCLDEQVAQIERELCQQLPEDERSQRLLEIPGIGPITASVLMTELGDAQQFGSARQFAASVGLVPRQYSTGGKPTLLGISKRGDKNLRRLLVQGARAIMQHIDRRTDRLGVWVRELLARRHSNVVACALANKLARIAWAILANGTNYRSQQAVSAT

SEQ ID NO: 453994 - protein, 351 aa, unidentified
MKTEPTAQPKLYIGIDIHKRSWKIHCATDLFSGKSFTMPPKPEVLKTYVSTHFRDHEVSTAYEAGCCGYYAHRSFEGYGWRSLVVNPADIHRKGKERFTKTDKIDAQLIARELKDGRLECIHIPEVEREQLRSLFRRRNDLVKDFRRVKSYIKMQLLYFGITVPEAFDNDHWSHSFRQWVDDLIFNHPTARETLDSRMRSFRFIDKELRDVSLKLRAYCRKHYKKDYYLLRSIPGIGGIVACGIICELGDLRRFNSIKHLAGYVGLSPGVHQSGDNQRATGITMRAHRLMRSYFIEASWQAIRTDPVMQAYYRKHLGKNVKNIIVKVARKLLSRTLAVIKTETPYTIGVIE

SEQ ID NO: 453995 - protein, 257 aa, unidentified
MPQHSVTLGIDVGDRHSHFCLLDTETGEVIEESRIATTPQAFERRFVGVGPMRVALEAGTHSPWISRVLRGCGHEVLVANARKLGLIYAEGRKNDRLDAENLARLARLDARLLSPIEHRGEASQAHLAIVRSHEALVLEDAARFGRSRSVGAYLGLAPGQRQSGESDPQERISKRGDELLRKLLVQGAHYVLGPFAQDSDLRRHGLKIAERGGKNAKRRAAVAVARKLSVLLHRLWVTGEAYEPLYNARSTLGADPA

SEQ ID NO: 453996 - protein, 339 aa, unidentified
MQVTTIGVDLAKNVFQVHGITTREEVVFNKPLRRAQFLPFFAKLEPCLIGMESCSSAHHWARELTALGHEVRLIPPMYVKPYVKRGKSDAIDAEAICEAVTRPTMRFVAIKTVEQQALLSLHRARDLLVRQRTQLINGLRGLVAEFGIYIPRGLARVIGFAEDITLGEVLDLPDIANEVIRNLAEQLMALHRRVRWYEERLKQVAKEDARVRLLRTIPGIGAVTASAIIASIGDGHQFRNGREFAAWLGLTPANKSSGGKEKLGRITKMGDQYLRSLLVVGMTSLVRQTRSHPERASKWLTSLLDRKPARVATVAMANKTARIVWAVLTRNEPYNPRKA

SEQ ID NO: 453997 - protein, 333 aa, unidentified
MPRANSNLLDWDFMKSATTNEKIFVGVDVSKAALDVYRPDTKEEFKIDNSDEAIALLCSQLKKMKRNVMVVMEGTGGYEYLLLKHLAAHKLEAAVINPRRVRDFAKGIGLDAKTDPIDARVISKYAEVVVPQPMVTKSDHELKHVALVARRNQLLELVNQENNRLKQSWDDDAKQSIRDVLEMLKKQLKSIDSQLAKMIQADTENQRAIEVLQSVMGVGPVMISTVLAELPELGKLNRGEIAKLVGVAPINRDSGKKSGKRFIGGGRGQVRRVLYMATIVAIRHNPAIKAFYAHLKSKGKESKVAIVACMRKFITILNLLIKTDQLWEDKMSV

SEQ ID NO: 453998 - protein, 339 aa, unidentified
MDHVAIDLGAKKSQICVRGADGRILEETRWPTRDLETYLAGRPTSRVVVETCAEAFCVADAARKLGHETRVVPATLVKTLGVGARRLKTDQRDARALSEVSCRIDLPSVHIPKTESRDQKTMCGMREALVGARTKAINTVRGWLRSRGRRIERGGRASLRQRVAAAWEGTLPSYVERQLQVIDVLNSQIAEANAEVKIWAEADETCTRLMTAPGVGPLTALRFVAALDDVTRFESAHQVESYLGLVPGESSSSERQQRLSITKAGPRALRWVLVQAAWALHTRCRKPEAIPLQLWAHRIEQRRGKRTAIIALARKLAGILFAIWRDRTVYDGSRGAKMI

SEQ ID NO: 453999 - protein, 401 aa, unidentified
MLFCGVDWAADHHDVCLVDGDGAIRWRGRIAHDPGGIERLREAIAAQEVDPAKVCVAVEISHGLLVGALVEAGYVVYPINPKAAERFRDRRKPSGGKNDRLDAEVLAQAIRTDRASLRALLPDSPLANEIATLARDRHSLVREQTRLGNQLRSALGEYFPAALIAFDLAADSTIAFLERYPTPEAAAKLSAFQIASFLRARRANRDLAAKAAAAKEAFRAPALRARPEIVRAKARLVRVICAQLRALPPELAAYEHELERLLKTHPEGELFLSLPGLGTILASRVLAGTGDNPSRFRSAPGLCAYAGTAPIVLQSGKRAVVKARSACPKEFRDAVQQWADQARRHSPWAAEFYRRHRARGHNHNESLRALGNRLLELLFDLRRKGVRYDEAVHAANIRWAA

SEQ ID NO: 454000 - protein, 393 aa, unidentified
MSQVIMFGCDLHDRNMLLRYAVGRNEPQQLSYDNDAGGRRRMIARLKSLAEKHGAERIVFVYEASGLGHGLSDQLHEEGIECYVLSPTHLPKTAKGARLKTDAKDAQMLLEQVRGFVLAGNKLPAVWTPPQRLRDDRELVRARVDVADELTRVKLKITTLFKAREIKIASPTKCRWTKAFIAWIRDQVIPTLDLTVATKLKLLLNRFEMYLKEQAELDKALKLLSREPRYKVPCAELLKIPGVGRLTAMTFLTEMGDLNRFDNRRQVAAYLGLCPSSNESGQKNDRKGRITRQGPARLRKMLCQAAWVSVNLSERAAADYYRIKQNQKNRTKKALVAMMRKLGIKLWHTALAAGVSSELVGRDRPGKASARALQRDGSPPSLSPSHQPLGCAG

SEQ ID NO: 454001 - protein, 414 aa, unidentified
MALVRWVGRAIGLDVHRDFCVVAICEDGKVRSGGRVPSTPEGLAMLAESLLGTDRVALEVTGSCWEVARILEPHVQRVVVVSPDDTGISSARAKTDKLDARALATLLWRGELEAVWMPDERCRVLRRRLARRQQLVWSRTRAKNEIHAVLQRRLQGKPPCSDLFGVKGRDWLASLELPLEERESVDAGIRQIEFLNSEIAGVERLIAGQALSWPEIRRLMTVPGVNLICAASFIAAIGQPSRFLSSRKLVAYLGLDPKVRQSGEGPARSGRISKRGSASARWALVEAAWSVVLQPGPLHAFYERTKARRGYGKAIVATARKLAVLFWCMLTRGEDYAHQQPSLTKKKLRRLEITAGAPKNSGRAAGVWATNEMMRDAERQLAQQAEASYRRMVTDQQAGAPARKVGASATPERA

SEQ ID NO: 454002 - protein, 412 aa, unidentified
MTITCGIDWAENHHDVALVDEAGKLVAKRRIGDDVQGYQQLLELLADAGDSASEPVPVAVETARGLLISCLRTTGRKVYSINPMAAARYRERHTVARAKSDHADAMVLANILRTDAAAHRPLPADSELARVIAVLARAQQDAAWNRGQLSNQLRSHLKQYFPAALAAFQVKGIGLDSREARAVLAAAPDPAAAARLSAARLASVLRKAGRQRGIEAWVNRLRTIFAGDYLHQLPAVEQAMGRQALALVLQLDAACRAANDLADAAATAFAEHPDAAILSSFPGIGPVTGARVLAEIGDDRTRFRDARGLKSYAGSAPVTVASGKSRVVRNRKVKNQRLAAAGYVWVFGALPSPQVKDLYDRRRVAGDRHTAAMRNVFNRLLGCLHHCLQTGQAFDPAKAFPLPESQPEPAAA

SEQ ID NO: 454003 - protein, 345 aa, unidentified
MTYYVGLDVSLRSVNLCVIDDDGEIITEAKVDSEPEEIVAKLQSLRPKIRSIALEAGTLTQYLTYGLQASGYDVICMEARQVHASLAGMRNKTDKNDARGIPQILRTGWFSRVHVKSIESHHIRALLSASKAVLQKCVDLENEVRGLFKVFGIKLPSPLKHGAFDAGVREKMESDPALAQALLPLLDARLVLYRTFLEMERRARRKMAADDPICRRLMTAPGIGAISALTFKAAVDDPKRFKRSRTIGAHFGLTPRRFQSGEMDNMGRISKAGDPSVRTVLYAAANALLTRTTGFSAIKSWGMKLMKTKGRRKAVVAVARELSVVLHRMWVNGNDFQWDTEGAMT

SEQ ID NO: 454004 - protein, 338 aa, unidentified
MKVYAGIDLHSSNNYVGIIDEQDQRLYQKRLANRLEHILEALEPFKESLEGVVVESTYNWYWLVDGLQDRGYKVHLANPAAIKQYEGLKHTDDKWDSFWLAHMKRLNILKEGYIYPKEERPVRDILRRRLLFVGHRTSHILSLQSAITRNLSYKMSSGDIKQLDQSDADQLFEDPFLILAARNSIAAIRFLGERIKEIEKAVKSHIKVKPEFEYLLTMPGIGNILALTIMLEVGDISRFPKVSNYSSYCRCVKSERLSNKKKKGEGNRKNGNKYLAWAYVEAANFAIRSYPEFESFYNRKKAKTNGIVAIKALSNKLARASYYVIKDQVPYNANHLFR

SEQ ID NO: 454005 - protein, 367 aa, unidentified
MKKVRTRAVAQSRNISQQKLSIGLDLGDRNSWYCVVDESGQIQLEQRVRTNAKALQEVFSAMPHSRIALEIGTHSPWISRLLSELGHEVIVANARKVRLLGESRKKDDRLDAQTLARLARLDPQLLYPVKHRSAQAQADLMMIRARAGLVRARAGLVNTARGLAKSHGERLRGCNVRNMNPEKAEGLSPELRSALEPLLACIESVSEQIQQYHERIEKLAQDSYPQVAVLKQIKGVGTLIALTFMLTLEDPHRFGKSRDVGCYLGLQPGRRNSGKSEPQMHISKEGDPYLRTLLVQGAQHILGPFGVDCDLRRWGLKLAERGGRNGKKRAIIATARKLAVLLHHLWVSGEAYEPLHNSQRRPMLLAA

SEQ ID NO: 454006 - protein, 410 aa, unidentified
MELLHRRCCGLDVHKETVVACLRLVADGKVTTEVRTFQTITSDLLRLSEWLAANECTHVAMEATGVYWKPVWHILDDGEFALVLANAAHVKNVPGRKTDVNDATWLAELLAHGLIRASFVPDTQTQEMRNLLRTRKQLVREQSSHVLRVQKILEDANIKLDSVLTDLMGKSGRAMIEALIAGETNPAKLASLADRRAKASPEEFREALRGRVTKHHRFLLRLHLNQIDALDAAMATVDAQVEANLGPFRTAVELLISIPGIKNLGAHVIVSEIGIDMSRFPSHAHLISWAGICPRNDESAGKRRSNRLRKGAPWLKTTLVQCAWAAVKKKDSYLQAQFYRIKARRGPKKAIMAVAASILTAIYHMLKDGTMYKDLGCNHFHRRSTDKQKQRLVKRLTELGYALEIKPLAA

SEQ ID NO: 454007 - protein, 412 aa, unidentified
MRRVIGLDIHRTFAEAVAWDDGRLIRLGRLDMTRTALEGFGKSLRPSDEVVVEATGNAMAVVRVLSPFVARVIVANPLQVKAIAHAHVKTDKIDAGVLASLHAAGFLPEVWTPDPETERLRRLVARRNQVVRHRTRIKNEVHSILHAHLIPRCPHADLFNRRGRDWLSRQPLPVDEKATIDRHVRELDRLAEDLDVLDREVAQGAIGNPSIERLITITGVNLTVAAGLVAAIGDIRRFTSPQKLVSYVGLNPRVRQSGLGLAQHGRISKVGRSHARAMLVEAAWAAAKAPGPLHAFFVRIRARRGHQVAAVAVARKLAVLCWHLLTKETDYLWARPALVAIKKRSMELQAGQPARKGNQRGPAYAYNVKELRNREMLVATQAERAYEHFVGQWRPRGPGKGVRERLNPARHE

SEQ ID NO: 454008 - protein, 419 aa, unidentified
MSFKIIKNNCCGLDVHKTWIFACIGITDSNNRTEYKQARFSSFTKGLNELCDWLAKYNCKDVCMESTGKYWIPVFNILEQHNLWVTLSHPKYTKPMKGNKTDRKDAKWICDLYMCGMVKPSFIPSADIRELRDLVRYRYKLTCMITGEKNRAQNCLTVSNLKLDEVFSDVFGKSSRSITEQILQHPGEAFDVAHFVHGRCKTPIEEIQAAVDGAISKEQAVKLRQCLDHIDELNKHISEIEQEILRLSDKYETALNLIRTVPGFDKNPLTAVQVLSEIGGDMSVFPTAKHLVSWAGCCPRNDQSNQKIKSTRISRAGSYFKPILVQVANALIKSKKHPEFTTRYKRIKARRGHKKAIIAICRMILTAIWHILSDLEPYTPEGFLESRPVKEEKVLSTSQALNLLKQRGYIIKDEPLAVS

SEQ ID NO: 454009 - protein, 345 aa, unidentified
MNEVKYIGADVHSASSFLVVLKNSGDVWDQRRLPTTEKDLAVYIESIPGRKKITFEETNLSRWLYQVFKPLVDEVVVCNPSKNTFTNNGPKTDGQDAMHLARLLKAGYLTPVYHGDDPRERFRDMVSAYGDLVQDIVRLKNRYRALFRGDGNPLGKGQKVYKMKELQKELKSGEKAFIAKGAYERLQTLLSQKEDFFAEMKLRSKPFKEVKILRTLPGIDHVHAWQIVAYVVTPHRFASKYKFWSYCGLVKHRQISDGKVYGNKKAHGNNALKDVFRKAGKAAIRGSSGVKAYYEHLISKRGFGEREAYNAVCREIAALVRSLWKKGEKYNDEQYRKSKNLSHPS

SEQ ID NO: 454010 - protein, 342 aa, unidentified
MQVTTIGLDVAKRVFQIHGVDAAGAVVIRRKLRRSELLQFFAHLAPCLVGIEACATAHFWARELGAFGHQVRLVPPSYVKAYLKRGKNDAADAEAICEAVTRPNMRFVPVKTVEQQGVLVLHRARELLVRQRTMLVNGLRAHMAEFGIVVPQGIQRLPELVALLEDEKTGIPQIAHEVLAAMVVQINNLTTSIRQMEKRIVAWCRTNAAARRLSTIPGVGPITASALAATITDPTLFRSGRHLAAWLGLVPRQHSTGGKAKLGRITKMGDQYLRKLLIVGMTAVIRSARRTKAPAFAWVNALLERRPARLVSVALANKAARIAWAILIRGETYRAPAITAAA

SEQ ID NO: 454011 - protein, 387 aa, unidentified
MPKHNDLSRCLVTLEQASTLIAVVEMGQSSWLVAGIAPGLDRYPLKKLGPDRDALLQLLHRWRNEAAKVGHAINWIAVAYEAGRDGFWLARWLRSQSIEAYVIHPSSVPVSREHRRAKTDRLDTELLKRAFLGWLRGEPKHCSMAAIPTLEDEDARRPGRERQILVGERTRILNRLKANLARLGVHGFRPNLARAPSQLGALRTPEGVAIPTNTLAEMRRDLDRLRFVKQQIKEIEKTRAERLAKAPDERRHAAARLLTRVVGVGIETADMLVQEVFSREIRDRRALARYAGLTGAPDESGQRRRERGLAKAGNARVRRGMIELAWGHLVHQKGSSLTTWYRRRTVDARGGARKTMIVALARKLLIVLWRFATTGEMPAGLLLRPAA

SEQ ID NO: 454012 - protein, 391 aa, unidentified
MIIVGIDVAKDKHDCFITSSTGEVITHPFTITNNLGGYETLMRRIHEATPNLNEVRVGLEATGHYGYNILSFLGKMKLKSYVFNPLLIHQRVKGQSLRMTKTDRLDARSIAVMLTTELNSKPYSLKSYHILELQALCRNRFRLVRQCARIKQDVSRLVTVLFPEIETVFSSLHLKSVQALFKAFPGASYIAKASVEELTGLLSDKSKKVHGYQMACRILELAQKSVGTVSLASSLELQQCIQRIELMTEQVKDVEKAIFEYVEAEPPYCLSIPGISFKLAASIVAEVGDFRRFETADQFLAFAGLSPTTYESGKYRSSHARMEKRGSRYLRYALMTAARMVATHTKTYGQYFAKKRSEGKPYFVALSHVAKRLVRLIFRLEINQETFRLDK

SEQ ID NO: 454013 - protein, 387 aa, unidentified
MPQLNDLSRSLVALDQDSTIIAVVELSQSSWLVAGVLPGIERQPQKKLEPSAERLLGLLHRWRDEAVRAGKKITRIALAFEAGRDGFWLARWLNARGVEAHVIHPSSVAVSREHRRAKTDRLDTELLKRGFLGWLRGERGHCSMARVPTIAEEDAKRPNRERECLVGERTRIVNRMKATLARLGVRNFKPTLRKAAERLATVHTPEGTPLPRNVLAELQRDMARLGFVVSQIREIEQARQKRLEQETETGPHAMVRQVARVIGIGIETADMLVHEVLSRPMRDRKAVARYAGLTGSPDESGARRREQGLARAGNARVRRGMIQLAWRFLRFQKESALAQWYRARTADSRLGTRKTMIVALARKLLIALWRFVTTGETLEGVILRPAG

SEQ ID NO: 454014 - protein, 406 aa, unidentified
MELVPIHKRVIGLDIHQAQVTACAIIEESGGETRLEQRQFGAFKRDRRELAVWAAALDPDEVVMESTGIYWKSPYAALEAVGIRATVVNARHVKQVPGRKTDVGDAQWLATLARAGLLRGSFVPPAQLRELRLIARQRQKLVGLLSSEKNRMHKVLTDAGIRLGVVVSDIHGQSARAMIKGILRGQAPHEVLQRASRRLKASREELHDALQGELTASHVFVLDELLRHIEELEARIARFDARLLAELASEHYALALLQTLPGVDLIGAAMLLVEIGSDMSVFGTSDRLASWVGLCPGNNESAGKRKSGRVRKGNPYVRRLLCEFAHAASRTKSAFQAKFQSLIVRRGHKRAIVALAHKMLRTIFFMLKRGEHYRDSATNYEQLSVQRNASRWIKALTRFGFIPAAA

SEQ ID NO: 454015 - protein, 335 aa, unidentified
MDIRYFIGVDISKTTLDWAVFDGKAIVLQSQSANSEVGIKTTLKLIKALPGFRLAESVCCMEHTGIYNAHLLAHLYKLSFPLWLESSLQIKKAGGLQRGKTDTIDAQRIAEYAFRFRDQMRLWQPARPVLQKLSALSALRQRLMLVRQQLQQPITEQDGFIDAALQKQLAKNCQASLKAINADLQIADKQITELIEGDDRLKELFAWITSVPGVGPATATEVIVATDEFKAISDPKKLACHAGVAPFEYRSGSSVRGKTRVSPHARMRLKSLFHLGAMSAVRMKGELQEYYQRKIAKGKNKMSVLNAVRNKLIHRVCSVVHRGQKYDKNYTPTLV

SEQ ID NO: 454016 - protein, 411 aa, unidentified
MVKENFIYVGIDLHKETHTAVMIDCYNQKLGEITFPNRPADFPKLVTKVKKCNTDAKEVVYGLENAYGYGRPLAVWLIDKGYFVKDVNTAISHRQAKHRGAMYRKSDSDDAEAIALATLNMLDKLPDACPNDAYWSLGQLVHRRDNIMKQRTRLVNQLHEQLCIAYPSYKSFFNDISRPTALYFWEHYPSKKYLKGKSVEDLRAELVPVSHNKCSTKTCEKILDAVASDKVKNNAYQDARDMVTLSIVSDLQHYDSQLTEVDKMLEQMYKMLGCTLTTIPGVNVITAVKILAEIGDIKRLSNANKLAQFAGIAPLHLSSSGKGKDLATKQGNRRLQATIYFLAIQMVHISSKGTPRNPVVRAYYEKRKAEGKTSQQALICISRRLISIIYGMLKSGTEYRMPVVENAGENR

SEQ ID NO: 454017 - protein, 315 aa, unidentified
MIVLGVDVSKGNLHAVLLEADGRMGKRSFPNREVGFEQLVKWLRNRGVDRVHVCMEATGGWGEDLGIYLHDRGHTVSIVNPARIKAFGQSEGVRTKTDDVDAALIARFCQTQAPDAWKPPSPKERELQALIRRREGLIDMRTQEINRASSARRTDAVRSSITEHIAYLDTMIANIEADIRRLVDEDDDLRGKRNLLTSIPGIGEQTAHTILGEVPGLSEFRDVKAVAAHAGLSPKHHQSGQSPGISRLCKAGNANLRKALYFPALAAMRSNPTLKAFADRLQARGKRKMVVIAAVMRKLLIIAYGVLKGGRAFAA

SEQ ID NO: 454018 - protein, 355 aa, unidentified
MKVKKKVRTNKKVKTNKLNTFTALEGYAHYLALDYSQECYSLGRVTPSMSEPKITRGSRQVEDIQTQLKKLRGKKILTIEETTSTHWLYVELKEYVDKIVVCDPYRNSLLSEGAKDDDIDAGKLSLLLRGGFLKEVYHTMDEDYIIRKLISAYEDLIKSGVRVKNQQSSIYRSMGLSYKKRESLGNNPIVKFIEAQQNISIGIYEETKKKYIKEFEQLRSKIAVIEYMCKVSGINTISSVKIYGTVIDGKRFLTKNKYWGYCGLVYHQKLSGNRSYGKRKTRYSRVLKSVYKTAAVAAIRGNNDISEYYKYLLSKGLAEDKARNQIARYIAKVTYAIMKHEVEYIPYMWKKPMAA

SEQ ID NO: 454019 - protein, 352 aa, unidentified
MDHFIGLDAHKNSCTFVVLGSKGQAKRKEVVETNGRALVEFVKRIPGRRHLCTEENSQSQWLYEILSPHVDDLAIVLGRKSRGDKSDDRDAHALANRMRLGDLEQRIYKLPVLFTTLRDLVRSYQTINKDLVRVKNRIHALYRSRGVPTQEAGCPFCAQDAPHAGGCRNPGLHRFIERLRRQQESLEALKVEAQKDMIAEAKRHAIMRILQTAPGFGPIRSAELLSIVITPYRFRTSRQFWSYCGLAIVQRSSADWVRLPNGKWVRASVYQSRGLNRNFNRAAKTIFKGAAMTVEKSSRHPLRADYDRLLANGTKPNLARLTLARKIAAIVLSMWKNQQAYEPGRRSDVKNK

SEQ ID NO: 454020 - protein, 399 aa, unidentified
MKSPCVAVDVSKGKSYYQGFIEIDKPANKATPIQNDLEGFKSVHELGQTLKETYSDVVYVFESTGIYHKALETFLMNHDEKCIILNPLEASKIRKTDLRSTKTDLRDCKSIAKAYFMKDFRLHNQKDELYEKLQSMNGHYNFLIQQFREMKVHFRNALDIVYPRFDEVYPDPYLDIPMSILKRYAHPDELKSRRVETIVKYIMKDTKHRESKAMTEAKKLKDYIDKVSSGCRSSSFEVTILKTMLNKISEQEVEIELCLDEMRELVSDVPLYHQLMSIPGIGDNIAIRLIGELGNLDRFERSEQLVAYAGIDPRVYQSGQMTGEHLHITKKGNKHLRTLLFLAISSNIRVCKTNIILNFYNKKRQQTNPLVYKAALIACANKLLRIIFGMYKSGKNFHN

SEQ ID NO: 454021 - protein, 432 aa, unidentified
MNPFSVSPEPSPMAAWVGLDWADQQHVICLYEVDTGQSTVSRLEQKPEALQDWLSQLRQRFGGAPVAIVLEQARGAVIYALLSADFVRLYPVNPQSLASYRKAYAPSGAKSDPADAVLLMEMVRNSPERFRVWKPDDAGTRSLQLLTENRRQLVNQKTALTNQLTSLLKTYYPQALELAGALDNLQACDFLKQWPTLEALQQARAGQIRQLYREHGRPSSEQLDQRLEQIRQARPLTTDPAALLSGSMMVQVLVEQLRPLLAAIERFDRQIAVIFGKHPDRPLFDSVPGAGAVLAPRLVAAFGTDRDRFQSAQQAQQLFGIAPVTEQSGKQRWVHWRWACPKFLRQTFHEFAGHSRHWCGWAKALYQRLRRLGKGHHAALRVLAFKWIRILFHCWKTRTGYDEQIYLKSLQKRNPTLWAEIQLLPPRKKKVA

SEQ ID NO: 454022 - protein, 453 aa, unidentified
MKKETEKKGLLRIGSGLPVFNSHAAGIDIGDTLQCVAINDKNGGHEVKTTTAFTCDLIEIVDYLKINGITTVAMESTGVYWLPLYIMLEEAGIEPYLVNAKHVKNVTGRKRDDTDAIWLQKLHTCGLLQKSFQPDNEIRVLRNYTRQRKNLISLSSDAVRRMQKALEQMNIKIHTVISDILGVSGMNIVKAIIAGERDPQNLSTLCDPRIKAPKEEIVKSLQGVWNEECLFFLEQAVENYEFHQKQIKSCEEKIKQQLLKQVAIIKEGDISGLEQVPKNKVKAKPKKNQFDSSLSKYLIAITGIDLCKIPGISEITTLEFISEVGVDMSKWKSAKHFAAWLNLAPNTKISGGKTLSSKMLQKKNRAGQYLRQAASSLSINKTPIGDYYRKMRSKLGGKGAVLATAHKLARIIYTMLSKKIEYNSDMIFENQEKMKLDRIRKLEKQLARLKQAS

SEQ ID NO: 454023 - protein, 346 aa, unidentified
MKKIFIGIDFSKEKFDATLIKAEGLKECAPSMHEVFDNKTSGFRRLVRWVKGQSEGLPIDTWLFCGENTGAYSIGLSNYLYASGYDMCLECAYKIKHSAGILRVKNDKADSKAIAEYAMRNYDKVRLHKPQSSSLTCLREVFLYRHSLVRQKVALTVRRDEKRLTQEKSDARAFMSFTSKHLITEINKAIYKCDQKIKETIAADDELREIFDIITSMPGIGVQNATCLMVYTDNFQKFDMDSRKIACYYGIAPFGRQSGTSVNSRPKVSPFANRMIKSLLSQAALAAIKSDINIQNYYQRLIERGKHPLLIHNNIKNKMLHALVAMVRDRIKYNPDYVYQTNKSVA

SEQ ID NO: 454024 - protein, 330 aa, unidentified
MTIAVGIDIAAKTFDMVIRRSGKPSKPSTFKQTPAGHAAVIKQLKKLKPRSIVMEATGIYYLDLAVAIAEAGLPVSVINPKSFRHFCALKLNGTKTDGVDAALLAEYGERMAPRLWTPPRDLYLKLRDVGRQINRLTHSRTQAKNRLHALTSTRMTLALLIEDEQEAITMLDRRIDRLTQAALELIEQDQTLSRHMQNLCAAKGVGQATAIAVLAELMVLPDSLKAPQVSRYAGLDIRLTQSGSSVNRPARLSKAGNAYLRSALYMPAMCAVRHDPRAKAFYDALVYRGKKKMQAQCAVMRKYLTGMWACIKDETAFDSSQLFSEEHMKA

SEQ ID NO: 454025 - protein, 416 aa, unidentified
MVPIYVGVDVSSYDLKICILDASGEILVNKFTVTNDDPGSSNLISKIMEVSNKYSFDKIFFGLEATGTFGSPLQYALADSDLLKPFNPTITVFNPNIIFEFRKSFGNLPKNDFKDSYVIAERVRFGKLPNDCNVDFRYLALQRVTRYRYHVVQTITREKNFYLSNLFLKYSGIYQSDVFSSNFSATMSSIIDDFETVDDIATCSLDNLIDYIMDKGKKHFSDPIETAEKLKKAAKRSYRLDRLLSDSIGFVLQSCLRNINLLQKEITVIDKTIAKQVEMFRTEYTILNSVKGLGPVFIGGLIAEIGGIHRFPNQNALAKFSGLYWSEYQSGKFTAEDSSLQRSGNQYLRYYFVQAANQLRKYLPEFSEYYSRKFKESKTHHHKRALILTARKAVRLVFVLLRENQLYIPPAKKGAD

SEQ ID NO: 454026 - protein, 324 aa, unidentified
MIDGVLGIDVSKNTLDASMSSCNKVRARSFANSPDGWRHLLDWLITQRVRRVHACLESTGRYSLGIAGALNEAGHVVSIVNPAQIRDFARTKLGRNKTDGVDASHIREYCELFKPHPWAPPSEAHRRLGELQTIRAGIIAGLTEWKNRKNSGMIDAVAQSLADVTISHFTSQLSAVDEAITQTIDHDSVLRRKRDLLLSISGVGETLAGVVLAELPGPDVLHSSAEVVAYVGLNPRQHQSGTSIDRVTRISKIGNAVLRAALYMPAMSAMRYNPAIVALVARLKSRGRLKPKQIVVAAMRKLLVLCFGVLKTGKPFDPAIAMGR

SEQ ID NO: 454027 - protein, 317 aa, unidentified
MTYSELFVGIDVAKDELVVCFHPAGEIRRIANSRTGLALLGKQLLQLARGHCLRVGFEASGGYERGLAILLDRLALEAYLLDPARVRSFARAERQLAKTDPLDASLIARCLAAIHPQLTRHVHDPKAVQLAEHVRLRDLTVAQAVQMGNQLESIADKAMRKLVTAQVARLRALAMRIEKAIAALIAASPALAERERLLRSAPGVGPIVAACLIARMPELGRLSSRQAAALVGVAPFDRQSGNYTRPARCHGGRPTVRRALYLAALSIARNGKSHLACIAMRLKAAGKPNKVALVAIMRKLVITLNAMIKHNVPFQPA

SEQ ID NO: 454028 - protein, 349 aa, unidentified
MNRTTYGLDIAKGVMQLHWVDIETGEIGRKKLVRAKLCDHFAQLRPVRIVMEACGGAHHWARTLGALGHDVELLPARQVRAFVRSNKDDAADARALWIAAQQSDIRRVPIKGIEQQAVQALHRTRQHWISVRTATINALRGLLYEFGVVLPGGKQVGLKALSLRRPQIDAQVPAPMQRLIDGQLAMLKDITQRVDQLEAEIAAVGKARATEARLRQVPGIGLLGASALAATLGDASGWKSGREFSASLGIVPAHTGTGGKVRLGHISKRGDPYLRTLLIHGARSVITHAKNKPRWLEQLLARRPLNVVVVALANKMARTAWALVAHAREYQTEWKSTPPTSCAAQAAAA

SEQ ID NO: 454029 - protein, 335 aa, unidentified
MIKASIGIDISKDDFHVCFKLRDEQGRIKIIGTRSFKNTLKGFIELLEWVKKKNKSNTETVFVMEATGVYFENLVNFLHDKGEKASVILPNRMKGYFKSLNIKTKTDKVDSKIIAEYGIERRLEIWKPMSGNYKAVRELCRELLALKKDKQRAKNQLHAMKYGHDRLDKLIKMKEKQIKFYEKNIKDLQKHIKIAVESDPKLMDKISKIVSIPGLGFETAVILASETNGFLLFHNIRQVVSFAGLDVSHNESGKFSGRSKISKKGNAKIRQALYMPALSATSANKPIKELYERICDKNPQTKRKGVVASMRKLLSLAYTLWKKDEVYNPEYNWAA

SEQ ID NO: 454030 - protein, 420 aa, unidentified
MARTVEIVYPVCCGMDLHKSFVVACIAVTDEHSHTAHHIKRFSTFTGDLRRLADWLASYNCVDVCMESAGKYWIPVFNTLEKTCNVCLTHPKYVKAIKGKKTDKKDAKWISELFKCDLVRSSFIPPPDIRQLRDLCRYYVKLTSFVSSEKNRAQNCLTMCNFKLDDVFTDVFGKRATRVLDALLEHGNSDFELDGLLNGNCKSSPEKIHAALDGDLDPMQAEKLSLIRRHMDDLGGLKTALESLIYKLAAKYQPQIDLLMTVPGVSAPLTAIRILAEIGADMSVFETSKQLVSWAGLTPQNQESAGKKKTTRIGRAGAYLKPLLVQIALAASKSDKHPELKNKYLALKKRLGGKKAVIAIARKLLTAIWHILSKNQAYNAELYRKADKPPVTREFTTAQAVAFLRSKGFVILDEETGEIA

SEQ ID NO: 454031 - protein, 347 aa, unidentified
MNILKQTVGIDVSMDNFEARFGTIDSSQEEKISLPQNFKNNISGFKKLLNWVVKQRTSESLPVIFVMEVTGIYHENLAHFLFENGQQVVIVLPNKIRNYAKSLETKSKTDPIDALVITRFGLERKLEPWTPPEPFISAIKALCREYHSLKEMSTEIKNQIHAKEYAFFNDKTTINRKKKLLNTLQKQLNEILSEIDILIKSKTELNNKINNVATIKGIGTITIITILAETNCFEHVTNINQLISYAGLDVVLNQSGKKKGKTTISKKGNKFIRKALFMPAMSACRSNYKMKEVFARLVSKGKNKKAAIIAIARKLLVLIYTLWKNDSVFIQDYHGTNSIHNNSVLCT

SEQ ID NO: 454032 - protein, 350 aa, unidentified
MTQSSKIIGVDLAKSVFQLALANAQHHVTATKRLTRRQFHTFFVNHPPVHVVMESCGTAHYWARTLQALGHTVTLLPAQYVRPYVRRNKTDRNDARAIVEAARNRDIMAVPVKTEYQQALQSLHRLREQWKTTRTARINALRGILREFGVLVPLGPRAAIESTQDALPTLPALLQPAVQHVLNELTEIQHRITQLEKQLKHVVKDDVVIQGFMQINGIGLLTATAMRASVQSPAQFKNGRQLSAWLGITPREYSSGDKRYLGRISKRGDKYLRTLLIHGARSVMVRIKIRQRAHQELTALQAWAAQLEQRVGHNKATVALANKMVRILWATWMHQREFDGNYRSQPVTQS

SEQ ID NO: 454033 - protein, 359 aa, unidentified
MKIVGCDFHPSWQQVAVFDPETGELTERKLMNGDGEAERFYREMEAPALVGIEACGNSQWFVELAEGLGHEVWVGDAAQIRASYVRKQKTDRRDAGHILKLLMEGRFPRLWTPSAEQRDMRQLLVHRHKLVEIRTRVKNGLQHLALNKGLQKKNALWSVRGRACLEKLLLEGWTLRRREDLLKLLTELNRTLDELDKAVSEAAEADPQARLLMTQPGVGPITSLAFVLTIGDISRFQHSKQVSSYLGLIPREHSSGGKQRLGAISKQGNRFLRQLLVEAAQTATRLDDGFRKEYQARCHHKPKGVAKVAAARKLAVRLYWMLRQNVGYPEIARIESSPRVALAGENQADELIGRSRIQQ

SEQ ID NO: 454034 - protein, 353 aa, unidentified
MTSTKYIGMDVHKESISIAVRNDAGKIVMECVIETKSNVILDFIHGLRGELQVTFEEGTWATWLYDLLKPHVTKLVVCDPRKNSRQGNKNDRIDARELSDRLYMNKLSSVYHGGAGVRTLRELARSYLTISKDLARVMSRVKAIYRSWGIPCAGKQVYAPRHRAEWLAKITEVGVLRRAEFYYQQLDALRPLRHEVRRELLAESKKHPSTKLLRQIPSIGPIRAALLIALIQTPHRFRTKRPLWKYSGFGIEMHSSADYRSVKGQLQKSKKQVSVRGLNRDCNHDLKNLFKSAATIASVKPGPFQEFYAALVAKGMRPEMARLTLARKIATIVLIIWKRGVSFDAKYLKPQTA

SEQ ID NO: 454035 - protein, 435 aa, unidentified
MKTNYPPDSIQWAALIGFDWGDCQHAVAIRANNQSVEKLQLTHAAETLHGWLDELEQRFGGRPVAIAIEASRGACVYAMMERPWIHLFPIHPATSHHQRRSFRPSGAKDDLPDAELLLSLLERNFDRVRLFQAHDPATRTLNELAQARRKAVDRRTLLSNQLTSALKDYFPQALEWSGEKRAAAMALDFLDKWPSLLDLKASKPDTIRRFYHAHNVRRPELIQERLQQIRSAKALTTEAAIVDTRVRVVRLLVAELRVLQEHISGFEEAIAKVFAAHPERALFSELPGAGANLAPRLVGLFGTDRGRWAHVSELQRLIGVAPVLEKSGSHYWVHWRWNAPKFLRQTLSEWAAQTVVYSPWARAYYEHQKSRGHGHWSILRSLAFKWLRILWRCWQSNSPYQERRYLDQLLKRRSPIATRALQLAQEMGHGNLKIS

SEQ ID NO: 454036 - protein, 406 aa, unidentified
MRRTDHRATHPRSAVHAHDTALFVALELSRSTWLVGSSMPGSDRVSRHQVRAADTTALLALLKRLKARAERSCGATVRVISIHEAGLDGFWVHRFLEANGIESHVVDAASIAVNRRSRRAKTDRIDVEKLLDTLIEWARGGRRACSMVRPPSSAEEDERRLTREREALVIERTRHVNRIKGLLATQGVFGFEPMRKSHRRQLEHLHAWDGQTLPPRLKAELARELNRLELVISQVAAVEGERDRALKAQQHPAPSISAPEATASASAQPTATEHAGRLLLRLRSIGPEFASVLSSEAFYRNFSNRREVAGYAGLVPSPWKSGGIDVEQGISKAGNARLRKTMIQMAWLWLRHQPGSTLSRWFHKRVGDRRGKIRRITIVAVARKLLIALWRYVTLGLVPEGAELKV

SEQ ID NO: 454037 - protein, 390 aa, unidentified
MDVAGRRLAKARLPEGVAGIARLHAMIGEQLGDDEDVMVVVGIETERGPWVQALIAAGYLIYAINPLQVARYRERHGVSGAKSDTGDAHALADMVRTDRHQLRPVAGDSVQAEAVKVLTRAHKTLIWERTRHLLRLRHALREFFPAALDAFDDLAATDALELLATAPDPASAAALTIEQITAALSHARRHGRAAKAETIAAALRAEHLSQPAVVTAAYAATVRAQVAILTVLGTEIKTMDKQVEAHFGKHPDAEIYLSQPGLGVVLGARVLAEFGDDKQRYVDAKARKNYAGTSPITRQSGKRKLVLARYVHNDRLIDALGLQAFSALKASPGARTYYDQLRARGTGHRAALRQLGNRLVGILHGCLKTGTTYDENTAWTHTRQDQELAA

SEQ ID NO: 454038 - protein, 312 aa, unidentified
MAQMVVTAGIDVSKPRLDVEAWPTRQQIGVSRDAAGLATLIAWLTEHGVMRVGLEASGGYERLVLDTLQDAGFEVVLLNALRVRRFAQAKGRLAKNDRVDARTIAQFTAFMVEQVPTPRRRDLDPLVELLTVRRQLKHWITDCTNQLEHLRDAGLRKIIRLRQDSFEREVAKLDKKLVALLNAHDDWQALARRLRTVPGVGPVVAPTLIALLPELGRLSRRMIASLVGLAPYDDDSGKRRGERHIKGGRATVREALFMAAKVARTHNPVIAAFASRLEGKPPKVILTACMRKLLVMLNAMLRDGTDWRLAAA

SEQ ID NO: 454039 - protein, 338 aa, unidentified
MKLYGGIDLHSNNSVIALSDESDKVVYQRRLPNDLGLVLTALEPFHDNISGLVVESTYNWYWLVDGLIAAGYDVHLANTAAITQYSGLKYADDHTDARWLARLLRLGLLAEGYIYPQAERAVRDLLRKRSQLVRQRTTNLLAVQNLCARNLGRTPSANQVKRLTDDEVDRWLRDANHALAVKSNLVILRVLDEQISQLARAVKGQVKLRPAFKPLLTVNGIGDILGLTIMLETGAIERFAKVGNYASYCRVVGSRHTSNGKRKGQGNTKNGNKYLAWAYIEAANFAVRYNPQIKRYYQRKRARTNGVVATKTVAHKLARACFYILRDQIPFDVDKAFA

SEQ ID NO: 454040 - protein, 362 aa, unidentified
MRAITIGVDLAKQTFSTCEVDASGRVVRRKDFGREGFAAWLAQVPAGAVVAMEACGSAHHWARRCLEYGAVPKLMAAPKVVPFRKSRTTKNDRNDAEAIATAARQGNMCFVPVKSVDQQARLSCHRVREGYKVQALAIANRMRGLLAEFGIAVAHSNAALRRVLGDSAVRSKLPAPMPELLDELKQQWLEVSKLLAGCEARIARHARADDRCVRSQRIIGVGSLTADAVVATVGTAKEFRNGRQFAAWVGLTPMQYSTGGRTRLGPISCRGDTYLRTLLIQGARSSLRLAQAVAPERATPEQIWIQQLADRLPFGKLVVAIANKHARQLWAILAHGEDYDPHAWMKHPMVQRAAVHPRAAAA

SEQ ID NO: 454041 - protein, 354 aa, unidentified
MNSVRYVGMDVHRDTISVAVLDEGGGLTMQSVVATRAAAILECIHGMRGTLQVTFEEGTHSAWLYDLLVRRVAKLVVCNPRKNALLKSGSKSDAIDARKLAELLRAGLLSGVYHGETSALEVQQMARSYTQLTEDTTRVMARLKAVFRGQAVSCAGKKLYGKRHREEYLAQLSGGLRRRAEHLYQELDALQPLRHGVRRELIVECRKHAAAQWLQSVPFLGPIRAALLIGRVQTPHRFRTKRQFWSYCGLGLETRDSGEYRMVNGQVERRRRPTLIRGLNWNHNHEMKNLFKSTATAASVRQGVWREFYLQLLEKGMRPEMARLTLARKIAAITLKIWKKGERFQAEHLKLQAA

SEQ ID NO: 454042 - protein, 346 aa, unidentified
MAKSSVAVLGIDLGENSCSLVGLDAAGAVVLRRRARRETIVGLTAKPPACIVAMEACCGAHHLGQLLAAQGHTIRLMSPEYVRPSVKAQKNDDRDAEAIAEAATRPTMRFVLLKAQDQLHMQSLHRVRSRLVGIRTMLMNQLRAILLERGLVFPQGRRKFETAIGTLLRDSEMPIGARIQSLVAEIREEWVSLDGRIDALDREFVTHARADEAARRLVSIPGVGPMTATALRAAVDDGSAFASARDLPAWLGLVPRQHTTGGKPKLLGIVRRGNAYLRELFIHGARAALTSLSKVEDPTGRWLRGLLVRAHYNVVVVALAAKLARIAWATLRKGVSFERRPEPAFA

SEQ ID NO: 454043 - protein, 344 aa, unidentified
MSEVIIIGLDIAKHVFHAHGADERGRAVFSKRISRGKLLDFFATQPSCTVALEACGGAHHWARQLTQLGHKVRLIPPAYVKPFVKRQKNDAIDAEAICEAAQRPSMRFVAVKSEQQQAAGLVFRTRDLLVRQRTQLINAIRGHLTEYGWVAPKGPSHVAMLADLLENEEMVNSLPEAARAMFRVMLDLLAGLNSKIADLDKEIARRAREDEVSRRLMTVPGIGPISATAIAALAPPAETFAKGRDFAAWLGLTPLQRSTGGKQKLGATSKMGERTLRRLLIIGSSAVVKQASKRGAPRGSWLEQMLARKPRMLVTVALANKMARIVWALLVKQENYRAPVAAKA

SEQ ID NO: 454044 - protein, 358 aa, unidentified
MADKVTVAAVVGGVDTHKDLHVAAVVDQNNKVLGTQYFATTRQGYRLMLAWMTSFGALKRIGVECTGTYGSGLLRYLQNAGLEVLEVTAPDRMERRKRGKSDTIDAECAAHAAFSGIRTVTPKTRNGMIESLRVLKTCRKTAISARRVALQIIHSNIISAPDDLREQLRNMTRMQLIRTLGSWRPDASEYRNVTNVYRISLKSLARRYLELHDEIADLNVMIAAIVDELAPELIKRNAIGYESASQLLITAGDNPQRLRSESGFAALCGVSPVPVSSGKMNRYRLNRGGDRAANSALHIIAIGRLRTDDKTKEYVARRVAEGHTKMEAIRCLKRYISREVYTLLRNQNRQVNSIPIMA

SEQ ID NO: 454045 - protein, 355 aa, unidentified
MESTKYVGMDVHEQTISIAVMNSAGKLIMESIIETKAITILQFIQGLRGDLHVTFEEGTWAAWLYDLLKPHVTKVVVCNPRKNALLKEGNKSDRIDARKLAELLRNGSLSAVYHGENGVRTLKELSRSYLTISKDLGRVMNRVKALYRSWAIPCAGTQVYAPRHRPEWLSKITEAGVRRRAEHYYQQLDALQALRHEVRKDLLVESQKHNATKLLRQVPCIGPIRAAQLVALMQTPHRFRTKRQLWTYSGLGLETHDSAQYRYVEGQLQRSKKPQQLRGLNTNHNHDLKNIFKGAATMASISSGPFHGFYEALLAKGMQPTMARLTLARKIAAITLIVWKKGARFDPQHLKQQAA

SEQ ID NO: 454046 - protein, 347 aa, unidentified
MEYFVGLDVSLETVNVCIVNAAGDILLEKKIAAEPAAIVHLLKSFGSPFKRIGLEAGPTSSWLYGELRAAGYGAICLECRHVKAGLSAMRNKTDRNDARGIAQLVRLGWFRQVHVKSEEAQRTRMLLVNRQQLLTKALDIENSVRGSLKVFGLRVGVVARRGFEARVLELVADDPILLAVTEPMLRVRQALLEEFERLDRLCQQLARRDPVCRRLMTVPGVGVVVALTYRTGVDAPERFSKSRDVGAHFGLTPKRYSSGQTDYDGRISRCGDEMVRTALYQAANVLLHHGRWSSLRSWAMRIAKRGSVKGAKVALARRLAVVMHRMWTDGTDFRWSDTSRMTVPTAA

SEQ ID NO: 454047 - protein, 457 aa, unidentified
MSRRGKRTQGMEKAHPFQGMSRVNPNAAGVDIGAVEIVACVPGEGNTQIVRAFGNYTVDLQALGRWLADYGVKTVAMESTGVYWIALFEELERQGFECLLISSRSLRRVAGRKSDISDAQWIQTLHSYGLLESSFRPQAELIALRTLLRHRAQLIEHRSPHIQHMQKALLQMNVHLSQAVSDITGVTGLKIIEAILAGERSPEKLAALREPGCKKSAEEIGQALTGTWREEHLFVLKQSLAMYTFYSEQIATCDEEIERVYGLTYPDRKDGEVAPLRERKRNSHSKNKPKNEESIRQHLKRISGVDLSVVDGFGVSLAQTVIMEVGTDMSKFPGEKHFCSWLGLAPKHEISGGKVLKNKTLKTKNRAGQAFRMAAQSVKQADCVFGVMYRRLRARLGPAQATVATAHAIARVVYRMLKYKVEYETISVEEYEQKYKAQQLKYMRKKAAKLGYQLTPA

SEQ ID NO: 454048 - protein, 411 aa, unidentified
MLKIVYPICCGMDIHKSFLVACIATTNEQGVTTYKSKRFSTFTGDLRRLAQWLCENECRDVCMESTGKYWIPVFNVLELTCNIVLAHPKYVKAIRGKKTDKKDAKWIADIFKHDLVSGSFIPPADIRQLRDLVRYRWKLTNFTTGEKNRAQNCLTVSNIKLDDVFSDVFGKAASAITKRLLESNEPFDVSDYLTKGIKASKEEIQLAVDGVMCVEQAEKLRIIRSHMDSLSLCKANLESLILTIAEKYLPQLELVLTVPGIQSFSAVGIISEIGVDMSVFPTSKHLCSWAGLTPQNNESAGKKKTTRINRAGAYIKPLLVQCANAVVASKKHPEIRSRYIAIKKRRGHKKALIAIARMLLTTIYNILKKKEPYNPELYRKSDRPPSHREVPVDEAIFILQRQGYLITAPTA

SEQ ID NO: 454049 - protein, 355 aa, unidentified
MNQEKYIGMDVHQATISVAVMDAGGKLIMECLLETKAGTIVEFLRGLHGTLWLTFEEGTSAAWLHDLLKPHVNRLVVCDPRKNALLKDGNKSDRVDARKLAELLRGNQLHAVYHGEHGVRTLKELGRSYLTITQDVTRVMNRIKALYRSWAIPCAGTTVYAARHRAEWLAKIAEPGVRVRAQRLYQQLDLLQPVRLEARREFLAESHKHSAVKLLRQIPSIGPIRSALLVALLQTPHRFRTKRQLWAYSGFAVETHDSGEYRSVRGKLQRNRERMTVRGLNDNHNRDLKNLFKSAAISASTRPGPLRDFYVARVEKGMRPTMARLTLARKMAAISLTIWKKGVQFDPQQLQRQTA

SEQ ID NO: 454050 - protein, 410 aa, unidentified
MDVFCGIDWAEDHHDIALVDRDGGLVARLRVSDDAAGLARLLDLLAEKGDSAGDPVPVAIETPRGLLVACLRAAGRKVYPVNPMATARYRDRHSMAGRKSDHGDAVVLANVLRTDLHAHRPLPADSELAQAVAVLARAQQDAVWDRVAAHNKLRSHLREYFPGFLAAFAAAKGGIMRPEARAVLAAAATPADAAKLTLAQLRALLRKAGRSRGIDAEAQRLRDAFRQEQMRQLPLVEQAMGRQTLALLRQLDAACQSADDLEQAAVESFNQHPDAGIITSFPGIGALTGARVLAEIGDDRSRFQDAKGLKAYAGAAPVTRASGKSRSVTHRRVKNNRLAAAGYIWAFSAITASPGARDHYDRRRDAGDRHAAAQRNLFSRLLGCLHHCLTTGQHYDEATAFPTRTIPAAA

SEQ ID NO: 454051 - protein, 317 aa, unidentified
MSTPVASFVGIDVAKHQLDVAVRPSGETWTVAHDEGGLSALLARLREVAPTLIVLEATGGLEVPLAGALAAATLPVAVINPRQVRDFARSTGTLAKTDRLDAQLLAQFAEVVRPEPRPLPDAQAQELTALLQRRRQLVEMLTAEKNRLPLAARRIRPPLHAHIVWLHKQIAQFDEDLRQLIHASPLWRAKDDLLRSAPGVGPVLATTLVAALPELGTLTRRQIAALVGVAPLNRESGTLRGRRTVWGGRAQVRAVLYMSTVVAVRHNPVVAAFYQRLRAAGKAPKLALTACMRKLLTILNAMLKHHTRWAPVMAPHA

SEQ ID NO: 454052 - protein, 345 aa, unidentified
MKITTVGIDLAKNVFAIHGVNEHGRTVLKKVLKRDQVAAFFANLPACLIGMEACASAHYWARKLQGMGHTVRLIAPQFVKPYVKSNKNDAADAEAICEAVARPNMRFVPIKNVEQQAVLAQHRARQGFIKARTAQANQIRGLLAEFGFIIPQGIANIAKRVPELLEDATNELPGSFRLLVQRLMEHLKELDHQADEIEAQIVTWHRDNELSRKLAEVPGIGPITASALVATVSDAKNFDNARQMAAWIGLVPRQNSSGGKNVLLGISKRGDTYLRTLLIHGARSVICAFQRKKNKVDGWLGALLARRNPNVVAVALANKNARIVWALLAHGREFRPDYTSAKAAT

SEQ ID NO: 454053 - protein, 347 aa, unidentified
MKFYTKQHKYYCGIDLHTKKMFVCILDAGGNIRVHQNIKTDPEAFLRIITPFRDDIVVTVECMFTWYWIADLCVEQNIPFVLGHALYMKAIHGGKAKNDKIDSHKIATLLRGGMLPQAYVYPARMRATRDLLRRRNHFMRKRAELFAHIQNTRSQYNLPDPLGCIAKPQNREGIVERFNDPSVQKSMAANLEMIEAYDRLLTQLEHDIIASAKEHDLRSYALLQTIPGVGRILALVILYEIESIERFPQVQDFVSYCRLIKSIKESNGKKYGSSGKKIGNAHLKWAFSEAAVLFLKGNEPGKRYLERLTRKHGKAKALSILAHKLGRAVYFMLKNKEAFNQKKFLGL

SEQ ID NO: 454054 - protein, 372 aa, unidentified
MYNTTVYVGMDVHKESFTVCAYTVEADKASYFQKMEADYKKVLSYLDYLRRIYGEAVEFVCGYEAGCLGYTLYHQLTDHNVNCKILAPSTMLEQRSKKRIKTDKRDAELIAKCRASRSYSPVHSPTQQDEETKEFLRMRDDHKLALKKIKQQILGFCLRHNYHYGSRHYWTQVHIKWLRSLKSEGLYSEILTEYLLTYDALTDKIERLDRRIEELASQEVYAEKVKMLTCYIGVKTNTALSTVVEVGDFHRFATAERFASYIGLVPGEDSSGPDCTRLSITKAGNRHVRLLLVESAKCFGRGEIGFKSRELKARQAGNRSEVIAYADRANERLRRRYYKMVLGQNKKHNVATVAIARELACFMWGMMTDHIA

SEQ ID NO: 454055 - protein, 355 aa, unidentified
MTSAKYIGRDVHKETISIAVMNSMGKLLMESIIETKAGTILQFFAGLRGDLHVTCEEGTWAAWLYDLLKAHVTEMIVCNPRKNALLKDRNKSDRIDARKLAELLRLNYLKPVYHGEHGLRMLKELSRTYLAISKDLVRVMNRLKALYRGWGIACSGRSVYAASYREAWLKKIIEPGVRLRAEYFYQQLDTLLRLRREVRRNLLIESRKHSATKMLSQIPTIGPIRSAHLVALIQTPHRFRTKRQLWAYSGLAVETHDSAQFRYVDGQLFRSRKPQQLRGLNEDHNHDLKNIFKGAAQKATVGAGPFREFYERLLAKGIKPSMARLTVARMIAAITLAVWKKGVRFDPEQLKLQAA

SEQ ID NO: 454056 - protein, 410 aa, unidentified
MQVVHERCCGLDVHKKVVAACVLTPAAEGRSHKELRVFGTMTDDLERLADWLAERGVRHVAMESTGSYWKPIWNVLEERFALVLANAAHVKAVPGRKTDVKDAEWLAELLRHGLLKGSFVPDRAQRELRELTRYRTSLVEERTAAVNRLQKVLEGANVKLASVASNVAGLSARRMLDELVAGSTDAAALAELAVGRLREKIPALERALSGRMGDHQRFLLAQQLAHIDFLDEQIARLDAEVAERTRPFEAQIARLDTIPGVSTRIAEILVAEIGTALDRFPTPGHLASWAGMCPGNHESAGKRHSGKTRKGNPALRRALVQAAHAAGRTKTTYLGAQYRRLAARRGAKRAAVAVGHSITTIAHYLMTRGTVYQDLGPLYFDLHDRDAVRRRLVGRLEKLGYKVTTETAAA

SEQ ID NO: 454057 - protein, 352 aa, unidentified
MNEITTVGIDLAKDVIVVCAGDASGRTLFFRQFGLRGFASWAANLPPCVIAMEACSSAHFWARTLTGLGHRPKLLAPDLVQPFRKSKGAKNDRNDAQAILIAALQPDMRFVSVKSVEQQSILACHRMREGWKSERTALINRVRGLLAEFGLWIGRSPHNLARSLPRLIQDEQLPGRVRALLCQAQEHLLRLEALMEQCELEICEHARQSEPAQRLCAITGIGPITASAIVVSIGNARDFRNGRQMAAWAGLVPKQSSSGGTDRLGKITKRGDTYLRGLLTQGARSTLNAALARPPDKRSPLQHWIVALRQRVGYHKSLVAIANKHARICWALLARAERYDPHAASRHLRAAA

SEQ ID NO: 454058 - protein, 358 aa, unidentified
MVTGLKHQKEKRSMDHFAGLDVSVKETSVCIVDDSGRIVREVRVASEPEDLLPVLTNPAYHFKRIGLEAGPLSQWLFGALAEAGLPVICVETRHMRAVLKAQINKTDRNDARGIAQMMRAGLYRPVHVKTLRSQKLRMLLTHRKLLQSKAIAIDNDLRGTLRNFGLKVGMVGTVKFEARIKELVENLPDLAILVEPLLIVRRVLREQLGILHRRLLTIVRDDDVCRRLMTVPGVGPVVALTYRATVDVPARFRNSKSVGAAFGLTPSKYQSGEINRTGAISRCGDEMMRVMLYEAAQTMLVVSTKWSWLKAWAMKIARHRGMKKAIVALARRLAVIMHRIWVDGTEFRWTREQAPIAA

SEQ ID NO: 454059 - protein, 411 aa, unidentified
MEILYPRCAGLDVHKETVVACARLATGSGEVAREVRTFGATTASLLELAAWLTAQGCTHVAMEATGVYWKPVWHILAADGFALVLANAAHVKNMPGRKTDVGDAAWLAELLAHGLVRASFVPEAQTQVLRTLLRTRKQLVRERVAHTQRLQKTLEDANIKLDAVLANLLGASGRAMLEALAEGESDPATLAALAHPRLTATPERLEEALRGRVAPHHRFLLRLHLDQVDALDAAIARIDREVDAGLAPFQAAVELLTSIPGVGGLAAQVIVAEIGLDMGRFPTAGHLLSWAGMCPRNDESAGKRRSTRLRKGAPWLKTTLVQCAWAASRKKASYLQAQFHRLRGRRGPKKAICAVAASILTAAYHMLKDGTAYQDLGPAHFERRSKQTQAQRLVRRLADLGYAVEIIPVAA

SEQ ID NO: 454060 - protein, 423 aa, unidentified
MIPAVIERCAGIDIGKKFLAVCVMTGPANQEGKAEVRKFGTVRHELEALRKWLQSEGCTHVVMESTGVYWKPVLNILEDDPQYTLKIILANPQQVKAVTGHKTDPHDARWLAHLLRHGMIRPSFIPPRAIRELRDFTRRRKQTIGLAADERNRVQKILEDANVKIGDVLSDVFGLSGQLMLEALVNGLGGDGPPSAFDIAQLARGNAKKKLNELTAALQGHQMRDSHRTLIRHAMRHMAFLAEEIEALDRDIAALIQETNLTPAYELLQSIPGIKSQAAATILAESGPNMKQFPTAAKFSSWSGLAPGNNESGGKKKRAPAMKGNPHIKTALVEAAWSASRTKRSEFEDRYQRLKPKLGHKRAIVASAHTLALRIYEVLQAGLPYQPHGGHLTPPSVNRLVRHHTRRLKCLHRWLKDQGAVHE

SEQ ID NO: 454061 - protein, 350 aa, unidentified
MYFAGLDAHLKYVTVAVLDRLGTIVLETTVSTREPERLLAVLAPFRPLEVVVETCPFWPWLYDLLVPAGIGFHLAHAKRLRAIATAPQKNDRVDARLLARMLLSGLIPVAYPRPGDQRELLRLLRHRTTLVRFRTRLAGRIHSQLHQQRLLLPREQLLRQATRTWLRETAWPRLTTEQQAIVTTHLELIDHLTPLIQALERRIDTAAGANPTAALLATIPGIASYRSLLLAAELSPVSRFPRVEHLASYAGLAPVTRSSGGHTRHGSIPQGANRWVRGALVSAIPSHVRWAPTSPVTRAYAQLTARLGWRVARVAAARKLLRIVYIMLRRGEAWRSEPVAGADVRDEVHV

SEQ ID NO: 454062 - protein, 356 aa, unidentified
METAYDGRQVVGMDLHRRRSVLVRMTEDGRRLGTARITNSPAELRREIARAGKSPKVVLEATYGWYWAADTLAAAGAEVHLAHPLGVKAFTYRRVKNDERDSADLADLLRMGRLPEAWIAPHEVRELRELTRYRQKLVHLRTSCKDQVHGVLAKLGVTVTCTDIFGTAGSAWLDQLRLPQPYAGKVTSLRHLAGELTTEITMLGEVIASLLAGDRGYQVIQQLPGIGPVLAAVIIAEIGDVTRFKNAGQLCSWAGLTPRHRESDTKVARGHVTKQGSRLLRWALIEAIQRVPRDSVIGAVKDAIIARRGKEARNIAKVAAARRLLTLVFYGMRDGQIRCLSRPREDPPPAQTPQAA

SEQ ID NO: 454063 - protein, 349 aa, unidentified
MKRTTIGLDIAKRVFQAHAVDPESGEVRRAKLQRSEVLRYLAQMHPALVVMEACSSAQHWAREIRKLGHEVRLISPQFVRPFVKTNKTDAADAQAIWTAAQQPEMRSVAVKTEEQQAVLALHDIRTRLQKSRTAAINQLHGLMGEFGVELPRGWRTMLPQAATALDSESTPVPALLEPQLRFQLMEIRSLTARITEVEGRISAWMRQREDCERIAAIPGVGLLTATAAVATIGEARSFRSGREFAAFLGLVPRQRGTGGRVQLLGISKRGDRYLRTLLIHGARAVISVRKGKYATEPNTWLDRVLQRRPTNVAAVAQANKMARQIWALLAHGRIYEPRHGVLEAAATPA

SEQ ID NO: 454064 - protein, 410 aa, unidentified
MELLHPHCAGLDLHKETVVACIRHMVDGKVATEVKTFKTTTQELMDLSDWLTSQGVTHIAMEATGVYWKPVWHILSDSEFELVLANAAHVKNLPGRKTDVNDATWLADLMAHGLIRASFVPDEPTQQMRDLLRTRKQFVRERSSHTQRIQKTLEDANIKLDSVITDIVGLSGRRMIEALIGGETDPEALAALAHGRIRATKAELEAALRGRITAHHRFMLRIHLNHLDALNSTIADIDKEVDGNVEPFRVAIEMLATIPGVSSLAAEVMVSEIGIDMSRFKTEGHLISWAGLCPKNDESAGKRRSNRMKKGAPWLKTTLIQCAWAASRTKGSYLQAQYLRIRSRRGPKKAIGAVAASMLTAAYHMLKDGTLYQDLGASHFDDRDKGKQALRLVSRLQSLGFTVQITSMAA

SEQ ID NO: 454065 - protein, 405 aa, unidentified
MKHYCGIDWASDHHDISIVNESGKEVDRFRIDDDLKGYHTLSNTLKSFEVEIPIAIEAKDNLLINFLIAEGYEVYSINPKSAERYKNRYNVVGNKTDEIDSFALADMLRTDMHKYRSLEYSSEEIRKLKILCGEYSKLTKDKNMLGSQLYDVLSKYYPITLTLFYKYNCKTLYKLVLKYATYEELRKVSFEDLEKFLKENRYRKTHYIKNVYDKIQGNDYHALPIFDETFSHTARALIKMLLILEDEIKNIQNKMTEITTNHPLGTIFYSLPGSGEILAPKLLSIMGDNKKVYSNSCEIQAYSGVAPVIKRSGKSSRVQFRIACNKEYRNILTYFAFCSLSWSPWARKYYDRAKLKGKRHYESLRLLAYKWTRIIFKLWQTCEVYSEEYHTKNLERYNKNILKVA

SEQ ID NO: 454066 - protein, 461 aa, unidentified
MARRNPGIPTPASPSSRGPALRITHPHAAGIDIGGSSHFVAVPPDRDDEPVREFRAFTADLIALTDWLRACRVDTVAMESTGVYWIPLFELLSSRGFEVLLVNARHVKNVSGRKSDVLDCQWLQQLHSYGLLRGAFRPGDGVVALRAFARQRHALLRTQARAVQHQQKALVQMNLQLTSVIADVAGATGQAIVRVIISGERDPMRLAALRNCRIKASEEEIALALQGNWRCEHLFALKQALEAFDFCGQQLAELDAQIEAQLQRLQVTDDEPAKGRKRSVARNAPKFDLRARLFSMCGVDLTAIPGVDVTTALAVVSETGADLTAFPTGKHFASWLGLATGTKISGGKKLSGRTLPSSNRAAQALRLAAAALRTSQSALGAYYRRLCARMDKPKAVTAAAHKLARLIYAMLTRGQQYTDQGQAYYEERYRERVVANLTRRAQQLGLQLVPLAGASPQTTTA

SEQ ID NO: 454067 - protein, 320 aa, unidentified
MKVSIGIDVSMDTLDVALYDGKLHKILRCENQEIGFSEIEKELIGYDISDILISMEATGVYHLKMAVYFHERGYLVSVLNPLIIKRYTEMKMLRAKTDSVDAKAIAEYGYNESPCYFIPKKGQNERITQLLKLIDGLHRTKSEIRNRFHALKRVPGADETALLICEELEACINAEIRQAEQKINQILKEYYSDDNKRLREIPGVGERLSSLVIGFFGKFENFDNAKQVSSFIGLNPSPRQSGISLNGRGIISKKGNRYIRKIFYMAALSASKHNSACKAQYERLIANGKSKRVALIAVANKLARQIFAVMKYDRIYDPNI

SEQ ID NO: 454068 - protein, 427 aa, unidentified
MNYTQNEKIMSITENTLIIGIDIAKEVQYARAFDYRGIELGKIKSFNNTAEGFSSFHEWIKALTLEKRKNNVVIGLEPTGHYWFNLAQFLKDIDIRLVLVNPFHVRRSKEFDDNSQTKNDLKDPKTIAKLVIDGRYLEPYIPEGIYSDLRISMDMRESLINNIVKVKNKISQWLDKYFPEFNRVFTEWDGMAALICLNEFPTPEKIIATGVPQIVAAWRKKIRASVGVKRATKLMNAAKSSIGVKEGLRMAQNELIYNLEQYDLYMKQHDQLEKEIEELALQISGVKEMLTIKGVGIITAAGFIAEVGDISRFTHPSQIQKLAGLNLIENSSGKHKGKTSISKRGRSRLRALLFRAIMPIVATNKEFKILHEYYTTRAENPLKKKQSLILLCCKLIRIMYTIITKKVEYNPEKLINDSSLNLQSKVA

SEQ ID NO: 454069 - protein, 292 aa, unidentified
MMVIIGVDPHKASHTAVAICGDEREVAKVTVRATSQQTAKLLAWAEPFVERTWAIESAGGLGYLLAQQLVDAGEHVLDVPPTLASRVRVLGTGRSEKNDPNDALSVAVAALRSDSLRRVEIADHSEIMRLLAKRNHDLGRMRARLTCRLHNALADLSPSGIAKELYVSDARALLMAFEPATPIEHMRHELALELVDDVRRLDEQIKESHRRIRTAVRASKTSLTELFGVGPVVACAVIGYTGDVRRFANRDHFAAYAGVAPIEHSSGGRVAHRLSRRGNRKLNNAIHIAAIS

SEQ ID NO: 454070 - protein, 309 aa, unidentified
MLTAEADKRKTKVVVNTAAGVQALLAWCAKHGAQPAQLHAILEPTGLYHEQAATALPQVRVSLVNPAQARDFAKALALRSKNDALDSYVLARYGQTLSPALWHPAPLHARQLRALLTRREALSKDLLRELNRKEKSQFSPSAPLVDGSIDKAIAFLREQIKQIERAIDQHIDNHPDLKQDCELLNSIPAIGPQAGNAILAVMHNRHIDSAQSLAAYLGVVPVQRQSGSSLNSCARLSKAGPSQVRATLYMAALVGTRHNPHIRALYQRLLKTGKSKKAALGAAMRKLVHLCFGVLKNRIPYQPNYAMNG

SEQ ID NO: 454071 - protein, 407 aa, unidentified
MDVIYPRCAGLDVHKQTVVACVRIVGDSPLLQEVRTFATTTSGLLALSDWLGSFGVQHVAMEATGVYWKPVWHVLEGHFELVLANAAHVKNVPGRKTDVNDATWLADLLAHGLIRASFVPPTAVQELRTLTRTRKQFVRERASHVQRIEKVLEDANIKLSVVISDILGKGGRTVLQALIDGHSDPEVLASRITTRVKASRAELLEALRGRASAHHRFMLKVHLSHIDALDKAVAAIETEVGTGLAPFRQAAKLLSTMPGLSEVSANVVVAEIGLDMSRFATPGHLLSWACMCPRNDESAGKRRSTRMRRGGKWLKTTLVQAAWSAIKVKGSYLQAQFHRLRARRGAKKAIVAVAASMLTAAWHMLRNGTKWQELGAAHFDRADATKTANRLIRRLQQLGYVVQAAPA

SEQ ID NO: 454072 - protein, 425 aa, unidentified
MSEKIVVGIDVSKAFSDICILSPNNDIIKRLKISNDITGMRSLIYVLEKVEDEYKDRAVIIMEATAHYHQILANFFRKHNYEVIVINPIQSGALKNINIRKIKSDKTDAYNIALLYRIKNYNETITHSDTVNSIKKLCRQHKELTDEIVEHINRLIAFLDISFPDFKKVFTDLQGKTPLSLLEKYPTIQEVLSPENKQDIIQLIKENSHKSSSYAEAKYEKLLKAAEKSIEVCIVSLSSAVLIQTTVRVIFSLQEALKAIDDEIKRLSLLDEKFHKEIVLLQSIPGVGEYTACVVLSELGDISNFSKPKELVAFFGLDPGVSQSGTYNRKNNKISKRGSPHVRSILHMLAKSNVYPNRNREYLNPVMRAYFEKKIAEKPYKVVMCAIMRKMVQIIFAVLRNQKSFELRTPEEHQKLIREKSKLVA

SEQ ID NO: 454073 - protein, 390 aa, unidentified
MQALYPRPDEHAAIRTDLKAIFVSLELSRSTWVITSLSPGGGEKMSKHSVPSGDVAALLARLSQLQEKARARTGRIFPIIVIQEAGLDGFWIHRVLQQEGIESHVVDPASIATSRRRRRAKTDRIDGEAQVRALLAYKRGEPRVCAMVQAPTPQEEDRRRISRERETLTAERVRHVNRIKGLLFAQGIGDYEPLHRNRRERLEALITGDGRPLPECLKAQIRRELDRLELVIEQVKAVEAERDAVLARAQASPGVPAPAALLLALKGIGPEAAATLWSEGLFRTFSNRKQVAAYAGLAPTPWQSGSVHRDQGVSKAGNPRLRTIMIQIAWLWLRHQPQSALAVWFRARIKRTGGRLGKTMIVALARKLLVALWKYATAGVLIEGAILKPA

SEQ ID NO: 454074 - protein, 466 aa, unidentified
MTAEKRLRNRKERKELTRRLQSENPGLEVVHPEAAGIDVGNEAHYVAVRPDRDAESVRKFECFTADLYRLAAWLKKCKVKTIVMQSTGVYWIPLFDIMEEQGFEVYLVNARYTKSLPGRKSDVQESQWLLKLHTYGLLSNSFQPPSEIRTLRTYWRQRAEHVAGVSTCIQRMQKALTQMNLQLANVISDLSGITGQKILRAIVAGERNSLKLAELRDCRIQASQEEIVKSLEGNWRPELIFVLQQQIDIYDAYQRRIAECDQQLKTHLAEFADHRNGSLTPSPTGQGDRKKTAARHTPKFDLGGELQRILGVDLTRIDGIDVMVSQTLLSEVGLDMSRWKTEAHFASWLGLCPDNRTSGDRVLRRGTRPVVNRAALALRIAAHSLLRSQSYLGAQYRRLRTKLGAPKAITAMAHRLARLVYRMLKYGQQFVDKGMEYYEQRYRNQQVHLLQKRAAQLGLQLVAVET

SEQ ID NO: 454075 - protein, 316 aa, unidentified
MTLSVVLGIDVSKEWIDACLLPAGQEWHVSTQPEELQAWVQALPADIELAVLEATGGLQAVVAALLDSRGIPVAVVNPKQIRDFARALGVSAKNDRVDARLIARFGLHLHPPARPLPTPEMTALRELIVRRQQIVDLLTAEKNRGLIVCTPAVQKNIQQHIHYLEKQLDALHRQIEEAVQKSPLWRAQEQLLTSMKGVGRVTAVKLMAHLPELGSLTRREIAALAGVAPYCHESGKRRGHRYIEKGRGAVRSALYMAALSALRYNPAIKQFAERLKQKGKKGKVIMVACMRKMLVTLNAMMRDQIPWQNHLVALEN

SEQ ID NO: 454076 - protein, 311 aa, unidentified
MEHSHFVGIDVSKAHLDVHVLPTGDSFRVSHDDDGLVTLIERLRPVAPVVLVLEATGGYEVTAAATLASAGLPVAVVNPRQIRDFARATGQLAKTDILDARVIALFAEAVRPAPRPMPDEQARALGELIARRRQLVDMLGAEQNRRRLLHDRRLQRHVDAHIAWLEEALRRLDHDLTTLIRSTPVWRETEDLLRSVPGIGPVTACTLIADLPELGHLDRRRIAALAGLAPFARDSGAFRGRRMIAGGRAHIRRVLYMATLTAIKHNPAIRVFYLRLVAAGRPGKLALTAAMRKLLTVLNAMLRDRRPWQPA

SEQ ID NO: 454077 - protein, 337 aa, unidentified
METKLFMGCDIAQDTFAFCLRDHSKVVCQGEVSNSKKAIQAWLKELKQIYHVDLSSVIFCLEHTGIYGMILMRTLYTRSLIVCVEGASNIKLSLGLQRGKNDRVDARRIAEYAMRYTDRLKQWKPKREVLERLQLLNGMRSRLVKALKVLNSHTKEAGRFLGKNEYMLLKKGTQDSINAIESNIKKADKSIEALIKSDENLKRLSDLVTSVASIGMVTCAAILVKTNEFQDFREAKKFACTSGLAPFEHTSGKSVRGKTRVSHRAHKDLKTLLHMCALGAISRKGELQDFYQRKVGQGKNKMSVINAVRNKLIHRIFAVVRDGVMYQNNYQYNLVMS

SEQ ID NO: 454078 - protein, 508 aa, unidentified
MAIWTVGVDLGKKAKHHAVILDEKGQRLNKELMFTTSADELENLQEELTALAPTGTSFRFIMEPTPTWQTVGAYLHHKGHAVYLVTPAQVHDMRKLIRRHQKTDRLDAYALAKLPYVDPEHVHKAVFPLNHDWQALKRGVKKEHKLAQKIAQYRQVLEELAEEIMPGLSELFPDPLRPLDRLVYQRYARPELVARHGVNKLHHNLEKALGQQVDLAKAEELYHLAREAFKLHEVTGLNTLDLERHIRYEINNLELLMNQQEKVKNHNLEIYHKLDPKGHILSIPGIGPVLAPAFLLCKLVINELSTPKQFRAYSGFVPGVSSSGQSESKGKRMTQAGPGWLKRAAYLAADVARQVDPQLAHVYNRSMVEKGKVHTQAVCEVATHLMDRVFCVLKEERPYEFRDLDQKQIDKREAWTQAKELKVPQSVRQRLRRGKGAPKKQKREKMSVRAPAIKAVPVNKSPSVMKDNTCTATGSSVIMEPIGTILERIINKIDTDNKVVDNFSYQGT

SEQ ID NO: 454079 - protein, 349 aa, unidentified
MGTAYDGRQVVGIDLHRRRSVLVRMTGDGRRLSTARITNSPAELRRAIAAAGKSPRVVLEATYGWYWAADVLQAAGAEVHLAHPLGVKAFAYRRVKNDEKDAADLADLLRMGPLPEAWIAPAEIGELRELTRYRLKLVQRRSGFKEQVHAVLAKLGVPVTCTDIFGVWGNTWLDGLALPQLYAGKVASLRTLIGELATEIALLDAVIADLLAGHDGYRALQALPGIGPVLAAVIVAEIGDIHRFSCPGKLCSWAGLTPRHRESDLKVARGHITKQGSPVLRWAVVEAIQHQPASSPVRQVKDRIIARRGKEAKNIAKTAAARHLLTAVFYAMRDGQARSLATRTAQAAA

SEQ ID NO: 454080 - protein, 465 aa, unidentified
MAQRGRGQGRKGQRQRRGLERINANAAGIDVGCNEHYVAVPPGRDAEGRDVRSFRGFTCDLELLSEWLRLCGVTTVAMESTGVYWIPLYDLLESKGFEVLLVDPRGLKRAPGRKSDVLDCQWLQELHTFGLLAGAFRPKEQTAALRAYARQRAMLVAYASDHIQHMQKAMTQMNVKLRSVITDITGVTGQQIIRAILKGERDPRVLASLRHEACHNDEATIAKALEGTWREEHLFSLRQAFELYEIYQEKIAACDAAIEAHMSGMDDRSGGTTLQPTKKTKRRKNQPHFDLRGHLHRIAGVDLTQIEGLDALTVLKVLSEVGPDMTPWPTRKNFTSWMGICPGSTITGGKKLSSRTKPSANRAAEALRVAAQSLHHSRSWLGAFLRRKAAQKDMPTAITATARKLAELIYTLLKRGTEYVKRTQDQYETMHRQRMLAGLARSARRFGYVLVPKDAAMLTPEPAPA

SEQ ID NO: 454081 - protein, 345 aa, unidentified
MEHFAGLDVSVKETAICVVDELGKVCCEVKVTSHPEDLLGVLKDSAFRFKRIGLEAGPLSQWLFDGLAKADLPVVCIETRHTKAFLKAQVNKTDKSDARGMAQMMRVNLFRPVHVKTLASQQRRALLTGRKLLQEKAIAIENDIRGLVRNFGLKVGAVGVIKFESRIRELVDGMPDLADITDALLIARRKIREQYAKLHRKLLAIVRYDKVCARLMTIPGVGPVVSLAFSATIDIPARFTNSKAVGPALGLTPILNQSGESSRVGRISRCGDNMMRTLLYEAAQVMLARTTRWSWLKAWAMNVARRRGLQKAIVALARRLAVIMHRIWSDGTEFRWTREKALPTA

SEQ ID NO: 454082 - protein, 386 aa, unidentified
MWPVGVTLFRLSAIEHVGQIGAPARFILLVRTVSWAIAVLCVSPHTREVKMEAMREVLGIDVSKSKLDIELLINGKVKTKVLQNTPAGHKSLLEWIDKSKASRSSLHVCMEATGVYHEALALTLYDAGIKVSIVNPACIKGFGHGENIRNKNDEIDAGLIARYCLAMNPELWTPPPLEQRQLRGWTLRVQALKDIRQQEENRLEAHTIGGMDDVAMNVKTHITWLDIEIKKLEKEIDDHIDRHPGLKNDAQLIASIPGLGTTTIARVLGHIGDIRRFKNAKAFAAFLGVTPKQRTSGSSVRGRTVMSKTGSSSLRAALFMPSMVARRHNPILRQFADRLLATGMAKKAVIGAVTHKLAHLIYGVIRTGKPFDANFLSNRLAIQDGI

SEQ ID NO: 454083 - protein, 337 aa, unidentified
MKKNYQIFVGIDVSKSKLDYCIVSNPSSVQHQFGIAANNEKSIKGFISNLQKKNLTNENVLFCLENTGVYSMPICFWLQENCFDYWVVPALQIKRSVGIKRGKSDKVDAKDIAMYAVSHLHQLTLSVLPEKSFLELRILLAEREKLVKAIKTFASTSENRGFLPKEILKSVLQQNKKTIVLLKQQLIKLEKLIEELIHKEELLDQQFKLLQTVPGIGKQTAVDLIVYTHAFSSFKNWRKFACYCGIAPFPYESGTTIKGKTRVNDLANKKLKSLLNLAALSAKKYDIEMKSYFERKVAEGKNKMLVLNAIRCKVLSRAFAVIQRNSPFVNLSRFKVA

SEQ ID NO: 454084 - protein, 409 aa, unidentified
MERVIERGAGLDVHKKSVTACVRVPGPSGDRRQEVQTFGTTAAALLTLRDWLSAHGVTHVAMESTGVYWKPVYYVLEERFTCLLVNPAHVSKVPGRKTDVRDCEWLAQLLEHGLLRGSFVPPVAIRELRDLTRYRAVLVQDRTREANRLHKVLTDAGIQLASVASNVLGKSGRAMLTALVEGTTDPAVLADLAQGKLRRKLPALREALAGRFREHHALLVSQLLAHLDYLDEALEDLTTQIEEALGPFASEAARLDAIPGVGPRTAEVLIAELGVDMRQFPTARHAASWAGLCPGTHESAGKRRAVRTRKGNRWLRAALIEAALAATNVRDSALAARYRRLVRRCGHKKAIMAVAHKMLTTAYLLLADGRTYQEPGAGYYDARRKDRDVRRALQALERHGYRVSLEPAA

SEQ ID NO: 454085 - protein, 364 aa, unidentified
MTKKRYYIGMDVHKESVQMAVFEERGREPIYERQLANDTGLLIKEVTRFSREGEVEVAYEAGCLGYVIQRAMERVGICCHVLPANKVAKKREDRVKTDKRDAQLIGRELRSGSIRPIAVPDAEDEATRDLLRCREDVGLDLRRVKQRLIKFMVRHGHIYTEGVNHWTEKHWRWMDQVQFSQGHEKAVYEEYRSQIKGLEERLKRLTGQVEETAGSQRYKGSVSDNRAFKGIDYVVALALVCEIGDFKRFASAKAFMSYLGFVPSENSSGGKRSQGAITKAGNGHLRRLLIEAAWHYARFPRIGVRLAERRKGSSARAIQIADRALHRLHKKYLRLVMNGKHPNKAVTAVARELAGFIWAVQVSA

SEQ ID NO: 454086 - protein, 352 aa, unidentified
MQDIIGCDLHTRYQVVAWVEEATGEIRTRRLEHENGEARSFYTGWPRGARVGIEATIPALWFERLLGECGHELWVGHSAQIRAQAVRRQKTDTRDAEHLLDLLRTQRFPRVWTPSLEERDLRQLLVHRLKLVRARTTVKNQLHALAISQGVCRKGRLWTVKGRAELASLSLLPWASRRREELLALLDQLDAAIEPLDQAVEIQAQAREDAVLLMTHPGVGPVVSLAFVLTVGPASRFPNSRKLVSYLGLNPRENSSGGRQHLGAISKQGNSMLRWLLVEGAHRAVVYDPEMRRAYQRLKFRRVSGVAKVAMARRLAVRLYWMLRAHMNYAQLVRMSGSPSSAVAPTGSESKL

SEQ ID NO: 454087 - protein, 338 aa, unidentified
MEITTLGIDLAKNVFQLHGVNTIGEKVLSKQCSRKQLIEFAAKLPACLIAMEACGSAHHWARKFISMGHEVRLISPQFVKPFVKSNKNDANDAEAIVEAAIRPSMRFVTVKTVSQQDVLSLHRVRSRIVGARTALINEIRGLLGEYGLVLPQGARQVRSQLLTIVDIKSSELTSHSRALFKDLYEELVAIDEKIKSMDKKIQNLSGCDAQAKKLMQLPGVGPLTATALVASVGNASMFENGRGLSGWLGLVPRQHSSGGKNKLGGISKRGDQYLRTLFIHGARSVLLRIETREDAQAKWLKRLIERRGFNRACVALANKNARVAWALLAREESYRKAA

SEQ ID NO: 454088 - protein, 349 aa, unidentified
MCEMYFDPAEADMKYCGIDLHSNNCVVIVSDEEDRIVFSKRVLNDLRQICAALEPHREEMAGVVVESTYNWYWLVDGLMDAGYRVHLAHPSAIKKYEGLKHSGDYADAGYLAQLLRLGLLAEGYIYPREERGARDLARKRMQLVRYRTAQILSIEGILMRQTGARMKGEAVKRLTAEQVTEFAFAPDVALAVEANRAVSQALGQQIEALERRLKERVSLRPEYRLLKTVPGIGETLATTIMLETGSIGRFAQVGNFSSYCRCVDSLRESNGKKKGEGNTRNGNKYLAWAFVEAANFALRYCPQAKSFYDRKKSKTNRVLAIKALAHKLARACYHMLREQKPFNVHLCFG

SEQ ID NO: 454089 - protein, 311 aa, unidentified
MNNTIGIDISKDTLDAHRLADGQHKQFLNGKTGHAQLVKWIGKQSDPLIIFEATGAYHRQLERVLCTHIIPFVKVNPKQARRFAQASGKLAKTDRVDCEMLAKMGAALQLVPKPFTTENLYDLKELLSARRALIKDRTAAKARKATVINALIKQQLEKRLRQIKNDIAKIDALMLDVAREDQYMSERLDILFSIPGIGVITALMILVDMPEIGALNNKQVASLAGLAPMSQSSGKWMGKARIQGGRPNLRNAIFMPALVAIRHNADLKTKYDQLVTAGKEKKVAITAVMRKLLVLANALLRDNRKWAEKAA

SEQ ID NO: 454090 - protein, 410 aa, unidentified
MEVIILCCAGLDVHKNGVEACMRRMNREGKLHQETRHWGTMTRELMAMADWLSEAGVTHVAMESTGVFWKPIFNILENRFQVLLVNARSLKHVPGRKTDQKDSQWIAQLLQHGLLKGSFIPPREQRELRDLTRHRSQVIGEHSRITNRIQKVLEDANIKLSSVATDITGASGRQMLQAIIAGEDNPEKLADLAKHSLRSKIPQLQQALYGKITDHHRWLLRLLYDQLTSAEAFLSKLDERIEQLTRPQQPLVEKLDRIPGIDRRVAEVVLAEVGPDMTPFPDAPHLTSWAGICPGNNESAGKRKSGKTTKGSRWLRQALVQAAWAASHKKDSYFRTHAHNLIRRRGKKRGLVAVAHSLLIVIYHMLKEGTDYVDLGAKFLDQIRSEHLVRFHLHRLEELGLKVTAIPMAA

SEQ ID NO: 454091 - protein, 330 aa, unidentified
MNYSHFVGLDVGKKSFDASLVSLDQELSHHTFPNTPEGIEELLHWIKQHGVEVETALFCAENTGSYVIDLCLSSYQYHFPLALECPLTIKKSIGLQRGKNDRIDARRIAQYASLHYRKLRLYELPDKDLVRLRNWLVIRDNLVKQKVSSLKLLELPRETSRLADLMVPMTFLENQICQIKEKISYVEEEMEKIITENITLSTNYQLLTSIKGIGPVNAIVLLCVTDNFQRFSDPRKFACYSGVAPFEYSSGTSIRGKTKTSHLANREVKVYLTRAAITAIAWDPQIKAYYKRKIAEGKHKASVINAVRAKIIARCFAVIKRKTPFVTLSA

SEQ ID NO: 454092 - protein, 520 aa, unidentified
MPALQKARLVPAGEFVDFGMPSRAWVQLDRQEEYVMAKRKQSNFERINLERMNRKQRRELGQRLEKSDPGLEIVHPHAAGIDVGNESHFVAVPGNRDPQPVREFGCWTGDLVKMAAWLKGCGIETVLVQATGVYWIALKDIVEQQGIEVVVANAQHTKNLPGRKSDVQECQWLMKLHTYGLVRGSFQLAEDMQGVRAVWRLRGRHVEEAARSVQHMQKALTQMNVQLANVLSDISGKSGQAIIGAILEGERDPGKLAELCDRRVQASTEEVAESLRGNWRDEMLFELSQARESYRFAQQQIQSCDRKLESYLKVLPTRQVEIMLPAPPVPSPATPVRARQAPRKQGNTPEIPGMRDELVRICGVDLTTIDGISIVTAQTILAEIGTDTSRFRTEQAFVSWLGLAPNRDISGGKVIRVVRRKVPSRTSTALRLAATSLKSSDSYLGARYRHLQRQLPSKASAVKAMARYLGVLVYRLMTKGQAWVDQGAARFEQKRKALSLATLQARALANGYRLVPVTAS

SEQ ID NO: 454093 - protein, 385 aa, unidentified
MSQSLDITNAVDYDRTLVLAIELSNKSWVLAAQVPGLPQTKAKRTIEPDKLALQSAIDGYRARAVAAGHPVDRVVATYEAGWSGFWLARWLIANGVEVHVVQPSSVPVDRRMRRAKSDGIDAELLLRTLLAWLRGEPRVCSMVPIPKEDDEDARRSIRERTELVSERVGLANRIGAVLATLGTDTYNPLLKSRRRRLADLRTGLGEPIPPNALAKIERLLSRLELVLDQIAELEDDRDAVAETSTPDEAGRMIQQLCGLRGIGVQSATVLVREAFVRHFANGKALGSYAGLTATPYNSGGIEREQGIGKAGNRRLRTVMVELAWLWQRYQPGAAQVLWFRERAGSTGRRVRKVMVVALARKLLIALWRFVVDGVVPQGAIMKPAA

SEQ ID NO: 454094 - protein, 415 aa, unidentified
MSHPLLVGVDVHRQTNTVCLMDASGHVLGSRRTIDNNRPGTAVLVDQVAQKMAQGDFDAIQIAAEATGWYWWHFFQTLARDPTLQQWSLQLYPLNPRLTANFAKTYVDRDHTDVGDAFVIADRLRMGRDLPPPYQLDARYLALRLLTRYRFHVIHTLAREKAYALAILYLKASEYGRLKPFGNLFGAASRAVLQEFASLEAIAAMPFDELAEWLDVRGKRRFADPQDNARTLQQVARDSYALPDALQLPVHQILGWSLQHITFLEGQIKRLDSAISEQLTNIPHTLETIPGIGPVFAAGIVAELGDIARFEFDQAKVAKFAGFKWKKHQSGDFTAEETHLTRTGNRYLRYYFCEAANAVRMHDAEYAAYYDRKYREVRQHQHKRAIVLTARKLVRLVVRLLTSNQPYQVRRPASS

SEQ ID NO: 454095 - protein, 457 aa, unidentified
MSNGSRHRLSRGDRRRNEKLARLRAIITRETAVLAFDLAADKQVCAVTDPDSKVLARRTVRAKAWQLSEAVEWGLARAAEAGFSSVVVACEPTGHRWRVLDQIAAEHGVALVCVQPLLVCRAREAEDFTRNKNDDSDAMIIARLTTELRCYLPERADPTWARLRHLAARRAKLVTAAGAARQQVRDLLECIWPAVLGAASEPLDSVNWLASLTVALDRIGATGDLSTIRGWGRARFTAAVRRELGATRWYSAIVHAVFDAAVDPDQATIGVAAQRAGACERVAYALADLTARRAEITEVETRILGVLGQLGLTELAASIPGVSAIGAATILAEAGDPTRFSSARALVKHAGLCPRDNSSGTYQGKTPISGRGRPELRLAAWRAVFTALRHNPVLAARHRHLTTRADNPLTDTQARVAVAASLLRQLHAVITTGTAWDPTIAAGLDRRQDREDGAAAA

SEQ ID NO: 454096 - protein, 420 aa, unidentified
MNAVGIDVSKGKSMVAIMRPFGEIVSAPFEIKHTASDIHSLVELINSVEGESRIVMEHTGRYYEVLAHQLSEANLFVSAINPKLIKDFDNDSLRKVKSDKADAIKIARYALDKWQNLKQYNVMDELRNQLKTMNRQFGFYMKHKTAMKNNLIGILDQTYPGVNTYFDSPARSDGSQKWVDFASTYWHVDCVRKMSQNAFIDHYQNWCKRKKYNFSQSKAEEIYGKAKELVPVLPKDAITKLIIKQAVDQLNSASTTVESLRTLMNETASKLPEYPVVMAMKGVGTSLGPQLIAEIGDVSRFTHKSAITAFAGVDPGVNESGSYEQKSVPTSKRGSSDLRKTLFQVMDVLIKTHPQDDPVYQFLDKKRAQGKPYYVYMTAGEQVSKNLLRTSERISFISSRILIIIIIFRPALVWWSYFDT

SEQ ID NO: 454097 - protein, 333 aa, unidentified
MGRFWVGIDVAKRKLDVALLDEAGKVKSKVLANDPAGFAALMTWLKERGAEAASSHLCLESTGIYSEGCATFFADAGWKVSVVNPSLPKDFGKSELKRNKTDAIDAGLLARYCLKMEPPAWQPPPLEYRKLRSLVDRRQALQDMHQQEANRLESTVETSARTSIAEHLSWLESRIAELNRDIDDHIDGHKQTLGKDAQLLASIPGLGRTTAAKVLGLLGDLRRFDSGKALAAFIGVTPQRRESGDSVRGRSSISKAGHASVRHALFMPTLVATRHNPKIKAFRDRLVAAGKPKKSAVLASMHKLVHIMYAVVRKGVEFNPRFGQLALDVQDGI

SEQ ID NO: 454098 - protein, 287 aa, unidentified
MAMRVSKSVIGVDVAKIELVTYQADSDLLALIPNEKPAIKRWLKTLPRPAALAVEATNIYHVDLVELAYQAGFDVYIIDGFQLSNYRKGVGGRSKTDASDARLLARFLKNEGECLRPWTPPPAVYGKLQSLLRRRASLIQAKTSLTQSWANDASLKASFAAFLKSIERLDLLVKKKLKDALREAGLLEQVARCQAVEGIGFLTATALVMAYSRGDFNSSDSYIAFLGMDLRVTDSGQKNGRRSLTKRGCSEIRRLLHNAAMSLAERVHGKSSTTIIAAAEKLPQRCL

SEQ ID NO: 454099 - protein, 392 aa, unidentified
MIIVAVDVAKDKHDCFITNTDGEVLFDSFVIQNNQDGFEDLFQKICSVTDSPQNVKVGLEATGHYHLNLLGYLLDKGFPTCLINPLQTSLFRKSLSFRKTKTDPVDARAIARLLMSDRTLQPYSLTSYQNQELKSLTRYRADKVRERAKLKSSLARLVVILFPELEKLVPILYMATIYDLLHEFPGASYVASAHLTRLSHLISESSKGRYDKEKALEIREAARHSIGSVSPAKSLELRHAIDHIRFLDDEIDEVEAQIFALLDKDPPRMLDIPGMGPRMAAVIVAEVGDFNRFSSPDKLLAYAGLSPSTYQSGQLTSTYAKMEKRGSRYLRCALFNATKYVCMWDPVFKAYLAKKRAEGKHYNVAISHAAKKLVRLIYHLETTGKSYRSKAA

SEQ ID NO: 454100 - protein, 412 aa, unidentified
MKVVYEICCGIDVHAKMLVACLLLANGEKEIRTFSTMTDDLLRLRDWLVAARCTHVAIESTGVYWKPVFNILEDALTVILINPEHAHALRGRKTDIKDAEWLADLLRHGLLKASFIPPPEIRELRELTRYRESLVREQSAVANRIQKVIESGNIKLGQVASDALGVSGRAILWALARGETDPDKLASLAQRQLKKKVPQLRRALQGRLTVNQRFVLRELLRRWEELEAADRRVTQEIDRYLQDRPKLARAREIVDTIPGLGLRAAEVIVAEIGVEMKANFESDAHLASWAGICPGNKSTGGKRLSGRTRKGNTYLRSTLVQAAWGASMKKNCYLSSQFFRLLKRLGRKKALVAVGHSLLVIIYHVLERDQTYTELGGDYFDRHHVEQQRDYYLRRLQMLGLKISVEELPKAA

SEQ ID NO: 454101 - protein, 344 aa, unidentified
MDHFGGLDVSVKETSICIVDDTGRIVKEVKVASEPAALLKVLGNPAYCFKRIGLEAGPLSQWLFSGLAEAGLPVVCVETRHMQAVLKAQINKTDRNDARGIAQMMRVGLYRPVHVKTLRSQKLRMLLTHRKLLQSKAIAIENDLRGTLRNFGLKVGMVGKVRFEARIQELVENQPDLAVLVEPLLVVRRVLREQIVILHRRLLAIVRDDEVCRRLMTIPGVGPVVSLTYRATVDVPARFRKSKSVGAVFGLTCSRYQSGEVDWSGEISRCGDEMMRSMLYEAAQSMMHSKKWCWLKAWAMQIAKRRGMKKAIVALARRLAVIMHRIWVDGTEFRWTREQAAAAA

SEQ ID NO: 454102 - protein, 342 aa, unidentified
MQITTIGLDIAKNVFQVHGIDAKEKVVVRKQLRRSQVIAFFKALPPCLIGMEACATAHYWARELTKLGHEVRLMPAKDVKAYVKRNKNDAADAEAICEAVRRPTMRFVRIKSAEQQGQLMQHRTRDVLIRQRTQIINALRAHLAELGIVAAQGDAGVNELRAIVADDREERLPIDARASVIVLAAQLEALQTLIGSIEKRIKMQHRSNETSQRVETIPGIGVLGATAIVATAADPTVFRSGRDFAAWIGLVPRQDSTGGKQKLGPISKQGDRYLRRILVVGAIAVLRRAQENPGKYPWLTQLLARRPFKVVAVALANKMARTAWALMVHGGTYRAPELAEAA

SEQ ID NO: 454103 - protein, 369 aa, unidentified
MEKLITYIGLDVHKNTIAVAVAEAGLRKEVRDQGTIANTPAALKKLIAKLASSGGELRFCYEAGPCGYGIQRQIAAAGHECTVVAPSLIPKKPGDRVKTDRRDAINLAKLHRAGELTAVWVPDQAHEAIRDLVRARLAAVRTLRKARQQLSGFLLRQDRHYGQKAWTHLHRRWLAGLKFEQPVHYIVLEDCLEAVDAATARLGRLEAHIEAALPTWSLAPVVQALQALRGVAMVAAATLVAELGDITRFTKPSQLMAYLGLVPSENSSGGKRRQGGITKAGNEAARRMLIEAAWSYRFPARISRAQLIRQEKLAKPVRDIAWKAQERLCRRYRKFARAGKLPTVITAAIARELAGFVWAIANQAQPAGA

SEQ ID NO: 454104 - protein, 444 aa, unidentified
MGKPQVFDDQEQGRVFERVAAVDVAKASGVVCMRLPHPAQPAGRRSQVWEVPATMRAVTELAGRLAAEGVQKVTLESTSDYWRIWFYVLEEAGLAVQLVNASQARNLPGRPKTDKLDAMWLARLTEMGLLRPSFVPPAEIRVLRGYARARTRLTQDRTRCLQRLEKLLEDALIKVSAVASKLTTRSVQDMIRAMIAGQRDPQVLAGLARTRMKAKHDALAEALAGLFTDHHAELAQLLLDQIAFLDTQIARLTMLTGEQLASIRAAWGIDADGATGPSPGAIALPAIARLDEVPGVGAELAASIISETGLDMTRFPSPGHLASWAGLCGRTIQSGARTRTGKGQGNAWLRGYLGRAAIAAARTSTFPGERYRRLARRRGAARAQVAVARSILIIIWHLLNDPTARYHDLGPGHYQARTDKSRKARNHIRQLQALGYTVTITQTA

SEQ ID NO: 454105 - protein, 369 aa, unidentified
MGKHSEVFVAFDVAKKKHAVAIAEGGRTGEVRFLGDVDNSPLPIERTIKRLADRYDRLHVCFEAGPTGYGLYRQVRALGHDCLVVAPALIPKRSGERIKTNRRDAVTLARLHRAGELTGVWAPDAAHEAVRDLVRAREAASDDLRRKRQQLLSFLLRHGRIYSGGGHWTLAHRRWLAGQTFEHAAQQIVFQEGIDAIEDALQRLRRLEKQLALIVPDWSMAPVVEAYQAMRGASFLVAVTFAAEIGDVRRFATPRQLMSFLGLVPAESSTGDTIRRKGLTLAGNRRARRALIEAAWTYRYPARVSNTLRTRLEGLPKSVRDIAWKAQIRLCARYRRLSATGKKLPIVVAAIAREMAAFLWAIGREVAPA

SEQ ID NO: 454106 - protein, 404 aa, unidentified
MYNAVGIDVSKGKSTVTVLQPGGTVIRNPFDVSHTSPNLNELAEYLDSLDGDTRVVMECTGRYHEPILKTLSEAGLFVSVVNPHLIKNFGTNSLRKVKSDPADARKISRYTLDNWNQLRQYSGMDNTRTQLKTLNSQFSFFMKQKVAAKANLIALLDNTYPGVNKLFDSPAREDGSEKWVDYAYSFWHVDCVRGIGLKAFTERYRAFCKRHHYNFQADKPEKLFHASKELVAVFPKEKTYKLLIRQSIQQLNLASAHVERLRREMNELASTLPEYNTVMGIYGVGKTYGPQLIAEIGDVSRFTHREALTAFAGVDPGVNESGQHKSRSNRASKVGSARLRKTLFQIMTTLLQNAPEDDPVYRFLDKKRSEGKPYYVYMTAGANKFLRIYYGKVKECLRNLEQES

SEQ ID NO: 454107 - protein, 393 aa, unidentified
MLTHEETVSSPEGSGVDGHIYVSVEMSRSKWVIGLQSPLADKIAIHTFGCGDVDALLALIKRMRAKVEAARNNSPAVKVCFEAGYEGFWLQRRLGALGMQVTVINPASLLVDRRAKRAKTDRIDARGMVRALMAFARGEHQVLGEVRVPTVEQDDARRTLRERQRLVKERTAHTNRIKGLLKTQGIMDFDPRAAEAASRLDDLVTGDGRHLGSCLRREIVRELERLSLVMEQLTRVEAERDAVVERGRQQEGLSANHDRDAAMIAILNRLKGIGTNDASILVREAFWRSFRNRRELGGWSGLAPSPWASGSVSRDQGITKAGPPMLRAQMIQITWRWLLWQPGSDLARWFRKRTEGAAGRMRRIMVVALARKLLVALWRYATTGAVPNGAIVT

SEQ ID NO: 454108 - protein, 355 aa, unidentified
MNHPYYIGMDLHQKTSTFSVKDTEGAVVAAQTVPTTKETIEKFLSSYRGAALAVEPVSQWYCYADFIESLGIEVKIANPNRVKAIAFARIKTDTIDAGVLADLLRANMLPESYHAPKHVRDWKDEVRLRMSLVRLRVQVKNKIHALLWKQGIRSPYTLFTKKGLLWLDAQSFPETTALALATYRETQALLDRQVREAEKRMIESNKHREEVRLLITIPGISYLSALTIMAEIGDIARFPSAKKLMGYAGVVPSTYASGGKIRHGKIIKQGSSWLRYVLVEAAHHQPHCTRRRGLSEYYEGIKDRKGSKAAAVATARKLCAVIWRVLTDKRPFIAPQEWDNRRAYQCGIATPLSAR

SEQ ID NO: 454109 - protein, 319 aa, unidentified
MTRNHIGVDLSKDFLDVCDPRRGAARVPNRPEEVSGWVAGLGPDDVIVFEATSGCDRVLRRAVQAAGIPGVRLNPLHAWHFARSLNLAKTDRVAQNARFQRDAAMLARLGAERQPEPDPAPDPAREDLRALGQRRDQLKRMEVQEKNRRAACPLEAVAAGIGEMLAILAAHIERIDKAIAEHVSRHPGLKSADRLLRSIPGFGAVAAVTMLAHVPELGTVSRRAAASLGGLAPRARDSGRHRGRRFIGDGRRHVRRVLFMAAMSLMHRPGFLADFIARKKAEGKPGKLILIAVARRLLTIANAILRTGIPFQPNTRPAT

SEQ ID NO: 454110 - protein, 337 aa, unidentified
MKFSGIDLHSNNSVVLISDEADRIVYQKRLPNDLAQILGALEPHRGELVGVVIESTYNWYWLVDGLIDAGYRVHLANPSGIRKYEGLKYSGDVADAAYLAHLLRLGLLAEGYIYPREERGARDLARKRLQLVRYRTAQILSIESILMRQTGARMKSESVKGLTAEQVEELGFAPDVALAVEANRAVSQTLGQQIEALEQRLRERVSLRGEFKLLQTAPGIGETLATTIMLETGTIARFAQVGNFSSYCRCVDSLRESNGKKKGEGNTKNGNKYLAWAFVEAANFAVRYCPQAKSFYEHKKRKTNGIVAIKALAHKLARACYHMLREQKPFDVNRCFA

SEQ ID NO: 454111 - protein, 355 aa, unidentified
MNDAKYIGMDVHTATISAAVRDSSGNLVMEATLETKAETILEFVHGLRGSLHVSFEEGTCAAWLHDHLKPHVSEVLVCDSRKNALLRVGNKNDREDARKLSELLFLNELHPVYHGETGIRTLKELARSYLTITRDLTRVMNRLKAIYRGWGIACAGQQVYAPRYRAEWLAKITEAGVRRRAEIYYQQFDALAALRQEVRRQLLAESRRHPAMRLLRQIPSIGPIRAALLIALMQTPHRFRTKRQLWAYCGLALRTYDSGEYRFVGGQLKRSKKAVTIRGLNKNHNHDLKNIFKGAATRAAATAGPLQNFYEARIANGMKPPMARLTLARKIAAITLLVWKKGVRFDAEQLKQQAA

SEQ ID NO: 454112 - protein, 336 aa, unidentified
MEKFKWFLGVDVSKDTLDLSLFVGTTSIDYRQIENSPASVRSYFKQIKTEFKVQLVECLVCMEHTGIYNNHLLDTGLKLGLKIWVESALAIKLSCGISRIKNDKVDSAKIAVYAYRFQDKAKLWEPSNPTIELLNQLSKQREKLLKVRHQLEVSIGEKTLFMEKTLVKRMKDAIARPLKAVKVAIKALDAQIDEILNTDEQIKCKAKIITSVPGVGKVTAVKLIVTTNLFMNINDPRKYACYGGVAPFERTSGTSVRGKMQVSKKANLSVKALLSLCATSAIAHDPELRGFYLRKVEEGKNKMSVINAVRNKIIHRIFACVNQNRMFEMNYQNSLA

SEQ ID NO: 454113 - protein, 428 aa, unidentified
MEVIHPRCAGIDVSKKDAKVCVRVQGAGRRGTSTTVSTWGSNTGEILALGEHLLAEQVSCVVIESTSDYWKPFYYLLEEQLPVMLVNAKAARNVPGRKTDVSDAAWLADLGAHGLIRASFVPPAPIRVLRDLTRARTTITRARTKEIQRLEKLLEDAGIKLSAVASNIVGVSGRAMLEALITGERDPAVLADLAKRQMRAKIPALTEALRGRFSEHHAFMARLYLDRIDAHAADIARLDARIEEAIAPFRSVRELLMSIPGWSQVVADVFIAETGADMSVFPTAAHLASWAGVVPGCNESAGRVKSGATRPGNRHLKAALGVAALSAARTKDTYYSARYRRIAGRRRAAQSRRNKNRGMSIAGMTALVAIEHTMLTDAWHMLTNGAFYRDPGPDYYTRHHPGRTKARAIKQLESLGYTVTLEPLPEVA

SEQ ID NO: 454114 - protein, 472 aa, unidentified
MSKEKAKKAKKKKVGDIISMQVVNPYSAGIDVGDKEMVVALPEGLSDPRVRTFGTMTCDLEEIVAYLKTFEIDSVGMESTGVYWKPLFRKLIHEGIEVFLVNAAHVKNVSGRKDDENDAMWIQKLHSCGLLKSSYLPDEDQEALRTLVRHRKTLVRDSSRFVNRMQKSLELMNVKFHTVISDIVGQTGKAVVEAIIGGERNAANFLPLISKRIKADLPTIEKSLQGNWLEEHLFTLKQNYEMYQLYWVKIVVCDQKIEEQLQQYEAKYNEGVIETAKTVKEEPAATPGGKKKKAKKYGDKNRPRFNVHGHLERIYQVDVTAIYGINSTSALDIFAEVGTDLSKWKNEKHFVSWLNLCPNNKISGGKLISSKLFHKKPNPASLAFRAAANGVQKSDNWLGDYFRRKKAKGGNKYAIIATANKIATIFYKMVRYKEDFKPVELEQYQQKYKQAKIAFLKRKLIQLEQEAENVAA

SEQ ID NO: 454115 - protein, 407 aa, unidentified
MGITCGIDWAEAHHDVAVVDDVGTTLGKLRIDTGLPGFTALMALIAEHTDEPTSVAVAIETDKNLIVAALQAAGLTVYAINPRAVARYRERSAQAGGKSDPGDAIVLANILRTDLHVHRALPRISEGGLAVKALARQHQEAIWARQLTVNRLRSTLLEFYPNALKAFPVLTHKAALEILGSAPSPAHGMKLTHKRVVTLLRRSGRGDRPGLAEMILKHLHEPALRQPPAVEAALSHAVIGLINVIKTMETAIADLEVAMAAEFDRHPAAEQLRAAPGLGPILAARVLGEVGDDTTRFSTAGGLRAFAGTAPITRASGRSKSVRTRHVKNKRLADACHWWAFAAITKSPGARAHYDARRAAGDRHNAALRNVANKLLGRLWWCLVNDVAWDDNAAWPGLAQAQEQAAA

SEQ ID NO: 454116 - protein, 339 aa, unidentified
MGLHCAVDLHGNNGFYGIVDETGKRVFKKRLPNSLPEVVDALAPYQGKLDAGVVVESTYNWYWLVDGLQENGFDVRLANPAAMEQYSGLKNTDDESDTFFLTELSRLGILPEGHIYPKEERPVRDLLRRRLLLVRQRTAHILSFQNLVARERGENLSSNEIQKLWPAGVEPLFDDTRLQLMGKTNIEAIRFLTKQIRGIENAVLAEAKLKPEYEKLLTVPGIGKILALTIMLETGDITRFAKVGNYSSYCRLVKSSRTSNDKKKGENNRKNGNKYLCWAYIEAANFIRRYCPEAKAWHQRKVKRSKQVVATKALASKIAKACYFIIKDQVDFDVKLIFG

SEQ ID NO: 454117 - protein, 356 aa, unidentified
MSSMSPDPRRRRVVIGVDTHKHVHVAVALDDIGGRLDARSFPADRGGYEQLLDWAAGFEAKRLIFAIEGTGSYGAGLTSAVRRRGLGVIEVLRTDRRDRRLRGKSDTLDAENAARSVLAGNSTSVPKTNDGIVEMIRQIKVAKDVAVKARTAAMITLKAVLVTASPELREPLQPLSKMALIERCAGLRPGPVTTVLAATKHTLRSIARRWQQLNDEIKTHEAILVELTGQLVPQLVAAFGVGADTAAEMLIVAGDNIDRVRSEPAWARLCGVAPIPASSGMTNRHRLNRGGHRQANAALYRAVIVRMQHHEPTRAYVARRTADGKTKAEIIRCLKRLLAREIWALLRPLRTTTIAT

SEQ ID NO: 454118 - protein, 319 aa, unidentified
MFNLGIDVAKAKLDCALRLPNGKHRNKVVENNHKGFAVLKEWLLKHDASNPRVCMEATGTYWEGVAEYLAGLDMVVSVINPAQIKAFGASRLVRTKTDKVDAQLIADFSHERQPEPWIAPSPAAQALRAMVLRLEALQAMRLQETNRLDVAREAVRQGIEDHIAWLDTQIKELILAIKRHIDDDPDLHDKRELLDSIPGLGERTIPVLLSYYADTERFDNAKQAVAFAGLDPRQHESGSSVRGKPRMSKIGHSFLRKALYMPAMVTVYRTPWGQRFGQRLSAAGKAPKLIIGAMMRKLVHVAFGVLRSGKIFDPTLHAA

SEQ ID NO: 454119 - protein, 428 aa, unidentified
MNVEDIIRREQFCQIKDEIPRSDDYLVVGIDVAKDKHHAFMGSSTGKSLARKLVFENNLQGFGKLLQRSETVQTQHGLGKVVFGFEPTGNYHKPLGAHLIRCGRHVVLVTGKAVKNNRELLDGRWDKNDTKDAANIADLISRAKCLYYDVGSGNINEVRQSLSLRRRLKKEEHSVRMRIRNNLLAQYFPELDGFYSACESETLAIVRWCLDPRRIAGMEFDEFFLMVTRSRRGIAQKRRLQKIHQLAVESVGCSMGPAAGSEATLLVDKLKAVREQLKQVADQMQDICLQFADYNYLLTIPGFGPYVAARVLASIANPRRFDSSNQVLKMAGYDLGANRSGKTSDQAVPVISKRGNAELRYALYQAAHVASTRNRDFICYFTRMLRGRQRERGIKTKMKVKLAAKMLKIAWTLMKRHEAFDPDHLIVA

SEQ ID NO: 454120 - protein, 337 aa, unidentified
MTESYLVAIDLGKRHFQVCATDASGKTLFNKAFSRQKLQEFLDKQPACVVAMEACATSHYWGRFALGAGHEVRLIPPIYVKPFVKRQKNDAADAEAIAEAARRPNLQFVAVKSAEHQARAVTFRTHQCFVKQRTQLINALRGHLAEFGLIAPGGATNVKHLEQAIRDEGTNLPAVVREMARFYFEQIAALTVRIDALVQALRLASRTDSFLRRLCTVPGVGPVTAGAIAAFAPDLRTFSNGRSFAAWLGLVPKQHSSGGKTRLGGMSRMGQEDIRKLLIVGAMSCIRWICRRGENPDNWLGRLLARKPRMVTAVALANKMARAVWAMVIKQQDYRTA

SEQ ID NO: 454121 - protein, 348 aa, unidentified
MSESYEGRQIVGIDLHRRRSVLVRMTETGERLETVRISNDPEYLREVMTRAGEAPDVVLEACYGWYWAADTLAELGATVHLAHPLGVKMFSYRRVKNDERDAADLADLLRMGRLPEAWIAPPACRELRGWVRHRAKLVGLRSNLKCQVHGILAGAGITVPMSDLFGASGQHLLATAELTTESRSRIDSLQRLITALDFEVELFAKLVAGRLRTHPGYQAIQLIPGVGPVLAAVFVAEIGDITRFRQPEQLASWAGLTPKHHESDTTVHRGRITKQGSRLVRWAAIEAVQRLPGHTRIGQIRDRVAARRGRNIGVVAAARELTELVFYGLRDHHVRALAGHTPRTPVSA

SEQ ID NO: 454122 - protein, 430 aa, unidentified
MGLIVPTTIRPERADQPLPYEWFVGIDWGSQQHQVCVLDRDRRRVGERAVDHDGASLARLADWLWGMAVGQPQRVAVAIEVPRGAIVEGRLERGFHLFALNPKQLDRFRDRHSVAGAKDDRRDAFVLADSLRTDQPSFRRLQLDAPQLLLLRELSRAEETLLEEFRRSANRLRDQLHRFYPQMLQLCSAADAPWLWDLLDLAPTPAHAALLSAEQVQRVLKAHRLRRITAPEALACLQAPALPVAPGATEAAQAHCGFLLPCLRVLAEQLRACGQQVDALLRTMADEPGAGERPSDVAIVLSLPGVGRKITAWLLAEAAQPLAARDYQVLRTHSGVAPVTKQSGKRRLVVMRRGCNPRLRHALYHMARVAMQRDTHFSSVYTALRAKGQRHGQALRAISDRLLRILVAMLRNGTCYDASRIRRESAVQMG

SEQ ID NO: 454123 - protein, 411 aa, unidentified
MHNRQNYLYVGVDLHKEHHTAVIINCWQEKLGEIQFENKPSAFSKFLLEVETYVSDGLSVVFGLEDVGGYGRALAKYLVDHEQVVKEVNPALSFLERKSQVMIQKNDSWDAECVARILINKLNQLPDVKPNDLFWSIQQLVSRRNALVKAQSALKNQLHIQLNHHYPSYKKFFSELDGKTALAFWEQYPSPSCLEGTNIKQLTAFLLDVSNNTCSVKKASDILKLVKEDGHTMKEYQDTRDFLVRSIVREIEFKKKEMKYIERELKQLVNLLDYQLETMPGIELVTASALIAEIGDIRRVLNANKLARFAGIAPVYFGSGGKGKTHKSKQGKRALHALFYNLAVQQVQVAKGSKKPRNPVFHAYYQKKLKEGKTKGQALVCIMRRLVNIVYGMMKYKTAYELPVVEEKEVV

SEQ ID NO: 454124 - protein, 433 aa, unidentified
MSGRETVQSEVKFVAFVGIDWADQKHVWCLQKASSREREFGELEQKPETVEAWVGELCRRVGPGPIAVAVEQVKGALVCMLRKYECLHLFPVPSTMSAAMRKALYPSGAKDDPRDAGLLLDLLLQHRDRLRHLQPDNEATRRVQNLVEERRKLVEEKTAQLNRLIGYLKIYFPQMLDWFGRLDRKLVCEFLERWPSLEELKKVPLAELRKFFGQRQGRHHELTEERIHGIVHAMPAIQDGAVIEAKGVVVQVIAQLLRSLLEGIANLDRKIAEAAGAHPDFFIFESLPGAGAALAPRLLAALGSQRDRYGSADEVQKHSGIAPVTEASGKKKWVHFRWACAKFLRQSFHEWAGHSIAHSVWARAYYQQQRQRGQDHHAAVRALAFKWIRIVFRCWQDRVAYDENKYLAALARRGSPLSSVLTTATPLCNPCGS

SEQ ID NO: 454125 - protein, 367 aa, unidentified
MKKISTRAAAQSRNISQQKLTIGLDLGDRNSWYCVVDEAGQIQLEQRVRTTAKALQEVFGTMPRSRIALEIGTHSPWISRMLSDLGHEVIVANARKVRLIGESRKKDDRLDAQTLARLARIDPELLYPVKHRSAQAQADLTVIRARAGLVRARTGLVNSARGLAKSYGERLRGCNVRNLNPEKAEGLSPELQAALEPLLNAIEALSERIVEYNERIEKLAQQSYPQTALLKQVKGVGTLIALTYMLTLEDPHRFGKSRDVGCYLGLQPGRRNSGQREPQMHISKEGDPYLRTLLVQGAQHILGPFGIDCDLRRWGLKLAERGGRNGKKRAIVATARKLAVLLHHLWVSGEAYEPLHNSSRTTVAAAA

SEQ ID NO: 454126 - protein, 342 aa, unidentified
MQITTIGLDIAKNVFQVHGIDATEKVVVRKQLRRGQMLAFFKALAPCLIGMEACATAHYWARELTKLGHQVRLMPAKDVKAYVKRNKNDAADAEAICEAVRRPTMRFVPVKSAEQQARLMQHRARDLLMRQRTQLINALRAHLAELGIAAAQGREGIKELLAIVAQDGDTRLPVDAHASLIVLAAQLQAVQTMIGSIEKRIVAQHRSSEENKRLQTIPGIGVLGASTIMAVVPDPKVFRSGRDFAAWIGIVPREDSTGGKQKLGPISKQGDRYLRRILVVGACAVLRRARQQPEKYPWLTQLLARRPFKVVAVALANKMARIAWALLAKGGTYRAPALAAAA

SEQ ID NO: 454127 - protein, 310 aa, unidentified
MDSIYVGIDVSKDRLDVHVLPSGQAFAVARDGKGLNELIERLGSVQPQLIAVEATGGFEAIVAAAIAGAHLPLAVVNPAQVRHFAQAIGKRAKTDPIDAAVIARFAEAVKPEPRELPDEAARLLSELVVRRAQVIEMLVAERQREKRASAVRVRKSLARHIATLEKELPEIDRDIDTMVRGSPVWRETEDLLISFPGVANTIARNVMADVPELGRLTRREIASLVGIAPFTRQSGRWKGKSMIAGGRPFARSAIFMAALSAARCNPVLREFYKRLLARGKPKMVALIAVARKVLTILNAMIRDKKQWQPA

SEQ ID NO: 454128 - protein, 341 aa, unidentified
MSSTSLLDSVQTYVGIDVSKDWIDCYLRPHQEAIHCGNNSDGFTELEQWLTVHGVEADATVICMENTGIYDDKLLKHLTENGWLCAVEKTTVLGKVTPDHHRKDDPFDAAGLAEYADRYLDKLTITYPKSDDVERLRQLYSERNRLVVQKGAVQNKYSQLDHHTVTSELVEESWKQQLDFYEHQINQIEQRMHELVRAHDGLQHYWELLMDIPGIGKVTAWLWLVLFYGQSTLDCKKISSRFGFAPHSNRSGSSMRGKTRSSGHGAAQMRKCMSLAARAASSYYEKFRDYKQRKIEEGKLWPVVRNNLINKLIKIICAIWNSGKPYRSDHMSRFDRQKVAN

SEQ ID NO: 454129 - protein, 412 aa, unidentified
MLKIVYPICCGMDVHKSFVVACIATTNDHGVTTYKSKRFSTFTGDLRRCAAWLSENNCKDICMESTGKYWIPIYNILEATCNIVLAHPKYVKAIRGKKTDKRDAKWIADIFKHDLVSGSFIPPADIRQLRDLVRYHWKLTNFNVGEKNRAQNCLTVSNIKLDDVFSDVFGKAATAITTRLLESNEPFDVKPYLTKNIKKPIEQIQAAVDGKMCAEQAEKLRIIRSHMDSLELCRLNLESLILTTAEKYLPQLNLVMTAPGINSFSAIGIISEIGVDMSVFPSSKHLCSWAGLTPQNNESAGKKKTTRISRAGAYIKPLLVQCALASLKSRRYPEVQARYISLKKRRGHKKAIIAIARMLLTAIYNMLKRNEAYNPDLYRKADRPPTHREVSVEEAVFILQRQGYLVTAPTVT

SEQ ID NO: 454130 - protein, 423 aa, unidentified
MEPKTPMPKRYIGLDIHKHYLVAYGVDANLNPRLGPRRVNYPDLDRWIRTSLTLEDALVIEMTTNTWEMYDRLLPWVHSVMVVHPPHVALITRSQVMTDKVAARTLAHLLAKGLLVGIWVPPEAVRQQRALVAYRQKFTRLTTQAKNRLHAVLHRRQILPPQQGDLFAPAQADWWRSLPLGPIEKALVQADLDTLEFGRKQIEQLEASLNQRAAQEERLPLLVQLPGVSVLTALTILAAIGDITRFPSAKHLVGYAGLGARIHDSGQTTRTGKITKAGRRDLRTGMVEAAQTAANTHPYWQAELARLEPRLGRNKAIVAIARKLLVAIWHILTQNAADRHADPERLGRKFLQVAYTLGHANRPQGQSAAAFARKQLDRLGLGQGLTHVHWGAKKKPIPLPPSTRAAILSSPTPVSLLSCLRSD

SEQ ID NO: 454131 - protein, 410 aa, unidentified
METIVLRAGALDVHKAQVTACVRVPGRGRERRQEVAEFQTTVRGLLSLRDWLKAHGVGQVAMEATGVYWKPAWAILEDEFDCLLVNARHVKQVPGRKTDVSDAAWLCQLLEAGLLRRSFVPPKPIRALRNLTRYRKAQIGERQREANRLHKLLEDTGIKLDCVASDILGASGRAMLDALVAGTSDPEVLAELAKGKLRAKIPALREALVGRFDAQHALIVSAILAHLDFLDEQIQLLSDEIEVQLAPFAAAVELLCTIPGVQRRTAEVIVAEIGTDMSRFPSDRHLASWAGQCPGNDRSAGKRRSGKTRHGSKWLDTALTEAAMAATRTNDVYLAAQYKRLRPRRGHGRALGAVKHSIITGCWHMLSTGELYREAGGDYFTRRDPERVTRRLVAQLERLGHTVTLQEAAA

SEQ ID NO: 454132 - protein, 388 aa, unidentified
MQTAADHPEAPTAIRHDLGAIFISLELSRSTWLITSLSPGGGEKMSKHSVRGGDVAGLLERFAQLQEKARARTGRTFPIIVIQEAGLDGFWIHRVLQNEGIESHVVDPASVATSRRRRRAKTDRIDGEALLRTLLAYKRGEPRVCAMVKATTPEEEDRRRLCRERKVLTNERVQHVNRIKGLLFGQGVSGYEPLRRNRRQQLNELRTGDGRPLPKHLKTQISRELDRLELLLEQIKAVETERDALLAAQKVALPGPAAMLLDFNGIGPEFTAVLWSEGLFRHFDNRRQVASYAGLAPTPWQSGSVDHEQGVSKAGNPRLRTTLIQLAWLWLRHQPQSALALWFKERVARNGGRHKKTTVVALARKLLVALWKYVTAGVVIEGAVMKTA

SEQ ID NO: 454133 - protein, 369 aa, unidentified
MNDITYVGLDVHKATVCVAIAESGRGGEVREVGVFENRPDVLRKMVARLGKHRRRLNFCYEAGPCGYGLHRLLTGLGHDCVVVAPSLIPMKAGDRVKTDRRDALMLAKLHRAGELTPIWIPDAAHEAMRDLVRARATSVRALSKARQHLQGFLLRHDRIYHGARAWTLAYRRWLTTVRFDHPAQQIVLQDYIHAVEDAEFRRDRLTRQIEELMPSWSMAPVAAALQAMRGVALVVAVTVVAEVGDFRRFTNARQLMAYLGLVPSEHSSGSTVRRAGITKAGNALARRVLIEGAWTYRMSARVSRKLHDRLEPLSAAIRDIAWKAQVRLCARYRRLAATGKPKVVVTTAIAREMVGFIWAIARVAQPEII

SEQ ID NO: 454134 - protein, 409 aa, unidentified
MQVVHEVCCGLDVHKKSVTACVLWAAGRRRQTREFGTFTQELLELADWLRDCGVTHVALESTGVYWKPVWNLLEGQFEVLLVNAQHIKAVPGRKTDQKDSEWIADLLQHGLLRASFVPPTPTRELRDLTRYRASLAQEINRIANRIQKVLEDANIKLASVATDTLGASGRAMLEAIVKGEQDSQRLAEMSRGLLRNKIPELQQALEGRVTGHHRFLLRELLDHLYFVESKMRRIEQEVEERLGPFQSEVARLCTIPGVDRVTAWGLLAEIGLDMSQFPDAQHLASWAGLCPGSHESAGKRKSGKIRKGSLWLRRCLCQGAWAVSTKKNNYLSALYRRLAARRGTKRATIAVAHNLLVIAYYILRDGTCYRDLGPDYFDRLNPEGLRRRLTKRLEGLGFKVSLEPLAQVV

SEQ ID NO: 454135 - protein, 366 aa, unidentified
MDKSSTVKMSGNEILKQRKLTIGMDLGDRSTRYCVLDEAGDVILERSVPTTKKGIDQVFGAMPRSRIALETGVHSPWISRQLTQLGHEVIVAHARNVRLIGESSRKDDRLDAKTLARLARIDPQLLSPVQHRSAEAQAHLTVIRARAALVGARTALVNAARGLAKSYGERLRKCGTQQVRPDLAAGWSVELRAALEPLLGEIESLSQRIAAYDRQIEQIAKKEYPEVSLLQQVKGVGTLIALTYLLTLEDPHRFRRSRDVGCYLGLRPGRRNSGSSQPQLHISKEGDGYLRTLMVQGAHYILGPFGEDSDLRRWGLRLAERGGKNAKKRAIVAVARKLAVLLHKLWVNGEVYEPLRNHPTAVDAVA

SEQ ID NO: 454136 - protein, 481 aa, unidentified
MKTNSPTLAVGIDVHKKRHYARVKIRETREIISPILKIYNSKRGLDFLLEKVNHLMEKYQAKGVIFALEPTGIYWKPLGYALHDRGCLVHLVNPVQVHYKRKEEDPAANKNDKIDPGLICDLACDGKSNPARFMLGIFRLLQKTVRSRRDIVSGLSSKKIKLKTVIYELCPELVDAFTDIAGRVSMAILRFSPSIDLLESTPLEELSSIFRIYGSHKTKISPEKLLSQVRFSLGIRNNNQAHIKQIQMILEQIDLLKRQISILEKDINGYLKELGQTLTSIKGIGPILAAEVIAEVGDIDTFSSGRQLVKLAGLDTVESSSGETKRRRYISKKGISSLRTTAILAAFSLIKSCPPFTDYFLYQTKVLAKKPMQAIIAVADKFLRVCFYMLKNKTSFDPKRIGTGNLRTKAKFLNQSLEVSLDSKEIVNLDLNLLDIFSKSPKVVLFDEEDPTWVKIRVNSKVETFDLEEPRGRILALLNAL

SEQ ID NO: 454137 - protein, 393 aa, unidentified
MTMVYLGIDVAKDKHDCYIVNSDGEILANVFTIPNDQAGFNLLLQRLKSVAPDLSKVKVGLEATGHYSYNILGFLLDKGLHTYVINPLHVNLFRKATNIRKTKTDPIDARTIAEMIMSNVVLTSYTAKSYHNEELKSLTRYRFDKVQERARLKTSVARLVSILFPELEKLVPTLHIHSVYALLTEFPGARQIASCHLTRLTHLLSESSKGRYKRDKAIQIREAARSSIGSVMSAKSLELKHTIHLIEVLSEEIDEIELSIKQIMDKDPSPILTIPGISYRMGAMILGEIGDFSRFSSPDQILAYAGLSPSTYQSGKLDNAYPHMEKRGSHYLRFALFNAARFVCNWDPTFASYLAKKRTEGKHYYVAISHAAKKLVRLIFALVRSGQAYSPAT

SEQ ID NO: 454138 - protein, 347 aa, unidentified
MQIIGCDFHPSYQQIAWLDIPTGELRERSLEHASGEAQRFYASLPGPVRVGMEAVGNAHWFERLLAELGHELWIGDAARIRALVVRRQKTDRRDAVHLLELLTSGRFPRIWVPSPEVRDTRQLLLHRHKLVALRRRVKNELQHLALNQGVQRKRKLWSAAGRQVLESLPLQGWTARRCHDLLAWLDQLDAQVAELNQAVAREAERRPEVRLLMTHPGIGPIVGLAYVLTIGPWQRFPRGKPVASYLGLIPREHSSGGRQKLGAISKQGNSFLRSLLVEAAQSAVRYDEELRRDYRRLAERKHKALALVMVARKLAVRLYWMLRENRPYAPPPAVRMSGRPSHSVVAR

SEQ ID NO: 454139 - protein, 349 aa, unidentified
MSQNLQVAIAVIGIDIGKNSFQVVGLDERGAIVLRQKWSRSQVEARFANMPPCLVGMEACVGAHHLSRKLKALGHDARLMPAKYVRPYSKGQKNDFRDAEAIAEAVQRPTMKFVATKTADQLDLQALHRVRERLVSQRTGVINQIRAFLLERGIAVRQGQRFLRAELPRILATPPEVLSPRMVRVIEGLAADWRRLDERIEGLSGEIEALAKQDAGCERLMSVPGVGPIISSAMVAAIGAGDAFSKGRDFAAWLGLVPRQISTGDRTILGKISKRGNRYLRVLFVQAAWVVLIKPQIWERHGLKPWIEAAKKRLHHNVLAIALANKLARIAWSVLARGRAFEASKLQAA

SEQ ID NO: 454140 - protein, 356 aa, unidentified
MSNITRVGVDLAKNLIQVHAVDAAGKVVTNRALKREKFLLWCADLPAGCLVAMEACSGAHHWCRQLRERGFDARMIPAQCVAPYRIQGKSGKNDANDAAAVCEAASRPHMNFVPPKTLDQQGMLCVHRLREALKEERTACINRIRGLLAEFGVVLPQTPAILRQHLNDILEDASNDIAGMARLVLQRAQEHWRELEKHIQWCDERISAHQKNDEQVQRAAELKGVGPITASAVVATVGDFKQFKNGAQFGAWLGLTPKQNSSGGKTSLGSITKRGSKYLRNLLIQGAKSVVLTGKHNDDPISQWAQRLRERCGWQKAVVALANKNARILWAVMTRDKRYDARHVSAPPAGVMPAAA

SEQ ID NO: 454141 - protein, 415 aa, unidentified
MSHPLLVGVDVHRQTNTVCLMDASGHVLGSRRTIDNNRPGTAVLVDQVAQKMAQGDFDAIQIAAEATGWYWWHFFQTLARDPTLQQWSLQLYPLNPRLTANFAKTYVDRDHTDVGDAFVIADRLRMGRDLPPPYQLDARYLALRLLTRYRFHVIHTLAREKAYALAILYLKASEYGRLKPFGNLFGAASRAVLQEFASLEAIAAMPFDELAEWLDVRGKRRFADPQDNARTLQQVARDSYALPDALQLPVHQILGWSLQHITFLEGQIKRLDSAISEQLTNIPHTLETIPGIGPVFAAGIVAELGDIARFEFDQAKVAKFAGFKWKKHQSGDFTAEETRLTRTGNRYLRYYFCEAANAVRMHDREYAAYYERKYREVRQHQHKRAIVLTARKLVRLVVRLLTSNQPYQVRRPASS

SEQ ID NO: 454142 - protein, 410 aa, unidentified
MEPIVDRGCGLDVGQAIVVACLLVGRADQKARKEVRTFRTLTSDLLKLKDWLLSEGCTHVAMESTGVYWKPIYAILEDAFELIVANAHHIQNVPGRKTDVKDSEWIAELLRHGLLKKSFVPPKPIRQLRDLLRYRRKVVEARSAERNRLLKLLENANLKLASVISDVFGVSGLLMLKAILKGEQTPEQMAQLAKRRLRKKIPELQLALDGRVEEHHRFLLDLQIRRLEQFDRDVDVLDREIDTRLQPYREQQTLLMELPGVERVIAATLVAEIGVDMSVFDSAEHLTAWAGVCPGNNESAGKRKNAHSRRGNIHLKTALVEAADAAARTNGTYLKNKFHRLKARRGHKRAAVAVARKILIAAYYMLSTGAHFRELGPEYLDRLHPRRVADNLVKRLQRLGFVVTIQRAAA

SEQ ID NO: 454143 - protein, 358 aa, unidentified
MKQTVRPDFTGQNIYVGMDVHKKSWSVSIYSEHHEHKTFTQPPNAQSLVGYLKRTFPGASYYAVYEAGFCGYWIHDTLHQQGVDCMIVNPADVPTTNKERCGKNDRIDCRKLGKNLRNQELQPIYIPCSMQREDRSLVRTRHGMVCKQTRCKNQITSFLAFYGVFLPPEMETRRWSRRFISWLESIQLEHSSGTIALKTLIEELLHLRKILAGLNREILLLSRTYDYAEAVWLLKTVPGISTLTAMILLTEIGDIFRFKNTDTLASYAGLIPDTKSSGEDEHTTNITKRRNPMLRSVLVESSWVAVRKDSALMLAFNKLCRRQKKTNAIIHIARKLLNRIRFVLKNRRPYVMATVEIY

SEQ ID NO: 454144 - protein, 354 aa, unidentified
MSEKLNSEIAVIGIDIGKNSFHLVGQDRRGSLVLRQKWSRGQVEARLANLPPCLIGMEACVGAHHLSRKLQSLGHDARLMPAKYVRPYSKGQKNDYRDAEAITEAVQRPTMKFVATKTADQLDLQALHRVRERLVGQRTGIINQIRAFLLERGIAVRQGLHFLRAELPSILATRIDVLSPRMLRVIEDLAGDWRRLDERIEGLSDEIGALARQDKGCERLMTVPGIGPMISSAMVAAIGTGDTFSKGRDFGAWLGLVPKQMSTGDRIILGPISKRGNRYLRKLFVQAAWVVLVKVGPKNWERYGLKSWIEAAKPRLHRNVLVIALANKLARIAWAVLHKGRAFECVKTDAPRPA

SEQ ID NO: 454145 - protein, 450 aa, unidentified
MVKRKRNEVVFPNAAGIDVGAASHYVAVPADAAADGVREFGAMTADLHAMADWLLACGVDVVALESTGVYWIPVFDILEQRGLTVWLVDARQLKYVPGRKSDVQDCQWLQTLMSFGLLRAAWRPAGDVCAIRAIARQREVLLVEQASWIQRMQKTLVEMNIQLAEVLSDIMGMTGQAIIRAIVAGERDPHALARLRHRRVKASEDEVLKALTGNWRDEHLFVLAQTLAMYDDLARHLAQCDAKIDALLDQRARTKIDVGKAPRAGTQAHIEFGVRQAMANWAGVDLTRINGLGVTSVMKLLCEVGPDLKRFETVKHFCSWLGLSPGTKISGGKVLACATKRSANRVRQTLKMAAMSLSHSDSALGSFYRRLCSRMDKPRANTAVAHKLARMVYFMLTRGEQFVDRGQAEYEEKQRQRDIAALKRRATSLGFELNPKSPTAPNGNAHGLVT

SEQ ID NO: 454146 - protein, 345 aa, unidentified
MHIASIGIDLGKTTFHLIALGERNKILLRKRFSRSQLLAYTARLPLSLIGLEACAGAHYLGTKLSEQGHQVRLIPAQFMKPYRKSNKNDFLDAEAIAEAVNKQNMRFAQLKTQEQLDWQAMHRVRDRLVQRRTALINEIRGFLLERGITFAARPIHLRKNLPAVIEDAEQNLSPRLRWLLDRMWQEWKQIETDVQAITDEIERISNDDARCRQLRQIPGFGPLISTATVAAIGNGAAFRRGRDFAAWVGVVPRQYSTGGKRKLYGISKRGNVYLRRMLIHGARSVLFRVKYDTGGFGQWVHRLAQRAPYNKVVVAIANKLARIAWAVLSSGRDYRHQPHQQLAAA

SEQ ID NO: 454147 - protein, 337 aa, unidentified
MELQKQYVGIDLHRRRSVIVRRSPEGETLDTVRIDNDAVALAAEVAKAGEAPEVVLEATYGWYWAADVLADAGAVVHLAHPLGNNWGHRRVKNDERDATDLVDLLRLGRLAEAWVAPPQLRELRELVRYRAKLVNLRSGLKAQVHAVLAKEGVAVPMSDLFGVAGQRLLDDCRLGQAYAVRVESLRDILEVVGREVTMLERRIAAALADDAGYQAIQAIAGVGPILASVFVAEIGDVSRFAGPAQLCSWAGLTPRHRESDTTVRRGHITKQGSRLVRWAAVEAVARQKGDTPIRAAHHRIADRRGKAIGRVAAARKLLTLVYYGLRDGEIRGLAEAG

SEQ ID NO: 454148 - protein, 332 aa, unidentified
MDNFYFIGVDVSKKKLDFCVLFEGKVLREEQVSNHQQAVARLIGELKNDLEMDNEQFLICAEHTGQYTFPLVCACKSVECKLWLENPSQIKYSSGMQRGKNDKVDAKRIAIYASRFGDKVKYYDRPTEEIERLKQLERERALYVTDLAKYKGQMYDQKDFMPAALYRKKTKRMKGLIQELQAAIDAITAEMEKIIGSTEVLARQMELLMSIDGVGKVVALNVIIETEAFSRFDNPRKFCCHAGVAPFSYTSGSSQHSKNKVSHRANKNIKKLLHMAAISVTHRKEGELKAYYMRKVEEGKNKMSVINALRAKIVARMFAVIKRNEVYTPIYS

SEQ ID NO: 454149 - protein, 337 aa, unidentified
MNYCGIDLHSNNCVVIVSNDEDRIMYQKRLPNELARIAAALEPYRHELAGVVIESTYNWYWLVDGLMDAGYRVHLAHPAAIKKYEGIKHSGDFADAAYLAQLLRLGLLAEGYIYPREERGARDLARKRMQLVRYRTAQILSIEGTVMRQTGHTLKGEAVKRLSGSDVEQFGLAPDVAMAIEANRAVCQVLGQQIETLEKSLLECVSLRADYCLLKTVPGIGQTLATTIMLETGSISRFPKVGNFSSYCRCVDSRRESNGRKKGEGNTRNGNKYLAWAFIEAANFAVRSCPQARSFYDRKKSRTNRILATKALAHKLARACYHILHDHKPFDIHLCFG

SEQ ID NO: 454150 - protein, 371 aa, unidentified
MKSILYIGMDVHKENYTLCSYSFEEDELKYKQTVAPDYKMILKYLEQLRNRKADEIEFVCGYEAGCLGYTLYHQLADHGIKCVILAPTTMGITNTGHIKTDKRDAGNIARCLAFHTYSEVHVPTPQDESVKEYIRMRDDQKKALKIIKQQILALVLRHGYRFEEGKNYWTQKHVKWLKSLNLGGILQEGLEEYLVTCEYLTDKVERFDKRIEEFAEDERYQNNVKKLSCFIGVKTHTALSALVEIGDFKRFGKAEQMAAFLGLVPGEDSSGGKQKRGSITKAGNSHVRRLLVEAAQGYTRGTVGHKSVDLKRRQTGNEPQIIAYADRANERLRRKFYRMTLKNGTKRNVAATAVARELACFIWGMMTDHVA

SEQ ID NO: 454151 - protein, 456 aa, unidentified
MPASRGTRARSSGQLATINPNAAGLDVGSTFHVVAVPADRDEQPVRTFRTFSGDLHRLADWLEATGITTVAMESTSVYWIPVFEILEARGFEVLLVNARDVKHVPGRKTDVQDAQWLQQLHQHGLLRGSFRPRDGVVRLRAYLRHRERLVEYAASHIQHMQKALMQMNVQLHHVVSDITGTTGMRIIRAIVGGNHAPDRLAEFRDVRCAASEATIRAALTGNYRAEHIFALRHALELYDFHQAKIAECDVEIERVLRTLNEARATPTEPLPAVRHAKAKNEPEFDARPGLYTLLGADLTQIHGFGAYTVLRLVAECGDDMRKWPTAKHFTSWLSLAPRNKISGGRLLSSKTRRSSNRAATLLRIAAVNVGRTQTALGAFYRRLAARTGKAKAVTATARKLAILFYKALRFGMTYVDPGASSYEERYRQRVIQHLQRRARHFGFALVADPAAIGGVS

SEQ ID NO: 454152 - protein, 369 aa, unidentified
MPNLKVRYVGLDVHKDSIVIAVAEEGRGEPWEVGTFPSDWASLDKTLRRLAAGFVLKLCYEAGPTGFELHRRLVEAGYDNQVVAPSLIPTKPGDRVKTDRRDAANLARCHRSGNLTAVYVPDPDTEALRDLERAREAAKNAERTAKQQLGKFLLRQGRRWDGGKNWTLKHLDWIRRQVFEHEAHRRVLRDYLKALEDATERVNRLTDDIAELIAESALAPLVTSLQAMRGVATISSAVIAAELGDLRRFKSAAGFMKFVGLIPSESSTGPRIRRGPITKTGNRRVRRILVEAAWHYLRPPAMSRALRLRNANASDAVRKIAWKAQKRLHRKFRHLIYDKGKPSQVAVIAVARELAGFVWAIGREDRLTA

SEQ ID NO: 454153 - protein, 413 aa, unidentified
MDWVACVGIDWGDKQHACMIQTREGSKQAMTLASSPEEVHRWVRELRERFPDGTIVVGVEQGQWSLIYELMAYEFLALVPINPRASKAYRTSLRLSGASDDPADAALICDFVLKHLAELRVWRPDDVRTRKMRLLCEQRRSLVDQRTALTHALSATLKEYFPQVLQWFGETSQHLRAFLTHWPTLDQARQAIVDDLTNMLKASGRRKASAVAKELIEKIRLAVPLTRDTAIIEARSLYALSLVAQIDPLDQQIANHDQAIAAVWAHHPDCKTFGSLPGAGAVLAPRLAVAFGLDRSRYEDAREVQQYSGIAPVIERSGRQFWIHARWGFPTFLHQTFHEFAAASLPQCEWARAFYQQQRERGAGHHQAIRALAFRWIRILFRLWKTGEEYDENRYLEALKKKGSPVVSRLAAA

SEQ ID NO: 454154 - protein, 345 aa, unidentified
MNYFAGLDVSLKLTAICVVDGDGNVVREGVADTQPEMLVSWLKDTGLAFSRIGLEAGQCSSWLHKGLALAGFPVVCVETRHAKGVMQAQSVKTDRNDARALAQMMRTGWFKAVHIKGEDSQKLRTLMGSRRCLLDKQRDLDNHIRASLRVFGFKVGLIGQSRFEERVRELIAGDDDLEVGIVALLDARRALHGQVRLLTRTIEGLARKDEICRRLMTAPGVGPLTALAFKTAIDDPVRFAKSRNVAVHLGLTPRKYASGEVDYNGGITRCGDDFVRKHLYEAAHSLLVNTKKWFALKAWGVRLAKRSSFKNACVAVARKLAVILHRMWIDGTDFRWGHEEQAAAA

SEQ ID NO: 454155 - protein, 341 aa, unidentified
MRYIGLDVHKDNITACVLTSTGKPKFEKDFIKGSGPWDLSELLGFGDKDGFCVMMESGTYAYQPFRFFSDLGIETHVVHAKALKVITKSDKKTDRKDAYTIARMLRLWKRGEIDLQMAYIPTREQCELKDICRYREEISKKIGDETRRIKSHMSRNCQHLPEAFDNFQARKVRDYVRSAFPADITLMRRMADLERLFEERDSVQKEVESRLPGSREVEILMTVPGIARQTAVQIMSMIVDIDRFEDAEKLCAYFGMVPRVRDSGGKEHHGRMTKNGDRMMRAVMERVTESHVRNCDSSVTRYYKRKCSEMGTKKALITASRKMLSVIFAMLKSGSDFRLAA

SEQ ID NO: 454156 - protein, 343 aa, unidentified
MQVSTIGLDLAKNVFQAHGVSAEGKVVLKKQLRRGQVLSTFAKLPPCLVGMEACAGAHYWARELRKLGHDVRLMPARDVKAYVKRDKTDAADAAAICEAVSRPSMRFVALKTPEQQGRLMQHRVRDLLLRQRTQTINALRAHMAELGLVAATGRQGLCLLLAILADARDERLPQDARASLKLLASQITALQAQIDSLDKRLHAQHRQCPASRRLETIPGIGVIGATALAATITDPKAFKSGRDLAAFIGLVPRNNSSGGKQRLGPISKQGDRYLRRILVVGAHSILKQARTRPDKHPWLARLMARKPGKLAAVALANKTARIAWAVLARGESYRAPTAPAAAG

SEQ ID NO: 454157 - protein, 313 aa, unidentified
MHEDVFVGIDIAQERLDVHVLPQGDALKFQNDANGIEKMVRHLRKAVPKVIVMESSGGFEISLAAELGAANLPVAVVNPRQVRDFARGIGKLAKTDSIDAYVLASFAQTNKIEPRPLPSEEEQLIKDLVRRRQQLISLRATEKNRLHRVRSKPVRESILVVIQTLDEQIRSIDRDLDNILRSSPLWRDKEDLLKSFSGVGPVTARTLLALLPELGKANRQQIAALVGLAPLNRDSGKMKGKRMIAGGRTDVRNALYMAALTASKHNSTIKAFYERLTQAGKPAKVALTACMRRILVILNAMIKRKQPFQAFCT

SEQ ID NO: 454158 - protein, 404 aa, unidentified
MKGPIVSIDVSKGKSDYQAFKDLNVKYTGSRSIKHNKEEFDEIVNLVREMEKKLETEVCVVYEATGVYHRVLKKVLEDNNIKQFIINPLLSAKTRKNDSLRSPKTDKLDPKSIAKTYYSHSLHNSHKQETIYHELRELSRYYEDILVHIRKDKVAFRAQLDIVFPGYDTLYDDLYGPVALAIIEKYPHPEMLQKKKINTVSKVIQNKTCHRQAVSDTMADKAIEYSKTIYSGCDKDDIEVLILQRFIKKLNEDMAEAERTIGEMIKLAQELPDFNIIKSIPGIGDNLAARIIAELGDMTRFKKKNELVAFAGLDPRISESGQNDGDHMHITKKGNKRLRCLLYLAVTCSIRLKRDDNSIKDFYIKKKQQSNPMCSKAAKTACASKLVRIIYSMCKTGELYQYNK

SEQ ID NO: 454159 - protein, 370 aa, unidentified
MSESSTIFVGLDQHKESITVSYVGADRSLEPICLGPIGPRTSDVDAMVRKLQSKGKKLVFAYEAGPCGYGLYRHLTRKGHTCLVVAPAKIPRKPGDRVKNDKRDATNLCRLLRSNDLKSVYVPQIADEAIRDLCRAREDAVSDFKAAKHRIKSFLLRHDIRFNGKADWKTPHLRWLGEVKCETSAQQVVFQEYVRAMIQGFERVERLEIELTQHVKSWRLSPVVEALQALRGVRFTVAVTAIAELGDLTRFEKPRQLMAFLGLHPSEHSTGERRRLGGITKTGNTHARRALVEGAWAYRFPARVSKQIQARQEKLPEAVRDIAWRAQVRLCKRFQKMIARGKNANIVVTAIARELAAFMWAIAKQVPVAA

SEQ ID NO: 454160 - protein, 383 aa, unidentified
MLRPATPAGLDFMTALAPSDRVHLATKRPGLGEGANVRFIIGCDFHPSFQQVAIFDNLTQEVRQLRLAHPQQAEEFYRSLPAPARVGTEAGGHNQWFQKLLVELGHELWVGDAARIRASYVRKQKTDRHDARHLLELLRQERFPRIWVPSAAERDLRQLLVHRHSRVRMRTQVKNQLQALALNQGLQKKRRLWTELGRAELEGLVLLPFAGARRTALLDSLDRLNQEIAVLDRQVERAALAHAGATRLMTHPGVGPVTALAVVLSVGPVARFRRAKHLASYVGLVPSEHSSGGKQRLGHISKQGSSFLRFVLVEAAQSAVRLDPAMKRQYVRLALRRQRAIAKVAAARRLLRRLYWMLRWECDYPALLARMQASPSHAVTRSA

SEQ ID NO: 454161 - protein, 429 aa, unidentified
MNYNTQNAKIASITEKSLIVGIDVGSETHYARAFSWRNYEYSKKPFAFSNDEDGFASFKAWMDDIAEKHEMEKVIPGMEPTGHYWLNLGAYLQGQGMRPVHVNPHHVKKSKELDDNNPNKNDRKDPKTIAGLVNEGRFSYPYIPTGIYAEIRNLSNLRIQTQEEITRIKNRIARWFSIYFPEIKDVYRNPDAVSGLMVIKQAPLPCDIKGLGVDGVNKIWRDARLKGAGLKRAKNLVTAAEHSIGNTEAPRSARKEIRNLLNDYEIYKSRMDELMEEIEELLSGIPYIDKLMGISGIGIKTVSCFIAEVGDIERFDNPKQVQKLAGYAIVADSSGKHNGESRISHRGRKRLRYALYEAAVSVIGKNKEFKEIHHYYRTREKNPLKKMQSVIAVACKLIRIFYAILTKGIDYDGQKMLRDIVRPGMQSAA

SEQ ID NO: 454162 - protein, 386 aa, unidentified
MREQAFVPRDFDIFGGLDVDKKSIAVTFMNHDGVLRSFSVPYAAEPLLNYVRKHFAGKKVAFAYEAGPTGWGLYDKLTAEGHPCVVAAPSMIPKVPGQKVKTNRLDSQKLSEHLRGGQLKSVHVPSEAYRELRHLTQLRDTFVKELVGMKLRIKGLLLFEGIEFPPAPPGSHWSSLVRAKLRRLACSATVRFKLERLLESLEHSEKQTLQTVKEIRRLYKQSPELCRAMAHLKSIPGIGEIMASHLLARIGDPQKIGNVRQLAGFIGLAPREHSTGERVARGQITRTGDGRLRSKLIQAAWSAIRQDAELREFYRSIYRRHPRHLAARKAIVAVARKLTTRIYAVLKENRPYVVREKVHSAPLTKEETVPQGTTRGLAEPGEPELP

SEQ ID NO: 454163 - protein, 336 aa, unidentified
MSAIATVGIDLAKSVFSIHAVNEHGKVQMHCTVSRSKLLPLIAGLSPCLIGMEACSGSHDWARRFREFGHTVRLMAPKFVVAYRKGGKNDGNDAEAICEAVARPNMRFVPVKTIDQQTVLTLHRVRQGFIVERTAIINRLRSLVSEFGIVIAQGANRARRDIVDHLDRLPDMVVRAVKDLLDHLQGLDDRVALYDRQLLQLTRKDDVVQRLQSIPGVGPLTASAIVASVGNATEFRNGRQFAAWLGLVPRQHSTGGKTRLGHITKSGDNYLRSLLVLGARAVIHRAARHPDRLSQWISDVRARRGYARATVALAAKNARILWVLLTKGDRFTSVPA

SEQ ID NO: 454164 - protein, 358 aa, unidentified
MTQVKKLDFSGTTIYCGVDVHKKSWRVNIQDSEFELEDFTQNPDAVLLHKHLTRSYPGASYKIGYEAGFSGFSTQRSLSGSGCQCWVVNAADIPTSDKDKKQKGDKADARKLCAYLQSKKLKGIHIPDASWEHARTLVRTRERIVNNQTRSKNRIWQLLHFSGLPAPADQQEGNYWSKRFIEGLQKIDCGGSVHLQQSLQLHIKDYLQTRLLLLEATRAIRGLCREQKYAGDIKLLRSIPGIGEINAAVLLFELQDVTRFKRFDYLCSYVGLVPDTADSGDTKRTKGITHRHNYYLRTALVESSWSVVRKDPALLMKYKQYCRRMEKTKAIIRIAKHLLSRINFVLKNKKEYVTGVVA

SEQ ID NO: 454165 - protein, 454 aa, unidentified
MGRRTTSGTKKKKSNRFWKQINHNAAGIDAGAEFHYVAVGEDRGVGPWVRKFPTHTSGLYRLADWLIECGIETVAVEATGVYCMPLLEVLEARGIEVILAKPSSLKSVNDRRKTDMLDCQWIQMLHTFGLLRGSFRPTQIVATYRAFNRQRQMLIEQASSCIEHMKKALTQMNIRVDQAVSDVTGKTGMGIIRAILTGERDPMVLASMRDGRCAKNEEAIAEDLTGKYSSEHLFALDQAVRSWDHYQVLIAECHTRLEGHAQTFEKKADRKTIPPPRRVEHVRKNVLTFDARSLFYELLGQDLTQIDGIGTGVVSAFVAEVGTNLDDFKTVKNFASWLRASPGADKSGGKNRSGKNRCTTNRLMTALRVAAQTLGNSKSALGAFYRRKRAQIGKEKAVTAAAHKLARMIYFTIKLQRPYVDPGPDHYTEKHRQRIIKSMEKRAKELGYSLVKAA

SEQ ID NO: 454166 - protein, 269 aa, unidentified
MIYAGLDLHKSFCQTKICTKEGELVKEGRIKTEAEDIEEFFSGLEDLTIAFEASGNYEYFYDLLEGLGHKVVLAHPLKTKMIAEAKIKTDKIDAKTLAELLRGGFLPTSYVPPKEIRELRHLVRHRIFLGRVRAIIKNQIKTELRRKNIKYPDGAGIFMEKGKKWLRSLKNPVIDSYLAIYEAVDRDVKNAEREIEKAGKEYKEVKLLTGTVGIGMYSALIIYSEIEDCSRFSDEEKAFSYAGLVPRVHQSGNTSYYGRITKEGSKYLR

SEQ ID NO: 454167 - protein, 390 aa, unidentified
MEARTVNNLLPAASHDDAVGCLVAIELSKKSWIVAVNTPLSDKISRHTLKAGDGKELLDLCERIRTRVARETKRRVEIVSCYEAGYDGFWLHRLLEAHGIRNYVIDPASLQVDRRARRAKTDHVDVERLLRSLMAYLRGEPKVWSVVCVPSVAEEDDRRLNRERGRLINERVQHVNRIKGLLAIHGIYDYQPLRRDRMLRLERLRTAADGQTLPPRLKAEILRELQRLELVLGMIKTIEAERDAIASPKTETEHTNAKKIQDLAKIKSIGPEFATTLIGEVLYRSFDNRKQLASYVGLTPAHFQSGAMCRDQGISKAGNGKARTVMIELAWLWLRHQPDSPLSVWFRERVGKLKGRIRRITIVAVARKLLIALWRYLETGLVPKGAILKA

SEQ ID NO: 454168 - protein, 347 aa, unidentified
MDQQCHYVGLDVSLETTSICVIDDAGAIIWRGKCSSDPDTITAIVRQHAPGAARVGLETGQLSNWLTLSLRRRGVPVVCMDARHAKAALSLQINKTDANDAFGLAQVVRTGWYREVAVKSMDAHTLRMLLVARSRLVSQRQATANTIRGLLKTFGLVVAKGSKGLFPVRVREQIVGNPALIAIIEPPLAVWYAIRDQVVMLDRQMLARARNDQVARRLMTIPGVGVVIALAYTAVIDDPARFRRSVSVGAYLGLTPRRYQSGEVDTTGHISKCGDSLLRGYLYEAAAVLLYRDGRASVLKSWGLGLAKRIGMRRAKVAVARKLAVIMHRIWSDQSEYRWMAIPSTTA

SEQ ID NO: 454169 - protein, 333 aa, unidentified
MNQLTRYYGLDVSKDTLHISYQTGTDASGQPQWAYQTLPNELDALEQWSTQLPPNSHLIFEYTGTYSARLAWVLALHNRPFSILTPSQSKGFATTLKSISKTDRSDAALLARYGQVFQPQPSQLAEESLHQLRQQHKHLNDLRISQQAVANQLHALSFDPRASQKVKASLGILQQSYLTQISLFEDDLDQMSQQELQAISERMQRVKGIGPAWAQALCTATNGLAGFESAKAVAKFVGLAPSQTQSGSSVHRRGRMARTGLGYVRGLLYMAARSARKYNLGCQALYERLRAKGKCHKVAMVAVMNKLVHQVFAVVKNNVDFVNGFGLPKQNLA

SEQ ID NO: 454170 - protein, 315 aa, unidentified
MNQANWVGVDTHKETLACYKDGKFKEFKTTQKDFEAALRWAGKGSLWAIEGAYCFGKPFTAHLIRNGCEAYEVNPLLTSSWRKTLSISNSKNDFGDAKVISLFANTSNLQKVSLETIQLKEKITARDHFVKDRTRAINAIKMLFSTRGINLPHKDLATLKAGKWLVAYDDKLIQHYGKLLNDLNVAINDLKKEIEKDLPEKAQKLKQLKGVGDLTAAIIYTETKGKVTTPEALASYAGVAPVDKSSGKTTRHRNNKSGNRKLNSVFYRMSIHQRIFDPEGKKYYEKKIAEGKTKRHARKCLSRQLVRLVYNLLKD

SEQ ID NO: 454171 - protein, 353 aa, unidentified
MRFSVSNYDLLFPMDVDARSIHLSVMDSKRMIQKKTLPYDATNLLNYVRKHFPGQKGLFLYEAGPTGYGLYDYLTEQGEDCSVAVPSMIPKAPGQRVKTNRLDAYNLGIQARTDDMRFVEVPEKKYRDLRHLTRLRLRYARKIVATKNAIRSLYLFEGIPFPEGCWSKQMLAKLQQIQHRQAIEFKVKQLLEDLEYYQRQQKTTKTELRRFCNADEEIKRCIGYLMSLPGVGWIVSTYILGALGGYKHLSSGKKTSGFLGLGPRENSTGTKVRKGEITAVGDPNARKMVIQACWVAYRKDPEFRSEFDKIYKRHSPTIAMKKAIVATGRKMVCRIHAVLRDQRKFENRFLKVA

SEQ ID NO: 454172 - protein, 312 aa, unidentified
MSERVAVGIDISKDEIVIAVAPSGEQWTSPTTPEALERTMARIAALQPTVVVMEATGGYEAPVAAAGAAAQLPIAIVNPRQVRAFAQALGRLAKTDVIDAHVLAAFGLHVDPPVRPLPDAATQVLAAFVARRRQLIEMLTAERQRLAQATAPAVQKDLRAHVRWLERRIANVDDDLTTHIQGSPLWRAREELLRSVPGIGPIVARTVMAELPELGTLSRHGVAALTGVAPMNRDSGQYRGPRMIRGGRPSLRRALYMAAVVAARYNPPLAAFYQRLRAAGKPAKVALVAVMRKLLTIMNAMVKHETVWNPAN

SEQ ID NO: 454173 - protein, 344 aa, unidentified
MNKITTIGLDIAKHSFHYVGCDQRGKMLKRKRLNRHQVLAHFANGPSCLIGIEACGSAHYWGRELQRLGHEVRLIPPQHVKAYVRGNKNDYNDALAIAEAVVRPEMRFVTIKTVEQQDQQMMNGQRQQLIRDRTAQVNRLRAMLMEQGVAVPKSISQLRRALPVLLENRDGRLGELFLSLLQQGVEYLQQLDAHIERCDQRLKELHTRTPACQQLTTIPGFGPVVASLFYSYVGDGSNYRRGRDVAAALGLVPRQHSTGGKAVLLGISKRGNKQLRTLLVHGARAVVSRVGDKTDALSCYLRQLIQRVGIHKATVAYANKMARMGWAIVHYDTVYQAPPMSVRP

SEQ ID NO: 454174 - protein, 343 aa, unidentified
MAIVAGFDVHRAQITFEALDRESGELKRGRIPSTPEAVRAWVTRFPGKEVDVAVEACTGWLFVCDALSEAGARPHLAEPAETSARRGKKRRAKTDREDAHWLCTLLAEGRLPEAWIPPAHVREWRTRTRLRKTLVDERTEWLQRIQATLFHHGVPASTVPRRLLAAEGRAFLAQLPLPEAARERIQVALALVDAIDCRLLLLERELRALARRQKGCRALRRHFGIGELTSLTILCELGDVSRLSSSRKAVRCAGIDVGVHRSDRRSRAGKLTKQGSPGLRWALYESAQSACRKTSPDHPAYLALRERGLSHTRASLTIARKLARRSFHTLRELGPEALEPVTD

SEQ ID NO: 454175 - protein, 315 aa, unidentified
MAMPVSVTKPIVGVDVAKNELVIYQSDGDFLEEIPNTRTSIKQWLKALSGTVAIAIEATNIYHLDFADLAYEAGCTIYMVGGYELKHYREGVKIRAKTDALDAKLLARYLKNEAEELRPWTPPSPLYRQLLSLFRRRAALVQARVGLVQSWSNEPLLKAAFAEQVKSMQQLETLIEKTINDQLKEAGLLGQLKRCLKVEGIGFLTGARLITAFQRGDFRNADAFIAFLGMDLRVAKSGQKDARRSLTKRGDPEARRLLHNAAMSASRTKAWKGYYEEQRTRGFSTTQALVMLARKLARVVFALLKGQSEYQPKAS

SEQ ID NO: 454176 - protein, 367 aa, unidentified
MKKISTATRKAIRNFSQPKLTIGLDLGDRSSWYCLLDEVGEVLQEKKLSTTPMAVREMFGAMPRSRIALETGMHSPWVSRVLSELGHEVIVAHARNVRLIGESRKKDDRLDAQTLARLARIDPQLLSPVKHRSAKAQADLTVIRARAGLVRARTALVNTARGLAKSYGERLRGCNVRNMNPEKAEGLSPELQRALEPLLAGIESLSERIRECNERIEELAQTSYPQVALLKQIKGVGTLIALTFLLTLEDPHRFRKSRDVGCYLGLQPGRRNSGQSEPQMHISKEGDPYLRTLLVQGAQHILGPFGPDCDLRRWGLKLAERGGKSGKKRAIIATARKLAVLLHRLWVSGEAYEPLHNSQQMMMPAAA

SEQ ID NO: 454177 - protein, 324 aa, unidentified
MTEPVLGIDISKLKFNACLINIEGKLRHKLFPNTAAGFEQLRDWLLRQGVERVHACLEATGTYGDSLALFLHEAGHRVSVINPAATKAFAQSRLSRTKTDRVDAELIARFCLAQAPPTWSPLPMEVRELQALVRRLESLIEMRVMEENRLSSGITVEAVRHSVEQLMAYLNQEIKHTEELIRNHINGHPTLKQQSALLDSIPGIAETTAALLLSEMTDIKQYSSARQVAAYAGLVPRERQSGSSLRGRTRLSKIGNARLRRALYFPAITAIRCSPFFQAWAKGLQERGKCKMSIICAVMRKLVHLAYGVLKNDKPFDPEWAKSA

SEQ ID NO: 454178 - protein, 388 aa, unidentified
MNYCGIDVAKRKHSAMVLNTKSETVKQNFTFKNDRQGFDKLLQELQPFADQLLIALEATGHYWLSLYEVLTSTGYQVVVLNPLQVHAYQRSGIRKRKNDRIDSFWIADFARISNPQATQQQATEHLQLRELSRFRFRLTENMGNCKRKILSILDRVFPEYEKLFSNVFLTSSRQLLAQAVTAQEFADFDLGELTALLSSASRGRFGQEKAEAIQSVARQSIGVHFLADSVRIQMRCLLQQLDLLEAQRQEVDLMLEHLMQQLPQYITSIPGIGLATGAAILSEIGDINRFESPEKLVAYAGIDATVYQSGQFEALETHMSKRGSPYLRQALWQAASMAVLHDPQLKNYYQRKKAEGKHHGTAIGAVCRKLVARIFIILKENRPYEIRY

SEQ ID NO: 454179 - protein, 383 aa, unidentified
MENTITYVAMDTHKKQHKIALHYPRREEIVEFSINNTVRDIKKMVNKIKKHSPGKVEFCYEAGVCGFTLKRRIEQFDCRCNVIAPSLVPRKPGERVKTDRRDAKKLLMMHKAGLLTEVHAPNEHQEAARELTRLRETAKDNLKRIRHQLLKFLSRHGYVYRDGHHWTQKHIAWLRAIEFTEPMLTSVFEKYFNEMIYCIGRLEALDKEVGLLADSEEYKEIVGLLRCFHGIDTLTAITILTEIFEFGRFESPRHLMSYLGLTPSEDSSGDKQKKGSITKTGNKRVRRLLNEAAWHYRHRYVPSKALKQRRKGQPQWAVEIADAAGRRLSKRHRHLVNNGKMPCKANIAVARELAGFIWFVVTQYHARNNTKDAACNQTTAISV

SEQ ID NO: 454180 - protein, 414 aa, unidentified
MFFLGIDIGKQHHEVGLIDQHGKSIGKTIRISNTKFGSEQLLAFFNKHALLPENTMVGMEATGHYWLSIYTFVHKLGFHTTVFNPIQSDVLRDFYIRKTKTDTIDALLIAQVIRLDLPDKTELPAEDIFRLKQLERFRYGLVDRCSDLKRKILACLDQVFPEYDQIFSDVFGCSSTQVLLNSPIPEDLLEIDAERLIETINTASEKRLGIARSEEKVMKLKEAAAHSFGISIASDVFKLEIQIMLEQIQLLDSQIKIIEAEIQEIVSKQENYLTTITGIGDITAAVLMAEVGDIKRFERPNQLLAFAGLDASVHQSGDFTGTKNRLSKRGSPYLRRAIWQAAFVAAFKDPALSLYYQKLRKRGKSHGTAIGAVARKLVNIIFAVWTQNKPYEVHFPEDICQGSQKNVGFGPLKM

SEQ ID NO: 454181 - protein, 345 aa, unidentified
MEPSHYVGLDVSQELTSVCVIDEQGAVVWRGKCATDPDVITRTIRQHASSLVRAGLETGLLSNFLTRALRARGVPVVCLDARHAKAALRVQINKTDANDAHGLAQVVRTGWFREITIKSMDAQSLRLLLVARAQLVSQRQATANTLRGLLKAFGHVVRKGAGGLFARRVREVCDDNPALCAIAEPMLAVWQSLREQIRILDGQLLKRAKSDPAARRLMSIPAVGVIVALAYVAVIDSPERFRQSSTVGAYLGLTPRRYQSGDVDCAGHISKCGDRLLRCYLFQAANAILTRKVTDSTLRIWGRALVARIGLRRTTVAVARKLAVIMHAIWKVDRDFDCTGKPARV

SEQ ID NO: 454182 - protein, 445 aa, unidentified
MRDHSEAFIGIDTSKLRNAIAIAEGGRGGEVRYFGEIDSADAATRKLVSKLAVKYRSLTFCYEAGPTGYGLYRLIRSLGHECVVAAPSLIPKKPGVRVKTNRRDAVELAKLSRAGELTAVWVPDERHEAMRDLSRARQAAKKHLTSKRQQILSLMLRLGRHYPGKKTWGTAHMNWLTQQKLEHREQRIALEELLEGMRQEAERVERLEQAIREAVPEWSLAEVATALQAMRGIDLVAAVTVLAEIGDLSRFQSPRELMGYLGLVPSESSTGDKVKRGGITKAGNGRARRILVEAAWSYRHPARVSREKQPKVAAAPRRVREIAWKAQTRLCGRFRSLTRKGKLPSIVATAIARELSAFIWAINHEVMAPGEGLEIRNVPTARSVTPCSPPSRRGLATADEVAGAPRRPALTAAARGVPATARVGTKKRAPRSNKETGSEAESAGL

SEQ ID NO: 454183 - protein, 338 aa, unidentified
MNKFSGIDLHSNNSVVVVSDEADRIVYQRRLPNDPVQIRAALAPHREDLVGVVIEATFNWYWLVDDLMKDGYCVHLANPAAIRQYDGLKYSGDFADAAYLAQLLRLGLLPEGYIYPAQGRQVRDLSRKRMQLVQCRTAQILAIENLFSRQTGGQMQGERVKRLDEAQVSGFGFAPDVLLAMQANLAVMQTLQEQIGIVEKRLMERVKQHPDYALLNSVPGIGPVLATTIMLETGTISRFAKVGNFSSYCRCVDSRRESNSRKKGEGNTKNGNKYLAWAFVEAANFAIRSCPEAKRFYERKKRARNGIVAIKALAHKLARACYYMLREHKRFEVTRCFG

SEQ ID NO: 454184 - protein, 416 aa, unidentified
MAVTRWVGRAVGLDVHREFCELAICEDGRVRSGGRVASTPEGLGVLARSLLPSDRVALEVTGSCWEVARILEPRVDRVVVVSPDDTGIASARAKTDRLDARQLASLLWKGELEAVWVPDERCRILRRRLARRGQLMRARTRAKNEMHACLQRRLQPRPPCWDLFGVRGRRWLAGLGLPAEERESVDAALRHVEFLDRELAAVDRPIARQALSWPEIRRLMTVPGVNLICAASFIAAVGNANRFLTSRKLVAYLGLDPRVKQSGEGPARSGRISKRGSPSARWALVETCWSVVLQPGPMRAFYQRTKARRGHGKAIVATARKLAVLFWCMLTRSEDYAHQQPTLTRKKLRRLEITAGAPKYTRRAVGSWSTNLLMRQAERELALQAEASYKRMVQDQRAGAPARKSGASVTPERAQV

SEQ ID NO: 454185 - protein, 315 aa, unidentified
MYLGLDIAKAKIDCCLMHDTKYLHRTFENNQDGFIKLTNWLEKHTANKVYACCEATGSYSEAIADYLHDTGHKISVVNPLRIKAFVTSELQNVKTDKQDAKSIAIYCHRNQPELYKPASPSERELKALTRYLDGLKELLTSHTNRSLVAHHSVKSYIETSIKNTRAEIKVIEKVIQSRIKSDNDLDKQAKLLKSITAISDGTIPHILTLFADKQFKTAKQATKYVGLNPIIKQSGNKSTRHLAISKMGDKYIRSALYMPAVVAFRMAVYKPFIKRLKDKGKTNKQIICAMMRKLLVYCFTVLKTGNQFDPDLILK

SEQ ID NO: 454186 - protein, 340 aa, unidentified
MNIKRIGLDLAKNVFQIHGVDHHEKVVLRKTLRRAHMMTFFSGLSPCLIGIEACGSSHYWARELTRMGHTVRIIPPKLVKPYLKGNKNDANDAAAICEAISRPGMRFVALKSEAQQTLQAEHRVRARIIRERTALCNEIRGLLSEFGLVLPVGINHVRKALLEILSQQEQWNDRFIRLLCELSEEMQMLDERISRHDRRLQQAARDDIRIKRLMEIEGFGPIVASALVAAVGDAKQFKNGREMSAFIGLVPRQHSSGGKERLGHISKRGDSYLRTLLIHGARAVLRFSAGKTDRRSRWLQSVAERRNNNIAVVALANKNIRIAWAILSRSEEYRGVENAA

SEQ ID NO: 454187 - protein, 323 aa, unidentified
MSISMIGIDTAKSIFHLHGVDAQGKAQLKRKLRRDELIAFFERQSRCTVVMEACGAAHHWARMLGGLGHEVKLIASEAVKPFVKRGKKNDPADAAAICAAASRPDARFVAAKSPEQQGVLALHSVRSLLVKQETMLANAMRGLATEFGLVVPKGMDKLEELVALVEEDGGIPEQARAAFIGLREHCRATAEQIEGLERRIIAHARGDDTARRLATIPGIAAWLGLVPRQHSTGGKTRLGRITKAGNREIRRLLVLGATSMVYRAKQWNSAAGAWLRGLLERRPVRLATVALANKMARIAWALMTRNEVYRAKGGVAFAAEATA

SEQ ID NO: 454188 - protein, 403 aa, unidentified
MNSVGIDISKGRSTVAVMRPFGEVVISPFEVRHTDSELSELARRLKSLTGETRVVMEATGNYHAPVAKLLHDAGLYVSVVNAKLVHSYGNNDLRRVKTDRKDAVKLANYGLDRWLTLPRYVPEENTRLLLKNCYRQYRQYSKVQTVLKNNLISLLDTVFPNANRLFSSPIRGDGSEKWVDFVAEFWHCRCVSEKSERTFTNKYQRWCKKHGYNFREAKAHTIYAEASGHIGVMPKSETTKLLVEQAASQLRATSAALAALKHEMQSLASMLPEYPVVMDMFGVGPTLGPQLIAEIGDVRRFYSKKALVAYAGLDAPPNDSGDVTGRHKSMSKVGASSLRRTLFLVMSVYLQNAPLDEPVYQFMDKKRAEGKPYRVYMMASANKFLRIYYATVKAYLESLEHTA

SEQ ID NO: 454189 - protein, 274 aa, unidentified
MKQIKRIGIDLAKSVFQVHGVDAHENVVLRKPLKRAKLRAFFAQCPACQIGMEACGSAHYWARELGKLGHTVHLIAPQFVTPYRKNDKNDGNDAEAICEALGRPTMRYVPIKDEEQQAVLCVHRARSLLVEERTALANQLRGLLAEYGLIIPQGVARLRAALPGILEDAENGVPMLAREVFADLTERLRGLDTHIAAYDRRITHLARTMTAAKRLMQVEGIGPLTATALVASVGDARLLKNGRQFAAWLGLVPRQHSTGGKSRLGRGAASATRL

SEQ ID NO: 454190 - protein, 346 aa, unidentified
MTIVGCDFHPSWQQIAVFDTETGEVRECKLVNGNGEAERFYRRLSSPTLVGVEACGNSQWFVDLLQRLGHEVWIGDAAQIRASYVRKQKTDRRDAAHILKLLIEGRFPRLWTPSAEQRNLRQLLIHRHKLVGIRVQVKNGLQHLMLNRGVQLKEKLWSQAGQKALRELTLAGWAALRRKDLLSLLASLNEQIGQLDQATEKAAEENQEARLLMTHPGVGPITALAFVLTLGDVTRFKRGKQVASYLGLVPREHSSSGKQRLGSISKQGNRFLRMLLVESAQAVTRLDEGFRKQYQRRCHHMARGVAKVAAARRLSVRLFWMLRTHTAYPEIVRIESSPAEALVGES

SEQ ID NO: 454191 - protein, 427 aa, unidentified
MKPHYFIGIDRSDYRLDLCILDANGKILEQTAISSDPEAMLAWVRKIEGMLPAGARAALCIEQPCPGLLNFFKQFDFLVLYLINPLTLKRYREAFNTSRAKDDKKDAFHLARLLLEKHDLLKVWKSDDPQTRQLAILTRKRRQLVDLRGSITNRLTQVLKDCFPQALKLTGRDLHARLALSFLEKWPTLQALQKARPATIKKFYYLNGSRRPKPIEERLELIAKAVPICSDPIILESNAEFILALVKQLRGFDLSIRRFDALTAQALEDHQDAAIFTSLPGAGPNLAARLTAFFGTDRSTYPEPANAQRHSGVAPVTKQSGKMHFVHRRYACCKFWRQTFVEWAGQSVMKSRWAKAYYLQQKEKGQRHHTILRGLAYKWIRIVHRCWQTSQPYDEDRYLAVLAKRKSPLIAIIKKLAELPEPQETSP

SEQ ID NO: 454192 - protein, 388 aa, unidentified
MHYALTKLMAYGPIKTPEIFIFSESVQIDIKALRLIIKVLKSSLIIHINAKIMKKTLQSIFLFVGIDVSKLTLDVTEMNTRSKTKKYTQVENSTTGLAQLEIWFKEAHDFQYANTIFCFEHTGMYTRVLLDYLMSKGANVWMESSLHIKKSLGLNRGKNDKIDSYRIAEYAYRFSDKACFVENNSPEVVLLKDLLSARTRLKKSLQQILVTIKELTKVDEQQGKEIEILNLHAIKGLKASIQQIEEKIHQVIESNNQIQEVYELITSIPGVGFILAAKLLVYTKVFTSFSNVRQLACYCGVAPFEYRSGTSVKGKTGVSKFANMDLKATLHLASISAIQHNVELKKYYKRKVEEGKSKMVVINAVRNKLLARVVAVVNRKTPYVSLIN

SEQ ID NO: 454193 - protein, 356 aa, unidentified
MQTQVTKKIDFSDKNLFIGLDVHKKSWSVTIVIDGMEHRTFTQPPDPLALNNYLQRMFPGGSYNSAYEAGFCGYGIHRDLNSLGIRNIVINAADTPTSQKDKLHKRDPTDSRKIARELEKGSLRGINVFDRELEELRSLNRTRFYLMRDLRRSKNRIKSFLMYYGVPIPPEFDNNQWTLKFISWLKQVRMKTPGGQEAFFHLIQSYEHHRQQLLILSRMVRLRISHYDKELYSLLNKISGIGPLTASALITELGDINRFTHINHLGSYVGLIPRVRESGETTHAGGITFRCNSFLRTLLIESSWQAIRMDPALMQYYHRHVINSKGHKVIIKVARKLLNRIRYVMKNRQPYVTGVA

SEQ ID NO: 454194 - protein, 366 aa, unidentified
MEVTTIGIDLAKSVFAVSGADSRGRVVIRRQLRRAQVLGFMRGLPRCVVGMEATGGAQYWARQFTALGHAVRLMSPALVMPYRKGNKTDRNDADAILEAVSRPSMRFVTVKSVAQQYLLALHKVRAQLVKSRTALCNQLRGLLRERGVAVRMGVAALKRGLPAALADESSELSGEMRELLSEMSQWLGTLEQRIASCEARITQKFKHDERCVRLAEVPGVGPLTATALVAAVGNAQRFKNGRELSAYLGLVPRQHSSGGKTVLLGITKRGDRYLRTLLIHGARSALRQCKLKGDARSDWARRISAARGPNVAAVAMANKNARILWALLSRGDRYRSSRVLTRAVLRPGSPPPVKRARGAKLRVAKD

SEQ ID NO: 454195 - protein, 402 aa, unidentified
MQFYSKFVGMDVHKETIAVSVAEANGGEVRYLGEIHNTPEAVAKLVKQLRKGNARPSFCYEAGPCGYGLHRQLLEMGEANQVVAPSLIPKKAGDRVKTDRRDSLTLARLLRAGELTAVWVPDTPQEALRDLTRAREDLKHLERQAKQRLQAFLLRHGKRYGGETKWTKMHYHWLETVKFDQPLQQIVFQEYVDTTQSLTKRVAALDKQIEGAGSASGFGPLIEGLMALRGIARLTATTIMAEIGDLHRFATAPQLMGYLGLVPSEHSSGSHQCRGGITKTGNGHVRRVLVEAAWTYRHPARKTTYLQSRAKHTTEAVQEIAWKAQVRLCGRYRLLEGKGKLKVKVCTAIARELAGFIWAIGQAFPEPEVNASGQGKGRSVSAAERATVGEPSALLCRRPAME

SEQ ID NO: 454196 - protein, 414 aa, unidentified
MQVVYPICCGVDVHKSFFVATIISTTDGIQPHYQKKRFSTYNGDIRAFADWLSLHSCLDVCMESTGKYWVPVFNILEERGINVTVANPKWVSVVKGNKDDVKDSKWIGDLFRLGIVPGSFIPSKPVRLLREFTRYRAKLVAMKSSEKNRFQNAFTVCNVALDSVVSDMLGKSASAIADYLISDEPFSPEHCVSLLHRSLKKKADAVLESIEGFSISPEQKHRIQIVRAHLDYIESSIEAVDAAIDSMAETQQSAISLLCTIPGVGRSSAITVLSEIGTDMSQFGSSKRLCCWAGLTPSNNASAGKKKSVRISRAGVYLKPALVQAAHAAVKSNTSLYFRTKYECISKRRGKKRAIIAIARMILTSIFAMLSTGEVFNPCDLYKIEMPETLVAKQKDKALKQAIRLIESQGLSVA

SEQ ID NO: 454197 - protein, 323 aa, unidentified
MSSFVGVDMAKNTFDVATPLDNGKHRTKGKLSNDAKGFAEFESWLRKHATADALIVIEATGNYHEALADFLFQKGYRLHIANPATTAAHAKSELSRNKTDKTDAKLISDFAMQKHRKLRLWVPEPQSRRRLRALVRRLEDLNEIRQMEKNRLQVASPNVVTSIKSVIAHVLEEITKTEKAIKQHIDDDPDLRGKSELMTSIDGLGEKTAALILAELGDPLDYEGPKKLSAFAGLSPRQDRSGGYVGPTRISRTGSSRLRGGLYMPAIVGIQHNVVLREFAKRLKANGKAPRQIICAVMRKMLHLVYGVLKSNRPFEPEIALAH

SEQ ID NO: 454198 - protein, 440 aa, unidentified
MTTPCLPVLDPTAAAIDVGSEQLHASIAGGPPKIFGTTTDQLYALRDWLKENGVRTVAMEATGIYWLCPYEVLEKGGLAVVVVNGKYVKNLPGRKTDMKDCQWQATLHAHGLLQPGFVPPEHIRRLQDYLRLRTDHITMAASHEQHMQKALERMNLKIHDVISDLTGVSGLKMIEAILAGQRNPVALLALCDAQIQKNKANRLRQALEGTWKAEHLFALRQAHELWQCYQKKIAECDQAIEVVLKELAGPEDPSQPVPPPTAKRGGVNAPQIAGLHGLLWRLCGQKDPTQLPGVADYVLLQLLGEVGTDLGKHWKTEKHFTAWLGLAPGSRQSGKRRGSQKRSRNRAGRLFCVIARSVGRSVDKALGGFYRRLKGRRGGLLANLALARKLAEMFWRLMVHGRAYVEAGLKKYEEKVAQTEQRLLQKLAQKYNLVLQPKAV

SEQ ID NO: 454199 - protein, 339 aa, unidentified
MQLYAGLDLHSRNTYIGIMDKEFKRVFNKRVANKLPLILATLKPFQNQLKGIVVESTFNWYWLIDGLMDAGYHCMHLANPAAMKQYEGIKHTDDQHDAFFLAQMLILGILPQGYIYPKEDRPVRDLARKRLFLVRHKTSHILSLQSLIARCSGQRVSANEIRKFTVEDLQQLLEQEYIVLSAQANLDTIVFLKQQILQLEKAIKNKVKLSKAFQQLLTVPGIGLILAMTIMLEVGDIGRFHQVGNFASYSRCVSSQRLSDGKSKGHGNRKNGNRYLSWAFTEAAHLSRRYNERFRSYYNRKVAQANTCLATKALSNKLARICYYIMRDQVPFRENLLSQ

SEQ ID NO: 454200 - protein, 518 aa, unidentified
MKQIRDKVGGLDVHRDTVVACTRVTMPDGDVEVAKRRFPTTQEGLAELTAFLMDAGVSTVAMEATGIYWRPVYYSLEGLFEELWLCNAQHVKNVPGRKTDLSDAEWLADVAAHGMVQPSFVPPPDIRELRELTRYRKTQVDARAKEIQRLEKTLQDAGVKLTSVASTVWSASSRAMIEAMIAGERDSVVLAGMAKGVMRNKIDRLEVALEGNFGAHHAILCRQVIDHLDFLDASIAALSAEICARLVPFEPQVALLTSITGISATTAQVIVAETGADMSRFPTAGHLCAWAGVAPASYESAGKKRPAGTRKGAPWLRRTLLEAARSAARTKGSYYSALYARIARRRGPNKAAVAVAHSMLETAWHLLSSGALYQDPGADYFERRHDPAIEASGSNAGSRPSDSPSPSPRRPRKHTRRQQLHLVPHRPVPRDTRPRSATASHFTGGHVRSRPARLKGRERTSERDRSLASTQVRCAPDDSRDALSRAFGSDHTEQTSRGRVHCRPARVRRDFASRSGWM

SEQ ID NO: 454201 - protein, 482 aa, unidentified
MKPKQQEKTKEATCGPTQGHWQQMNRKQRREMTRKIQSEDISLEVIHPNAAGIDIGNESHYVAVPPTRDSHPVRRFGCTTAELKEMAVWLKQCGIRTVAMQSTGVYWIAVYDILEQAGLEVYLVNARDTKNLPGRKSDVQESQWLMKLHTYGLLRNSFRPSQEIRTMRTYWRQRNDLVQSAGRHIQRIQKALTQMNIQLANVLSDVSGMTGQAIIKAILAGERDPHKLAAFRDHRVKASEEKIARSLEGNWEEDHLFVLQQEQDGYEFCQKQMAECDQRLEQYLKQREDRSAGANLPEERRKERLKKKKGNKPQFDLRTGLFRMSGTDLTRIDGIDVMTAMTILSEAGSDMSKWETEDHFVSWLRLCPDNRISGDKIIGKGRLSTNNRVSIALKMAANTLRTSKTYLGAQFRRLRSRLDTPVAIKAMAAKLARLVYRILRYGMKYVDQGAAFYEAQHRQLQIKHLKSKAAKLGFHLIQVPAA

SEQ ID NO: 454202 - protein, 390 aa, unidentified
MNDTGEKLAAKRFPEGLEGIAGLHALIAEHTTDPGEVIVGIETERGMWVQALIAGGYRVYAINPLSVSRYRDRHNVAGAKSDPGDAKLLADLVRTDRHNHRPVAGDSDEAAGLKVLARSHQNLIWDRTRHTNRLRNDLREFFPAALVAFESLADRDAVAVLGKAPHPELARRLSVAQIRSALRTGGRQRNLDERATQIQAALRTPQLTAPPDVAAAFAATTKALVEVIAGLNDAIGELETELATHFDEHPDADIYLSLPGLGVVLGARVLAEFGDDPDRYDNAKSRRNYAGTSPLTIASGKKHAVLARYVRNRRLYDAIDQWAFCAITTSPGCRQFYDHRRTTGDLHHQALRALGNRLVGYLHGCLRTRSTYNEHTAWAHRQPAPTQTAA

SEQ ID NO: 454203 - protein, 300 aa, unidentified
MALTIVEDTRAVTGGVDTHADMHVAAALDPVGGLLGVGEFPATAAGYARLLGWLGGFGTVCLVGIEGTGSYGAGLARHVTAAGIRVVEVDRSDRQDRRRQGKSDPLDAVSAARAAQSGRARGEPKGRDGAVEAIRALMVAKRSARSERTQTINQARALIVTGPDNLRARFARHTAAGLVSELAALRPRPGATVGYATRIALRELGRRAEFLDGQLGRLDELIVPLVTARAPALLALHGVGPDTAALLLIAAGDHPHRLRSEAAWAHLCAVAPIPASSGKRTATASTPAATARPATPCGGS

SEQ ID NO: 454204 - protein, 345 aa, unidentified
MSIVGGLDIHRKQLTFDYLDTVSGEVRRGQVAPADRVHLRAWLARFAGRGEVAFAMEGCTGWRYVAEELAAAGVVTHLAEPADTALARGRKRHAKTDKTDSRHLRTLLAEGRLPECWIPPAQILEYRALLETYHDLRREHTAWVQRIHAVFFHQGAPPLSEGALRTEQGLAALQAAAAAHLSPAGQLQVATALEMIAALEARLHTLRRQLREAAAHLTGAKVLAARLYGVGPVTALAMTCWLAGAGRFSSSRKAVRFTGLDITVWSSDRKGPPGRLSRQGPPVLRWAVYEAGKTHARAAAPDHAYYAAVKDRKNSKRAALSEARKIVRQACHILTELGDDALTAA

SEQ ID NO: 454205 - protein, 359 aa, unidentified
MEHYVGLDVSLKLTAICIVDRTGKIAREGMVASDPETIAAFIKSHAPHVVRVGLETGATSTWLWTELNKMGLPVICIDARHAKAALKLQINKSDRNDAVGIARIMQCGWYKEVRVKDLDSHAIKALLVSRALLVKIKRDIENQIRGLLKNLGLIIGQAKMNVFSVRAAELAEARPELAAAVEPLLKAREAVGQQIADLDRKAMRLARNDAQVRRFMTTPGVGSITALCFLATIDDPTRFSRSRSVGAYVGLTTRRFASGEIDWTGRISKCGDKMLRSYLYEAANVLLTRVAKWSALKVLGSQGCEAQRATQSQGCRGSKACRHSAPDVDRWQRIQLVIKGGCQSNLHSRTTRIPPISGN

SEQ ID NO: 454206 - protein, 350 aa, unidentified
MMIIGCDFHTRYQQIAMMDTETGELVERRLEHEDGEAREFYASLPKPSRVGMEATGYAQWFERMLAELGHELWIGHASEIRAGVVRKQKTDARDAAHLLRLLVENRFPRIWIPSPAERDTRQLLRHRYKLVCFRVSVKNQLHGLAMSQGVCRKKRLFTAQGREELEKLSLGPWASRRRQELLAMLDHLNPAIEELDRAVQQAANSQPDAVRLMTHPGVGPVTALAFVLTLGPVARFQRSKQVASYLGLNPKERSSGGKQHTYSISKQGNTMMRWLLVEAAQTAVRFDPELQRLYQRLKFRRGGSVAKVAVARKLAVKLYWMLRVPAGDAQMAPMQGSPTATLVPHVGSTF

SEQ ID NO: 454207 - protein, 431 aa, unidentified
MDIGATEIWVDVGVGNDPEPVRRFETFTADLNRMTEWLMQCGIKTVVMESTSVYWIPACQILEDKGIEVLLANPRYAKNVSGRKTDALDCQWLRTLHCYGLLPASFRPAREIASLRSYLRHRQMLIEYAAAHIQHMQKAMTQMNLQLHHVISDITGLTGMRIIRAIVAGERNREKLAAMRHERTHADQATIEKALEGDYRTEHLFALKQSLDAFDHYQKQIAECDQQIAQHVRSLETKSEPSLGLKAARQSKRKQRNQMEFGVREEAFRISGVDLTQINGISESAALSLISEIGINMSSWPTEKHFASWLSLCPNNKISGGRVLTSRTRKTANRARDILCLCAQSLLRSQSALGAFCRRICSRIGKPKGLVATAHKLALLIYRMLKCGRDYADIGQEKYENQFKERALRSLARRAKDFGLQLVPCSENEVP

SEQ ID NO: 454208 - protein, 360 aa, unidentified
MTIVAHAHPFVIGVDTHARNHTLAVLVAATGELVATEQFPATDAGMDRAVAWAARRTDGEMATLWVIEGVATYGAHLASAAKRAGFEVVEVAAMNARARRGTGKSDPFDARRIAASVLSLEPEQLRRPRSDDGIRPALRVLVTARAHMTTERTATINALTALLRTAALGIDARKPLTASQIGEVARWRTRAEDLATSTARAEAVRMAKRVVDLNEQLTANQAQMINLIHASKAAALLDKTGIGPVTAAVVYTAWSHAGRVRSEAAFAALAGVNPIPASSGNTIRHRLNRGGDRRLNRALHMAVITRMTHDPETRAYVERRRAEGRTSKEIRRCLKRYLARQLYRTLESLHTEPNANRQTA

SEQ ID NO: 454209 - protein, 385 aa, unidentified
MIDASFPYFINEEALMTFLGIDLHTNCFTCCYINSKSGDKQLKTFKLDDCGLSNFYKTLNRRTHVLVEATINTFAFVELFQHLVAEVVIANTYKLKLISVTNKKTDKVDAEKLARILKMQVLSGEQQISPVLIPPKVVQDLRALFSTYTLIRKQITATKNRIHSLLKQNLFPFTKEYIFGKKTRPSIRAISEDPVLTFQLGLFFDLLESLEKKADEFADQILLTAAPFSKEIDILTSMKGVSVFTAAAIMADIVSVDRFPNAKHFTSYLRSAPRVESSNEKTIIKSTNKAGRKTSIVLLSQSLNHFRDSNPKLCAWHDRLATYKKKGLVRMGLCRRVFAEMYQMLKKQEYHYYCDAKNHQKKMEEYYLFLNRHGIEIDQELKIAS

SEQ ID NO: 454210 - protein, 360 aa, unidentified
MGMRRIIALDLGKFKTVACVMDALDRSHVFETIEMSPASVHDLLARHATTPDPADTLVVCETCDCCGWVYDACVALGLPAKVVAANTEAWHWRRVKRKTDRDDALKLAKLALLEQLTVVHMPSPAQRQRRRLVLHRRSVVSRRTMSRNAIRSIFSQQGIPLARGGKQWTRAGVAQLKAYARPLADCDDDLDLWRGRLHAELQLMADVDAQLKVFDAKLDALSAGDARVALLQTVKGVGPRTAEAVVMHLDDPHRFKRADDVAGFAGLVPKQLESGETSRFGHITRRGPGLLRSMLVESAWSVYRHNDWARTLVQKVSRGSKARRKIAIVALARRLLTILWAMLRDNQPFRAPRPASLTSG

SEQ ID NO: 454211 - protein, 350 aa, unidentified
MSECTTAVIGCDLGDKQSTLCILRADGRVERPKPIKTVREAFRTFFFARPPAHVVIEVGAHSRWVSALLEELGHRVTVANARRVKLISQNDSKSDQVDAELLARLGKADVELLAPIHHRGMEAQADLAVPKARDALVGCRTKLINTCRGLVKSFGERLPQCSGESFHRQAREYVPAALKPALEPVFQALERIDEAIRKEDKLVARLAKKYPDVEVIAQPNGVGILTALVFLLTLEDKNRFKSSRQVGGFVGLRPRKNQSGEDDPQLRITKAGDPFLRRLLVQCANYMLGPFGRDSDLRRWGLELARRGGKNARKRACVAVARKTGVLMHRLWVTGEVYEPLGYSAKRLAA

SEQ ID NO: 454212 - protein, 343 aa, unidentified
MTKLYGGIDLHANNSVIVLVDDQEQVVYEKRTPNDLSTILSQLSPFQPRIHGLVVESTYNWYWLVDGLMDAGYAVHLANTAAIHQYDGLKHTNDHSDARWLAQLLRLGILPTGYIYPKEDRAIRDLLRKRSQLVRQKTSNLLSIQNLVTRNTGTSLSGNRIKTLSAEAIRDVLPTPDLALAGTSTLAVMRCVADQIAAIEHTIKARVSLRPAFHQLLTVAGIGQTLALTIMLEAGDMHRFPTVGQWASYCRCVNSTKLSNGKRKGQGNTKNGNKYLAWAFIEAANFAVRYYPDIQRFYQRKKAKTQGVVAIKAVAHKLARACYYVLRDQVPFDIEKAFTTQPA

SEQ ID NO: 454213 - protein, 339 aa, unidentified
MMTSFVGVDLHRNNFTYCIRENGEEKKIGKCEISELKGFASLLGKDTAMAVEATGNTFMFCRFLKAHVGRLVVVNPSQFKVISTSTKKTDKHDAKILAEFLEKDMLPEVRMKDDLQAKISSLTQTREKLVQLRTVLKNKVNNLLAANFIVLKREELSTETGLRKALSFHFDPITDTELFVVVEQIRSLNQSIEKLDKTIEDHGSKMDGFKNLKSIKGIGSKGAATLLSTIGNIHDFRSSKQLAAYIGIVPRVSNSNDTVCHGRITKNGSKIARTTLVQCALIAKRYSPYLHAFHESVKSRRGGAKANIALARKFLDIVYRTLKNNWMFEDFTQFKLVKN

SEQ ID NO: 454214 - protein, 380 aa, unidentified
MTLDVYFRQCVGIDVSKDKFTACLYMYDRAGDVGCCTKSIDFANTKSGFNQMVRWSRREAVKERPLTYLMEPTGVYYEHLAYHLHKIGQTVYVVLPNKARKFCEAEGIKTKTDAMDARCLALMGCTSRKLKPWSPPAPIYRELRQMTRFHADLSQIMTSVMNRMESLNHMEEADKTVRKNCQRLLQEIDMLMEKNNKAIMEKVAEDRELQDKVRRIAKVKGLREPTIVCVIAETEGFHYIENRKQIVGYAGLDVKARQSGKEDPRHCISKKGNAHIRAALYMPALVAVRYNRQIKAAYGRICQRHPNGKMIGVTAAMRRLLLLIYTLWKNGEEYDETRDKTHTPGKKEQEHEYAPEDCIGRIDNEPADWDVVDENGEPPL

SEQ ID NO: 454215 - protein, 338 aa, unidentified
MRSYAAIDLHSNNGVLTVIDESDKVLRQRKLPNRLEAFLGELEPFRKSLQGVAVESTFNWYWLVDGLMAHGYHAMLVNTSAIQQYEGLKHSDDQYDAWWLAHMMRLGILPTGYIHPRGERAVRDLLRKRSRLVQQRTANILSVQNLEQRNRGTRISSNEVKRLTAADVHELYENDDLALAMTSTLHVIGALTEQIKTLEKAVLRKARLRPEFELIGTVWGIGEILSLVIMYEAGEMSRFASVGDFASYARCVDARRLSNGKKKADNNSKNGNRYLAWAFIEAAHFAIRYYPEAKRYYDRKASRTNAIVAIKAVAHKLARASYHVLRGRVAFEPNKVFV

SEQ ID NO: 454216 - protein, 341 aa, unidentified
MNPSVIGMDISKKVFQLHTVDRDSGTIERIKLRRDEVLAFFARRQPCLVAIEACGSAHWWARQLRQQGHEVRLLAPRSVRPFVLRNKTDAADAQAIWTAVQQPGACLVAIKQADQQAILSLHRIRAQLLKFRIMQSNALRGLLYEFGIVLPEGHAQLAKAMPQAFAEAENQVPPVLLESLHEQWARVLRLEDELRVIELRLKRYLHENPDCRKIAEIPGIGLLTATAAVASLGDATTFRSGRQFAAWLGLVPRQTGTGGRVRQLGLSKRGDSYLRMLLMHGARSIIGRGERSEWVEHLLARRPYNVAVAAVANKLARTLWAVLAKGSPYQAERFSACPSGH

SEQ ID NO: 454217 - protein, 360 aa, unidentified
MSLSPELVAPPAIVIVGVDTHKYIHVAVAIDALGVRLATLSASSDRTGYTTLVTWARSLGTVAAFGIEGTGSYGVGLASHVRRHAIRVVEVSHCDRRKRRNNGKSDTLDAETAARSVLAGIATAVPKTADGSAEMVRQIKVARDTAVKAKSAAIITLKTLIVNAPEDLREALEPLTDRKLIDRCARLLPGAIINTVASTKHALRAIAGRWLTLSSEIDTHDEALDLITQAAAPTLREAFGIGPDSAAEMMIVAGDNPTRVRSEAAFAKLCGACPIPASSGVTNRHRLFRGGHRQANAALYRIVTVRMRWHQPTMDYVTKRTAQGLSKKDIIRCLKRFVAREIFRALLDDHRSRQTANAAA

SEQ ID NO: 454218 - protein, 363 aa, unidentified
MVSPILAQWTTLSEDFVLLGAIMDTVSLIGIDLGKHCFHLHAQDGSGRMVLRKKLTRNQMFTLLSNFPSCTVVMEACAGAHWIARRLQTLGHEAKLISPHFVKPFRQGNKNDFADAQAICEAASRPSMRFVSPRNEAQQVVSALHRVREALVRNRTGTINQIHAFLLEFGISLPRGMAVMRRLPAVLEAQALPPRLVAVLERLQAHFKYLDEQIGQLEHELLTQLHEDERSERLLEIPGIGPITASVLMSELGDARQYGSARQFAASIGLVPRQYSTGGKPTLLGISKRGDKGLRRLLVQCARVIMLRIERRTDSLGVWVRSLLARRHSNVVACALANKLARIAWAILAKGTHYRSAPTALPA

SEQ ID NO: 454219 - protein, 473 aa, unidentified
MNRSITYQSVPVKNVSLRFLKNIARRSTIHVGIDIGKYKLYVSVRWTPSRSKSVVHEHPWFVENTREIPALVAKLRKIASQNKLIVGIESTGSYGDPLRQALADVGIVVHQVRTKVTHDYAEIFDGVPSQHDGKDAAIIAELVSQGKSTPWPYESQSETENEMRYQVKKMINVHEEIERHQGKLEGLLARYWPEITSILALTSMTLLKLLRYYGGPGPLHVDKESSQKIRQFSRGRINEEKSNEIRNAAKQTCGVRQGTWDLQICKDVAIRMLELYKQSRECKKRLKALIEQSCTQLQRLSKTLGVGTASVVWCHIGDPRQYHCSDAWIKAMGLNLVERSSGEYQSEYRISKRGDSETRRWLYMAALRWVQQSPVKQWYQRKKLQTGKKIPGEENKLTGGKAVVAVMRKLMKGLWYALVRDTPFDPEKLFFKEGSRRKDVTPNRRPRQKKTKKAQRLGNAKVGFLRNGQKSTK

SEQ ID NO: 454220 - protein, 388 aa, unidentified
MLPVINALEVQKGKPAMKQNTTELENPRRRVVRKNKQRELTIGVDLGDKTSRYCVLDREGNVLFERSTATTKKGLAQAFASMGASRIAMEVGTHSPWVKRLLESWNHEVIVANAHRVRLITESTRKDDRLDARKLARLARVDPELLSPIRHRSEGAQADLVMIRARAALVEARTKLVNSARGVTKSFGERLASCDPDQMRVKCLVGLPSSLQSALQPLVTAVESLTRQIHEYDNKVAQIARSEYPETARLRQVTGVGELIALTYVLTLEDPQRFRRSRDVGGYLGLRPKRRDSGASRPQLRITKEGDVYLRTLLVQGAHYILGWHGVDTDLRRWGLKLAARGGKNAKKRAVIAVARKLAVLLHRLWITGERYEPLRQSQATSGLQGAV

SEQ ID NO: 454221 - protein, 341 aa, unidentified
MSIVGAFDVHRRQLTFEYLDTVSGELKRGRVVPADREHLRAWLARFAGLEDVHFALEGCTGWRYVAGELAAAGITPHLAEPADTAALRGRKRHAKTDKTDARHLRVHLLAGDLPECWIPPEHVLEARALARLYKDLLDERGAWHQRIAATLFHQGVPVTPSMSTAGGRAAVPAMDLSPAGRQAVDTGLRQIDRLTGELDPLRGQLGMLSRRQPGCAAPRAAHFGIGAVTAVAIWAELGDVRRFTSSDDVVRHTGLDITVHSSDIKRPPGKLSRQGPQLLRWALYEAAKRAARPASPDHGYYTMARDRRTAGLATLSVARKLARRCYHTLRELGEDALAPAA

SEQ ID NO: 454222 - protein, 345 aa, unidentified
MEIHTIGIDLGKTVFHLVGLNQRGEVVVRKKCSRNQVLRFTSNLHVSLIGMEACGGAHFLGRALRDQGHEVRLMPAQYVKPYVKTNKNDYIDAEAIAEAVGRSNMRFVPIKTDDQLDLQSLHRVRERWVVRRTAVINQIRGLLLERGVTIRKGRHHIEVSLPGILEDSENKLSGALRVLLAQLQLEMQYLQRQIEESDKLIGRIAGDLEACRRLVAIPGIGPLTATATIAAIGNGAAFKKGRGFAAWLGVVPGEHSTGGKQKLTRTSRRGNRYLRKLFVQGAHSVLLQKTKQATGLGTWLSNLTSRKRAQVATVALANKMARMAWAILTKGEAYRPPLLPQAVEL

SEQ ID NO: 454223 - protein, 312 aa, unidentified
MANLICGVDVSAATLDACVGRDGAYQRFDSDDGGIAALIAFCQAQRAELVVMEATGGYERRLFALLWAAGIPAAIVNPRAVRRFAEAMGRPEKTDRIDAGMIAWYAETKRISAQQPASQTQQKLAACVTRLRQLTELRTCQTNQRRLITDPDVLASFAALLAVTAEQIRQFEAKIITLIKADPLWQALDAEFRSIKGVADRTIARLCAELPEIGTIDSKAVAKLVGLAPIAHDSGASKGKRPVRGGRAGIRSTLFLVAEIVRRYDPDFAEFHRRLNAAGKPKKVTRVAVAHKLLTRLNAKARDVRQKLTQTA

SEQ ID NO: 454224 - protein, 460 aa, unidentified
MNPKRSKSRNGGKMPMVHPNAAAIDVGATMHMAAVRADRAPEPVRSFGTFTTDLHRLVDWFTECGVETVVMESTSVYWIPIFELLDARGFTVFLVNARDAKHVPGRKTDVSDAQWLQRLHSFGLLRASFRPKGQIAELRAYVRQRERLLEYAASHIQHMQKALTEMNLQLHHVVADITGATGLRIIRAILAGERDPEALACLRHYSCHSSAETIAKALTGSYRAEHLFALEQALALYDAYHEKASACDARIEAVLKDLIGHRGHGHGSAPRASRRRNRTNQANALAFDVREALFALLGKDITTIGGLGPYLSLKLIAECGDDLSSWPSAKHFTSWLGLAPSNKVSGGKMLSSRTRRSGGRAAALLRLAAVTVGRTDTALGAFYRRLSARIGKAKAVTATARKIAVLFYNAVRYGMDYVDPGASSYETRYRTRVINNLHRRAKAFGFVLQPLEPKVGAAVS

SEQ ID NO: 454225 - protein, 392 aa, unidentified
MVVSVGIDVSKDKHDCFILSSEGEVLADAFTIPNTMDGFNCLLERIQDCTTPQDKMKVGIEATGHYSYNLLGFLLDNSLTTYVLNPLRTNLYRKSLSLRKTKTDQVDARTIASMLLSDVGLKPYTDAAYHNEELKSLTRYRFDKVKERAKLKSSIARLVCILFPELEKLVPSLHIASVYALLEEFPGAKQIAAAHLTRLKALLETASKGRYKRDMALEIRDAARNSIGSWMPAKSLELQHTIRLIRELDNEIAEIEAQIQFIMDEIHSPITTIPGIGFRMAAMIFAEVGDFTRFDSPDKLLAYAGMSPSTYQSGQLKNCYPHMEKRGSRYLRYALYNATKYVCHWNPTFSDYLAKKRTEGKHYNVALSHAAKKLVRLIFAMEKSRQPYCSAA

SEQ ID NO: 454226 - protein, 345 aa, unidentified
MMVTLGTDAHKKSHTIVAIDDVGAEIASVTVAATREGHLRLVKWAARWPQRRWAIEDCRQLSRRLEADLLRIGDQVVRVPPKLMAGVRRSARTRGKSDPIDALAVARAALREPDLPVAQLDGPSREVRLLVDYRESLVKDRTAAQNRLRWRLHELEPGYDPPPGSLNRYKTLDHIDQLLAAHSSMVAVLAHREVTRIRELTREANQLERDITQRVTDLVPSLLKIPGCGALSAGKLLGEAADIARFKSRDAYAMWAGVAPIPVWSANKQRFRLNRGGNRQTNAALHRIAITQLRIHPDAQAFIKRRLETGSTKREALRLLKRKLANVVYRTLLTDAQQPALSQAA

SEQ ID NO: 454227 - protein, 412 aa, unidentified
MKLFVGIDVSSKDLKVCMMNGEGDTLQSFTVDNNLEGASNLRDQIVAVADKLPSKEIHIGLEATSVYSWHPALFLHEDEALQKRKAKVFTINPKLISKFKEAYVDLDKNDHIDAWLIADRLRFGRLPMTMVMQEQYIALQRLTRMRFHLVHNLTREKQYFLTNLFYKCSAFTSEVDSSVFGHAITELLLEKYSLDEIVAMDVADLADYLKDHGKNRFPDPERVAKCIQKAARASYRLSKVVEDSIDLILGTSIQSIRSIQAQIKELDQAIERILSGIPNTLQTIPGIGPVYAAGILSEIGDITRFDDQAAVAKYAGLVWRKHQSGAFDAEDTKRIKSGNRFLRYYLVEAANSVKNRDPEFGDYYRKKYKEVPKHQHKRALVLTARKLVRLVDVLLRNDQIYTPRRKVNAAKD

SEQ ID NO: 454228 - protein, 359 aa, unidentified
MTGHFIALDVHCQSTELVAMTSTGKIVKKHHCATTIPTLVEAIEQVRRPRQLTFEEGPLADWLARNLRDHVDELRVCDPRRNHLVAKDGDKDDPIDAEKLAHLFRGGYIREVHQAASLDRTLLKQHVGFYHDRVRERVRQGHQLVALLRRHGAFVSISGLLDVQERRRVWGQTPRDPVLRADLDRLWQVYELLSSQEQAIGNDLIRLARRHEPVRRFRQLPGFGWIRAVTFYVYVETPWRFASKSALWKYCGIGLERRGSGQGPTRVRLIRQAHRKLKNVLLGAAQSATARADNPFADKYHYWTQEEGMHRATARRNVARCQAAILWHLWKTGDTYDPAKVRGVGRPTTMQKRTTPARA

SEQ ID NO: 454229 - protein, 341 aa, unidentified
MQHLAIDLGGTKSQICVRSAEGQILHEQALETARLGRFLKRQPTSRVVLETCSEAFRVADLAVSFGHEIRVVPATLVRSLGVGARRIKTDRRDAQVLSEVSCRIDLPSVHVPSDLARQRRSMCTMREELVATHTSLINCVRGWTRTQLLKIRPGDTKTFAKRMRAVALATKDGLPEYVERLLQVIEALQQQIVAADDELRSLAEEDPICQRLMTVPGVGPVTSMRFVAALDDRNRFPTAHAVEGFLGLTPGENSSSERQQRTGITKAGPAPVRRALVQAAWNLRRIRPSDPISQWAAQLEQRRGKFIATVAVARKLAGILFALWRDGSTYEPNHQARRSAM

SEQ ID NO: 454230 - protein, 360 aa, unidentified
MKKDIKTESGLTVGVDLGDRWSKYCVLDQHGQIVEEDTVATTGRAFRKLFSDRTTARVVIEVGTHSPWVQRLLKELGHETITANPRYVRLIYSSRNKNDKLDAERLARLARVDTKLLHPIQHRGGTTQADRAVLRSRNVLVACRTKLINHARGIVKSIGGRLPSCSTTCFHKRVRQNLPDELKPALTPVLDTIGTLTLKIQRLEARVERLASKRYPETGLLRQVSGVGPLTSLSFVLTLEDPARFKSSRAVGPYLGLRPRQSQSGGHDPELRITKAGDTDLRRLLVGSAHYILGPFGPDTDLRRWGLTLAARGRKNAKKRAVVAVARKLAVLLHRLWVTAEVYEPLRSNRSVMVPEAVSA

SEQ ID NO: 454231 - protein, 426 aa, unidentified
MENRTNQRLEEIAPSTLIVGIDVAKMLQWARFVDYRGIEVAKTTSFRNDKTGFESIVAKIENLRKEKFGDVIIGMEPTGHYWKALANYLINKGYKVVGVNPYHTKKAKELDDNSPTKCDKKDAITIARLVKDGRFFIPYLPQDVYAELRSLANARASLMKRNSAIKNTIIAVLDEYFPEIYDVFKNPIKGKASRQILKECPFPREIMELGVDGVLSEIRKAAKKAVGIKKAKQLVETAQNSIGVEYGLIATKIKIQGMISELELLESNLVCIENAMEKMLMATGYDERILSIKGVGVVTGATFLGEVGDPMRFDNPRQIARLAGYSLVEDSSGKSKSGTKISKRGRKGLRSILYQIAFTMVGINAEMKALYKHLTTRSKNPLKKKQALVVISKKIITIIYSLIKKQENYQPERVFGTVRQEMLLAA

SEQ ID NO: 454232 - protein, 415 aa, unidentified
MFYRQEYKVKTVDLPSTKNISLGGVIVYLVGIDISKYKHDCFIATETGEVIKNSFSFDNNHQGFNTLLTVLKSLDQSQEIRIGLEATGHYGNNLKIFLYDNNFSFMEFNPVLSERFRQVTTLRKTKTDKLDSHLISKMLLTYDYQTYSLKSYHILSLKSLTRLRFSMIKERTKYKVRLKNIMDLIFPEFFSFFSDSYGPTPMYILSKYKSPNKLASVDIKDLYDEIHEVSKGRLSYIKLVKLHDCAKKSIGKSNDILEFQLQSILNMLMFYIDEIDKIESKITSIMKMHEFYTPTINGIGLISAASIISEYGDFSLFDSPDKMLSFAGLEPAVYQSGNSITFGKIVKRGSPYLRYTIMNCASRVLMDNPRLYDYYNKKRNEGKPHRVALTHVAKKLIRIIYKIEKDKIPYNQDLI

SEQ ID NO: 454233 - protein, 338 aa, unidentified
MNIVFPGIDLAKNVFQLCGLNQAGKPVYTKRTGRKELLQTLANIPACLIGIEASTGAFYWQREFEKLGHKVKVISPQYVKPFVRGQKNDGNDAQAIAVALMQPTMQFVPPKSPEQQDIQALHRARQRIVNHRTATVCQIRGLLLDRGIPIGSAVSRARRAIPLILEDAENGLSSRMRRTIAELYDLFNDLERRIHFFDKEIETVFRQSEACQRIAKVKGIGPKTATAVVAAIGKGTEFKNGRHFAAWLGLVPRQHSSGDRQVLMNMTKKGDKHLRTLFIHGARAVVRVATNNNDGHMNQWVNQLKERRGFNKTTVAVANKNARIIWSMLRNETEYQVV

SEQ ID NO: 454234 - protein, 347 aa, unidentified
MRFYNQQRPFYCGIDLHTRKMYCCIVDSVGEVLVHRNLQTRGDHFLNLIAPYGDGLVVGVECMFSWYWLADLCEKEEIEFVLGHALYMRAIHGAKAKNDKIDSRKIAMLLRGGNMPIAFAYPQALRATRDLLRRRMFLMWRRAELLGHVQSTNWQYNLPPLTKKLRSKSNRVGVAERFGEQSVRKMVELDLSLIGQLDTHLSDVELYLERTVKIDDPQNFSRLRTIPGVGRILALVLLYEIYDIKRFESVGRFISYCRLVKCAHESAGKKSGSGGSKIGNAHLKWAFSEAVCLLLRESSEAQRFVARKEKKHGKAKALSILAAKLGRAVYWMLRKQEAFDVKTFFQN

SEQ ID NO: 454235 - protein, 356 aa, unidentified
MEQLTTVGIDLAKDVIAACVLDVHGVVVERRVLRRGAFERWAAQLPPCNVAMEACGSAHHWGRWFAARGHTARLIAAEFVVPFRKGGKNDTADAEAVAVAARQPTMRFVPIKTVDQQTILAWHSVREGWKEERTALLNRVRGLLAEYGVVIGRSADRFLAALPELTEDSRLPDAVRALLLEAREQFAALHARLARCDAQIAAHARNSPAAQRASELLGVGPVTASALAATVPNAKAFRSGRQFGAWLGLTPRQHSSGGRTRLGRISLRGNVYLRTLLIQGARSTLQSALNAEPSRANRLQRWIIELYGRKGYHKTLIAIANKHARILWAMLAKDKPYDASAWQRHPMNQPPLAGNT

SEQ ID NO: 454236 - protein, 387 aa, unidentified
MKKDSIAKLQTKLSKGKKNQVQARRAAKQRLTVGLDLGDRSSRYCILDEAGENVSEDKVPTSKPGLNGVFGKMAASRIALEVGTHSPWVSRHLAALGHEVIVANPRKVKPIAQSVKKNDRMDAEQLARLARVDPKLLSPIQHRGPEAQADLAVIRARAALVDVRTELINTARGLAKPMGERLKKCDADYVSEALADGLSEATQNAVRPLLKSVEEIDKQIDAYDRKIQEIGKRYPETMLLKQVHGVGTLIALTYILTLEDAQRFTRSRDVGPYLGLTRKLRDSGDSEPELGISKAGDGLLRRLLVQGAHCILREGSPDSDLKAWGTAKLQQQGERKKGGKKRKKKAVVAVARKLAVLLHRLWVTGEVYDPHYQRKAVEAAQGKAKAA

SEQ ID NO: 454237 - protein, 419 aa, unidentified
MTQREDSKIIGIMHPICCGLDVHKETISACVIFPDKDGVDQYDIKEFGTFTDDLMHLRSWLLDHCCPVVAMESTGIYWRPVHNVLEDSVQVVLVNARDIKNVPGRKTDIGDSKWLAGLLRHGLLRGSFIPMKEVREWRDLTRLRKKYVHTVGDYRKRAHKLFESANIKIDSVVSDLFGVTGRNLMNLLVFDRKALTLEDIHQCVRGKLKGKEEELYRSIQGFFSDHHRFILKRLLHTIDLLEEEISMFDAQIRHLMKDQNALLDRMKKAAGIADVSSREILAEIGPDLTAFPTGEAMISWSGLCPGNNESAGKRKSGKSPVRKHHLKTIMIEVAWAAVKKKGSYFKDKYYRLKARRGAKKAIVAIAHRILLGLYYVIRDGVELRDLGEDYLAQRNKAQKMSHLRKQAQLLGFNLVPQTT

SEQ ID NO: 454238 - protein, 347 aa, unidentified
MQHIAIDLGGVKSQVCVRSQDGQILQERKVETLRLGAMLEREPASRVVLETCAEAFRIADLAMASGHEVRVVPATLVKTLGVGARRIKTDRRDAQVLSEVSCRIDLPSVHVPQEIARVRRNMCAAREVLVSCRTAMVNSVRGWARTQLLKIPCGDSETFPKRARKAALASPEGLPEYVERTLRALDSLTEQIAAADEELEQLAKEDPVCKRLMSVPGVGPITSLRFAAALDDRTRFPTAHAVQGYLRLTPGEHSSSERQQRTGITKAGPAPVRRALIQAAWNFRRLRPLDPIAVWATQIEQRRGKFIATVAVARKLAGVLFAIWRDGSTYQAHHRLPAPTSRAPTSP

SEQ ID NO: 454239 - protein, 350 aa, unidentified
MTNLPRCVTGGVDTHLDVHVAAALDERGTLLGVESFDTTTHGYKKLLGWLSDFGPVELVGVEGTGSYGAGLTRHLQAEGVRVVEVDRPNRQRRRRKGKSDPQDAITAAHAAQSGDALSEAKTRDGNVESMRVLRVARSSARSGRTRALNQMRSLISTAPEPIRAELRGLNVFRLLERTSTYRPGAKRDIISLTKFSLRMLARRAIELEGEVTEIDAILKPLVKETAPELVATLGVGTDAASALLVAAGDNPERLRSEAAFAHLCGTSPLEASSGKTTRHRLNRSGDRQANSALWHIVITRMVYDPRTTEYINRRLSEGKTKKEAVRCLKRYVAREVYALLPQDKLGVDSP

SEQ ID NO: 454240 - protein, 387 aa, unidentified
MVQVNDLSRSLAAFDPASTLVVVVEMSKASWLVSGVVPGVERQPLKKLEPGATALLRLIERWRKEAVRAGRPISRIALAYEAGRDGFWLARWLIARVIEAHVIHSASVAVSRERKRAKTDRLDAAMLIRVFLGWLRGERGHCGMVAIPTIEEEDARRPNRERESLVNERSRIINRMKSALARLGIRGFKAHLRKAPERLAGLRTPEGTGLPTNMIEEFRRDMARLALIREQISSIEKTRAQRLEQAPDTGPHAMVRLLARVIGIGIETADLLVREILSRNLRDRRALARYAGLTGSPDESGLKSREKGLAKAGNARVRRGLIQLAWRFLMFQKDSALARWYRTRTEGPSGARKTTMIVALARKLLIALWRLVTTGEVPDGVELRSAA

SEQ ID NO: 454241 - protein, 346 aa, unidentified
MKITTTGIDLAKEVFQIHGVDAHGKVGLRKQLRRSAMLEFFAKLPPCLIGMEACGSAHYWARKLGEFGHTVKLMPPQFVKPYVKTNKNDMADAEAICEAVSRPNMRFVPIKNVEQQAILSVHRARQGFVKARTAQANQIRGLLAEFGLIIPKGIGSIAERMPDILEDGENGLPGTMRKLLERLNDNLKEMDRQVTELESQIKQWHRDNELSRKLEAIPGIGPITASAIVASVGNATEFKSGRQLAAWLGLVPKQHSTGGKQVLLGISKHGDTYLRTLLIHGARAVIRFAENKAEPDQWLCKLIGRRNKNVAAVALANKNVRVIWALLSKGKEYERDYASSPRVAVA

SEQ ID NO: 454242 - protein, 349 aa, unidentified
MLADELDYVVGVDTHRDEHVLAVVVAPTGGVIAQRSVQASARGYAAAVRFADEHAPGARVWAVEGAGHYGAGLARHLSGRGETVIESGRGPRDERRLRGKDDPLDAVRAARAALASEKLVLPRTGQRREALRLLLVARRSAVEVRRRALVQLRSVIVTAPDRLRDQLQALPERRLLERCSHFRRSSSCPVDELAAKLVLRTLARRIEAATFEAEQLERELLAHVRALAPRLLDEPGVGPIVAADVIVAWSHPGRVRSEAAFARLAGVAPVPASSGQTIRHRLSRGGDRQLNRALHTIVLHRRQHDPTTQAYIDRRVAEGKSRREATRLLKRYLARHLYRLLQQTEPLMT

SEQ ID NO: 454243 - protein, 353 aa, unidentified
MTMFAGMDVGGKRTAVCILDDAGKVVWRGMADTHPEMIDAVLRRFKGELTKVGLESGPFTPHLFRSLAAMGYPMICMDARRAADAIKSRRIKSDKGDAWALAEMLRTGWFTSVHVKSADTHRLKALLGARDQLVKVKRSLGNQVRGLLRPFGIRLPSRAGMKKFMAAAYQSTRDDPVMSVSIEALLEALASIEAQLAKLDDGLKELSRRNEVAWRLMSVPGVGPITALAFIAAIENVERFRRTRDIGAYLGLTEKRYQSADTNVGMGISKQGDAMARHYLYEAANVLLTTVKRRFALRNWGLKLIKTVGPKRARVAVARKLAVLMGRMWKDGAHFEAAVAAEPRKGLAMKRRF

SEQ ID NO: 454244 - protein, 338 aa, unidentified
MVYGAIDLHMRYSQIRILDEAGVVQRDQRVPTTRERLIAAFAHPGPIRILLETGTESEWVAQALEAAGHQVIVADPNYAPMYGETRRRIKTDRRDVAALAEANRRGWYRVAHRTSAAQRDTKQILRARRLLVQQRSGAVSLVRSLLRQSGYRLGTGSCETVPARVARLAVTGELVETLAPLCRHIAALTREIHAVEGRVQTRTAGDAIVARLRSVPGIGVIVATTFRAFVDRHERFAHAGQVSAAIGLVPREDSSAERRHRGHITKAGPRELRSLLIQAAWVCWRHPGSATLKAWVEGLAARRGKRIAVVALARRLSRILFAIWRDDTTFDVRTLARA

SEQ ID NO: 454245 - protein, 375 aa, unidentified
MNNNNTLYVGLDVHKESITVAYAINSEPVELMGKIGTSPTDIQNLCKRLRSKSSQVSIVYEAGPCGYGLYRRLVKSGFDCMVCAPSLIPKKPGERVKTDRRDAIRLVRSLRAGDLSAVYVPSIEDEAFRDLARAWASARDDLRHARQRLKSFLLVHGVHYVGRADWGPAHRRWLSKYSFESPWRQLAFDEHRRTIEDRQAQCERLESALKEAVTEWRLYPVVEALQAMRGIQFITAVGLISELGDLTRFEHPRQLMSWFGITPSEYSSGGSRHQGSITKAGNSYARKLLVEAAWSYRHPARISPAIQKRQENLPRPVIDRAWDAQLRLCKRYRKLQAKGKNVNITIVAVARELAGFIWDMGRIAMSVAQQPQCHK

SEQ ID NO: 454246 - protein, 341 aa, unidentified
MGEASTIGLDIAKWVFQAHGADATGRVVFRKRLVRAKVLEFFAGQPPCLVALEACGGAHYWARELGKLGHTVRLMPPAYVKPFVKRQKNDVADAEAICEAAQRPGMRFVPVKDEAQQANTVVFRARDLLVRQRTQCINALRGHLAEYGHVVPQGPAHVDSLVALVEDPKSSVPESARGILQVLIRTLNALEEQLKELDGEIARRAKADPVARRLMTIPGIGPIAATAITALVPAPEGFRAGRDFAAWLGLTPLQRSTGGKHKLGAISKMGERTIRRLLILGASAVVRWASRRGAAAGSWLARMLARKPRMLVTTALANKMARIVWALLVKGGTYRAPAVAA

SEQ ID NO: 454247 - protein, 415 aa, unidentified
MKVVFPTCCGVDVHKTFVVATIITTPAGSLQPNYRKKRFSTFNSDLNRFANWLLEHDCLDVCMESTGKYWVPVFNILEKRGIRVVIANPKWVKAVKGNKDDTKDSKWIGDLFRIGLVKSSFIPDLDIRILREFTRYRYKLVSMKSSEKNRFQNAFTVCNVALDSVVSDMFGKSATAIADYLTSDESFDPDHCVSLLQRSLKKKAAQVLESIEGFSMADEQKARIKIIREHYDFAEKLIAKVDACVDEMVAKHEGAINLLCTIPGIDRSSAITIISEIGTDMSQFGSSKRLCCWAGLTPGNNQSAGKKKSVHISRAGVYLKSALVPVAHAAVKDKNSPYYALKYSRIAKRRGKKRAIIAIARMILTAIYSMLCTGEVWNPVDIFKVDMPEHLKEQQLAKAIKQASRFLEKQGLTVA

SEQ ID NO: 454248 - protein, 323 aa, unidentified
MSQPNLQCMGIDVAKLSLDIATTDTIEPFTVGNDEDGFAVITDKLKHTKINLILMEATGGLEAAIACKLQSEGYDVVVINPRQARDFARSMGYLAKTDKLDAAMLAQLALVIDRHPDRSRYIRHLPDEARAVLAAMVVRRRQLNHMLVAERNRLYPSHPQSRKSIDNIIDALQNELDRINEQMKQHMTAFIQEQARLIGSVKGVGDITVASLIAELPEQGKLNRREISALTGVAPLNRDSGKMRGKRTTFGDRAGVRATLNMAALVATQFNPAIKLFYQRLLAAGKPKKLALVACMRKLITILNTMLRKGEEWNASFQSQVIS

SEQ ID NO: 454249 - protein, 435 aa, unidentified
MEEVTDEPLYRDRVCGIDIGKAQMAATIRVPSDRDPARRASETREFATTRRGVLALADWLRCWQVPAVVMESTGDYWKPVLYRLEAEEFECVLADAKQVKNLPGRPKRDPSDSRWLAACFERGAVTPCFVATEEFRVIRLHTRYRRDLTEERGREKQRAEKLLESSAIKLSSVVTDLHGVTGRDIMDHLIAGQRDPKALAQLARARARRKIAELQEALEGAEFFTPAHAALLAAMLARIDRVNAEIDELTAVIEQLLAPYEEQLQQAESMPGWGRRSAQDAIAETGADMTRFRTGGHLSSWAGKTPLDNQSGKRTGRAKSKKGNRYLAAITGETAVAAGKTATREGARYRRLARRRGKAKAQVAVGNTQLKVYHKLLSNPGMRYQDLGADYYERQRDVRRQIAHHVGKLGTLGFEVTLCRIPQPQPDGTGQTQAA

SEQ ID NO: 454250 - protein, 342 aa, unidentified
MVDTCAVTGGVDTHAAAHVAAAVDGIGGLLGVREFPATPAGYGQLLGWLRGFGTVGLAGIEGTGSYGAGLARHIAAAGIRVVEVDRSDRQDRRRKGKSDPLDAVSAARAAQSGRASGAPRGRDGQVEAIRALMVAKRTARAQRTQTINQARALIITGPDDIRTRFTGQTPAELVAELAALRPRPGSMVRYHTLLSLRELGRRAQYPGDQLARLDQLIVPLVTARAPGLLSLFGAGPDTAAMLLIAAGDHPGRLRSEAAWAHLCAAAPIPASSGKVARHRLNRGGDRQANHALWRIVITRMGSHPPTRAYVARRSKEGLSKPEIIRCLKRYAARETYRYLRPR

SEQ ID NO: 454251 - protein, 338 aa, unidentified
MTCYSGIDLHSNNSVVLVSDEADRVAYQRRLPNDLGMILAALEPYRGELAGVVVESTYNWYWLVDGLQAAGYRVHLANTTAMKRYDGLKHSGDETDAAHLAHLLRLGILPTGYICPPDERAVRDLARKRLQLVRTRNAQVLAVENIVARQTGAGISANAVKRLESETVGALGLPEDVSCAVAANVAVIGTLNAEIGKLEARLRQRVRLRPRFRVLISAPGIGEVLATLIMLETGPIERFAAVGNFASYARCVDSKRLSNGKKKGAGNVKNGNRYLAWAFIEAANFARRYCPEAKRFHDRKRAQTNAIVATKALAHKLSRACYHMLKDGQPFDVKRCFA

SEQ ID NO: 454252 - protein, 315 aa, unidentified
MSSRLAQCVGVDISKDTLDVHLHPDGASRRFANDLKGFKSLIGWLGGFQVVRIVFEPTGAYHHGFERRMGEAGFALAKVNPRQARRFAEAIGRHAKTDAVDAAMLARFGALIEPPARPIISQALDQMKELHVARRALVRDRVAATNRAHTRRSPLLKRQAAERLAQIERQIVAIDAALRQALAAEPDLKARFDILVSIPGLGETSALAILIEMPELGQIEHRCVASLAGLAPIARDSGKHTGKRFIRGGRAALRQALYMPALVAVRFNADLKAKYQALTAAGKPPKVALTAVMRKLLILANALLRDARTWTPKLA

SEQ ID NO: 454253 - protein, 371 aa, unidentified
MNSIVYVGMDVHKESYTLCCYCYDTDKVEYKQTIPSDYKLILKYIESMRKVYGEDSTFVCGYEAGCLGYSLYHQLKDHEVDCKILAPTTMAITNTNRIKTDKRDAANIARCLAFHTYSEVYVPDDEDNSVKEYIRMRDDQKLMLKKIKQQILAFVLRQGKKFEGGKTYWTIAHMKWLKNLDLTGLDKETLSEYLVTYEYLTEKIERLDNRIEELASGEKYKKKVQNMGCFLGIKTHTALSMIVEIGDFNRFEKAPKFAGFLGLVPSENSSGDDRNRYSITKAGNSHLRRLMVEAAQSYTRGNIGHKSIALKQRQQGCSADVIAYADRANERLRRKFYKMTLNKGVNRNVATTAIARELACFMWGMATGNIG

SEQ ID NO: 454254 - protein, 465 aa, unidentified
MATDNKPWRNRKERKEWARRLQSEDPGLEVVHPHAAGIDIGNGAHYVAVRPERDPKPVQRFECFTADLHRLADWLRSCGVKTVAMQSTGVYWIPVYEVLEERGFKVYLVNARHTKNLPGRKSDVQESQWLLKLHTYGLLNNSFQPSGEIRVLRTYWRQRADHVRGAATCVQRMQKVLTQMNIQLANVISDVSGLTGQTIVRAILAGERDPVKLAELSHSGIRASRDEVAKSLEGNWRPELLFVLQQEVEMYDIYQHRITECDQQLQEQLASFADATPLPSPEAEPKRKRIKPAKNAPRFELRSELQRITGVDLTRIDGIDVMVAQTLVSEVGLDMGRWKTEAHFASWLGLCPDNRTSGDKVLKRGTRRVVNRAATALRMAAVTLMRSRTYLGAQYRRLRTKLGAPKAITAMAHRLARLVYRMLKYGQRYVDKGAEYYEQRYRQQQIELLRKKAMKLGFQVTPVNS

SEQ ID NO: 454255 - protein, 433 aa, unidentified
MPDAPVIMGISKPAGLKSPCGEVKIVNPLFVGIDVSSKNNVAYLMKPDGSKHSSFSVQNNLGGAKLLSERIVSALGSMQLERVVIGLEATSIYGDSLVYALREDGRLGRFQRKIHVLNPKQVRKFKEAYSDLPKNDWVDAFVIADHLRFGRINREVYMDDYRYKALQTLTRARFDVIQNLTREKQRFANYLFLKCSGMAQDKDIQNTSATTIALMEHFETVDDLANADLEELTAFITETGRGKFADPDATAKAVRAAAKGSYRLPKTVNDTVNQAMAVSIASMRALKGQVKVLDKAIEQQFEIIPNTLTSIPGIGKVYSAGIIAEIGDIHRFDSQASVAKYAGLVWNRSQSGDFEAEHSRMIKSGNRYLRYYLLEAANSVRRCDSEFRRYYDLKFKEVNKYQHKRALALTARKLVRLVFRLLKDNRLYIPPEG

SEQ ID NO: 454256 - protein, 404 aa, unidentified
MKKNIKVEPKPAKAMKENKEPREATITESRKKVGVEIKPESETFWIGLDLGDVESTYCVLNQAAEIVSRGKVKTREADLKRVLGGYEGSQLAMEVGTHSGWVSRSLEGEGIEVVVANARKVRLITASQHKSDEKDAEDLARLLKADPKLLSPIVHRSEAAQKDLLRIRGRAGIVEARTKLINMARGLAKTMGKRLGACDADQMGTKQVEGWEAELAEILGPVLALIECCTLTMQTYDEKIKENSEEKYPETKRLTQVPGVGTLTATTFVLTLDDKNRIKQSRQVGPLLGMTPARRQSSESDPELRISKEGDRYLRTLLVQGAQWIMSGRGPDCELKRFGQKIAGIDPAQPGMKKDKQSRKRKKIAVVAVARKLGVLLHRLWVSGEKYDPFYATKRKGKTKTEAA

SEQ ID NO: 454257 - protein, 409 aa, unidentified
MDVVHEVCCGLDVHKKSVTACVLWASGRRRQTRAFGTFTRELLELGDWLRACGVTHVAMESTGVYWKPVWNLLEGQFEMLLVNAQYIKAVPGRKTDQKDSEWIADLLQHGLLRASFVPPTPIRELRDLTRYRASLAQEINRIANRIQKVLEDANIKLASVATDALGASGRAMLEAMIHGEQDSQRLAEMSRGLLRNKIPELQEALQGRVTAHHRFLLRELLDHLYFVQSKMQRIEQEVAERLGPFQSEVARLCTIPGVDRVTAWGLLAEIGLSMKQFPDAQHLASWAGLCPGSHESAGKRKSGKIRKGSLWLRRCLCQGAWAVSTKKNNYLSALYRRLAVRRGSKRATIAVAHKLLVIAYYILRDGTCYSDLGADYFDRLNPEGLRRRLTKRLEGLGFKVTLEPSAQVA

SEQ ID NO: 454258 - protein, 453 aa, unidentified
MRRSTLESVPAVPNAAEREFDWYVGIDGGGATHQVCVLDAAGRRAGERAVAHAGADLAALAAWLHEVAGPSLARVAVGLESRHAGPVALCLEHGAAVFAINPKQLERFRERASAAGAKDDRRDAYVAASALRTDRGTFHRVTPDDARVVALRELSRTADELREDARRLSNRLRAQLERYFPQMLTLVPAADEPWLWTLLERVPTPAAAARVREAAVARVLTAHRIRRVSAAEVLTALRAPALVVAPGTVEAVSAHVALLVPHLQLVSEHHRRCLAQLEAAVAALAGPGPGADPPSRPAPNAPPDAPPDAPPDAPPDALGTAVRLVRSLPGVGGVIAGALVAEAAGALLAGDYHALRTQGGTAPVTKQSGKQRLVAMRHACNQRLRTALYHWARVSTQHDAAARQYYATLRGRGHSHPRALRSVADRWLRILTAMLATGTPYDSTRFASGVATP

SEQ ID NO: 454259 - protein, 367 aa, unidentified
MKKNSTVKQSPKRAKVLASGRITIGLDLGDKTSRYCVLDENAGVQAEGSVATTKKAMTQKFAGMRRCRIALEVGTHSPWLSRMLHGFGHEVIVANARQLQLISASSRKDDRMDAQMLARLARVDPELLRPIHHRGEKAQQDLLAIRVRAALVEARTSLVNAARGLAKSMGERLPSCDTDSLNVERLESLPEKLGEQLTPLVKEVESLTEKIQQLDQKLEQIARTEYPETQLLRKVNGVGPLIALTFVLTLEDRGRFEKSRDVGCYVGLRPKRSQSGESQPQLRITKEGDIYLRKMLVQGAHCILSRRGPDTDLKRWGLRLAERGGKNAKKRAVVAVARKLAVLLHRLWVTGETYEPLRNSMAKQAAA

SEQ ID NO: 454260 - protein, 381 aa, unidentified
MQRIDPHQIRTAAEGYDTTIYVALELSKASWLVAINAPGGDKVSKYTVAAGATTALSAILTRARAQAERWCGESVRIVAIHEAGMDGFWVHRWLEAQGIESHVVDPASIAVDRRKRRVKTDRIDVEKLLRTLMGWARGERRICSMVRPPHPEQEDERRLTREREILVGERTRHVNRIKGLLMTQGISGFQPLRRDRRARFEALRLWNGTTLPSRLKAELLREFDRLELVMNQIQVIEAERDRALQIKSRDTIGALLVRLRGIGPEIASVLCGEMFHRDFVNRREVASYAGLAPSPWKSGTIDIDQGISKAGNPRLRKTTIQLAWLWLRHQPGSSLSRWFHARVGDRRGRIRRITIVAVARKLLIALWRYVTLGLVPEGALV

SEQ ID NO: 454261 - protein, 418 aa, unidentified
MNTFMSFEFTAVIGIDWSDTKHDICIQPAGAEEREFDRIAHQPQSIEQWAQNMYRRFGGPIAVVLELSKGPIVSALQKYDFFVLFPVNPSMLAKYRVAFKPSRAKDDPTDAELAIDLVLRHRDRFKPLRPQSVEMRTLVHLVEKRRRLVEDRKRFSNRLISTLKAYYPQAVEWFSHKETFVFCAFITRWPTLKQVKRARRSTLERFFREHHVRRPNLIEARIKAIQEARALTDDPAVINPCTLEALALTEQLRTTLVLIKRFDEAIAQLAPSMPDYPVFASLPSAGIVFTPRLLAAFGEDRDRFQNAADVQQYCGVAPVTERSGQKSWVHWRWQCPTFVRQTFIEWTAKTIYSSFWAGAYYHQQRQKGASHQMAVRALAFKWIRILYRCWQSRTPYNETVYLQALQRRGSNLIPQQIT

SEQ ID NO: 454262 - protein, 430 aa, unidentified
MGLIMPSAVHPQQDDQPMPYEWFVGIDWGSQQHQVCVLDRDRHQVGERVVDHDGASLARLAAWLWIVSAGQPQRVAVAIEVPRGAIVEGLLERGFHVFALNPKQLDRFRDRHSVAGAKDDRRDAFVLADSVRTDQPSFRRLHLEEPQLLVLRELSRAEETLLEEFRRNANRLRDQLYRFYPQMLQLCPAADEPWLWDLIDLAPSPAHAALLSEEQVQRVLKVHRIRRVKAHEVLTCLQTPALPVAPGAAEAAQAHCGFLSPCLRVLAEQRQACGQQVSALLHTLAEQPDDGEGPSDVAIVLSLPGVGRKITAWFFAEAAQPLAERDYQMLRTHGGVAPVTKQSGKRRLVVMRRGCNPRLRHALYHMARVAMQRDAHFSSVYAALRAKGQRHGQALRNIGDRLLRILMAMLRHRTCYDASRIRREPVVQRG

SEQ ID NO: 454263 - protein, 423 aa, unidentified
MVLGVGIDWAEAFHLVALGHPDQGVIQILRVEHTPAAVDQLIAQIAALEPEPAEVRVVIETRHGLLVERLLDAGYVVLPVNPDLVARRRGPARKKDDAEDARICCLLALDRHTALRPLIPHGEVAAELRAIARDDERAARDQRRLLNRLRHDLLSTYPAALAIAGDDLGAPTILKLLQRWPTRDQLATASRQELLSFASTARHGWPGRLADKVAASLATDQFTPRDYLVRAKADTIRLAATQLLTIHAQRRIWERRMGELLGGAPSHGRANTPREERPGQAVPGGKVYRSFPGLGDRLAARVAGEIGDHPQQFGSPNALACYAGKAPVTRRSGRSELVVATRLACNRYLADAVQQWAFCSLRCSGWAREFYDAQRARGKTHHAALRALGNRWLEILWHCLIRGQLYDEATHIANRNRALGKAA

SEQ ID NO: 454264 - protein, 345 aa, unidentified
MSMVRKIVGGVDTHADSHVAAVVDANGGMLGIESFPADESGFEALLGWLMSHGEIDRIGVEGTGSWGVGLSRFLHDHEITVVEVDRPNRQDRWKVGKSDPTDAVSAARAALSGSASVTPKTRNGPVEQIRILLVARRSARSQRIETLNQLRHLVYTGPETVRSRFKDRYKTGLITEVAKLRPRKASDPILYTTQVTMRGLARRIQMLNSEIKGLDSMLTELVANTAPSLVGLYGIGTDTAATLLVAAGDNPDRLHSERSWAHLCGVSPIPAGSGKTSGRHRLNRGGNRQANAALYRIVLTRMSSDERTRTYVARRRDDGKNTAEIMRCLKRYVARETFKHLPRTA

SEQ ID NO: 454265 - protein, 411 aa, unidentified
MRLFVGDDWAEDHHDIEVMDEAGKVLAKRRLPEGAAGMTQMHALIGRFVPEDADDAEVVIGIETDRGPWVAALVAAGYAVFPVNPLQASRYRQRHGVSGAKSDGGDAHMLADMVRTDSHQLRPAAGDSPEAEAIKVVARTHKTLVWERTRAVQRLRHQLREYFPAALEAFEDLDAPDVLELLGKAPDPARAAKLTRAQVAAALKRARRRDIAGKTGVILAALRGEHLRQPAALTAAYAVTARSLIALILTLNEQVKILEEQVREHFGRHPDAEIYQSQPGLAAILGARVLGEFGDDPHRYASAKSRKNYGATSPITRASGKKKVVAARFVHNDRLIDALMAWAFSSLSASPGARAFYDEQRAKGLEHNDALRRLANRLVGILHGCLKTRTLYDEATAWSHRENLPQSGFAA

SEQ ID NO: 454266 - protein, 354 aa, unidentified
MGISKQCIGIDISKGTFTACLCQRSDDGGLAFSKTIDFSNDSKGFNQFLRWTKGVIARDAALVFLMEATGVYYENLAHHLHKIKKMVHVVLPNMSKHYFSSLNIKTKTDAVDSRILSQFGVERIHKAWTPPPAILLQLRNLTRYYVQLQEQKTGLGNIKHSKDCSHDIQTFILKSNKKLITEIDKEIVRCLREINRLVKSDVGLHKKIEKLATIKGIGMITIVTILAETMGFEEFGSAKQLVSYAGYDVVQRESGTSVKGKTRISKKGNRYIRNALYFPAMVACRYNSVLKDAYTRIILKKPSKMVGQVAVQRKLLILMYTLWKNDTVFIENYKVSSPDPKTETTLDSSEPELL

SEQ ID NO: 454267 - protein, 351 aa, unidentified
MWIIGCDFHPRYQQVAAMNQETGEIVERRLSHETKEAEQFYESLPPGARIGMEASCPAQWFERLLDRCGHRLQVGDPATIRASVVRKQKTDARDARQLLELLLTDRFPSIWIPTPAERDSRQLLVHRHKLVGWRTQVRNQLSALARSQGVFPGTRFWTQAGRPKLESLSLDRWAAQRRQGLLRLLDDLDAQIADLTRQIEQQARARNDAVELMRQDGVGPIVSLAFVLTLGTAQRFPRGKQVASYLGLNPSEHSSGGTQRFGHISKQGNRMMRWLLVEAAWMAVRKDPELQRVYQRLAFRRGRKIAAVAVARKLAVKLYWRLREFEQNNAPQSPAPMQGSSGRGLMHSSTL

SEQ ID NO: 454268 - protein, 342 aa, unidentified
MMIIGCDFHPGFQQIAYVELETGEYGERRLNHPTEAEQFYRSLAGKQVRIGVEATGGLRWFRKLMHELGHELLLGDASEIRASSPRKQKTDMRDARHMLRLLEENRFPAIWQPPMENEDLRQLLLHRCRMVRMQTRIKNQLDMMAKNEGLVSSRSWSKKRRQQIEALPLSGWHVQRRKDLFELMEELDKRIEPLDKAVLEASKQSPEAVLLMTHPGVGPVVSLAYVLILGDWRRFPRGKQVGSYLGLIPAEASSGKRQQRLGHISKQGNTLLRWLLVQAATKAQRHDPSWHRQYLRLSIQKHHGVAKVAIAHKLAVRLYWMLRSGQDYKQVKERGSHAGQSV

SEQ ID NO: 454269 - protein, 388 aa, unidentified
MQKLNDLSRSLTTLEPDDTLIAVIEMSLSSWLVAGIVPGVERQPLKKLAVDESALLNLLNRWREEAEKAGHRIKRIAVAFEAGRDGFWLARWLRARGIEAHVIHSSSVAVSREHRRAKTDRLDTELLKRAFFGWLRGERDHCKMVAIPTIEDEDAKRPNRERESLVGEQTRIVNRMKAALTRLGIRGFNPKLKKAAGRLEGLRTPEDEAIPPNTLAELRRDMQRRRLVSDQIRQIEDARLDRLEHAPGDGPHAMMRLLARVMGVGIETADMLVHEVLSRNMRDRRAVARYAGLTGTPDESGRKRREKGLARSGNARVRRGMLQLAWRFLMFQKESALARWFRARTENARGTRKTMIVALARKLLIALWRLVREGVVPEGVVLRPAGKR

SEQ ID NO: 454270 - protein, 345 aa, unidentified
MSIVGGLDIHRRQLTFDYVDTASGELKRGQVVPADRRHLAVWLRRFDGVTDVAFAAEGCTGWRYVVEELQRAGVVAHLAEPADTAAARGRKKRAKTDRSDAKLLRELLEGDRVPECWIPPWQVLEYRALLELYHDLRREHTAWVQRIHAVCFHQGVEALGAGDINTEDGRARLSHLAAAGLSPAGQVQVATSLHMLETLETHLDDLRRRLVGVARHLRGAKALTDALYGVGPITALVLCCWLGGAQRFSSSRKAVRFAGLDITVYSSAGKRSPGHLSRQGPPVLRWCLYEAGKTHARTTAPGHRYYAQVKERLDGKRAALSQARRIVRQACHLLTALGDDAFTTV

SEQ ID NO: 454271 - protein, 317 aa, unidentified
MAQKSRLVGIDVAKGKIDAAIRAGAEAAFANSVEGHRELLAWLQEHGVGKAVMEASGGYERKWMGLLRQAGIEVVIVEPKRVRHFAKSAGRQAKNDAIDARMIAWFGEVFDDLESQAGDVEREELDHLVTTRLAVMQLRDQVDNWTEHERPKAVQKIHQALLKTIQAQLDTLQQLIAGRIARTERFARRAEIIRSMPGVGEASTAGVIAFLPELGRVDRQVAAALLGVAPFDDDSGTRRGERHIQGGRRKLRTLLFMPILAAATRHNPVLKAYYQRLIARGKKAKVALTACMRKMIGILNTMLARGEKWDPTKHAIA

SEQ ID NO: 454272 - protein, 399 aa, unidentified
MICVGIDVAKDKHDCFILSSDGEVLADVFTIQNNREGFDRLYQRILACSRDKEETRVGLEATGHYNYNILGFLLEKGLPVFVLNPLSTNLYRKSLSLRKTKTDRIDARTIAAMLMSDIDLKPYTDRALRSEELKSLTRYRYDKVRERARLKQSVARLVNILFPELEKLVPTLHIASVYALLYEYPGARRIAEAHLTRLKLLLTESSHGRYRRDKALDIRAAARTSIGSDLPAKSLELRQTIQLIRELNREIGEMEAAIDEIMKTICSPITTIPGIGANLGAMILAEIGDFSNFSSPDKILAYAGLSPSTYQSGQLSMAGAHSHMEKRGSRYLRYAIYNAAKFACQWDPTFASYFEKKRAEGKPYKVAVSHAAKKLVRVIYALERSGRPYTPPPLPYSPE

SEQ ID NO: 454273 - protein, 340 aa, unidentified
MTITTVGIDLAKNVFAVHCVDQHGKTVLVKPKVPRAALPELIASLPPCVIGMEACSGAHYWARLFRQYGHEPRLMAAKFVSPYCMAGKSGKNDAADAQAICESVRRPHMRFVPVKDESQQAMQCLHRTRQGFIEEKTATYNRLRGLISEFGVIAPQSTDALRHMVSEQKKFLPLQVQQCVDDLLEHIDRIENNVTEYDRILSRMAKADHRSQRLMELKGIGPTTACALVASIGNAHDSKNGRQLAAWLGLTPSQYSSGGKSKLGRITKAGDSYLRTLLVQGALSVLIGAEKKTDSFSRWVCSLVERRGYWRAVVAIAAKNARLCWASLHYGDDFRLYSVS

SEQ ID NO: 454274 - protein, 358 aa, unidentified
MGQITRIGMDTSKHIFQLHGVNAAEEPVLRKKLRRKEMVKFFEGLPPTEVAIEACGGSHHWARLLESLGHRTRLIPPQFVKPYVKRNKNDAADAEALCEAMSRPTMRFVPVKTAEQQAALMLVGVRERLVRNRTQLSNAIRGYAAEFGLTTSKGLNRIEPLLERIATDETLSALARELFALHGKEYAQLQGQLEEIEARLMAWHRADACSQRLAQIPGIGPIGASMLVMKTPAPETFRSSRHFAAWLGLTPKDHSTAGKSKLGGITRAGDEALRSVLVVGSTSLLYRVRQRGTGSPWLIDLLRRKPPKLAAVALANKNARIAWKLMVSGERYRTKPTPTANSNTGFNPPRASLQAQSC

SEQ ID NO: 454275 - protein, 309 aa, unidentified
MKQSVVYIGIDVAKGHLDVAWQEQSRRFANDQSGRAALVAWIKQSPTAVQLLCEASGGYEQALLESLEQSDLKVTLVQANRVRQYARAAGILAKTDKVDAHVLSAFGAAMRPKPTVPHSAEQKRLRQYEAQRRHLSGLLLAEQNRLAQLSCAELRSLSRSLISKVKKQIDAIDARIASLIAQDQELCLKAQKLTSITGVGTRTAALLLAQMPELGQLNRRQAAALGGLAPFNRDSGTLRGKRTIFGGRRALRSGLYMAALVAARHNPILSNFYQRLRAKGKPHKLALTAVMRKLLLALNHTLKPIASPA

SEQ ID NO: 454276 - protein, 352 aa, unidentified
MAMTIVENRTITVTGGIDTHLDFHVAAAVDSNGGVLGVETFDTTTGGYRSLVAWLAGFGTISLIGVEGTGSYGAGVTRHLTEKGIRVVEVDRPNRQARHRAGKTDAIDAIAAARAALTGTAAGTPKTRTGNIEAIRVLTVARRSAANEWIAVVSQIRHVVFTAPDEIRARFLGLSPITLVRTTAALKPRRTDPDVVRFTTLSTLRELGRRALFLREQKMRLNTEMRPLIREVAPSLLEIHGVGFDVAAKLLIAAGDNPHRIRSEAAWAHLCGVAPIPASSGKVQRHRLNRGGNRQANSALYRIMLTRMASDQRTKNYVAKRTADGKTMGEIGRILKRYIAREIYPHLLSTID

SEQ ID NO: 454277 - protein, 375 aa, unidentified
MERINYIGLDVHKKNIVMAESIEAGQAEVVGEYPNTDKGLKKMIKQLKQRESEYSEVKICYEAGPCGYAVKREIDKAGFNCEIVAPSLIPVQGGNRVKTDQRDAKKLARYYRAGELTMVYVPTEEQEGIRDLIRCRDDLVGDIKRYKQRINHFLIRQGLIYQGKSHWTGVHRQWIRGLILKHEQLNSILMNYLSSLELLELQLEGINQEIQSIAKKPEYIEKVNALCAYRGIGVLTAMIIISEIVDFRRFRNARELMSYLGLTPSEYSSGGTEKKGSITKCGNSRVRRALIESGWHYIKKPTVTMKMKQDLEKVPQDQRVNPVKSMKRLNQRFYYLMFKGKSRQKAVVAIARELSGFIWDTLINLENRAILKKAA

SEQ ID NO: 454278 - protein, 417 aa, unidentified
MKNWNEISHYAGFDWAKDHHQVVILDREAKIVTEFEFDHSVEGWAQWRESIRAYPALAVAIETNQGLAVEQLLQSELTVYPLNPRSAQAYRQRKVPTSNKTDRLDAWSFADALRVDGHGWRPLQPLDPLIQELRLLCRDELHLIEQRTGLVNQLQQALGEYYPAALKAFDDWTLPSSWKFLERFPTPEALDKAGPRKWENFLHCHKLYRPQTHARRMDCFREANQFAGSSAVTRAKSMLALSLIKVLTALEKQLQEYRKQIEQLFASHPDHHLFGSLPGAGPKLAPRLLSELGEDRSLFPDVQRLQCYAGTAPVSYQSGQVHKVYLRRQCNKHLRCAIHLWADLSRRWCQWAQVYYWQVRQRGKSHSQALRCLGQRWLKVIWKMWQSRTVYDPELHTRNQLEHGSWVLQLMKAKGCE

SEQ ID NO: 454279 - protein, 376 aa, unidentified
MQQMDDLILGVDTHGDAHVGVLIDALGRRLGALAFPTDAAGHEQVLAWCGTHGRLRVAGVEGTGSYGAPLVRFLAARGVRVVEVNRPNRQRRRRRGKSDPADAEAAARAVLAGEATAVPKARDGVVEAIRVLHLARASAVKARTRVANQLKHFILTAPDPLGATLRPLTTEARVVRCARLRPGVGAQPGEATKRALRHLARRWRALDREVRELDADLRGLPQQAAPRLLAEPGVGPGCAARLLVAAGDNPTRLRSDAALAALCGASPVEASSGTVLRHRLNRGGDRQANNALWTVAVNRLRHHPETRAYAARRTREGRSRKEIVRCLMRHLARRLYPLLLADLARDPGRAEPRPPPPSPGDGCPATIPPVPAGTAG

SEQ ID NO: 454280 - protein, 350 aa, unidentified
MEHHAGLDVSLKETSVCIVDGAGKIIRETKVASEPEALVSYFSSLEIKVVRIGLEAGPLSQWLHAALTQAGFEVVLLETRHVKAALSAMTVKTDRRDARGIAQLLRMGWYRPVHCKTLPSQEVRAIITARKTLLGKLIDIELSMRGILRGFGLKVGAVTRKSFELRVRELMAGQATLTTIMEGLLNARATLVAEVAKLHKRLLEIARADGVCRRLMTVPGVGALTALTFKTAIDDPTRIAKSSDVGPLFGLTPGRYQSGETDIIGKITKVGDVMVRTALFEAATVMLTRSTKSSRLKAWALDLVKRRGTKRAIVALARKLGVVLHRIWVDGSTFRCAKEGAAMPALITAK

SEQ ID NO: 454281 - protein, 464 aa, unidentified
MKTKLQNQKKKKTKINLDSLPLIEPNAAGIDIGHREHWCAVPSGRCEKPVRSFGTFTEDLEKMADWLHQCGIKTVAMESTGVYWIPAFQILERRGFAVCLVNARHVKNVSGRKSDVLDCQWLQRLHSFGLLNASFRPEDQMCVLRSFLRYRDELVGARSVQCQHLQKALQQMNVQLHQVLSDVTGVSGLRIIQAILAGERDAKVLARLADCRVRASQATIEKALRGDYRVEQLFLLQSAFDLYQTYEQKIHLCDEQIIAQLAKLPARVDLKVKPVPPRKPGRPKLMDMVAGTDLREELYRCAGVDLTAIEGIGVLTAQVLISEIGLDMTRWRSEKHFASWLGLCPDNRISGGKVLSSHTRHVLNPVADALRIAATTLQNSKTALGAFYRRMRARLGAASAITATAHKLARLVYRLLKHGEAYVQQGMESYEHKYRQRLLYNLKKTAASLGWELTQTQQLPDSVS

SEQ ID NO: 454282 - protein, 431 aa, unidentified
MRFTEWPEPKGASVSDRFEWLVGVDWGSAAHQVCVINAQGEVCGTRRVEHTAAAVHDALRWIGERTGVSPDAIAVAIETSRGVLVDTLIEHGFVVFALNPKQLDRFRDRFTAAGAKDDDRDAHVLADALRTDRRAFRRVRPDDPLTIQLREVCRLREELVEEERRLVNRLREQLYRIDAPWLTLSPAADEPWLWTVLATTPDPAMWGQLGRRHIRAALQAHRIRRIAVDDVIHALRQPRLPVAEGVTDAVGFRIQTLVRQLVLLRQERTHSEQQIDRLLERLATAPVAEGEAGKHRDVEIFQSLPGVGRIVTATMLTEATAPLADRDYHTLRAYGGAAPVTKRSGKRAFFVHMRYACKHRVRTALYHWSRVSLQHDAAARTYYDALRARGHSHARALRSVADRWLRILVAMLKAGQLYDPSRFTKAVVTPA

SEQ ID NO: 454283 - protein, 401 aa, unidentified
MKRLSGGIDVGSESHHITILDEEDNVLYNQKVVHKLNEFAESIKLFKQIERKEGGKISFALEGKNGYSAPFDRILLDKGFTLYNVDNLKLKRFREAFAGEWKDDKRDALMLSKMLKLKEHINSPREKVFIKIEKPSPVTESLKLLSRHQQTLIDEKVRLVNRLRKKLLEVCPEILKLAKLKDKKLITILAKYPDFSKYKRITLKSLLKIKGIGKRQAPFLLRRLNNIEYMPGLTDIYKTIILSYAKRISELQKEIKDIDRKLDEIGEKDKAVIHLKTLPGVATKLASRLIGEIGDINRFPSEKQLAIYSGIACVDNNSGKITKAKAVYKANKICKQALIAMAGGSIRLSLQCKAYYLKKRAEGKSHNHTLRCLARQMIKVIHKMLTEDRDYIIKRELKKVA

SEQ ID NO: 454284 - protein, 352 aa, unidentified
MYYLGIDFHKAYSVLHLTDSKGLLVKKQKLFNRKQLFQHFLKDIQPVCAVVEACRNWPVMVELLDGIVDHLKLAHPFKVKAIAEARIKNDTIDSETLCHLLRADLIPEAYLRPAVNRDDQKILRNRSYWIKVRTQTKNRIHTLIDQQSEEIRECSKPFSDLFGKRGILWLYSLKIKQPDQDILHDLLDLEENLKQKIQQSDRRIKEIYQSDEQCQLLKSIPGIGYFFSVLIKTEIGDISRFKTSDKLCSYAGLVPSSYGSGGHVYHGRITKNGNKWLRWAMVEAVRPAISTHTELRYYYEKIKQRKGSNTAKVATARRLLCIVHRVLKQKSEFYETRHLLKQTYSGVAIKTA

SEQ ID NO: 454285 - protein, 402 aa, unidentified
MNAVGIDVSKGKSMVAIMRPFGEIVSTPFEIKHTASGINSLVELINSVEGESRIVMEHTGRYYEVLAHQLSEANLFVSAINPKLIKDFDNDSLRKVKSDKADAVKIARYALDKWQNLKQYNVMDELRNQLKTMNRQFGFYIKHKTAMKNNLIGILDQTYPGVNTYFDSPARSDGSQKWVDFASTYWHVDCVRKMSLNAFIDHYQNWCKRKKYNFSQSKAEEIYGKAKELVPVLPKDAITKLIIKQAVDQLNSASTTVESLRTLMNETASKLPEYPVVMAMKGVGTSLGPQLIAEIGDVSRFTHKSAITAFAGVDPGVNESGSYEQKSVPTSKRGSSDLRKTLFQVMDVLIKTHPQDDPVYQFLDKKRAQGKPYYVYMTAGANKFLRIYYGRVKEYLSSLPES

SEQ ID NO: 454286 - protein, 312 aa, unidentified
MAVAESCLIGIDVSKAQLDVAVSPSGETTGFANTDGGIEELVAWAKGVQPHLIVLEATGGLEMLATGRLTAADFPVAVVNPRQVRDFAKATGRLAKTDRIDAQVIAQFGQAIKPVPRALKDEETQRLSAFLVRRRQLVDMLTAEKNRFSRAHLRIQKDVKQHIAWLEKRITKTEGELAAAIKASPIWRAKEKILTSAGGVGPVLATTLLCRLPELGDLNRRQISALVGVCPFNRDSGTMRGKRSIFGGRADVRAALYMSTLAATRFNPPIKAFYDRLIRAGKLPKVALTACMRKLLTILNAMVKNHQPWQPQ

SEQ ID NO: 454287 - protein, 384 aa, unidentified
MSQVNDLSRSLTAFDQSATLTVVVELSAASWLVAGLVPGVDRRPLKKQEPDPVALLQLLERWRAEAVKAGRTVERIALAFEAGRDGFWLARWLQARGIDAHVIHSTSVAVSREHRRAKTDRLDTTLLIRVFLGWLRGERGHCGMVAIPTLEEEDAKRPSRERENLVGERTRIINRIKAALSRLGIRGFKPELRQAARRLEALRTPEDGPIPPNMLDEIRRDMARLTLVRAQIDAIERARCVRLEQAPVSGPHAMVRLLARVIGVGVETADMLVHEVLSRKLRDRRAVARYVGLTGAPDESGSKRREKGLAKAGNARVRRGMVQLAWRFLRFQKDSALSQWYRARTAGATGARKTTMIVALARKLLIALWRMVTTGEIPAGVALR

SEQ ID NO: 454288 - protein, 430 aa, unidentified
MKSNTQNAKIEAITETTLVLGIDVGSETHYARAFDFRGMEYSKKPFKFSNNEAGFMTFKAWILNIKEKHGKDKVVPGMEPTGHYWFNLGKFLQDNEMKPVLVNPHHVKKSKELDDNNPTKNDRKDPKVIAGLVREGRYMIPYLPDGVYADLRTASNMRFQLQAELTRIQNRISRWFNIYFPEYKTVYGQPDAKSGMMILKIAPLPEDILTLGIDGVNQIWRNAKLRAVGKARAKPLIEAAEHSVGSKEGALSARMEIRMLLEDYESRNARLQEVMALIEELVKQIPMAEKLLEIKGVGIKTVSGFLAEVGDISRFDNPKELQKLAGLALVENSSGKHKGKTTISRRGRKRLRYLLFEVAMSLVAKNPEFRELHVYYTTRKRNPLKKMQSLMAVATKLIRVFYAMLTKGVDYDPKKMISDIKRPAVYLQAA

SEQ ID NO: 454289 - protein, 350 aa, unidentified
MMIIGCDLHTRYQQIAMLDLETGEIVERRLEHENGEARAFYSALQGPVRVGIEATGHTHWFEAMLAELGHELWMGDAAKIRALVIRKQKTDARDAEHLLNLLREDRFPQIWRPSPAERDLRQWVWHRQKLVWMRGAVKNQLHALAMGEGVCRKKKLFTAKGRKELEGLVLGSWASYRRQELLRMFDELAAATAQLDVAVEQAAKNQPLAVRLMTHPGVGPVTSLAFVLIIGPVERFQRSKQVVSYLGLNPQEHSSGGKQRLGAISKQGNPMMRSLLVEAGHTAARFDPALKRMYQRLKFRRGASVAKVAVARKLAVRMYWMLRSTADYAQLVRMQGSPWATLVENSPLLG

SEQ ID NO: 454290 - protein, 349 aa, unidentified
MRYFQPPADTRFYAGVDLHARSLFLVILDHTGQTRYARNLPANPQAFRKAIAPFRDGLVVGCECMHCWYWLADTCREDHIAFVLGHAWGMKAVHGSKTKCDRKDAEAIARLLKGGNFPLAYAYPKERRGLRDLLRARLRLVRQRAELYGHVHTARRQLNLPPISNDVKYKSKRAAITADIDDDCVRRRVEADLSLLEPLDTTIRRLEKDIELAARQHYATEMAALQSTPGVGIVIALTILLEIDTLERFDSRQQFCSYARLCGARQESAGKTVGQGNAKQGNAWLKWAFSEAAVLGAQKDERIGKYLDKLSSRLGKAKALSALAHKLGRAFYHMILKKEVFNIDQFLRH

SEQ ID NO: 454291 - protein, 349 aa, unidentified
MAVAIVDSARLIVGGVDTHRDVNVAAVVDMNGGLLGVESFPTTADGHRLLASWMGGFGTIERVGIEGTGAYGAGLARHFAKSAVTVIEVDRPNRQKRRRHGKSDRLDAIEAARGALSGRCEGIAKSGDGAAEALRALLVAKRSARSTRIRTIVQLRHLMFTAPEELRSKLGGLSAAQLVNEAARLRPRPGGDIVVQGVKTTAVILARRVQALDVELDTLDAQIEPLVKGAAPDLLNVFGVGVDTAAVLVVTAGDNPGRITSEAKWAMLCGIAPIPATSGLIDGRYRLNSGGDRHANNAIWRIVITRLGQHEPRTVAYMERRLAQGKSKRYIIRCLKRYVARETFQALPR

SEQ ID NO: 454292 - protein, 421 aa, unidentified
MTDDIEWYVGFDWASETHCACLMDRAGRVVGKREVAHAGADLAELCDWLIRKTGAEPGRIGVAIETPHGPVVETFLERGFAVFAINPKQLDRFRDRFTVAGAKDDSRDAQVLGDSLRTDSRAFRRLVIDDPVRIELREWSRIEDELKRERTRLANRVRDQLWRYYPQMLQLSNDLAEDWLLALWRRVPTPAKAAKASEATIQRILKAHRIRRIEAPEVVRILRQTPLKVAAGASEAASAHMRSLAERIGLINQQLKTAERKLEQLLTRLEQAAQDQAGQDQAGQMSEQRDVTILRSMPGIGRTNLATLLAEGSEPLGRRDYHVLRTLSGVAPVTRRSGKAWMVLRRLACNRRLRNALYHWARVATQHDPVSRQRYAALRGRGHSHGRALRSVGDRLLYVACTLLRRQVLFDPDHNSLEAAA

SEQ ID NO: 454293 - protein, 340 aa, unidentified
MKKFLFIGIDFSKSSFDVTLLENIGQKCFVHKEFENEPDGYKSFLKWLAKQSKIKRESWLFCGEHTGLYSRGLSEFLAKKNLFMWLENPLQIKCSWGIKRGKTDKIDSLEIARYAIRFQDKAIAYKPVDKETDSLKLLFSYRERLVKTKVAMEISAKEIRKVISRDETSRYIFEDSNREIERIKKKIENVESKMHKIIINSQARENYLLVTSVKGIGMITAISLIMRTNNFASFENARQLACYCGCAPFEKTSGTSINSGTHISRLANRELKVLLTQCARSAALYNKKMSAYYQRKKAEGKADKVLINNIRNKLIQIIFAVIKHKTPYRENYLNPWAECA

SEQ ID NO: 454294 - protein, 355 aa, unidentified
MLGTKYIGMDVHTATISVAVLDAAGKLIMDSVMETKARTILQFIHGLRGDLHLTLEEGTWAAWLYDLLKPHVTNIVVCDPRRNALLKEGSKSDRIDARKLAELLRANLLRPVYHGEKGLRTLKELARAYLTIGKDLTRVMNRVKAIYRSWGIPCAGRSVYNPRHREQWLRRITQASVRRRAELYFEQLDALVLLRKQARKELLAEGQKHQAWRLLRSIPALGPIRTAVLMAIIQTPHRFRTKRVLWKYSGFGVVTHTSADHRYVQGHLERSKKPALVRGLDPVHNHDLKDVFKGAASQASTGKGPFRDFYEALVAKGMRPEMARLTVARKIAVITLTVWKKGVAFDAQYLKPQTA

SEQ ID NO: 454295 - protein, 404 aa, unidentified
MPELWAGTDAGKAEHHCTVIDANGTTLLSRRVPNSEAELLELLGDVLGIADGGPVTWAVDLNAGGASLWIALLVNHGQKLLYIPGRTVHHASAAYRGSGKTDAKDAFIIADTARMRRDLQPLQELGEIAVDLRILTARRIDLAADRTRAINRLRAQLLEYFPALERAFDLSTSKSALILLAGYQTPAALRRIGRSRLTTWLKNHGVRTSTAAKSTAEAAVTAGEAQFTVVPGERTCARMVHTLAAAVTALDEEISELEAQIEARFREHPDAEVITSMPGIGMTLGAEFIAATGGDMSVFGSSDRLAGVAGLAPVPRDSGKVSGNLRRPRRYSRRLLRMFYLSAQVATVCCPESKRYYQRKRAEGKSHKQAVLALARRRLNVLWALLRDHKLFETAAARTGATAV

SEQ ID NO: 454296 - protein, 323 aa, unidentified
MAKETGYVGVDVAKGTLDVAVNDAREVRRFSNDHEGISQAVDYISGLKPEGIILEATGRLEMALAAALQAERLPVVIINPRQVRDFARAIGALAKTDAIDARILALFGARVTPQIRPLPSKKAREMGSLLTRRRQLIGILTAERNRLSLANENIRLSIQAHIHWLEEALSDINADLDRRIKSSPSWREKDELLKSVPGVGKVVSSTLLIELPELGRLNRRQIAGPGGCVAPLNRDSGTMRGKRTVWGGRAKLRATLYMAALVATKYNPIISAFYQRLLESGKAKKVALVACMRKLITILNAMVKSMTPWHPAPIPDNAVMEAQ

SEQ ID NO: 454297 - protein, 422 aa, unidentified
MLEETADREEIIQRVAALDIGKAEVVCCVRVPHEGRPGRRLQEVQTYSTMTRSLLGMADHLRSLGVTRVVMEATSDYWKPAFYVLEAAGFETWLVNAHDVKHLPGRPKTDKLDAVWLCKVAERQMIRPSFVPPPEIRRLRDVTRYRIDLVGARTAEKNRAEKLLEDAGIKLSVVASDIFGVSGRAMMAALIAGERSPVVLAQLARTRMRARIPALQEAFTGHFTSHHAFLLAKMLARVDGIDADIAELDARIEEMIVPFGQAAERLDEIPGIGRIAAAIIIAEIGTDMTRFPTAGHLASWAKLAPGVKESAGKKKGSGSTGHGNPYLARVLGEAVTGAARTDTFLGERYRRIARRRGAKKAIVAVGRSILVIVWHLLSDPDARYTDLGSDFYATRINPERRKRTHVHQLEALGYKVTLEPAA

SEQ ID NO: 454298 - protein, 436 aa, unidentified
MANVVTFEQVNAHAAAIDIGAEKIFVSPDGVEVTCYQTFTADYRRCVEELLQRGTRCVCMEATGVYWIALYEMLEQAGLQVCLVNPKEVKQVKGRKTDPKDCRWIQKVFSAGLVRQSYVPAGTLKELRMMVREREDIIQMGSAYVNKMQKALELMNIKLTLALSQIHGASGIRVIEAIISGQRDPLELLLLCEKSIIDNKADKMIKALEGNYNESWVFLLEQNLKMWKIHQEQISVIDKKLEFLLESLAVNKPIVKGVVPPKPIRHHPPKIEELHQKLLSIYGVDGNSLSGVNDYTLLKLLGEVGTDMSRFETCKQFVSWCQLAPPLERSGKMRRRSKVRHGSKAGQIFRSIAQGLLNSKYIAIGVFMRRLRARTDSKIAVKAGARKLAEAFYRLLTKGSAYVETGTKDYLKQLEEKEKKYFQELLLAQLLILEKI

SEQ ID NO: 454299 - protein, 356 aa, unidentified
MSYDVKYIGMDVHKEAIVIAVLNESGKLVMESVIETKASSILQFLHGLRGELHVTWEEGTWAAWLYDLLQPQVQHIVVCNPRRNALLKEGSKSDKVDAGKLANLLRTGMLRPVYHGENGLRTLRELARSYQTIGKDLTRVMNRLKALYRGWGIPCTGTQVYAPRYREEWLNRIPHAGVRRRAELLYQQLDGLQGLRRPLRPELLAESRKHKAAKLLRQIPCIGPIRAARLIALMQTPHRFRSKRQLWTYSGLGIETHDSAQYRYVGGQVQRSKKPQQLRGLNQNHNHEMKEIFKSTATRASCSTGPFHDFYEALLAKGMKPEMARLTLARKIAAITLTLWKKEERFDAEQLKTQAA

SEQ ID NO: 454300 - protein, 375 aa, unidentified
MGVSRLHALIAEHLPDPGADLNPSPPVVVGIETERGPWVASLVAAGYTVYAINPLSAARYRQRHSTSGAKSDAADAHLLAEIVRVDRAHHRAVAGDSALAEGIKLAARTHQNLVWERTRHVLRLRSTLRDFFPAALQAFPELDATDALQVLAAASDPDTAARLTRHTILAALTRARRRNREERADQIMAALRAEELRQPAPVQAAYAATVRAQVALIATLNTQIEALEQVVAEHFGQHPAAEVLTSLPGLGTVLGARLLGEFGDDPDRYLDAKARKAYAGTAPITKASGTKKIVMARYARNKRLGDAAQQWAFSSMRGSVGARTYYQQLRARGTGHQAALRQLANRWVGILHGCLKTKSLYNEDTAWSHILTPAA

SEQ ID NO: 454301 - protein, 408 aa, unidentified
MDIIHTHVCGLDVHKKNVVACIITPDHQEIRTFSTMTEDLLMLVDWIKAHGVTHVAMESTGSYWKPIYNLLEMQDIKILVVNAKHIKNVPGRKTDVKDAEWIAGLLRHGLLQGSYIPDRQQRELRELIRYRRSLIEERAREINRIQKVLEGANIKLSSVATNVLGKSGRAMIEALINGETDPDVLSELAQRRLKRKKEELKKALKGLIGPHQRLMLKTQLEHIDHLDALIEELDAEIKERMRPFEDDLERLDTIPGVGRRTAEHILAEIGPDMTQFPSAAHLCSWAGVAPGNNESAGKRKSGKTRKGNQKLRSTLVEAARAAARSKHTYLSSQYHRIAARRGANRAAVAVAHSILTIVYHLLKKKQTYIELGPHYYEERKRHQVARQAIRKLETLGFKVMVEPSNQTA

SEQ ID NO: 454302 - protein, 346 aa, unidentified
MEQYVGLDVSLKMTAICIVDRAGKIQREGTVASDPAAIAAFVRQHAPNVARIGLETGATSTWLWTELRKLGLPIICIDARHAKAALKMQINKSDRNDAVGIARIMQCGWYKEVRVKSLDSHAIKALLVSRALLVKIKRDLENQVRGLLKNLGLVIGRTKMNAFVVRTAELTEDQPELAVVIEPLLKAREAVEKQIADLDRKAMRLARSDVQIRRFMTVPGIGPITALCYLATIDDPTRFKRSRSVGAYVGLTSRRFASGEVDWTGRISKCGDIMMRSYLYEAAGVLLTRVAKWSVLKAWGMRVAKRSGLRKAKVAVARKLAVILHRMWIDGTEFKWSSKEEAVQPA

SEQ ID NO: 454303 - protein, 345 aa, unidentified
MKITTIGVDLAKEVFQIHGVDAHGKAVLRKQLRRGEMAKFFAKLEPCLIGMEACGSSHHWARKLGEFGHTVKLMAPQFVKPYVKTNKNDMADAEAICEAVGRLNMRFVPIKNIEQQAILSVHRARQGFVKARTAQANQIRGLLSEFGIVIPQGIKSIAKRMPDILEDGENSLPGTMRNLLERLNDNLKEMDRQATELELQIKQWHHGNEASRKLEAIPGIGPITASAIVATVGNATEFKNGRQLAAWLGLVPKQHSSGGKQILLGISKRGDTYLRTLLIHGARSVIRFAENKAEPNQWLCKLMARRNKNVAAVALANKNARIIWALLAKGKIYERDYVSVAKAAA

SEQ ID NO: 454304 - protein, 317 aa, unidentified
MTDHITLAAGIDTAKAKLDVAIHGQPTHFTVANRPPGWRRLAGELAKAGIERVGIEATGGYERGVVGHLRGAGFTVLVLQPLQVKAYARLHLRRAKNDRLDAVLIAACTAALDPPAIAPDPRLPALADALTFIEQTEEDIARCKTRLEHITQPRLRRLALADIKRLHTRRATELKRLAQALRRHDDLAGRLDLVLSVPGIGERTALALVLRMPELGYVTREQAAALAGLAPFDDDTGQHNGTRHIAGGRSRVRASLFAAALAAAFRWNPALIALYRRLAAKGKSHKLALVACARKLLVYANTVLHRGTPWIVQHDAL

SEQ ID NO: 454305 - protein, 414 aa, unidentified
MQGYYVAGIDVHKAMLAVVVSEVKPGECEFQRRRFGTTRSQLRELTEWLLGLGVHEVVMESTARYWRPVWVALEETGIRRHLAHAHSNGARRGRKSDFRDAERLIHRLVAGELVLSYVPEDEQQGWRLLTRTRYQLVCERGRVHSQIEGLLEDAQIKLSSVITDLLGASGRRILQALVEQEGRHNPAKLAELGHAKLRASREKLTDALDGRWLERHRFLLRLHLERIHQLDVQIEEIQQQTASAMQSCQEAVARLVQVPGIRTEGALQMLAEIGPTAAAFPTPGQLASWVGVCPGQQESAGQSYSQRSAKGNWQMRRLLSQAAHAAAHAKGSFFESFYRRLVAKRGPAKAIWALAHKLCRLIWKILHEGAEYQEQGHPTSTLQTIRRRQRRIAAEFRKLGYQVQFTVLPPATPR

SEQ ID NO: 454306 - protein, 423 aa, unidentified
MTMFELVEAWTSYHKRSCGIGAIVGVAANQIRGDGMGPVVGLDVSKGASVLQAFTERNKPYGRCKRIAHTPEGFEQLVELLKELEKSTGFEPAVVLEATGHYHRSLVAYLEREGYQHFIVNPLQSKRAKGTHLRKVKTDAMDAWHLAEMYYRGDLKPHRTWSEALTELQHLTRQHEFICPMLVQAKQNARALLDQVCPAYETVFDNLFCTTSLQVLRQMLSSTPVTAETIQAAAGSSHGQAWVQEKLERIQALPPLSQSSKAQQMALLSVLNMVLTGQEQLRQLEKAMEELAMMLPEVELLRTIPGVGDKLAAVLAAEIGDASQFETPKQLVAYAGLDPGVHSSGKFTASSSRISKRGSKRLRRALYLAAQCGIRNGVNERLKAYFEKKRKEGKPCKVAVIACANKLLHHVHAILVKGEPYKA

SEQ ID NO: 454307 - protein, 339 aa, unidentified
MTVKTVGLDLAKDVFQVHGISENGRVIFNKAIKRAKLLRFFETLPPCVVGMEACGSSHHWGRQLRKLGHDVKLMPAGYVKPYVKRGKNDAVDAEAICEAVRRPTMRFVEIKTEEQQAILSIHRTRDLAVRQRTQLANMIRSFLREFGHILPIGIEAVTAFAKRHHDGDHPEMPEIANGMLGIQCYQFIGLNERIDGYSKMIEQHVLLNADARRLTRMPGIGPITASAIIATIGDAKQFRTGRDLAAWLGLTPLNKSSGGKERLGKITKQGDRYIRKLLVVGMTSRAVMAKRSPEKVDLWTARIIADKPFRLATTAMANKAARAIWAMLTKKQEYRQPAF

SEQ ID NO: 454308 - protein, 320 aa, unidentified
MQTPAVVLNIGADVAKGEIVVACSEGSFPVRQIANQRPALLAFLKGLPAGSRIGVESTGSYHELFAGLAHQLGFLVFLLNPKDTRHYAKAVGLRGKTDRVDAELIARMIAHEHTKLHPWIPPTPQQRELDRLIKRRATLISLREAVEMSLHELDGFAADLRALRTRFNQLIARLDLRVKALVEASPERKQNFTHLCTITGVGPVIGAALVNTLERVPLKSADAFVAFTGLDPRPDDSGQHRGKRRLSKRGPGELRRLLYLAAMSAIKTKTWRPLYDHYRAKGLSSTATLVILARRIARTAWSIYTHKTEFDPGRLMKPLT

SEQ ID NO: 454309 - protein, 420 aa, unidentified
MQFIILGGTNMYNAVGIDVSKGKSTVAVLQPGGTVIRKPFDVTHSSCELKSLTDYILTLDGETKVVMECTGRYHEPILRTLSDAGIFVSAVNPHLIKNFGNNTIRKVKSDPADSRKIARYTLDNWADLREYSSMDTTRAQLKTLNAQMAFFTKQKVAAKTNLISLLDMTYPGVNDLFDTPTRDDGSEKWVDYAASFWHVDCVRKIGLKAFTERYQAFCKRHGYNFQKGKPEELFNSSKELVAVFPKEQEYKEMIQMSIKQLNVISANVERIRQEMNRLASTLPEYSTVMAMRGVGATFGPQLIAEIGDISRFNHREALTAFAGVDPGVNESGKFKSNSNNASKCGPARLRKTLFLIMSSLLQTKPADDPVYCFLSKKRSEGKPYHVYMTAGANKFLRIYYGKVKECLRAQAQVQAETSES

SEQ ID NO: 454310 - protein, 354 aa, unidentified
MPKTASAQIAVIGIDIGKNSFHVVGHDSRGAIILRQKWSRGQIEARLANMTPCLIGMEACVGAHHLARKLATFGHATRLMPAKYVRAYARGQKNDFNDAEAIAEAVQRPTMKFVATKTADQLDLQALHRVRERLVSQRTGIINQIRAFMLERGIAVRQGIRFLRAELPIILASRTDVLSPRMLRVIEDLAGDWRRLDERIETLSREIETIARQDAGCDRLMSVPGIGPIISSAVVAAIGSGDVFSKGRDFAAWLGLVPKQISTGDRTILGKISKRGNRYLRVLFVQAAWVVLVKPQSWERHGLKHWIEAAKKRLHHNVLAIALANKLARIAWAVLAKGRGFQATRTIDGSTQPV

SEQ ID NO: 454311 - protein, 358 aa, unidentified
MQSNKKSFKGQKIFIGIDVHAKTWAVETLTESGFTKRHAQEASAKVLFDFLSKNFPDGEYHAVYESGFSGFSTYYQLKEYGIHCVVVHAADVPSTQYEQVMKTDKIDAGKLARALRKGDIKPIYIRERENLDDRAVVRLRKTIQKQLSGYKTRVKHLLHTNGVKLPARFDKPGTHWSRAFMNWLKDEVVLLSSTRLSLDLLINQVESIRKNLLEATRVMRILAATDKYKANYELLLSIPGIGFNVAMCLLTEIYDFKRFGNENCFAHYLGLVPTCHDTGDKHSTGGKTFRGNKLLGPMIIEACWVAIHKDYGLSQAYCSYKQKMKPQLAIVKVARKMSNIIFSVIKNGKKYEPYKWEE

SEQ ID NO: 454312 - protein, 347 aa, unidentified
MNQISRIGMDTSKHFFQLHGVDAEERVVLRKKLDRRQVLAFFAKLEPTVIGIEACGASHYWSRELTRLGHVVKIIAAQLVKPYVKRGKNDTADAEALCEAMSRPTMRFVPVKTAEQQAALMLAGVREQLIVGRTQLANAIRGHAAEFGLIAAKGLAQIAPLLARIQADEMLPALAREMFVLQGEEYARLDAQVDAIEDKLKAWHRASALSRRLAAIPTIGPVIASLLVMKVIDPHAFSSGRQFAAWLGVTPQDHSTAGKTKLGGITRAGDETLRSLLVVGATAVIWQVRRGASLHPSPWLVELLKRKPPKLAAVALANKTARIAWKLMTTGETYDAKRNRAPAVAAA

SEQ ID NO: 454313 - protein, 343 aa, unidentified
MQTVTTIGLDIAKSVFQVHGVDAEGHVVIRRQLKRRYVMTFFRKLPPCLVGIEACASSHHWSRELQALGHTVRLMPPAYVKPYVKRHKNDATDAEAICEAVTRPNMRFVATKTPEQQSCLTLHRTRHLFIRQQTSVINAIRAHLAEFGIVAPVGRNGVEQLLGVAADASDKRLPEVARVCVAALGAQLRMLKAQILQFDRMITAWHRSSEASRRLDDIPGIGPVLATALVASVADPKVFRSGRDFSAWIGLVPKQNSSAGKDRLGSISKRGDRYLRSLFTTGALAVIRYAKIHGTKHRPWLTALLARRPTKVAAIALANKIARMAWAIMAKGERYKEPAALAA

SEQ ID NO: 454314 - protein, 360 aa, unidentified
MREDSSVKLVVGLDVSDKWTQVCVVSMDSGEVIEEGRVRTRKVAVRERFAGRPRMRIVLEVGTHSPWMSRLLEELGHEVIVANAAKVGLIHGNSRKRDRTDAENLARLGRVDPKLLHRIRHRSQSAQEDLAVIRSRDQLVRCRSQLISHVRGSVKAMGSRLPSCSTECFARRAAAEIPQGLKPALDPILAQIATLTQAIRESDRRIEQLAKQYGVTELLVPIRGVGALTALTYVLVLEDPTRFATSRAVGAYLGYVRRLDESGESSPPLRISKEGDELLRRLLVHCAHYILGPFGEDCDLRRFGERIARRGGSFAKKKAVVAVARKLAVLLHHLWVTGEVYDPFYTARRKGEAPQEEDAA

SEQ ID NO: 454315 - protein, 342 aa, unidentified
MKDTMIGVDLAKHVFQLHGASMAGHLKFRKKLSRPQFQKFMTEHPPAVVVMEACGSAHYWAREMVKIGHEVKLIAPQYVKPFVKRQKNDAADAEAIVVAAQRPEMRFVEPKSEEQQAKAVVFRARQRLVHQRTDLVNALRAVLYEYGHIVPQGIGHLKRIEAILKMPNRDLPELVCQECQDLIGQIGQKTERIEAKTEQLKKLAGPTGTARRLQTMPGVGPLTALAVEAFAPNMASFKCGRDFAAWLGLVPRQHSSGGKERLGRVSKEGQADIRRLLIVGAMSRLNWLGRKSILPGSWLARMLVRKPRMLVAMALANKMARTIWAMLTKNEDYRNPAPAVAA

SEQ ID NO: 454316 - protein, 343 aa, unidentified
MGNDIVIAVDVAKSVFEVGVSDRPGHICRRERPRRDQFLSFFLAYPGATVVMEACGSAHYWGRELQKRGHRVVLLPPHHVRPYVRGNKTDRTDVKGILEAYRNAEIRPVPVKSVAQQSLATLHRLRAGWMTERTARLNAVRGLLRELGIFIPLGAREVIPAVWAQIEDADSELPPVLRRVFAEACQEIRDIEARIKKVDQDLAALAEQTPAVVWLLTIPGIGLLTATALVAFLGDIRRFPSGRHLASYLGLTPREYSSGLKRRLGRISKRGDGYLRTLLIHGARSVLVHARKQQPDRLRAWAHALAQTHVHNKAAVAVANKLARIVWAVWTRNVPYELIPKAA

SEQ ID NO: 454317 - protein, 359 aa, unidentified
MRSLLISDKGGRPWNRLAELAWITSKHIFQIHGVNTAEEPVLRKKLRRTEMVVFFKKLPPTVIAIEACGGSHHWARLLQSFGHEVKLIAPQFVKPYVKRGKNDAADAEALCEAMSRPAMRFVPVKTAEQQAALMLVGLRDRLIRNRVQLANAIRGYAAEFGLTAAKGMCKIEPLLDRVAADETLPALARELFAFHSAEYSQLQEQLEKVEAKLIAWHRADECSRRLAQIPGVGPIGASMLVMKTPTPEAFRTARHFAAWLGLTPKDHSTAGKVRHGVITRAGDEALRSVLVVGATAVIRQIRYGRGTLSPWLVDLLKRKPPKLAAVALANKIARIAWKLMVSGQTYRVNGKSPTMARAA

SEQ ID NO: 454318 - protein, 346 aa, unidentified
MNIATIGIDLAKNVFQVHGVDEHAKAGLKKQLKRAQVLPFFANLPPCLIGMEACGSAHYWARKLNELGHTVKLMAPQFVKPYVKTNKNDTADAEAICEAVSRPSMRFVPVKTGEQQAVLSLHRARGGFVKARTAQANQIRGLLAEYGIVIPAGIDNIVRRLPDILEDGENNLPGVFRQLLQRLSEHLKELDRQVDELNEQIQLWHRENAASRKLADIPGIGPITASALVASIGDAKDFENGRQLAAWLGLVPRQHSTGGKQTLLGISKRGDCYLRTLLIHGARAVIRVSERKVEQADSWLTRMVDRRNKNIATVALANKNARIVWALLAHNREYQSDYVTVVATGA

SEQ ID NO: 454319 - protein, 353 aa, unidentified
MRVVFGIDVSKASSEVVILVNGEKGHGYPITKDVIGFNQLLGDLKTVHHPKTTGVYSRRPQAFLDDHGYAYTRLNPLEAKKQLDSLRVRKTDKIDAEKLAQPQFVLNRKTTYVQEEVYQNLRDLSRFYQNLTEDIVCTKNRLHKVLQVTFPELENILSASTGEQYWSLVMAFLFKELVLRLTQSELMAIIFRFTSKRISDKRATYLADKLRELAKQSYCAVKKTSPILEEVRYYAQELLRLSERRQAVLNEMVFLAQPLPEYNILLSIPGIAETTATSLIGELGDIRRFQSANQINAFIGIDLRHYESGNFLAKERISKRGNPYARKILFKCIHNIASASHTKPCHIADFYEK

SEQ ID NO: 454320 - protein, 421 aa, unidentified
MDILYERVAGFDVHKDTVVACVRIVAGGKTTRECRTFATTTEQLLELRSWLEECRCTHVAMEATGVYWMPVFRILDAGKFELIVANAAHIKNVPGRKTDMNDAMWIADLLACGLIQASFVANEEVQELRALTRTRKQLVREQTRHVQRIEKTLAEANIKLSSVISDIMGASGRRMIQAMIDGVRQPNKLAELAGKQIKATPKELYDALHGRLTDHHRFLLALHLKQSDSIDETIRKLDVEIDQRIGQMEAEGNRTPFRTLIGLLTTIPGVSAVAAPAILSEIGPDMSRFPTAGHLVAWAGLCPGQNESAGKRKSSRLRKGAPWLKTMLVQCAWAAKRAKDSYYRAQFFRLQARRGPQKAICAVAASILTAIYHILKHGTEHHDLGSAYFDRRPVEAKASHLVARLKKLGFTVQLQPIAEVA

SEQ ID NO: 454321 - protein, 369 aa, unidentified
MRADKKSKRKGCKLNSIVAGIDLGDRESLATVLSPIGDVADRFSFLMNEEGYAYFASRVPKDARIAFESTIMAYPIARAFKMHGYNDITVAHPKELAWIVKSKKKNDRVDSLKIAKLHMVGMLPESHLLDRDEQIVRDLLVQRVKLGVEIGRLKNSVIGYLKREGIYDSLPKSGDNFSVKRRHAILSLRFDDKRDLILRTMMDRLEFLEGQCIPLEDSVRMNARVSDDVKLLMSITGVDYYLASLLSSFIGDVERFPSDDHLASFFGIVPTSRDSADVKRRGKMTKDGSSIARWALSVMVDTVMLHNDPIREYYTGVKKRTGSGKLAHVATMRKLTRMLYHMLKTRQHWKWENPLLTERKMAKLEDGWR

SEQ ID NO: 454322 - protein, 407 aa, unidentified
MRLFVGDDWAEDRHDVEVMDVSGRRLAKARLPEGVAGMARFHTMIGGLVGEDPEDVEVLVGIETDRGPWVAALVASGYTVLAVNPLQAARFRDRLGVSGAKSDAADAHVLADMVRTHAHQLRPVAGDSAQAEAIKVVARTHKTLIWEQTRHTQRLRHALRDYFPAALAAFEDLDAADTLELLAKAPTPAKAARLTTAQITAALKRARRRNVTEKTELVQAALRADHLGQPEVVTSAYAASVQALIAVLTVLNTQIKAMQGQVEAHFGRHPAAEIVTSQPGLGPILGARVLAEFGDDPDRYATAKSRKNYAGTSPITRASGKKKVALARFVHNDRLIDALMAQAQSALLRSPGARAYYDRQKARGAGHNAALRQLANRLVGILHGCLKTGTHYNETTAWSHHTNNIAA

SEQ ID NO: 454323 - protein, 350 aa, unidentified
MKIIGCDYHPGFQQIALVDTETGELEERRLEHAEEAERFYRDLGAQGACVRVGMEASGHARWFERLLCELRFELWIGDAAKIRAKRVRKQKTDRQDAELILKLMLKDDFPQIWVPNGENRDLRQLMWHRHRMVQARTRIMNQLQAVALNEGLLCKKRLWRETGRKQLEAFPLAPWASRRRQDLLELLDRLTPTIAELTQAIEREMENSPEAQRLRTHPGVGPLTALAFVLILGKADRFQCGKQIASYLGLVPLEDSSGKRRRLGHITKQGNSLLRFLLVEAAQVTVRSDPEWRSKYFHLTMRRGRKIAKVAMARRLAVRMYWMLRKGWDYEQLNKFGSHAGQPGNRHGVQ

SEQ ID NO: 454324 - protein, 354 aa, unidentified
MDNTIRYVGLDVHRDSISVAVLDSQGKVVKETVIETKEAALLGLIQELRGTLHVVLEEGTWSTWLYELLQGRVARVVVCDARKILVPGNRNDRIDARELADLLRCNRISAVFHQDTGLRTLRELARTYGVLTKEQTRTLNRIKALYRSWGIACAGQSCYGPKQRSAWLKKLPYAAVRERAKIDYQQLKSVQELRHEVRLQLLAQAKKHPAYGNLRGIPQIGPVRAALLIAFLQVPERFRTKRQLWAYCGFALETQSSGDYCWVEGKRQRSKKAPLVRGLNSNHHPGLKWIFKSAATRLCSGEGPFRPFVLGLLEQGIRPEMARLTVARKLAAIVLAVWKKGERFDAQRLKSQAA

SEQ ID NO: 454325 - protein, 371 aa, unidentified
MPSTSLPRSARQRGAIHLGMDVSKDSISVGILHPEEESPVVEKISHDEQSVRRLIRKFPSPGRLVVCYEAGPTGYELHRLLVSMGVTCDVIAPSLIPKRAGDRVKTDKRDAKKLARLHRAGELTAIRVPSVEEEAVRDAARARADMVDDLGRARKRMQAFLLRHGQIYRDGSAWTIKHHQWLRSVDFEDRALRLTFGRYLAIVEAREAELEAMEAELRPYLEHRLFADEIARLCAYRGVAALGALTLASEVCDWRRFPSAGAFMGFCGLTVSEYSSGGTVSRGHLTKTGNNHIRTQLVESAWAYQHRPSLGAELRRRQTDLDPDTVARAWAAQQRLCARFHRLQARKNNKPVVVAAIARELAGFLWAEMVA

SEQ ID NO: 454326 - protein, 374 aa, unidentified
MAEFSKYIGLDVHKETIAVAVADGDGGEVRYLGEIANEPAAVKRLLHKLSRDGGRLRFCYEAGPCGYELYRQIVGEGHACVVVAPALIPRKPGERIKTDRRDAASLARLDRAGELTAVWVPDPEQEAMRDLSRAREDMKIVERQLRQRLSGFLLRHRRRYGGKQACSQAYWRWLEGERFERPQQQIVLEEYAEAVRQAQRRAAGLEQQLHRAIEGWSLGAAAQALTALRGVDRTAAATLLAELDDISRFDHPRQLMSYVGLVPSEYSSGARRRQGGITKTGNGHARRILIECAWGYRFPARKTATIQRRAERAPEAVQAIAWQAQLRLCDKYRRLSARGLNGSKVSAAIARELCGFVWAIVRQVQRTEQVSAPA

SEQ ID NO: 454327 - protein, 323 aa, unidentified
MSSIVGIDIAKHSFDIATLQANGKYRTKSKLANEATGFQTLQQWLAKYAEPSAWIVMEATGVYHEALAEYLHQLGYRVCVMNPAQIARYAQSQLQRVKTDRVDAKLIADYGQRHLDKLRAWQPEPLAVRRLRALVRRLEDLKEIEQMELNRLEVSDASVQGSIRSVLQHVQEQIADTLKAIQDHIDNDPDLRGKRDLLVSIDGIGDKTAALLLAELGDPLKFKSARAITAFAGLNPKLQDSGKHRGHVSISRMGSVRLRSGMYMPTVAAMIHNAAIKALKERLQARGKAGKQIVCAAMRKLLHIAYGVLKSGEPFDVKKALAR

SEQ ID NO: 454328 - protein, 343 aa, unidentified
MEEIIRIGVDTSKSVFQLHGVNAAEQPILRKKLSRREMVKFFEKAPPTTALEACGGSHHWARLLGSFGHDVKLIAPQLAKPYVKRGKNDAADAEALCEAMSRPTMRFVPVKSAEQQAALMLVGVRERLIRNRTQLANAIRGFAMEFGIVAATGMCRIEPLLERIAADQALPELARELFAMHGVEYRDLLAETKVVEEKLTALHRSDQCSRRLAEIPGVGPVGASLLMMKTPDPRTFKSGRDFAAWIGLTPKDHSTAGKVRLGVITRAGDEMLRSVLVVGATALLQHVRTGRSRHASRWLIELLQRKKPKLVAVALANKIARIAWKLMVSGETYRRPEEQTQAI

SEQ ID NO: 454329 - protein, 351 aa, unidentified
MQHYVGLDVSVKETSVCIVDKAGKVMREVKVATKPEAILAVLTEEGLAIERIGLEAGPLSQWLYSALAGAGLPVICVETRHMKAALSAQINKSDRNDARGIAQMMRVGLYRPVHVKTLASQKRRMLLTSRQLLQAKALDIENDLRGTLRNFGLKVGMVGTVKFEARIRELVADHPDLAAIVEPLLIARRVLREQLGVLHRQLLEIVRHDEVCRRLMTTPGVGPVVALTFRATVDVPSRFASSKAVGAAFGLTPHGRDRPDGGHLEMRRRHDARDVIRGGPGPDDPQPQVVVAQGLGPEDCPASWDEARDRRCGATAGGHHASHVGGWHRVSLDQSRSCGHITGNLTASCAQ

SEQ ID NO: 454330 - protein, 415 aa, unidentified
MDVLHDRCAGLDIGKKDLKACVRTPSPTRRNSRRQEIRTFATTTNALLELRDWLIEQQVTLVVLEATGDYWRGAFYLLEDTLNVILVNAAHAKGLPGRKTDVSDSAWLAQLGECGLLKASFVPPEPIRHLRDLTRYRSTLTVERTREAQRLEKELEDAGIKISSVATDILGVSGRAMLAALIDGQDNAGVMAEMARGRLRTKIPALVEALTGSFGAHHAFLCRLHLTRIDELSATIEELSARIEQEMRPFARQIELLVTIPGVKATTAQVIIAETGGDMTRFRTPANLASWAGVCPGHHESAGIRRSGKRRHGNRWLGGALGTAAMAAGRTRERTYLGARYARLVPRLGKQKTIVAVEHSILTAVWHMLTDNADYQDLGGDYFTKQDPERAMRRIIRQANALGLTVRFDPIPDVA

SEQ ID NO: 454331 - protein, 345 aa, unidentified
MKKIAIGIDFAKEKFDVTVKNVTNGTSCYAQYPNTPGGGRSMVHLVKKFAKGITSEDWLFCGEDTGYYSQTIARYLTEKGFFIWLQNPYAIKHSEGDIRRGKDDKADSAAIADYAHRYEDKAHKYELPSKAAEELHMLLTRRDALVRAKRVIQSGTKEIPKRDKQGETITLIKASTKRLIKDIDDEIDILEQQMEKVVEQEEALQKSYKILRSFIGIGIVNAMCFIAYTDNFKKFELNARKIATYWGVAPFGEDSGTSVHKTPRVSHFCNHWLKAILSNAANNAIVWNPTIKSYYERLVKAGKCEGICRNNVKNKIIQIITAMIRKGEKFDSEFKFTGQNTAITC

SEQ ID NO: 454332 - protein, 323 aa, unidentified
MNKDIKYFGIDISHLVFDVTDSDGNYYQFKNSLIGFKKFIKLLNFNSHCVMEATGYYHYQLAYYLQENSIALSVENPLAVKRFIQMKLSKIKTDKSDSKLICAYAKQVDLKLWQGQSKHQLECLQMTRLLSVYTKQSTMLKNKLHGEAVLGNPSKLVVTSLKKSLRQVQKEIKTIEDKLLVLVKEVHQKVLSDLKSIPGIGPKTSLMLVVLTDGFERFKSGSELCSYAGLTPIIRQSGSSINGRPRISKIGNQKLRNLLFMCSFNACKYNKACKAIYDRIVAKGKSKKLALIAVCNKLLKQAFAIAKSGLIYDDTFRSVLVKN

SEQ ID NO: 454333 - protein, 318 aa, unidentified
MAKTFVGIDVSQKQFDVHIRPLKLARRFDNTKEGIAELLTWIRPYAAERIVCESTGPYQKLLVGALLAENFPAVVANPRQVRDFAKGMGQLAKTDAIDAGILAHFAELVPTIVRPLPSKELSELRELYDRRGQLVRMLASEKNHRHAAANGLPKVLKNIDKHIDYLEAQIEKLEQRMNEIVETSEAFKAQNEILQSITGIGPQVSRTLIAYLPELGKRTRQSITALVGLAPYPDDSGSHSGTRHIRGGRSKVRIGLYQAAISAIRHCPTMRAFYVSLKARGKMPKVAIVAVARKILVLANALMRDNRPYQPQPANSVC

SEQ ID NO: 454334 - protein, 435 aa, unidentified
MSKEDEETTMSARETTEPEFVAYVGIDWADQKHVWSLQKADSRQREAGELEHRPEAVEAWVGELCRRFGYGPIAVAVEQVKGALVYMLRKYECLHLYPVPSTMSASMRAALYPSGAKDDPRDADLLLELLVLHRNKLRRLTPDNEATRRVQNLVEERRKLVEEKTAQLNRLTGYLKVYFPQILEWFAKLDSQLVCDFLERWPSLEELQKVPSAELKKFFRHRRGRHGELTEWRMQGISQATPAIRDRAVIEAKQTVVRVIAQLLRNLLEGIATLDRKIAEATEVHPDFFIFQSLPGAGAALAPRLLAALGSQRDRYGSAAEVQKYSGIAPVTERSGKKKWVHFRWACSKFLRQSFHEWAGHSIAQSVWARAYYQRQRERGKEHHAAVRALAFKWIRIVFRCWQDRVAYDETRYLAVLAKRGSHLTSAFASAAVSV

SEQ ID NO: 454335 - protein, 381 aa, unidentified
MPSMQLRRDDVIVGVDTHKDNHVAVAIDGLGGRLGDIIVPTTIAGFEELLAFCLAFAGPAGRLIGFGVEGTGSYGVGLARYLRNHGHDVHEIARPARAVERRLAGKNDTIDAEHAARQLLAGHGLSTPKTADGSVETIRLVKIAYDGAVQARTTAIITLKATLATGSEALRAELEKLTDHKLITACAALEGPAPLPPVRRGAPAVVVPSDPDLAMRHVLSSMAKRWLALHEEAKAHAASLKALTAAAAPHLVEAVGVGYDTAAQMLITAGDNANRIKSEAAFAKMCGACPIPAGSGKTNSRHRLYRGGNRQANAALYRVVIVRMRWHQPTIDYVARRTAEGMSKREIIRCLKRYLARELFRLLPAPDAVANPVQGELEIAA

SEQ ID NO: 454336 - protein, 472 aa, unidentified
MTSKIPIQAPTSTSPAQVKPVRRRRKASALDVAYPNACGIDIGASSHFVAVPPGRDIQPVREFTAFTADLERLVQWLRSCHITAVAMESTGVYWIPLFEMLDAGGFEVHLVNARHVKSVPGRKSDVLDCQWLQQLMSYGLLRGSFRPPEDICALRAVWRHRDMLLSYQARHVQHLQKALTQMNVQLHHVISDIMGVTGQAIVRAIVAGERNAATLARLRDRRIKADEAEVAAALHGHWRDEHLFTLKQALALIDSYGTQIAECDGKLEQLLAVLKSHELPQDGLGAHKRASSTRNSVGFDARTSLFEASGVDLTRIPGIDTSTALKVISEIGVDLRRFPTVKHFTSWLGLCPGTKISGGKVLGSATKPCANRAAQALRMAAFALRQSQTALGAHHRRLCSRMDKPKAVTASAHKLARLVYFMLTRGQAYVEAGQDQYEERYRKRVVQNLAKRAHEMGFDLAPRNPSSIGSRT

SEQ ID NO: 454337 - protein, 346 aa, unidentified
MDHVGIDLHKRDSQICWLHDTGEVREVRIRTTPERFEALFGGQAPAQILIEASTESEWVARYLERLGHVVVVVDPNYAPMYPRRRRRQKNDQRDALALATASRTGTYRAVHRVSAAQRAVRQALTIRDTLVQTRTRGVSVVRSLVRGEGLRVASGQTEGFVGRVAAEPVPEPLATTLAPLVTLLTTLEAAIGAIETHVRTLTADDARVHRLQGVPGVGWITATAFVAAVDAAGRFADAGQLAAYLGLVPRDRSSGEGHRSGPITKTGPSRIRWLLVQAGWRVLRATTADAQPLRRWGLQVAERRGTRVAVIGLARRLARILYALLRDGTAFDPMQVAAGRAVRPAA

SEQ ID NO: 454338 - protein, 417 aa, unidentified
MKTENYAALVALDWGETEHAFATQVGESPVETGTMPATAETLHGWLEDLHKRTDGRPVALALEGGKSAVLHALVAHSWLVIFPVHPATSDRFRKAFVPSGAKDDVPDAIVLLTILTQHRDQLRPLKLDSAETRKVAALVAARRRAVDERTKLACELGSTLKTYYPQSLELCGREPATDLMLDFLTRWPELKSLKAARPASLRAFYAAHNSRHADVVAERLALITEARALTEDRAVIEPAILQVKMLVDILRPLQNNIALIEERIAEAFDAHPEAALFQGLPGAGPATAPRLLAAFGTDRSRYPDACSLQKYAGIAPVKQKSGRQLWIHWRWNAPKFLRQTFVEWAGQSVPKCAWAKAYYQQQRAAGKHHQATLRALAFKWIRILWRCWQDRVPYNEARYLASLRQQKSPLAARLAIT

SEQ ID NO: 454339 - protein, 355 aa, unidentified
MTKVISNFKGQTIFVGMDIHKASWNLGIHLDDMFIKNVHQKPNPHIMATYLQKHYPGAHYKAAYEAGKFGFWIQRHLTSLGIECLVVNPADIPKSQKDSLQKTDARDARNIGLRLQSGVLRGIHIPDEQQEADRVLFRHRKRIWKDLTRCKNRIKGTLAFSGFDIPEQFDNAIWSHNFIEWLRLLECKQQSRRRALDFMITQMEFLRKELLGISNDIRKMMREQRYKTNYYLLRTIPGIGPLTAASILVEIGDVKRFETFYHLNSFVGLLPMEHSSGLSDNKLSLTVRKHRQLRSDLVESAWTAKRTDPAMALYFHEQIKRKDSKIVIIKIARKLLNRIRFVLLSQQPYEFGIVK

SEQ ID NO: 454340 - protein, 347 aa, unidentified
MKYIGVDIHKQYFVATVMNQEGTVETKNRVSMDRASIQAYFKALNGQDDLKAVMEAGYGWSYFYDQIKELVQDIKLAHPLKTKAIADARIKTDSIDSEVLAHLLRADLIPEAYIPDARIRDIKNLIRYRMSLRKISKMLKNMIHAVLDRNHIEDPGFRGLSDKFGKKGRAYIKAFKLKGTDTRIVRNYLSLLEVIDKRRELVEKKIKKLFEGDEICKLLKTIPGIGELSAMVIRYEIGDIERFPSAKKLCSYAGLVPSTFASGGKVHQGRITKQGNTWLRWILGEIATCAIVKDAWLRSYCSRVAKRGGRNKARVAVARKLLEIIYKVWKEKRPYYEKPVAVALSIS

SEQ ID NO: 454341 - protein, 322 aa, unidentified
MKTIGIDVSMDEIDLAICEKGKSSYYGKMKNNRQGFDKIVKLVEKNKIDLVVMEATGVYHFQIADYLYDKKVKVSVVNPLIVKRFCQMKLSRAKTDKKDSTLIALYGYQEKPRHYQPRSKEEEELKSLYGLRKDLLQTMNQTKNRIHALEKKTHEQAFCIASLEKVEEILKQELREIENKIKEILENDFKEENDLLQEVPGVGLIGKAGIIGILGGFKYFENHKQVSAYIGINPSYRQSGKSLNCTERISKKGNGDLRTIFYMMALSAKKSNKACKIFYERLVEKGKSKKQAIIAVANKLIKMLMSILKNKKRYDENFVSSK

SEQ ID NO: 454342 - protein, 417 aa, unidentified
MDVHRDFCEIAVAEADGQVRSGGRINSRLTELELFAGSLAADDVVALEATSGAGLIAEIIEPHVAAVVVANTRKLPQISKAKAKTDRLDARTLARLAASGFLETVWAPDERTRALRRLCARREALVRARTRAKNEAHAVPARNLCGRPPVTDCFGKSGRVWLAELQLPVDERLTLDGCLRQVDFLDSEIRALEAALATEALGSPQILRLMTVPGVSLHTAAAFVASVGDIRRFASARQLVGYLGLDPRVRQSGNAEARHGRISKAGSSLARGMLGEAAWSVAQTPGPLRAFFERIRARKGPQVAATATARKLACLFWCLLTREEDYAYARPSMTRAKVRQLELAAGAPPRKGVRGIAGNKNAQTREAERELARRAETAYRRTIADWKAAGPTKRGAGATPGRASSRPSKGKAARQTP

SEQ ID NO: 454343 - protein, 323 aa, unidentified
MQTPSAVLNIGADVAKDEIVVACSEGSFPVREVANQHTALLAFLKGLPAGSRIGVESTGSYHELFAEAAHKLGFLVFLLNPKDTRHYAKAVGLRGKTDRVDAELIARMIAHEHTKLHAWIPPTPQQRELDRLIKRRATLISLREAVEMSLHELGGFADELKALRTRFNQLIARIDLRVKALVEASPDRKQNFTRLCTISGVGAVVGTALVNTLERVPVKSADAFVAFTGLDPRPDDSGQHRGKRRLSKRGPAELRRLLYLAAMSAAKTKTWRPLYEHYRAKGLSSTATLVILARRIARSAWSIYTYKTEFDPARLTNPVLRTH

SEQ ID NO: 454344 - protein, 355 aa, unidentified
MKYHTSTTQFNCGIDLHARQMYVCLMDRDGHKLVHTNIKNNDFAFFLKLVAPYRHDLTVCAECMFGWYWLADDCQAAGIHFVLAHALYLKVIHGGKNKNDRIDSEKIAHLLRSNLIPPAYIYPAAKRPLRALLRQRLLYVWNRSDLLARIQSHQLAHNRPTCRQHVYNRQTWSAQLLAAEPDPVRQLALQNDLALIGHYDTQLASLEKELLKLTRQTASRDFTLLQTAPGIGDYLGLTILHEIGEIERFPSVKNFLSYCRLVKGTVASAGKIKGLRGAKLGNPYLRWAFGEAAVIAKRDHAVLGPLAQRLEARMGGNKFKANTVLAIKLARAVYFMLKNKTVFDPDRLIAALSTN

SEQ ID NO: 454345 - protein, 344 aa, unidentified
MLHAGLDLSRARLDVCLVGESGEFVAHTAAPPDADGLRHLADRLRGHRVRAVIESMTGARFVHDALEEFGWEVLVADAQKVKGLAPLACKTDKIDARVLAELSWRDLVPVIWLPDPNIRRERELARYRLHLVRHRTTLKNRIHATLMTFGHPCPVSDLFGLAGRELLDRLALPDPWRRNVDASLELIDDLELQIAQLTVEMRRQGADHRYIPLLVTAPGFGWINAFTVASEIGDIERFASPAKLCGYTGLCPRVYQSGNSDRRGPITKNGSRYLRWALFEAAMHACTHPVYKERYQRTKRRLGRQRGPKVAQIDLSRKLTEAIWHMLTRNQPFAPAGAAFRLAA

SEQ ID NO: 454346 - protein, 352 aa, unidentified
MTVTIVETRAEIRAITGGVDTHADVHVAAALDSIGGLLGVKEFPATAAGYGRLLSWLGGFGTVCLVGIEGTGSYGAGLARHITTAGVRVVEVDRSDRQDRRRQGKSDPLDAVSAARAAQSGRARGASKGRDGAVEAIRALMVAKRSAAGERTQTINQARALILTGPDDLRARFTGHTTAALVAELASLRPRPGSTVGYATRIALRELGRRAEFPGGQLERLDELIGPLAAARAPGLLALYGIGPHTAALLLIAAGDHPERLRSEAAWAHLCGAAPIPASSGKTVRRRLNPGGDRQANHALWRIVFTRLGSDPATRAYAERRTAEGKSKKEIIRCLKRYVAREVYPHLRTTAG

SEQ ID NO: 454347 - protein, 412 aa, unidentified
MRRVIGMDIHRTFGEVVFWEDGRLRPAGRIDMTRTALEGFGRSLKATDAVVIEATGNCMAVSRVLSPFVKRVVIANPLQVKAIAHAHVKTDKVDAGTLASLYAAGYLPEIWTPDAATERLRRLVARRYQVVRHRTRLKNEVHAILHAHLIPRCPHADLFNRRGRDWLARQPMPDDERGAIERHVRELDRLGEDLAVLDREIAESALDDPAVKRLITITGVNLTVAAGLMAAIGDIGRFKSPRKLVSYFGLNPRVRQSGLGAAHHGRISKAGRSHARAMLVEAAWAAAKAPGPLHAFFVRIRARRGHQIAAVAVARKLTVLCWHLLTKDEDYLWARPALVANKLRAMELQAGKPQKKGNRRGPAYAYNIKALRAHEMRIVEQAERRYEHFVEHWQPRAPKDRARGRLKPAGLE

SEQ ID NO: 454348 - protein, 402 aa, unidentified
MNCVGIDVSKGKSMIAVMRPFGEVVVSPFEVRHTASELSELARLLKSLDGETRVVMESTGNYHAPVAWLLHGAGFYVSVVNAMLVHDYGNNSLRRGKTDKKDAVKLANYGLDHWLTLPRYVPEEDTRLMLKTCYRQYQQYSKVQTMLKNNLISLLDTTFPDANRLFTSPPRADGSEKWVDFVATFWHCECVCGRSEKAFTTQYQKWCRKHGYNFSEDKALDIYASACRHFGVIPKTDTAKLLVEQAISQLQTTSSALAALKQEMQSLAASLPEYPVVMGMFGVGPTLGPQLLAEIGDVRRFHSKKALVAFAGIDAPPYQSGQIDVRSRSISKRGSASLRRTLFLVMSVILQCAPIDEPVYQFMDKKRSEGKPYRVYMMASANKFLRIYYASVKAYLESLEHD

SEQ ID NO: 454349 - protein, 351 aa, unidentified
MENLIVGIDFSKKTLNYCVLSGSVDNIAAEGVLGNNRKGWSSLLRLARKRLRACDACGLLFCGEDTGLCSWPAAEWLTSHGCRVWLGDAFRMSRSMGYAPEKTDASDARRIADYAFRYSDKAVDYVPMTEADKRLRLLEKQHRTLTDVKVKLKNTVGALSALLEGQTRELEDTLAYVSERLKAVDRKIERLLKTDPELAPNAALAVNVPGVSYTTAAAVMVDTRNFTRFTDGRKYAAHVGCVPYRCESGTSLKRRPHVSKHSNRRLNSLLTQGAVSIMTRNRQMMEYARRKRAEGKNTGFIINNIRCKTIKRLFAVIRDRTPFREDYRNCMECRKTVGVNDKCNMCSHYLT

SEQ ID NO: 454350 - protein, 325 aa, unidentified
MDKLYAGIDIHKENLAGCIMDKDGNITREHTFPSSKKAVEKFFCNIPNSEITIAIEACGMWRGIHKILTELGYKVKLANPKKTHDIAGSKKMDKIDAKTLADLTRTKYLPEVWIPDEQTLQFRDLTRHKSNLTRLRTQVQGKIRGYLLRKGAKYSKLSTEKTLSTLAEEDPDIKNLVQVYRCLKEEEREVMRRIKRISQNMKETTMLMSMPGIAEFSSLMILAEIGDIKRFPSPKELVSYAGLCCGIYQTGTTERSVHNTAVNKWLKWIIYECSGRALMLDPRFQNYYYKIKEKKGFKTARRATARKMLTIIWYMLTHEEPYRAS

SEQ ID NO: 454351 - protein, 410 aa, unidentified
MRRCFGLDVHREFAEVAIWEEGVVRSAGQVKTTPEALRLFAESLCDCDEVAIEATCNTHAIARLLERHVGRVVVSNPMKTRAIAEAKVKTDKVDARVLAELLAADYLPGVWIADDETHALRRQVARRAHIVRQRTRLKNRVQSILHRNLIPRCPAADLFGHKGRAWLAAQDLPLDERQAAEALLRQLDFHGEELRLIDAELARVALRREEVKRLMTIPGVDATVALSIVAAVGDFARFRSPDKLVSYLGLNPRVRQSGGQPASHGRITKQGRAHARGMLVEAAWAAAKTPGPLHAFYERVRARRGMQVAVVATARKLAVLCWHLIINGEDYAYGRPSLLAQKLRRLELRAGMPSRRGQRGSTHAYNLKEVRARERALSEQGEIAYKQLVADWQAKRPARAGAGAATGVRL

SEQ ID NO: 454352 - protein, 366 aa, unidentified
MKKTSTVRVNGNMIFKGHKLTIGLDLGDRWSNYCVLDEAGEVLLEQKLATTPEAMKQTFERIPRGLMVLETGTHSPWLSRLLRELGHEVLVAHAQKVELISKSNRKDDRHDARTLARLARIDPELLGPVRHRSAKAQIHLTVIRARAELVSARTALVNAARGLTKSYGERLPKCGTEQVGRELAAELSAELREVLEPLLKEIESLNEGIKEYDARMEKIARESYPQVALLKQVKGVGTQIALTYVLTLDDPHRFRRSRDAGCFLGLRPGRRDSGQSQPQMHISKEGDRYLRTMMVQGAHYILGPFGEDSDLRRWGLRLAERGGKNAKKRAVVAVARKLAVLLHRLWVSGEVYEPLRNSHKAMRAVA

SEQ ID NO: 454353 - protein, 419 aa, unidentified
MSKSLFCGCDVASDNNTIWLMLDDGSQPVKLFGVDNNQLGAEVLVERVYSIAKEHCVSDILIGTEATSMYDWHLLEYLAESKLALEFNLKLYRFNAKWIKNFKKSLAPRGKTDPIDSFAIAERLRMGRLPKEYVPDVKYQPLRKLTRFRYHLMQQITREKDFFLANLFLKASAYSSVKPFGSTFSATSLAVINDFFSVDELAAMPIEELTEFILEKGKSHFSKPDEIVDNLKRVARESYRLKPELTPTVNLILASTFNNIHCYKEQVKLVDSAIAENLKAFKHTLESISGIGPVYAAGILAEIGDVHRFPNDSALAQFTGLTWPKHQSGKFQAEETRMSHTGNQYLRYYLVEAANSVKRCDATYKAFYEKKYKEATKHHHKRALVLTARKLVRLVWTLLTRQALYQPGYCSFEDLSKIG

SEQ ID NO: 454354 - protein, 350 aa, unidentified
MIIVGCDYHPGFQQIAFVDTETGELQERRLEHGEAAEKFYRDLAAQGMNVRVGMEASGHARWFERLLAELNFELWIGDATEIARKRERKQKTDRQDAQHILQLLMEHRFPKIWVPSWENRDLRQLLWHRHRMVQMRTRIMNQLQAVALNEGLRCKKRLWRQHGREQLESFRLAPWASRRREDLLELLDRLNPTIAELSQSIDQEAEKFPEVRWLMTHPGVGPLTALAFVLIIGRADRFQCGKQIAAYLGLVPLEDSSGNRRRLGHITKQGSSMLRFLLVEAAQVTVRSLPEWRSKYFHLMMRRGRKIAKVAMARRLAIRLYWMWRKGWDYEQVEKFGSHAGTLGTGRGVQ

SEQ ID NO: 454355 - protein, 346 aa, unidentified
MTIVGDRPVITGGVDTHADVHVAAALDRIGGLLGVGEFPATAAGYADLLEWLGEFGSVALVGIEGTGSYGAGLARYMAGAGVRVVEVDRADRQDRHRQGKSDPLDAVSAARAAQSGRASGAPKGRDGAVEAIRALMVAKRSARHERTQAINQARALILTGPDELRARFARHSTAALAAAIAALRPRPGDVPGYATRVALRELGRRVQFLDAQLERLNELIGPLVTARAPGLLSLHGVGPDTAALLLVAAGDHPERLRSESSWAHLCGVAPIPASSGKTSRHRLNRGGNREANSALWRIVITRLKSHPATLAYAERRSKEGLSKKEIIRCLKRYVAREVYHQLRDGA

SEQ ID NO: 454356 - protein, 341 aa, unidentified
MPIVGGLDIHRSQVTFDVADTVTGEAWRGQVRPADREHLRAWLAGFAGQAGDLAMEGCTGWRYVAEEVAAAGLRPHVADPAELAGQRGRKRHAKTDRADARFMREQLARGRLPECWVPPPRVLECRALLEAYHDLRQDHTAWVQRIQAALFHQGAPRLAALGTADGQARLAAAAARLSPAGQAQVATALQVTAVLEERLGELRRRLASESRHLTGARELQARLYGVGPVTALALACWLGGAGRFSSSRKAVRFAGLDVTVYSSAGKRSPGHLSRQGPAVLRWCAYEAGKAHARASAPDHAYYAQVRERIDGKRAALSEARKIVRQAVHVLAGLGDDALAPC

SEQ ID NO: 454357 - protein, 387 aa, unidentified
MVNNSLIGNAGVGEVSEASRADTSRRREFDRAQAHEAVTEREPRRRRGTSPNSRLSRPCSAQPASSHLQVREKTMSELIYVGIDVAKETFHVAACPNILKTSLPNTLDGHRQLCRMLKDHTIALIVLEATGGYEKPIAAELLDAGLPVVVVNPRQVRDFANGLGQRAKTDPIDAQVLAKFAQIVQPAPKTHSTPQTAELAELVRRRRQLNDLRTQESNRLLMIHHPKVKKSIKKMIKTLDFQINEIDQLIREHIDADNNFKNKDRILQSTPGVGPQTSAMLIANLPELGKLNRQEIAALAGLAPYDRSSGKYAGHAHIWGGRKDVRSVLYMAAFTACRFNPAIRALAERLRQNGKAYKVVITACMRKLLIILNTMIRNQTLWSLEKL

SEQ ID NO: 454358 - protein, 408 aa, unidentified
MQVLYTRCAGLDVHKDTIVACVRCVSPPMHQEVRSFGTTTTQLLELADWLGEHDCTHVAMEATGVYWKPVWHVLEAEFELVLANAAHIRNVPGRKTDVSDAMWIADLLAHGLIRSSFVPPQAIQQLRDLTRTRKQLVREVSQHSLRIQKVLEDANLKLGSVLSDVLGKSGRAMLDAIVAGQSDPALLAQLAQGTARNKSAELREALRGRITEHHRTMLRLHLQVIDALQRTLAELDAAVGKALAPIRQRARLLTTMPGVSDLTASVVVAEIGVDMTRFPSAGHLISWAGLCPRSDESAGKRRSTRVRKSGTWIKTTLVTAAWAAVRVKTSYLRAQFLRIKARRGAKKAILAVAASMLTAAYHMLRDGTEYNDLGANHFDHQDRTKTIRRLMKRLQDLGCDVPVSVHTG

SEQ ID NO: 454359 - protein, 336 aa, unidentified
MPIVGGLDIHRKQVTFDYLDTETGQVRRGQVSPAGREHLRAWLARFAGHRDVAFAVEGCTGWRYVAEELAAAGIAVHLAEPADTAFARGRKRHAKTDKTGCRHLRMLLAEGRLPECWIPPGHILECRALLELYNGLRRERTAWAQRIHAVLFHQGAPQLSQSALRTEQGVAELRAVAAARLSPAGQLQVATALEVIDALEARLHVVRHQLLDAARHLAGARALAARLYGVGPVTALAITCWLGGAVRFAGLDITGYSSDRKGPPGKLSRQGPPVLRWAVYEAGKAHARTSAPDHGYYAAVKDRKNSKRACLSEARKILRQAHHILAELGDDALAAG

SEQ ID NO: 454360 - protein, 322 aa, unidentified
MQGKMTSVGAAQAVYAGIDVCKAWLDVYLHPIGQSFRVPNSKDGCRSLASKLSSAAAGLVVMEATGKLHRLAHRLLSEAGFAVAVVNPSRSRKLAEALGMLAKTDKIDARVLAFYGAALGPSPTPIPAKSLAELQELVLARQAAKAEETALKNRIGAAESRVLKGLLEAQLKAHARLLARLEAAIAALVAKNAGLKRRCEILASIKGVGPIAAVTLVACLPELGRVSGRQIAALAGVAPVACESGDMKGLSRIKGGRPHVRTALYMPGLTASRCNPDLKAFFCRLREAGKPPKLALTAVMRKLLVLANTLIREDRHWTPDYA

SEQ ID NO: 454361 - protein, 339 aa, unidentified
MALADSAPGYQLFVGVDIAATSFTAAWTLSSPARERARTFAQTPDGFAAFQAALATTNVEPAKTLIVLEATGSYWITLAVTLHQAGYAVSLVNPAQAHAFARSLPRRAKTDALDAQLLTQFAAERQPSTWTPPEQVYHELRQRLLVRDGLLTMRTQARNQRHALTPWPVHIAGALEALDGVIAELDTRIVTLEDELATVLRDGAWAESADLLGSISGIGLVTTAWLLVATLNFTACHSAESAASYAGLVPLARESGTSVRGRACIGHGGNARLRTALYMATLSAARCNPAIRAHYKRLRAAGKPSKVARCAAARKLVQLAYAVVTKKQRFDPDYGTRQA

SEQ ID NO: 454362 - protein, 407 aa, unidentified
MDIASEIHYARAFNNRGIEVGKLIRFTNSEEGFIAFETWAEELKVKYNKNQVIVGMEPTGHYWFNFAQHLKDHGIKIVLVNPFHVKRSKELDDNNPTKNDRKDPKTIAMLVKDGRYMVPYIPEGIYSELRTAMETRWQIVKQLNTIRNRVKRWISIYFPEFNTVFGDWEGKAALIALKEFPTPARVVEIGVEGIVSYWKKEKIRAVGKRRAVELIEAAKKSIGIREGLAAANNELLTLLEDYEMKIKQYERIMALIEQLTLQIPGMEEILKIKGVGLTTAAGFIAEVGDISRFEHPKQIQKLAGLSLKENSSGKHKGKTAISKRGRRRLRALLFQGIMPIVATNEEFGELHRYYTTRDKNPLKKKQSLILLCCKLIRIFYALLTKKVAYDPQKMMSDIKRPILQEVA

SEQ ID NO: 454363 - protein, 343 aa, unidentified
MPLYVGLDVSQKTTAICVVDERGERRWRGTSATDPTAISALVIRHAGADAKVGVETGAMTPWLVHGLRKTGLSVECLDARRVKAALQMRLNKTDQNDAEGLAQVVRTGWYRPVHVKSLDAHRARALLGARAQLVGMRTRLSNMIRGILKTFGLLPGSGRGQRFDRHVEMLLEGEPDVGLIVRPLLETWRQVGDRIATFDKAVQRQVRADPTCRLLMTVPGIGALSSLIYVSTVEDPQRFSRSRAVGAHLGLTPRRYQSGEIDRSGRISRCGDGLARTLLYEAAIVILHRVKRASHLKDWALAIAQRAGPGKARVALARKLSVILHSVWRSGEPFRWSADLTAG

SEQ ID NO: 454364 - protein, 350 aa, unidentified
MAIVGGFDVHRKQITFDYVDNDGLVQWGQIRPATRKTLRSWLAKHCPEGAGEFALEGCTGWRYVSEELTAAGVGVHLGDPAEIAALRGPKKRAKTDRADARLLRTLLVEGRFPESWIPPAHVAEIRALGRLYCALMEERRGWQQRIHAQLFHQGCPPVKALLSEPGREVLVAAELSAAGRQYVDTALRRIDELTAEIDPLRMQLVRFARRQSGCRVLQRHYGVGWLCAAIIWAEVGDPRRFSSSDQLVRFAGLDVTVYSSDGKRAPGHLSRQGSPELRWAAFEAAKCAARRGSPDYAYYHNLAAKHEGRNGKNPTLAVERKILRRCYHTLRELGDAVLAMPIADAEEVAA

SEQ ID NO: 454365 - protein, 332 aa, unidentified
MGEVIRIGLDTSKHVFQVHGVDGSDRVVLSRQLSRGQVEKFFAALAPTVVGLEACGASHYWARMLGEWGHEVRLLPPQYVKAYVKRGKSDRIDAEAICEAMSRPSMRFVPVKSADEQAAAMVLSVRDMLVKQRTMLVNAIRSHAAEFGVIGAKGVGRIADVLARAREGLPKLAWDLLAVLAGQLEVLEIQLSKTEKQLRAWHRENVRSQQLATIPGVGPVGAMTMVLRVPDPTVFRSGRHFASWIGLTPREHSTAGRQRLGKISREGDEALRRLLVVGATSVIKLAQRGRGPAWLLALLKRRPAKVVAVALANKMARIAWAMMVSGQVYRAR

SEQ ID NO: 454366 - protein, 437 aa, unidentified
MKKKIQYHPLDVQQISAQTAQEHFPAGSRVLVGVDVAKRHFVAALCDAAGEAKLHVRFELPGQMHDLVQRLRELSDSGRTVEVVMEPTGTYGDTLRFHLQSHDIPVFRVNNKHVHDAAELFDGAPSKHDAKDASVIGWLHAQGRSRRWMPLDADRRDMRALVRQRDLYDDPLRRLISQMEPLLARHFPELEQLFDLSRRKTPYRLLEHFGSPAAIAATQAEPLGVLLRRYARRTKHDDVLALLRAARTTTGVPMQPQEVELVRSIATEVLRLMTLRKQVDDRIAEHCHQLEVLQAMRSCLGPVTAAVLFAYLGDPRTYSSAAAFEKAAGLNLVESSSGTNPRAADRASRRISKRGLGIVRKYLFLAAMRLVQTDPVARAWYQQRRAFQGGQKIKALIAIERKLCRALFHVAKGQPFDVNRLFDARRLPTMPEAQEAA

SEQ ID NO: 454367 - protein, 321 aa, unidentified
MADHSMKVAGIDTGKAELHVCLLPDGTQFKVGNDTGGIAKLVAKCVEAGIRRAGIEATSIYHRAAAKALRQAGIEVAELQPRQARGYAQALLQWSKSDTIDAAVIARLTRALDEVRPAPDPKIEAFAEVLTYVEQLEERIAWLKTSRERYANARFKARIAADIKALEKRRRTELKRLEAAMRKDQILATRLDLLLSIPGVAERTAIGLLIRMPELGTLTREAAARLAGLAPCDDDSGQHKGERHIHGGRSRLRRTAFMAAFAAALNWNHDLNIFYKRLRQRGKAHTAAVVACARKLIILANAIIARGTPWEKQRGMPCPAS

SEQ ID NO: 454368 - protein, 344 aa, unidentified
MFFCGLDVSLRETAICIVDADGKIMKELKVASDPNAIANAIRDSGFVCEKVGLESGSTAAWLQAGLVALEFPAICIDARHAAAMLQAGLRNKSDRNDARGIAQLIRMNAYRPVWVKSERSQRLSALFTASNTLQDQLVRIENVVRGLLRCDGVRLPLGRRHFEAEVRNRVGDHGEIMATIEPLLVARAELIRQRSVFDQRIIALARRDQVCKLLMTMPGIGAHVALSFKAGIDDPGRFRRSRDVGAHFGLTPRRYSSGEVDLSGHISKMGDRHVRHMLYVAAQVTLRHDQGLWSSMKAWAMNVAKKRGLAKARIALARRIAVTLHKMWLTGEPFHWQKPGAAMA

SEQ ID NO: 454369 - protein, 317 aa, unidentified
MRASAAFFVGIDVSKEQLDIAVRPSGESWTVAHEEASLSALVARLRDLAPTLIVLEATGGWEVPVTGALAAAALPVAVVNPRQVRDFARSTGLLAKTDRLDAQLLAQFAEVLRPAPRPLPDAQAQELTALLQRRRQLVEMLTAEKNRLPLAARRIRPQLQAHIAWLHQQIAQFDEDLRQLIRSSPLWREKDDLLRSTPGVGPVLATTLVAALPALGTLSRRQIAALVGVAPLNRDSGTLRGRRTVWGGRAQVRAVLYMSTVVAVRHNPVLIAFYQRLRAAGKAPKLALTACMRKLLTILNAMLKHHRRWAPVRAQHA

SEQ ID NO: 454370 - protein, 408 aa, unidentified
MTVVGIDVSKGKSMVAAMKPGGELVTTPYEVKHSGIELSHFALDVLCMEPDTRVVMEATGRYHEPVAALLHSEGIFVSVLNPLLIKQSGAGSLRKVKSDPKDALKIAKYGLDNWSTLREYTPMEAIRQQLKLCARQCDLYSKNIVMLTNNLISLSDKTFPGVNELFSSPEKENGHLKWVDFYRTFWHCDCINRMSPDAFEERYKKWCKRKGYHFSADAADALYAASCGLYTTLPRDNNAKLLVTVATDQLIALRENQSKLETEMLNLCKQLPEYETVMAMYGVGKSTGPHLMAELGDIRRFPHRSSIVAFAGVDPGVVGSGKMQLSSVATSKRGSPQLRKALFQVVSAYVKRKPENEAVYQFYAKKRDEGKPYYVCTTAAANKFLRIYYARVKECLNAAESATQAEEG

SEQ ID NO: 454371 - protein, 413 aa, unidentified
MNDAKYIGLDVHQATISAAVLDSTGRLVMESILETKAATFLQFIRGLGGSLYVTFEEGTCAAWLHDLLKPHVTNVLVCDPRKNSLLKAGNKSDRIDARKLAELLYLNKLQPVYHGEHGLRTLRELARSYLALTRDLTRVMNRLKALYRSWAIPCAGQQVYAPRYRSEWLGKIREAGVRRRAELYYQQLDALNILRQEVRRDLLTESRKHSATKWLRQIPSIGSIRAALLIALIQTPHRFRTKRQLWAYSGLALQTYSSGEYRFVDGQLKRSKKLLGIRGLNNNHNHDLKNIFKGAAIRAAVVPGPFQEFYAASIARGRKPSMARLTLARKIAAITLLVWKKGVGFDAEHLKPQAARASVGIRPSLVSSRWWPISSFGRSGSRVSIRNPVRPNTCSGTESLDKPYAPSDNQKKL

SEQ ID NO: 454372 - protein, 413 aa, unidentified
MDVLHSRCCGLDVHKSSISACILLRESGRVQKPQRRFGAMTQELQELAEWLRQFGVSQVAMESSGVYWKPVWNILEGQFTVVLANAQHIKNVPGRKTDQKDAEWIAQLLQYGLLRASYVPCEIIRDLRDLTRMRASLSQEASRISSRIQKVLEDANVKLASVATNVLGKSGRAMLEDIISGEDDPEHLASLALGHLRVKIPQLRLALEGKIRSHHRFLLRRLVDQIQFVEHEIALLDERLEDIGRQRPELAQAVARWDTIPGIDRVAAWALLAEIGDNMGQFPTADHLASWTALCPGNHESAGKRLRGTTRQGSPWLCRMACQCAWAAARTKNTYLSSQFRRLAARRGKKRAIIAVAHTLIVIAYHLQKKQSNYDDLGGNYFDRIHSDGLKRYLVKRLEQLGHKVTLEPIAAA

SEQ ID NO: 454373 - protein, 388 aa, unidentified
MSQPNDLSRSLVALDQDSTIIAVVEMSQSSWLVGGVLPGIERQPRKKLEPSPERLLALLHRWRDESVRAGRTITRIAVAFEAGRDGFWLARWLEARGVEAHVIHPSSVAVSREHRRAKTDRLDTELLKRGFLGWLRGERGHCSMARVPTIAEEDAKRPNRERECLVKERTRLVNRMKGTLARLGIRHFKPTLRQAAERLATLHTPEGTPVPPNALAELHRDVARLGFVVGQIKQIEKARQKRLEQPESESGPHAKVRLLARVVGIGIETADMLVHEVLTRRMRDRKAVARYAGLTGAPDESGARRREQGLARAGNARVRRGMVQLAWRFLRFQKDSALALWYQARTADRRAGTRKTMIVALARKLLIGLWRFVTTGELLEGVILRPAG

SEQ ID NO: 454374 - protein, 295 aa, unidentified
MGDMSWIRSITVQTPNTMKVQCVGVDIAKNDFKVAFATKGEDNKLSCTTAKKFDNAKTGFNQLVRWATSEMDKNAPLVFLMEATGVYHEELAHHLHRAGKQVHVVLPNKFKHFAASLNSKSKTDAIDAKLLARFGVEREHRPWNPAELVIKRMRDFSRYRVQLQEQKTAITNILHSKDYAHGVPADIKKSSKKVIAVLEKEIAILSKEMEKVVKSDPEIEAKVNKLRTIPGCGITTVAAIVAETNGFKEFKSAKQLTSYAGYDIVHNESGTSVLSKTRISKKGNRYMRHRCTCRP

SEQ ID NO: 454375 - protein, 390 aa, unidentified
MQVTADRPEAPSAIRSDLGAIFVSLELSRSIWLITSLSSGSGEKMSKHSVPAGDICALMARFSELKQKALARTGKLFPIIVIQEAGLDGFWIHRMLQNEGIESHVVDPASIATSRRRRRAKTDRIDGEALLRTLLAYKRGEPRVCAMVKAPTPEEEDRRRLCRERKVLIAERVEHVNRIKGLLFSQGVSGYEPLRRNRRQRLDELKTGDGRVLPDHLKAQISRELDRFELLIEQIKAVEAERDALFAAAKAAAPTPAPVTMLLDIKGIGPEFAAVLWSEGLFRHFDNRRQVASYAGLAPTPWQSGSVDREQGVSKSGNPRLRTTLIQLAWLWLRHQPQSALAQWFEERVTRNGGRFKKTAIVALARKLLVALWKYVSAGVVIEGAVMKTA

SEQ ID NO: 454376 - protein, 409 aa, unidentified
MRYYVGVDWADQTHAVWVVDERGTKVAMRTVPHTAEGLSEWGRELDEWRAQGIELWAAIERPEGRVVDFLLDHGVVVYPVNPKALDRARDRFRQSAAKSDPFDARVLAEFLRTDHAHLRALRPSSEAAQELKLLTDDYQRQIRQQTRLVNQLTTTLKAYYPRGLEVAELTTALAREFLQAYPTPATLTTLTERQWQRWARAHRLSETRTQELWAVLQRPQLPVPAHVVRAKARLMESLVAQLTVMMEGVGAYREAIEDFFARLPAAQWIRTLPIGDHGITAPTLWARLGDAPGRWESFRHLQAQAGTVPVTIRSGKQHVVRFRFACDKSLRYIIDHVAFLSLRWSEWARGYYAAQRARGHSYRQALRALSAKWLKIIFVMWERRVPYDEQYHLAMMTRQQLRQRQRKVA

SEQ ID NO: 454377 - protein, 417 aa, unidentified
MEIVHSRVAGIDVHKKQVTVAVRTPGKRGRQQQVRRYATFYAALRELTAWLTELGVTHVAMEATGIYWRPVWHALAEAGSLEVLVCNAAHVKNVPGRKTDVGDAAWLAELLEVGLLRGSFTPPEQLVAMRDLTRYRASLVHERTREIQRLCKVLEDGGIKLDSVASEPLGVSARLMIEALIAGERDPQVLAAMARGRLRKKIPDLAQALGGRFNDHHGLMCQLHLDHIDHLAAAIERVEAEVEKMIVPFELPRRRLCTIPGIAGRVSAAIISEIGVDMSWFPSGAHLASWIGLCPGNHESAGKRKTGKTRKGNPYLKSVFVEAAWSAVRVDGRLKARYQRLVRRFGGHRNQVAIKKAIVAIAHTLCVIVWHILHRGTDYRDLGADFYLRRDNPDVRKNHLVRQLQELGYSVELTLAA

SEQ ID NO: 454378 - protein, 285 aa, unidentified
MSQEKYIGMDVHQATISVAVMDAQGKLIMECLLETKAATIVEFIQGLQGTLSLTFEEGTSAAWLHDLLKPHVSRLVVCDPRKNALLKDGSKSDRIDARKLAELLRTHQLRPVYHGEHGVRTLKELGRSYLTLTQDVTRVMNRIKALYRSWAIPCSGTAVYAPRHRAEWLAKIVEPGVWVRAQRLYQQLDLLQPLRQAARHDLLSESHKHPAVKLLRQIPSIGPIRAALLVALLQTPHRFRTKRQLWAYSGFAVETHDSGEYRNVRGKLQHNRERITVRGLSDNYN

SEQ ID NO: 454379 - protein, 343 aa, unidentified
MQSITTIGLDIAKSVFQVHGIDAEDKVIIRRQLKRRYVLAFFQKLAPCLVGIEACALSHYWSRELKALGHTVRLMPPAYVKPYVKRQKNDAADAEAICEAVTRANMRFVATKTPEQQSCLMLHRTRHLFIRQQTAVINVIRAHLAEFGIVAPVGRKGVEELLDVVADSNDERLPEVARACLAALGTQLRSLKAQILGFDRQIMAWHRSNETSRRLDAIPGVGPALATALVASIADPKAFRSGRNFSAWVGLVPKQHSSGGKDRLGSISKQGDRYLRSLFMAGALAVIRYAKIHGIKHRPWLTALLARRPTKVAAIALANKIARMAWAMMARGERYKEPIALAA

SEQ ID NO: 454380 - protein, 451 aa, unidentified
MMKSKRLSPERDFVPTHPNAAAIDIGSRMHVAAVPPDRDPVPVRSFGTCTGDLKQLADWFERCGVRTVAMESTGVYWIPAYELLEQRGFEVVLVNARDAKHVPGRKTDVSDAQWLRRLHEYGLLRASFRPKGELAALRAYLRQRERLLDYSASHIQHMQKALMQMNVQLHHVVTDVTGETGMGIIRAVVAGERDPAVLATHRDRRCHASEAEIAAALAGNWREEHVFALGQALELYDAYHAKVVECDLRIEIVLRRLRDAAAKPAGRLPPARHRDKTANAPTFDARAALHAVLGVDLTQIHGLGPSLALKLIGECGTDLSAWPNAKHFTSWLCLAPANKISGGKVLSTRTRRSGSRAAALLRLAAVTVGRTQTALGAFYRRLSARVGKAKAVTATARKIATLFYNTLRHGIDYADPGASYYEDRYRARVLANLRRRAKSLGYMLHEMPAPG

SEQ ID NO: 454381 - protein, 406 aa, unidentified
MNYLGIDVSKSTSRYVILDNDGEKVSKPFTLHNDQNAFTKLLEQFKELNLKPDNLLVGIEATGIWWENLYCFLTEQKIKIIVLNPHQTNKFREALRLKAKTDDLDAYVIAGLLRSGEYAASYIPEETIQVLREIVKLRHQLVTSRQSFERQVHALLGLLFPEYEKTAIKNPFTISSLAILKAYPTAKHLAEAKPKNIEKIVRHIKGNNLNIDGIQTLIETAQNSIYSGRAKDARGMNLNILLTQVETLLNSIAQLDQRMNHILSPQNPDDPNSFPGANLLSIPGIGPKTLAAILSVVGADGHAYPDGKSFIGYIGFFPKIYESGETRRDNVISKRGPAYIRRALYIAAVACLKHNPEFKALYDRKISQGKTAKQALICIAKKLAHLCLSMLKSGESYNPSRVFMPV

SEQ ID NO: 454382 - protein, 343 aa, unidentified
MEYYVGLDVSLKQTSICVVDQTGSVVREGVVDSDPEAISVYVRSKAPDAVRVGLETGPTSTWLWTELKRLDLPVICIDARHAKAVLKMQINKSDRNDAIGIARIMQTGWFKEVHVKDIDSHSVRALLASRALLVKIKRDLENHVRGLLKNLGLVIGRAKFNVFAVRAEELIEGRPELIAAIRPLLEARNAVGQQVSELDRKVMRLARHDAQVRRFMTVPGVGPITALAFKATIDDPARFARSRSVGAYIGLTSRRHASGEVDWSGRISKCGDAMLRSYLFEAAGVLLTRVPTWSAVKAWGMKLAKRNGLRKAKVAVARKLAVILHRMWIDGTEFNWSKKEIAA

SEQ ID NO: 454383 - protein, 274 aa, unidentified
MPMSDYSYFCGIDLAKNHFSLHAVDQNGKVILHKSVTRSKLLTTIANMPLMRIGVEACGGAHYWARTLNKLGHDARIMAVKYVIPYRTKGKNDLNDAVAICEAVQRPSSRFVPVKSPEQQAILSVHRMREHWVRERTALMNRMRALLSEFGLIIPVGRSSLMKHVPLMLEDAENELPHLARTVIADAYHHLGELNQRIADTEQVFDSFAKVSANVQRVMKVRGIGPQTATAILASIGNGSQFDKSRDFSAWLGLVPKQYSTGGNTLRSDNQTRR

SEQ ID NO: 454384 - protein, 378 aa, unidentified
MKKQKKSVSPELTGTTQPSTLRYCVGIDCGSNELVCALLTMDSCQQVQTIAKKAFANSSAGFKALHLWASQKAKKQSVLYVVEATGVYHEQVAVFLYDKSEKIAVIQPNRSFNHTKTLQMKTVTDLTSSVVIADYGLRHSPTLWTKPKAVYLELRNLSRERAQLIEDKVSIMNQLHAIEHSAETNAKSIKRKQALVKFLLAQIKEIEKELERVPEKDAELKAGVSYITSIPGIGELSAFVIIGETLGFNGFTSSKQVVSYAGLDVIKKESGTSVRGKSRISKRGNKNLRTALYFPAMSAIKCNDHHKNQLLRITEKTGIKMKGYVAIQRKLLILAFELWKKQEIFDPNYVHHTQKKSERSLLTAPTVLMSSATESIAV

SEQ ID NO: 454385 - protein, 325 aa, unidentified
METKKLCCGIDVSHTKLDVCYQNNLGELFHLQVGNNNSGFQKIIEHTGVGYHFVMEATGVYYIRLAFYLHQQGCKQSVVNALSVKRYIQMHLERNKTDKKDAAWICRYAMEQCPLYWEMPDSAYFESKQLYNTIREYTEQIKRINNQLHSLRLLPVPSKDTIKSLEKIIVCMEKEIKQLEQKLQLLLVQWQPEQLKNVSSIKGIGKRAAAMLIVFTQGFKHTQSHRQLISFAGLAPTQYSSGSSIQGKPRIYKRGGKNLRDVLYMCSMNAMKTNAACKTLYERLRANGKTGKQALIAVCNKLLKQVFAVVKNNTLYQPNYCSAKP

SEQ ID NO: 454386 - protein, 287 aa, unidentified
MKYHCFSAGNSVSCLMINKYLFNQKGVSTMKYREINSEFYCGVDVHSKRSYICVLDNTGKKYLNRSMVNNFQDFKEVLYPFLPNVVVGCESTYSYYWLADGCHEHRIPFYLGHALYMKAISANKQKNDKLDARTIAELLRTNFFPEVYPYPREMRPTRDLLRRRHRLVRIRAEAYSHIQYETHNIKRFPRHQNYASYCRVVRPQQMSNGKVTGRKNMNMGNPYLKWAFNSIIISAQQSSELINRYYQKLESRYGRSNARARIAHKFNTAIYYMLKNSQPFDEKRFVP

SEQ ID NO: 454387 - protein, 340 aa, unidentified
MKITTFGLDLAKNVFQLHWVEPETGEVKRRALKRDQMVKFFAQRSASVVAMEACGSAHYWARKLIELGHEARLIAPQFVRPFVRSNKTDAADAQAIWEAAQRPERRFVAVKSVHQQAVLMLHRVREQRVKMRTMQINQLRGLLYEFGVILPAGRHKAMPQVTQALARLEDTLPAMALEVLREQCASIEALSAQIEEIERKLAAWRKEDEAAKRLMQVPGVGLLTATAAVATVGDAKVFSSGREFAAFLGLVPRQSGTGGRVKLLGISKRGDGYLRRLLIHGARAVITHAKARDPWVEALLARRPLNAVVVALANKMARTIWALLAHGRHYEPRGQALGCA

SEQ ID NO: 454388 - protein, 402 aa, unidentified
MNCVGIDVSKGKSMIAVMRPFGEVVVSPFEVRHTASELSELARLLKNLDGETRVVMESTGNYHAPVAWLLHGAGFYVSVVNAMLVHDYGNNSLRRGKTDKKDAVKLANYGLDHWLTLPRYVPEEDTRLMLKTCYRQYQQYSKVQTMLKNNLISLLDTAFPDANRLFTSPPRADGSEKWVDFVATFWHCECVCGLSKKAFTAKYQKWCRKHGYNFSQDKALDIYASACGRFGVMTKTNTAKLLVEQAISQLQTTSAALAALKQEMQSLAASLPEYPVVMEMFGVGPTLGPQLIAEIGDVRRFHSKKALVAFAGIDAPPYQSGQIDVRSRSISKRGSASLRRTLFLVMGVLLQCAPMDEPVYQFMNKKRSEGKPYRVYMMASANKFLRIYYASVKAYLDSLEHD

SEQ ID NO: 454389 - protein, 386 aa, unidentified
MGKSITSSVYVGLDVHKDSIDIAVAEAGRDGEVRHVGSIGGDLVALDKALRKLISRGAPLHIVYEAGPCGFVIWRHLSAQGLHCEVVAPSSIPKRSGDRVKTDRRDAILLARLARAGELTAVRVPDVADEAVRDLVRAREDAVREQRSARHRLKALLLRNGIGYAGKSAWTAAHLRWLATLKMAHATQQIGFQEYLHAITEATARIVRLEQAMRDALPEWTLRPLVQALQALRGVQLIASMTLVAELQDFVRFANPRQLMSYVGLVPGEYSSGPKRRQGSITKAGNSAARRMLVEVAWHYQHSPRVSPIIAKRQDQLPKEITDIAWKAQLRLNAKFKRLTARRVMKTKAVVAVARELAGFVWAIGREVQTSGWQGIEIQAATAAAH

SEQ ID NO: 454390 - protein, 416 aa, unidentified
MKIVRPICCGMDVHKNIIVATIGITNKKTRITEYIQETFSTLNPDLLNLKQWLINHKCFDACMESTGKYWIPIFNILEDEINIYLTHPKYVKAIKGKKTDKKDSKWICDLFKHDLIKFSFIPPKEIRALREISRYRYKLVGMRSSERNRYQNCMTVSNIGIGSVFSDPFGKSAQAIMKEVLESDIIEDEKILKCIHGSCKNKDKILDSIKHCNIETDQRFKMNESMTHMEELQVHIDNCEIEMMKRAAPMFDQFMHITQLPGISTLSAILIISEIGVDMKQFESDKQLTCWAGLAPANNESANKKKSVRISKAGQYLKPLLVQCALGAIKDKEGYFGIKYSRIKKRRGHKKAIIAIARMMLVSIYHMILTGETFNPSDYESFRNPKPPIKQQDLTEESAIEFLKKSGFDVSKLTKQ

SEQ ID NO: 454391 - protein, 389 aa, unidentified
MKIYVGIDIAKLNHFAAAISSDGEIILEPFKFTNDADGFQLLVSKLESFDKNSIIIGLESTTHYGDNLVRYLVAELYQVCVLNPIKTCQMRKNNIRKTKTDKVDTYVIAKTLMMQDDLRFVSFYDLDMMDLKALGRFRQKTIKQRTRLKIQLTTYVDQVFPEIQYFFKSGLHQNAVYALLKEAPSPKEISSMHMTHLANLLKVNSHGHFTKEQAKELRVLAQKSVGANDSAISIQITQTIQQIELLDSQLDKIEAEMTDIMKFNDSVIMTIPGIGYINGGMILGEIGDIHRFSNPNKLLAFAGLDPSVYQSGNFQAKTTRMSKRGSRVLRYALVNAAWNVVKNNATFKAYYDAKRAEGRSHYNALGHCAGKLVRVIWKMLTDELEFNLE

SEQ ID NO: 454392 - protein, 350 aa, unidentified
MIIIGADYHPGFQQIAFVDTDTGELQERRLAHREEAETFYRGLAQPGRTVRVGMEASGHARWFERLLAELQFELWIGDAAEIRTKRVRKQKTDRQDAQLILQLLLEERFPRIWVPSGENRDLRQLLWHRHRMVQARTRIMNQLQAVALNEGLRCKKRLWRDSGREQLESFLLAPWASRRRHDLLELLDRLSPTIAELTQAMEQEVEKCPEAQRLRTHPGVGALTALAFVLIIGRTDRFRCGKQIACYLGLVPVEESSGERRRLGHITKQGNSLLRFLLVEAAQVTVRSDQEWRSKFFHLALRRGRKIAKVAMARRLAVRLYWMWRKGWDYEQLKKFGSHAGQPGHRHGVH

SEQ ID NO: 454393 - protein, 443 aa, unidentified
MTNAMTDQSSAIPEPEWGGFLAIDWADKKHAWSLCVPGAPRREHGEIEHSPEAIHIWITELTTRFAGRPIAVCIEQSRGALLFALSKYGNLFLYPIHPAAANDFRKAVYPSGSKSDSVDAEVLLDFLLTHRNRLRLWRPDTEQTRELQFLVEDRRRMVDEKTRCLNRLTQRLKMYFPQVLCWFGSVDSVLVWRFLEQWPHLEALRKARRSTLKTLLQRDGRYSPPEIEGFWPTIRDAIPATHDAAVIASSILFVKTIVQQLQLLHETIREYDKRIGRLTETHPDFAIVSSFPGVGKALAPRLIAALGTQRERFRNANELQSYSGIAPVQESSGKQHWTHVRRACPKFVRQTFQEWAQHSVARCEWAHAYYDQHRARGKQHQAIVRSLAFKWIRILYRCWQNHTPYQEAAHSARLARRSSASVKDVEIVWKKTAGFSKLAALNP

SEQ ID NO: 454394 - protein, 334 aa, unidentified
MEQITTVGIDLAKRVFALHGVDAAGRVVLRSTLRREQLLEVMAKLPPCVVGMEAGSGAHDWARQLQRLGHTPKLMAAKFVSPYRRKGKNDGNDAEAICEAVSRPGMRFVPVKSLEQQALLSLHRVRQGFIVERTATINRLRGLLAEFGVVLPVRAVVVRREACKAAESLPALGRRAIEDLLAHLRTLDERIAAYDRELEQQARQCEPARRLMKIRGIGALSALAIVATVGNARDFRSGRQFAAWLGLTPRQHSSGGKTRLGHITKRGDAYLRCLLVQGARSVLHTASRHADRMSRWAQTLESRRGYHRTLVAIASKNARIAWALLSRNEVLRPA

SEQ ID NO: 454395 - protein, 344 aa, unidentified
MATYYIGADVHSNNTELAIEQRGRIVARYSVPTSIPAISAVLDSLQGKKILAMEEGPMAGWLYRNLHEKVDKLVVSEPRRNKLISSEGDRDDKIDSGKLAVLLRGNFLKAVHHTRDSHRAHLKHWINLYHDRVRDGVRDINKIRACCRMHGVRIPRKVVRNPVRRHAWLSELDNPVLKAQLHMLWIGYDATKEQVEIAKKQFSAYARKYPIIKSWCKIPGIGLIRATTIFAYLDTPWRFKNRAKLHRYCGVGLVRMTSGKDKKGRPKPARLKLPWAVNRRIKNAVLGAATSAIELRDNAFKEYYERMRSHGITPVNARHSVARKLVSTMSAMWKTGNEYDETLV

SEQ ID NO: 454396 - protein, 343 aa, unidentified
MGEVSTIGLDIAKSVFQIHGVDAGGAVVIRKRISRTKLLEFFATLPPCLVGIEACPTAHYWSRRLQTLGHTVRLMPPSYVKAYVKRSKNDANDAAAICEAVTRPSMRFVATKSEQQQSGLMLHRSRQLLVCQRTMLSNAIRGHMAELGIISAKGRNGTAELLKIIANEQDDRIPEAARFSLDILARQYAVVRAEIVAIEKRIHAWHRSSEESRRLEEIPGVGPIVATALVAEVGDWKVFSSGRSLAAWIGLVPRQHSTGGKERLGRISKQGNRHLRWLLVAGAMAVIRYARQHGTKRPWLARLMDRRPIKVAAVALANKIARMAWAMMVRGERFKEPKLLPAA

SEQ ID NO: 454397 - protein, 344 aa, unidentified
MSEVSTIGLDIAKSVFHAHGADERGVMVFSRRLTRGKLLEFFAVQRRCTVALEACGGAHHWARELQAMGYRVRLIPPAYVKPFVKRHKNDAIDAEAICEAAQRPGMRFVAVKSEEQQAAGLVFRTRDLIVRQRTQLINAIRGHLTEYGWVAPRGTAHMTLLAEMLEDDEMASSLPAEALPMFRVMVDLLTELDKRLAMLDREIARRAKEDKAARRLMTIPGIGPIAATAILALAPPIETFAKSRDFAAWLGLAPRQHSTGGKQRLGSISKMGERTIRRLLIIGGSSVVRQACRRGAPAGSWLERMLARKPRMLVSVALANKMARMVWALLTRKEDYRAPAVAAA

SEQ ID NO: 454398 - protein, 344 aa, unidentified
MQYIAFDVHKKYTWARVEDKSARVLRQERIDHGRGAVSAFLAECEANSPVAVETVGNWYWVVDEIEGAGCAPQLVNARLAKLMMGQVNKTDKLDARGLNLLQRNGTLPTVWIPPAEVRDARELPRTRMMLVGQRTQLKNRVHATLAKYGLSLPEVSDLFGKAGRKALARLMEQLPPNTTEATRAVLQQLDGLEQAITAVERRIAEVFDDTAENKLLRSLPGVGPTLSVIIATEMGDIERFGGAERFASYAGTVPRVHASGGKSYGGRVRMDTNPYLKWALVEAANAALLQGDRYGHVRRLYDRIRARRGHGKAIVAVARHLAEAAYWVLRKQQPYQEPRRSTRG

SEQ ID NO: 454399 - protein, 409 aa, unidentified
MIYCGIDWAERTHDVALVNDAGELLAKRHVTDDVAGYKILLDLLAEFGDTEDDPIPVAIETSRGLLVAVLRQGKRRVYAINPLAAARYRDRHSVSRRKSDPGDALVLANVLRTDMHAHRPLPDDSDLVRAIAVLARAQQDATWNRQQMANQLRSLLREYYPAALDAFAAWQNGLCRPEGRELLRLAPTPAKAARLTRTQIQAALKRAGRKRGIEAEAERLRKAFRTDWDHQPVLVEDALGKQMLALLGQLEAACTAADDLAKAVEEAFPQHPDAEVILSFPGLGVQLGARVLAEIGDDHTRFSDARGLKAYAGASPITRASGKKSSITRRRIKNDRLNHAGYLWAFAAPNGSPGAKAHYRRRRDERGDWHAAALRNLFNRLLGQLYHCLQHHKLFDEPTAFPAPLAAAA

SEQ ID NO: 454400 - protein, 362 aa, unidentified
MSISMIGLDTAKSVFQIHGVNEAGKVELRRKVRRSDLITFFEKQERCTVVMEACGAAHHWARILSGLGHTVKLIAPEAVKPFVKKGKKNDAADAAAICEAASRPNVKFVPVKTVEQQGILALHTARALLVKQQTMLANAIRGLATEFGHIVPKGLHNLEPLVALVDTDEAMPEQARQAVAELHKRFAELAKGIEALEKEIVKHARTDPTARRLATIPGIGPITASLIAATVVDISLFKSARQFAAWLGLVPRQHSTGGKTRLGRITKAGNKEIRKLLVLGATAMLGHAEGWHSAAGGWLRTILERRPARLATVALANKMARIAWARLAKVPASRLRLAGRPGEGVMTRNEVYRPQGGVAAKA

SEQ ID NO: 454401 - protein, 421 aa, unidentified
MPNIEIGVDFMVKENFIYVGIDLHKETHTAVMIDCYNQKLGEITFPNRPADFPKLVTKVKKCNTDAKEVVYGLENAYGYGRPLAVWLIDKGYFVKDVNTAISHRQAKHRGAMYRKSDSDDAGAIALATLNMLDKLPDACPNDAYWSLGQLVHRRDNIMKQRTRLVNQLHEQLCIAYTSYKQFFNDISRPTALYFWEHYPSRKYLKGKSVEDLRAELVPVSHNKCSTRTCEKILDAIAGDKVKNNAYQDARDMVTLSIVSDLQHYDKQLAEVDKMLEQMYKMLGCTLTTIPGVNVITAVKILAEIGDIKRFSNANKLAQFAGIAPLHLSSSGKGKDLATKQGNRRLQATIYFLAIQMVQISSKGTPRNPVVRAYYEKRKAEGKTSQQALICISRRLISIIYGMLKSGTEYRMPVMENTGETV

SEQ ID NO: 454402 - protein, 328 aa, unidentified
MHFIGNDVSKLTLDLACLDQKRRDGYQHCKLSNNPKGWDTLIQWVEKQTQAPLEDICIVMEATGVYHLKAAAYLSREGLNVIIVNPQQASQYAKSQNQQNKSDKLDARSLQQYGSQLKKYHLFTPVSPNISQLKALLSRMHQLGKDRQRERNRLEKCAFQEGSSFARTSIERTIKFNTSEQQRTQKQIDQLIKQDPVLKHDQKLLCSIKGIGKLTSQWLLPVLSTQRFNDAREVAAFLGLVPCHKTSGTSLNTRGRLSGRGDAILRAKMYMPAVSAMTHDPEMKAFYQQLLLKGKPAKVAITAVMRKLVHVCYGVIKHQTPYLENYAA

SEQ ID NO: 454403 - protein, 406 aa, unidentified
MKVYIGIDWSKEKHDAIFMNEAGQAIMYCQFSHMQSGFLELDDARRKLGVEPSACIIGIETSYNMIIDALWNWGYDQVYVLPPSAVNRSRGRYKQSKARTDRSDAWLIANLLRTELHNFHPWRPNTALTRQMSAQVNLVFSLTKESQRMANQLQAVLLRYYPVALEIFSGLNTLISLEFICAYPTPHQAAALTLEELRHFAKQQHYNHSECLPNYFVQLQKAYPQADVGTVASHQDIAVQLAKLLSNILRSKRSAITLLQHLFQQHPDCVIYQSLPGAGKLLEPALLVKLGDDRSRYPSASVVQALAGTCPVTDASGKRKKVYFRRACDRQFRQIAQQWARASTKESDWAAVYFQQARDRCRSDSHAYRCLANRWLAILWRLWQDRKPYDENYHLQQRLLHSKPIF

SEQ ID NO: 454404 - protein, 363 aa, unidentified
MNATAALPVVGVDLAKSVFQLAVADGSWRVVESHRLTRTQFERWFANRAVGLVVMEACGSAHHWARWLNGLGIEVRLLPAAYIRAYVKRNKTDAADACALLEAARCAEIVPVRVKSIEQQALQGLHRTRSLWMGTRTSRINALRGFCREFGIVIAQGSRLGVEQIGRVLADPHAAVPTLIRGTMTLLVEEIRLLEVRIAQLERELTALARQSPACTTLLSIPGVGLLSATAMVAATSGQVSHYRDARHFASWFGLTPKEHSSGGTRHLGRISKRGDRYLRMLLTHGARSVLRAASAAVHAGKTVDGLRQWALGVQHRSNHNKATCALANKLARICYATLRDGEPYGAARLNKKLTRTAFALPA

SEQ ID NO: 454405 - protein, 405 aa, unidentified
MEVIHPRVCGLDVHKNSITACIIIKRKKEIRTFGTMTDDLLELLDWIQENQCPIVAMESTGVYWKPIYNLLEVSDIEALVVNAQHIKNVPGRKSDVRDAQWIAQLLQHGLINGSFIPNREQRELRELVRYRRSLIEETARESNRIQKVLEGANIKLGSVASNVLGVSGRKMLRALIEGNLNPEILAEMSLGALRKKIPALQKALKGLVGTHQQFLLARQLDHVEYLEKQIEFIDKELAERLSPSSEEINLVMSIPGIGKRTAEQILAEVGTDMSRFNSDNHLASWAGMVPGENESAGKKKSARTRKGNKYLRSALVEAAKTVGRSKNFFGAKYRRIKARRGGNIASVAIGRCILIAVYHILITKKPFQDLGEDYHLNRKKDQEVKRAIKRIEKLGYSVEISELPA

SEQ ID NO: 454406 - protein, 331 aa, unidentified
MKEKEIMVGIDVSKATLDLCLLINNQSQLQQLKNSSKTVKSFFNKLIKQNKGVKISVCMESTGYYNWPCYEAFEDMEIELFVVNPLHLKRSMGLVRGKTDSIDATRIARFIALHKQDLKPTLIPRKQIRIMQALLAQRNRLVETKKKFNVPTNELVFVADKELSKQIERSSKKTIEQLDTQLTNIEELLNKLIENDIDLKRQYQFITSVQGVGKVLAWTMLVKTNEFRSINNARKLACYAGVVPFEYQSGTSILKKPRVSFMADKTLKKLLHLSAMRVIQLKGDLQDYYQRKVKEGKNKMLVLNAVRNKLVARICSTVNNKRNYEINLHLS

SEQ ID NO: 454407 - protein, 356 aa, unidentified
MPVYIAVDFHARQQTISYLTTEDGEIHRLRLEHRPDDPRHENVRVFYSQFEGEVIVGLESGGYSRWFEDMLEDLGHEVWVGDAKQIRLLAVRKQKNDRLDANHILDLMTTKRFPRLVRRSRYSCEILRQMGYRHKLVKMRTMGKNSLRAIAMGHGLTVRSPLHSEKGRIRFESLNLSTMEAVQAAGLIDLIERLTKEIERVEEWLAEQAAEDQKVSLLRTQHGIGLLSSLAVVHTLEPVDRFASARQITAYVGMDPVENSSADRRHIGSISKAGSKLLRFLLGEAAQVAIKKDTELKNFFCRVQKRRNTPKAIVAVAHKLLIRSFIMLRDQIDADEFYRCGLEARSSRAARRRSRA

SEQ ID NO: 454408 - protein, 321 aa, unidentified
MQEPTLFIGVDVSKAELVVSLGPEHRPRSVGNDATCIANWLREVPPGALIAMESTGRYHGLLAHLAHRAGLKVYVLNARDVYFYARALGTRGKTDGVDAGVIARYLAEHHEHLHPWQPASSVQQRLQDLLTRRAQLATQRSALKQIVGGVDVRDIDASGVYEALDALLDAMDQKVQELIASDARLRSGCQRLRTITGIGAQTSALLVTLFSRFEFANADALVAYCGLDPRPNDSGTRHGKRRLSKKGPSLLRRQIYLVGFSASHSKALKPLYESIRAKGFASTEAFVILGRKLLRVAFALWRGTESFDPQRLLPKNDLQKT

SEQ ID NO: 454409 - protein, 409 aa, unidentified
MELMYPTSSGLDVHKQFVVACVYVRNEQGKEEAVRKRFGTMTEELLSLVDWLKVQGISHVVMESTGVYWKPVYNLLHPHFDVWVVNAQHLAQVPGRKTDDTDAMWLTKLMRYGLLAPSFIPDEGQRDLRELTRYRTRLQQEKSRAVNRLQKNLEDANIKLASVATDIQGVSARAMIEALIAGNTDSQAMAELAKGSLRNKLPALTQALTGQVRDNHRFLLEELLTHIDHLNGRIARLDERITQLVAPHQSLIERLDEITGVGEQTAEIILAEVGPTVENWPTPAHLASWACLCPGNHESGGKRHSGQRRKGQTWLVAALVEAAWAASRSSKTYLAAQFHRLRARRGGKRAAVAVAHSILIIVYKLMANPADRFRDLGGDYFLSKNKEQEERRAVKTLQTLGFQVTLSAA

SEQ ID NO: 454410 - protein, 335 aa, unidentified
MKHYAGLDLSMESTQVCIVDENGRKVVSEKVESFPEAIAMMLERYGPVERAVIETGRMSPAICLGLRELGVPVVCIDARQAHQSLKAMKANKTDPHDAAGLAQLARTGFYKEVHVKSPAAHGVRSVITARSHLVEARVRLDNMIRGLCATFGYRPGAGQGKAFLERIMQAAHIPGLGDAIRSLLSVREELVEQIKEMDRRLRVIASQSQACEILMTIPGVGVQTSAAFAAAVDEAGRFRQSRNAGAYFGLVPRRHQSGELDWTGKITKQGDGAVRKLLYEAANSILTRSRETFALKTWAMKIAKRRGLKKARVALARRLAVIMHAMLRDGTLFQA

SEQ ID NO: 454411 - protein, 447 aa, unidentified
MKALPVLDPKAAAIDVGSETLHVSIAGDSPKVFGTFTGELERLRDWFREQGVRSVAMEATGVYWLYVYEVLEAAGLEVVVVNGRHVQNVPGRKTDMADCQWLATLHAHGLLRGGFVPPAAIRQLQDYQRLRGDHLIGAASQVQKMQQALERMNIKFHDVISDLVGVSGLKVVRAILKGERRPGELLALCDVQIQKKKADRVKESLRGCWKKEQLFALRQGLELWETYQQKIADCDRELETLLREMSGPQPPEGGNGSGVGIGPVVLSPAKPAGKNAPVIQRLQEMLARLCGGADATQIPGMSSALVLGLVSEVGVDMSCWPSEKHFVSWLGLAGGRKQSGKRKGSVKAHRNRAGRMFCAAARALGQSVDKALGGFYRRLRGRVGGLAANVALARKLALLFYRLLRYGAAYVEKGLKSYEARVLETETRLLRKLASKQGYTLIATTKT

SEQ ID NO: 454412 - protein, 312 aa, unidentified
MANLVYAGIDVGKDKLFVNIHLDSQVRDFPNTHSGLERLSRFLIKNAVNLVVMEASGGYERLPASDLRARGLSVAVVNPTYVRRFAQGMGTLAKTDTIDARLIAHFAFVKQPKPQQAKTVEEEELAALVERREQLVSLLSVEKNRLSKASDYSKASLQISIQFLTGQIASIETEIKALVAKSPERLARMRCMCSFIGVGDITAVTLLTEMPELGMESGKHIAALAGVAPINRESGKMKSKRRTYGGRARVRRTLYLAALSASRHNPIIRAFYERLLAAGKEKKVALVACMHKMLTILNAMLKKGELFNPEYS

SEQ ID NO: 454413 - protein, 452 aa, unidentified
MVKKKRKPKGLRICHPDAAGIDIGSNEHWVAVPADSTDNPVRPFGTFTSHLQQLADWLADCGVRTVAMESTGVYWIPLYELLEQRGFEVLLVNAAHARNVPGRKSDVLDCQWLQELHTYGLLRASFRPEAKIAELRTYTRHRQTLIEEAARQIQRMQKSLDQMNVQVHHVLSDLTSKTGMAIVRDIVAGIHDPQRLAQHRDPRCRASLDVIVEALRGHYQPQHLFTLQQALSLFDTYREHLATCDARIQTLLGALACDTPQLDTPPKPPKFKPTGNQIAIDVRNPLQRLLGGVDPLTIVGIGPLTALNLLSETGADMTRWPTEKHFVSWLNFSPGTRITGGKRISGKRPTSTNRASLILRQAASSIGRTRTALGAFYRRIAARRSKAVAVVATARKLACAYYRLLRYGGEYVERGADAAERDYHQRRLSHLERQANSLGFHLQPIESEAGVT

SEQ ID NO: 454414 - protein, 377 aa, unidentified
MSKVRWIGLDVHADTIAVAVAEPTGEVRALGVIPNRLESVRKLVKKLGPAETLRACYEAGPTGYVLYWQLTALGVRCEVVAPSLVPTKAGDRVKTDRRDAAKLARSFRAGDLTAVWVPDAAHEALRDLVRAREAAKRDQLRARHRLGKFLLRHGRRPATAMRAWSQRHLAWVHQVQFEHPAQEATRLDYVHEVDHVAERIARLERAIEAAVQTAPPSMRAVVAALQALRGVALVAAVTIVAEVGDLARFARPPQLMGYSGLGPREDSSGARVRRGGITKTGNAHLRRIVIEAAWAYRHRPAVGGALRKRQAPLSEAVKGIAWKAQHRLHGRYRTLLGRGKCHQQVVTAIGRELLGFIWAIGVTAAREQRPGASAVAA

SEQ ID NO: 454415 - protein, 342 aa, unidentified
MKYIGVDLHTTQLTICYRDELGAENINTVKISQIEEFLKQINRMDKVAFEATGNSLYLQNMLQTVMPLENIYVVNTLQFKLISKSVKKTDKNDARLLAEYLSKDMLPEARLRSESDNQIINLIETRDMLVSSNTAFKNQIHNILLKLGIKLKSSEVSGKKKRRNLVERYELAGVYKFQVEFALSNIEHNYAEIAKLEAKLEELKSTMKQVENLSSICGIGDKSAMGIKAIVGDINDFESPDKLAAYVGLCPRVNNSNETVCHGRITKRGNKLVRKLLVQCAWVSIRYNPLLKEFYTVLKKKKPAGKAIIAVARKLVYQIYYTLKYNWYFTNTENTEKEIKAF

SEQ ID NO: 454416 - protein, 336 aa, unidentified
MNIKRIGLDLAKQVFQLHAVDHHERVVLRKTLHRSQMLSFFIRLEPCLIGIEACGSSHYWARELTRLGHRVLIIPPQFVKPYLKGNKNDANDAEAICEAVSRPGMRYVAIKSEAQQSMQAEHRVRARLLRDRTALSNEIRGMLAEFGLALPVGLAALRRALPEILCQQEQWDDRFISLLCELAEELQVLDARLERYDRRLRQQGQEDDRIRRLQTIGGIGPVTASALVAAVGDAGQFKSGREMAAWLGLVPRQHSSGGKTRLGHISKRGDSYLRTLLIHGARAVLNASGHKEDRRSKWLQSVAERRNRNVATVAMANKNARIAWAVLSRGEEYRVV

SEQ ID NO: 454417 - protein, 391 aa, unidentified
MIYVGIDVAKDKHDCFITNSDGEALFKAFTITNNLDGFNELHQKIASVMDDVTKVKVGLEATGHYSYNLLGYLIDKGLPTYVINPLHTNLYRKSLSLRQTKTDKVDARTIASMLMSDVNLKSYSDISYHNEELKSLTRYRFDKVKERAKLKSSVSRLVCILFPELEKLVPTLHMASVYSMLSEFPGAKHVASAHLTRLTNLLSEASKGRYSKDTAITFREAARASIGSNMPAKSLELKHTIKLIQELDSEIDEIENEIKVIMDEINSPILSIPGINYRMGAMIIAEIGDFSRFDSPDKILAYAGFSPSTYQSGQLDGAYAHMEKRGSRYLRYALYNAAKYVCHWDPTFAGYLAKKRAEGKHYNVAISHAVKKLVRVIYHLEKTKQQYIKVA

SEQ ID NO: 454418 - protein, 403 aa, unidentified
MVFVGIDWAEAHHDICVVAAEGHVLAKRKVPEGLEGVGKLHALIAEHAEDPAMVVVGIETDRGLFVGSLVAAGYQVYAINPLASSRYRDRHATSGAKSDPGDARVLADLVRTDRHKHRPLAGDSNLAEAVQILARAHQGLVWTRQRQVNQLRNALREFYPGAVSAFDDLNTGDAVAILERAPTPIRGRGLSQAKIISALRQGGRERNLEAKAAQIQAQLRLPQLQAPTLLAEAYGHSVTATVAVIKQLNLQIATLEQELAASFEKHPDAEIYLSLPGLGVVLGARAMAEFGDDQTRFLHPKARKSYAGTAPITKASGTRKVVLARVARNRRLADACYQWAFSALTRSDGARHRYDALRARGQTHHQALRALANRLVGILHGCLVNRQAYSELIAWSALVEVAA

SEQ ID NO: 454419 - protein, 426 aa, unidentified
MKLEEKELEKPIRAWIGIDWADEKHDVSLYDVATGKQEALTIRQSPEALQEWLGQLRSRYEGGYVAMVLEQGRGGLLNALMGCEFLVLYIINPKSLSSFREAFYGSGATSDPVDAELMRDMVRQNASRFRAWRPDDVMTRSLRLLTEGRRNLVNQSTALTNQLTALLKGYYPQALAWIGTLDTAWACDFLEQWPTLQSLQASSRRQILRFYEKHPRVSLDLNEQLKQIQDARALTQDEAVLESSALMVQALVSQLRPLLASIAEFDRKIAMIFRKHPDRPIFESFPGAGAALAPRLTAAFGTDRDRFQAAIEMQELAGIAPVTEKSGKKSFVHWRYACPKFMRQTFQEFADHSRRWCKWAKAHYELLRRRGKSHNAAVRALAYKWIRILFRCWKDRQPYQDEVYTKALLKHGSPLSSLLAESVENP

SEQ ID NO: 454420 - protein, 386 aa, unidentified
MIEAVIERCAGIDVGKKFLVVCVMSGSLEAEPKTEIRKFGTIVAELEHLRDWLIQEGCSHAVMESTGSYWKPVFNILEDSVEVVLANAYDVQNRRGHKTDPNDSRWLAHLLRHGMIRPSFIPERAIRELRDLTRRRRQLVGERARERNRIQKILEDANVKLGDVLSDVLGLSGRLMIDALLEGRLQVEEIAQLAQRKAKQKIPDLIAALQRNRLTDHHRFLLRHALRHLDFLAEEIEALNIEIRSRLTTEQFRQKHALLQSIPGIQEEASAAILAEVGPNMAQFPSDAHLASWAGLCPGNHESAGVRKTGRTNRGNNWLRSILTQCAWAASNNKNSMLQSFFFRLSSRCGRKRAIVALGHRLLRVIYHVLLRDQPYQESNMRPLSA

SEQ ID NO: 454421 - protein, 339 aa, unidentified
MALYTGFDLHSNNNYLGIIDHEGKRIYRRKLRNNPEEILKTLNPFQKDIVGIVVESTYNWYWLVDLLMENGYKVHLANPAAITQYKGLKHSDDSSDAFWLSEMLRLGILPEGYIYPKDERPVRDLLRKRGHLVQTRTSLIMSLQNVIARNCGHRINVNDIKRLKQDMVHPLLEHNEDLALSGKASKETIDFLTRKIKEIESAVEKKTIHTNNYKHLLTIPGVGRVLGLTITLESGPMSRFPKAGNYVSYCRKVGSKWLSNGKQKGKGNTKNGNKYLCWAFSEAAELGRRYDQSMRSFFNRKMQKTHRMVAHGALAHKLAKAAYYIMRDGVPFDPDKLFS

SEQ ID NO: 454422 - protein, 339 aa, unidentified
MTPITRIGLDIAKGVFEVHGVNAQEHVVVRRSLRRNQVLTWFGKLPPCLIGMEACGTANHWARELSALGHTVRLIPPAYAKPYVRRNKNDAADAAAICEAVSRPSMRFVPLKTIEQQADSVTHKARQLLIKQRTMAMNSFRSLMAEFGIIAPQGPQHIGKLLTILADPEDTRVPAVARTALNTMSEMLSVLEKQVEALDKDIKVRIRGNATARRLDTIPGFGPILSSAIAAIVTNPRHFDSGRDFAASLGLVPRQDSTGGKTKLGPISKRGNGYLRRLLVNGATAVLNGKNARNDPWQAKLLDSKPKKLAAVALANKMARIAWAVMTRQEDFRPRAVAA

SEQ ID NO: 454423 - protein, 400 aa, unidentified
MLSIGIDVSKGKSTVCGMKPGGEIVYTPFEVQHTREGMSELVSLLRGSGEEVRVVLESTGSYHCPVVAALLENGIFVSVVNSLRMKRFCSQSIRRVKTDQIDAMQIALYGLAYWQELQPTRLPENTYRELQLLARQYYQMTSLLIKAKVDFNALCDQVLPGMQELMSDHAGRHKLSDFVLRYHHTAHILKMGETRFRKDYCKWAEKKGYRNHERMAALIFATAQNGIPVLPDAPSTQLVITEAIRVLHTVEASRDAILTQMQALAKTLPEYSLVREMPCIGDTLAPRLIAEIGDVRRFHSKRALIAYAGIDAPPYQSGKFSANNRHISKRGNRYLRKTGYEVMQSYVMHKPANDPIFTFIEKKRGEGKSGKLAMVAGLNKFLRVYYGKVTELYRSLPAIE

SEQ ID NO: 454424 - protein, 411 aa, unidentified
MRIIGMDIHRTFAEVVALEGTTSKAIGRVGLTRAQLSAFACTLQATDHVIVEATGNATAVFEVLSPHVARVAIANPLQVHLIAKAKTKTDKIDARVLAQLYAAGFLPEVWVPDEATLSRRRQVTRRNQLTKQRVRLKAMTQSILHAHLVPRCPHTDVFGIKGRAWLRAQWLPDDEREAIELHIAEYDRLTEAQHGVEREIARTALGDSHVKRLMTIPGVDMVVAVGVMAAIGRVDRFSAPDKLVAYFGLNPSVHQSGEHAGYHGHITKSGRSNARHLLVEAAWQTVRSPGPMKAFYERVRARRGNHVAAVAVARKLAVLVWHMLTKAEDYAWVRPTLMAQKLRALQLVAGMPAKRGQKGSAYDYNLPERRYADRAAAENAEARYRSATRGWRPKGPPAKGMERAPQVRSDL

SEQ ID NO: 454425 - protein, 351 aa, unidentified
MVRLRTRPFLSLFVHYKVMQNFYFIGIDVSKKKLDICVMSKSKVLKEEQVSNHPQAIASVIAGLKEELSMSNDSFIICAEHTGQYTYPLMCACNSVGCKLWLENPSQIKYCSGVTRGKNDKVDARRIAEYAMRFLDKAKPYKRPTEELVRLKQLEAERSLYLTDLAKYKAQLTDQDGFMEDKIFKRKARRLKAMINSLEKTLKEIAAEMADVIDASEELSRQMKLLKSVEGVGSVVAMNMIIATEAFTRFDNPRQFNCYVGVAPFAYTSGTSQHSRNRVSQRAVKYIKCLLHMAAVAIAHKKTGDMKTYFERKVAEGKNKMTVLNAVRAKLVARMFAVIRNNRVYQPILSV

SEQ ID NO: 454426 - protein, 397 aa, unidentified
MYIVGIDIAKRKHEAAVIDGDGAVIIKPFSFTNNCSGYNRLLAMLAKAKLPLDEVSFAMEATGHYWLALFTRLQKEGFRVQVINPVQTNSIRSFYIRQAKTDPRDALLIAEVIRFGHFSESTLHPENIYELRELCRGRHAIVSMQADVKRKVVALLDQVFPEYETAFTNLFGDTSMAILQTCPTPKELSEMRLEELCHLIEVSSRKRFRMEKAQELQALARGSFGFAMAGDVFSTMIRLYAKHLDFLKQQVREMDRKIAEIMDTLDTPITTITGIGPTLGAYILSEIGDISRFSSAAKLAAYAGIDPTMRQSGEYNGVRNRMSKRGSPYLRHAIWLAASSAVLHDPALKLYFQKKRDEGKPYMASVGHACRKMVSIIYAVMRDNKAYTPCIPNEISA

SEQ ID NO: 454427 - protein, 331 aa, unidentified
MFPVGIDVSKNTLDLCILYDGIKGRIKTRNIQNNRHSVENILRWLRLQHCGPEDVHVVMEATGVYHERLATELHDAGFRVSLANPHRSREFARGMGIMTKTDKVDAYMLACYAFLKKLHHWEPPSPEIRYLAALLRRRDVLLGDALREENRLEKYLSTDTPADIISSCRRMAQLLREEVSNIERQIKAHIKASPALRRDYTLLNSIKSVGPQLGMHMLVELRSHNFASAEQAAAFLGVVPIEKRSGTSVRSRPRMSKIGPPQLRARLYMSALCGKIYNKRMRNIYDEMCLRGKPKMVAIGALMRKLVHWCYGVLKTGTVFNDEGLKQVLST

SEQ ID NO: 454428 - protein, 408 aa, unidentified
MGRATRRWHTIVAATDGWSAPVRQPNDLSRSLVALDQDSTLIAVIEMGQASWLVAGIVPGVNRHPLKKIATDQEQLLQVLRRWAKEAETTGRMIKRIAVAYEAGRDGFWLARWLRARGVEAYVIHPSSVPVSREHRRAKTDRLDTELLKRAFLGWLRGEPDHCSMAAIPTLTEEDAKRPGRERESLVGERTRIINRIKGALARLGIRNFKPILRNAPKLLETLGTPEGAALPPNTLAELRRDMARLSFVKQQIKEVETGRIERLQRAPGERGNAMVRLLTRVVGVGVETADMLVQEIFSRNLRDRKAVARYAGLTGAPDESGKKRRERGLAKSGNARVRRGMLQLAWGFLVHQPDSVLAKWYRARTADARGVTRKTMIVALARKLLIVLWRLATTGEVPEGLAIRAAA

SEQ ID NO: 454429 - protein, 338 aa, unidentified
MKYSGIDLHSNNSLVTVTDEADRVVAEKRLPNELSTILAFLSPWREELMGVVVESTYNWYWLVDGLMAEGYAIHLANPSAIQKYTGLKHADDKHDAFWLAEMLRLNILPTGYIYPKDERPIRDLLRKRSHLVSLRSSLLISLQNIITRNCGVKMKTNDIKRLREDRVHPLLADNEDLALAGQVSKDSIDFLTRQIRAIETFIEKKLELTDAYKNLVTIPGIGKILGLTIMLETGPVERFEKVGNYASYCRAVSSQWTSNGKSKGKGNKKNGNKYLCWAFSEAAEFARRYNDKARGYYNRKLRKTNFMVAHAALAHKLARAAYYIMRDQVTFMPEKTFT

SEQ ID NO: 454430 - protein, 367 aa, unidentified
MKIIHWIGIDDHADKWTIAHFKGNEEKPAREFELVPDAGGYRKLIKYAKELDGEVRIVYEAGPCGYELYWRLTKGGLKCEVAAPSLTPRKPGDRVKTNRRDAKKLARYLRAGDMLTLIVVPDQGRESLRDLVRARHAVQKDLVSIRHQITKLVLRYGHRYREGKSAWTGRFWAWLNKVKLEGEHSQFVLTEMIRAHKQRLEQRGRYDDAIEAAAKAPAYAPYVAALTVLRGIDRLSAMTLLSELGDLRRFATAPQLMAAVGLVPAESSTGDHTNRLSITKTGNAHVRHIAVEAAWQYQRRITEGRTIRQRRKDQPQTLLDIAEKCDRRLNRKFQRMTSRGKPSTVAAVAVGRELMGFIWAIGQLVHP

SEQ ID NO: 454431 - protein, 332 aa, unidentified
MTDYIGIDVSKQSLELWDGTQEDEVPNEKGLKTLKKLLKKRYGGEWNETVRFIYEPTGPYSNYLRAFAAEHEVQVVEVNPKKSANFAKVVGNRSKTDTVDAKMLYSFHLLLKESEFSITKMDEIAEQLGAYLGSYEMIQKTRTMLSNHLQSLEYKSGVTRKLKESLEKELKHLDAIEEQLENEMEAVAEDHEETREALHNLLSMNGIGVISAMNLLYLFRKYPGANRNEITALAGLDPVRRQSGSSLNGGRKISRAGDPMLRKVLYLACMNSIQHNECIRTFYKHLVSDNHKKPKVALVACMRKLLLIAHHLYTTKFQYRPLEHDANLGLSS

SEQ ID NO: 454432 - protein, 401 aa, unidentified
MKRLSGGIDVGSESHHITILDEEDHILYNQKVSHKLNEFTESIKQFKKIERKEKGVISFALEGKNGYSAPFDRILLNQGFTLYNVDNLKLKRFRQAFAGEWRDDQRDALMLSKMLKLKDHINSPREKVFIKIEKPSPVTESLKLLSRHQQTLIDEKVRLTNRLRKKLLEVCPEILKLAKLKNKKLIAILAKYPDFSKYKRITIKLLLKIRGIGKRQAPFLLKRLNRIEYMPDLTDIYKTIILSYAKRILELQKEIKDIDKNLDEIGNQSKEVNHLKTLPGVATKLASRLIGEIGDLHRFPAEKQLAVYCGIACVNNDSGKITKAKAVYKANKICKQTLITMAGGSIRLSLQCKAYYLKKRAEGKSHNHTLRCLARQMIKVIYKMLTEDRDYIIRKELKKVA

SEQ ID NO: 454433 - protein, 346 aa, unidentified
MEHHAGIDVSLELSSVCVVDARGKIVREAKVASEPDALVSFFKGLGSPVKLIGLEAGPLSQWLHAGLMRAGFEAVLLETRHVKAALSAMTVKTDRKDARGLAQLIRMGWFRPVHAKSTGSREIRALLVARKQLLGRLLDVELSIRGILRGFGLKVGQVTRKTFEARIRELVTGHTMLERIAEAMLSARATLQAQYEKLHKAVLAFVREDAVCRRLMTVPGVGPVVAVTFKSAVDDPSRIAKSKAVGALFGLTPKKYQSGEKDVTGGITRTGDKMVRTALYEAANVLLSRITRFSKLKRWAMDVAKRRGSRRAKVALARKIGIILHRMWIDGTTYRWAEAKPIAAQA

SEQ ID NO: 454434 - protein, 354 aa, unidentified
MKCMTKYVALDVHQATTVASVRGESGRMLARAILPTEGPALVEFFRGMRGAVHVTFEVGTQSQWLYELVSPLVDRAVVCDPRQVTRQGNKGDRVDADRLSELLRLGGLRAVYAQSAHRSDLKELTRTYRTLVEDGTRVMLRIKALYRARGIKTPGAAVYHPTKRMQWLTQLTDRGVRFRAEALYAELDVLRELRPKAKAMMVAEARRDPAWPVLQTIPFFGPVRVALLLATMQTPWRFRTKRNLWAYSGLAVRTSSSADHKFVEGQVVRRRRAPLTRGLNRNHNRVLKDVFKGAATAAASQPGPLQEFYAATVARGTREEMARLTLTRKLAAITLRLWKRGEQYDPEKLTRQVS

SEQ ID NO: 454435 - protein, 411 aa, unidentified
MNPVVGLDVAKGESQVQMFLDKKIPYKNSVKVEHTVDGLKELYSYLLDLEHQTGMKPPVVLESTGHYHAPVVQFLEAREYIVIIVNPLVSYRAKSSSLRKTKTDAIDAYHLGELYYKEDLEPQKKRGVQLLNLRYLTRQHENMTGIMVQTKLQFQSVLDQVFPEYKGVFGDLYAEVSLRTLQTFPTSETVLKACVEEIAQFIDRHCKARSFNWALEKAEGLIAAAERNPYQSTLYQSLLVSLNMYIDLLQVYHQQLSTLEREIDQLAVQLEEYELLQTIPGVGEKIAATIISEIGEIDRFSHPKKLVAFAGLDPSVFESGRFKGTKNHITKRGSARLRHMLFTAVRCSIRDSRKKKTTEETIARNKRLRAFYDLKREEGKPYKVAIIACANKLLHWIYAMLKTKTPFQETI

SEQ ID NO: 454436 - protein, 338 aa, unidentified
MVYGAIDLHMRYSQIRIVDETGAVVRDQRVSTAREQLVQAFAGFGAMRVLVETGTESEWVAQTLEAAGHEVIVADPNFAPMYGDLQRRVKTDRRDVSALAEANRRGWYRAAHRTSAAQRGTRQVLRARRQIVQMRSGAVALIRSLVKQEGYRLRSCGAERVPARLAELRLPAPLRAILAPLVRMIETATTEIATLATDLEARAAADPLVQRLQTVPGVGLVVALTFRAQVDDVRRFRHAGQVSAAIGLVPREASSAERRQRGHITKVGPRELRSLLVQAAWACWRSKQSATLRAWVEQVAARRGRRIAVVALARRLSRLLYALWRDGTSFDVKTLAAA

SEQ ID NO: 454437 - protein, 428 aa, unidentified
MNEVDSIRLEQFRQLKKEIRGSKEHLIVGIDVAKDKHNAFFGTATGKTLFKRLVFENTREGFERLLIQTDTLKIQYGLTKTVFGLEPTANYHKPLAEFLIKSDHMVVLVSGVAVKRNRELLDGRWDKHDTKDSANVSDLISQGKCLFYEYPSMALRDLRNLLSLKKRLKKQEHGLRVRIRNHVLAQYFPEMDRFYGQSESDSLEIVKWCLNPSVIAGLEYEQFLQLVAPQKRGIWQQNRLKAIWKKAADSIGCDAGESLEFEAKAMVEALEHIRETIRATDAKIKDICLEFPEYSYLLTIPGFGPDISSKVLGAIGNPFRFNSGKQVLKMAGLDLSANRSGKRSDAATPVLSKKGKADLRYALYQAALIASIRNKYFIVYYTNKLRGREKEKGIKTKMRVKLAAKLLIIAWTLMKKKELFSPEYLTID

SEQ ID NO: 454438 - protein, 449 aa, unidentified
MNRKVYSAAGIVHVKLDLILKSRQKAEPVVIGVDVGKHELTVVLRWSDGCFERPWRVSNPNQIGLLRGLIVSLSQGRQLTVAMESTGTYGDALRQAMDDAQIAVHLVSGKRAHDYAEVFDGTPSQHDGKDAAVAAELCALGKSSVWKLDRGDDRSQRIELLVDQMAAAVECRTRWTLRMEGLLARHWPEASAVLGCSAGTMLKAMKHYGGPEALAKDPQARTQLRHWSSQKLSEQKLGELIESARTTTGVRLTRTDVQRIRWCAGEGLTASMEASRCRRELIDLAKDHDLIARQGEAIGVATACVLWRYLGDPRRYHCAAAYRKAMGLNLKERSSGKYQGQLKISKRGSGRVRQWLYLSALRLIRNEPRASKWYRRKLRKGGGGKRRLIMALTRKLALSMWAVSKSQQLFDVDRMLGPTGKKSVRKKAAGKQINRKQIHAKGAIKAKVH

SEQ ID NO: 454439 - protein, 348 aa, unidentified
MRSIGCDLHARQQTLAMLDTTTGEVANLTLAHEGNQVREFYSRLPRPVLVGIEAGGSMPWFLNLMDELGIECRVGHPAQIRATEPRKQKHDRRDAELILKLLAENRFPAIWLPRKELLDLRALRLHRHQWVRIRTRIQNALQAIALAHGLRRGPRLWSSDGQEKIAFLPLMPHTADRRSALQTMYQTIEAEIEKLTQVVAEQAEKRSAARRLMTHPGVGPVTALATDVFLGDPKRFADGKALASYVGIIPREYSRGGQQRLGGITKQGNPLLRFLWGEAGAHAVRRDPELKRFYRRKLVQKGLGKARVAVARKLGIRLWIMLRDEIDYPEFCRRGQMQARGAACGGDA

SEQ ID NO: 454440 - protein, 445 aa, unidentified
MEVTYTHCAGLDVHKKTVVACCMTPGVKGKVNIVSRSFSTITAGLLELSDWLHSQNIQQLAMESTGEYWKPVYNLLESGFEVLVVNAQHMKNVPGRKTDVLDAQWIAELLRHGLLRGSFIPPLPQRDLRDLTRQRTNLVQERAAVVNRLQKTLEWANIKLACVVTDITGVSARQILAAIVDGQDNEKVLAELAKASLRNKRQQLEQALTGRIREHHRFLIAQHLIHLDFLKEQIAIFDTQITEHIQAQTTTQNNSKSPTPSDSLSSALEISPDNCPLSWEAAVSLLDTIPGVARNTAEVLLAEIGIDMARFPSAAHLARWARVCPGNNESAGKQFSGRTGQGNSWLRSALIQAANAASRCKHTYLAVVYQRLKARRGRKRAIVAVAHRILTAVFHMLSSGQPYKDLGVNHLNHPQKQHLLKQMRSRLEQLGYKVTLEAQTSTAPN

SEQ ID NO: 454441 - protein, 358 aa, unidentified
MQLQRKELSFKNEKIYVGFDVHAKSWKVTILTEHLLHKTFVMPPSPEKLHEYLVKHFPDAHYYSAYEAGFCGLWIHHRLTALGINNIVVNPADIPTTQKEIAQKEDLRDSRKIAKSLRNGSLTGIYIPQESTLSERSIVRMRSQIVKDLNRCRCRLKSYLYFFGVEYPEPFAKVQSHWSRAFIAWIETLQISDESGKTVLNLLLSEVKELRKLLLEVNIHIRNLSRREKYCQASNILLSIPGVGITTAMNILTELEDINRFKNFDSFCSFVGLIPSTCSSGEKETVRGITFRGHRLRRIIVESAWIAARRDPALSHSFSLYSRRMESNKAIIRIARKLLSRIYSMLKNKQLYQTGKVA

SEQ ID NO: 454442 - protein, 376 aa, unidentified
MIKHSLGIDVSASSLACCISSIDLQQQVQVLATRTFANSQSGFKSLIHWTKKHHKQTHIPLVCLLEATGVYYENCALALTTAGLYVSVILPNKSKKYMESLGLKSKNDKIDARGLARMGAEQSLPRWQPLSNYFFTLRTMTRQLESLQKTKTSISNQLHAAENSIYKVGMVTRQLKSLIRTLEKQMKTLEAAIASHLRSEAQMGEKVAHLCSIKGVGLTTAAVILGETNGFALIENVSQLVSYSGYDVVEDQSGKRVGKTKISKKGNSRIRRALYFPAISAVGCGVKPLYELFHRTHGKHHIKMKSYVAVQKKLLILIYTLWKKNEPYREPGPESKCLEKTQVIQTVSGQKRKFPTNGREPQGKLPHEMAVSSQME

SEQ ID NO: 454443 - protein, 443 aa, unidentified
MTKKFQALQIKRQFISDKIIIGIDPAKNKHQAAIINHYGLPITNSFTFANSKQGYLKLLKKVRQQTEKSNNKNIVFSIETSCNLWCTLSYFLKSSGYDVLLVSPLTTKNSRPMLNHDFSRTDPKDALIIAGSARDGYFDFYRDYSSDIKAMHNLSIAYDKLRKNYVQQRNRIHSLMDRVFPEFYKVLNLDTRTGQYLLGKYFLPSDFINMDVDEETKTIEKISHKNHGREILEHLKELAAESIGIPMEENEALAERLILNTWLAMLVTIEEKMKQIISEIINIAKQTPYFKIITSLRGISDNLAALFIAEMRDLSLYKHYKQIEKYAGYNLRQSQSGNYVGPRHINHIGNRRLSWILYRMTEETVKYVPEVRVKFVKRQLHRCSYRKNIIASSGNLLRLIMSMVKDKRCYEYLDNGCFERLHELEKKYKRMVELKKRRFEKVA

SEQ ID NO: 454444 - protein, 365 aa, unidentified
MQKISTMRTRGKNIFQGQLTVGLDLGDRSSAYCVLNEAGEIVLEHKLATTPEAMKQVFASMPRCRIAMETGTHSPWVSRLLTALGHEVIVGHAQKVRLITKSRRKDDRLDARTLARLARIDPELLSPVKHRSAQAQLHLTEIRARAVLVSARTALVNAARGLVKSYGERLRKCGTEQFRRETTSGLSAGLREALEPLLREVESLNERIQEYGRRIARMAKETYPQTALLKQVKGVGDLIATAYVLTIEDPHRFRKSRDAGCFAGLQPGRRNSGESEPQMHISKEGDEYLRTLLVQGAHYILGPFGEDSDLRRWGQKLAARGGKNGKKRAVVAVARKLAVLLHRLWVSGEAYEPLRNSQKAMSTAA

SEQ ID NO: 454445 - protein, 387 aa, unidentified
MAKQNDLSRCLITLEQDATVIAAIEIGQSSWLVAGIVPGLERNPLKKLSPDPDALLQLLHRWQREAVQAGRAIKRIVVAYEAGRDGFWLARWLRAREIEAYVIHPSSVPVSREHRRAKTDRLDTELLKRAFLGWLRGEPKHCSMAAIPTLADEDAKRPGRERQSLVGERTRIINRLKANLARLGIRNFRPNLAHASNRLEALRTPEGSAVPANTLAELRRDMDRLRFVKQQIKEIETTRAKHLAEAPNEQRQAMVRLLARVVGVGIETADMLAQEVFSRNIRDRKALARYAGLTGAPDESGKKRREQGLAKAGNARVRRGMIELAWGHLLHQKASALTAWYRKRTSDARGGTRKTMIVALARKLLIALWRLVTTGETPAGLLLRPAA

SEQ ID NO: 454446 - protein, 430 aa, unidentified
MKSNTQNAKIEAITEKTLVLGIDVGSETHYARAFDYRGIEYSKKPFKFSNTEAGFVTFKEWILDLKERHEKDKVVPGMEPTGHYWFNLGKFLQDNEMKPVLVNPHHVKKSKELDDNNPTKNDRKDPKVIAGLVREGRYMIPYLPDGIDADLRTASNIRFQLQAELTRIQNRISRWFNIYFPEYKTVYGKPDAKSGMLILKAAPFPEDILTLGIDGVNQIWRDAKLRAVGKARAKTLIEAAEHSVGSKEGAVSARMEIRMLLEDYESRNIRLQEVMGLIEGLVNQIPMAEKLLEIKGVGIKTVSGFLAEVGDIRRFNDPKELQKLAGLALVENSSGKHKGKTTISRRGRKRLRYLLFEVAMSLVAKNPEFRELHNYYTTRRLNPLKKMQSLMAIAAKLIRVFYAMLTKGVDYDPKKMVSDIKRPAVYLQAA

SEQ ID NO: 454447 - protein, 411 aa, unidentified
MRYCLGVDWADQTHAVGVVDESGTTITARTVAHTAEGLDEWGRELDEWRAQGIDLWAAIERPDGRVVDFLLDHGVVVYPVNPKALDRARDRFRQSGAKSDPFDARVLADFLRTDHAHLRPLPPSSEAAQELKLLTEDCQRHIRQQTRLVNQLTATLKAYYPRALEVAEVTSALAREFLPAYPTPEALTALTQRQWQRWARAHRLPEARTGELWVVLRQPQLPVPAHVGRAKARLMQSLLEQLKPVVAAVAQYRKAIDDFFASIPTAQWARTLPIGKHGVTAPTLWARLGDAPGRWESFRHLQAHAGTVPVTKRSGKPRVVQFRFACDKALRYVVDQVAYLSLLSSAWARLYYDQQRARGHSHRQALRALGAKWLKIIFVMWQRQVPYDEQYHLATLARQHLQAASEGNRLT

SEQ ID NO: 454448 - protein, 406 aa, unidentified
MDTGYAVVIGLDIGKSGHHACALDPGGNRLFDKPLPQDEAQLRELFTSLQKHGEVLMVVDQPNTIGALPIAVARDCGCAVAYLPGLAMRKAADLYPGRSKTDARDAFIIADTARTMPHTLRSVDRDSEVLSALKVLAGFDEDLAHETTRALNRIRSLLTQIHPALERVFVGGSLSTGLVLDLLEKFGGPTGLNTAGRGKVLRFARAHSRRDPEALIDKIFAALAEQTVVVPATAAVELVLPRVAGQVKELKEQRATVAREVEGMLEDFPLASVLMSMPGIGIKTAAQILLAIGDGTAFETAGHLAAYAGIAPVTRRSGTSIRGEFPARSGNKRLKNALFYSAWVASHSDPISKTYYDRKRAEGKRHNAAVICLARRRCNVIYAMLRDGTYYQPPTVPTPEPPLLAA

SEQ ID NO: 454449 - protein, 398 aa, unidentified
MTESSDYESVQVFIGVDVGKDTHHAVAINRSGKRLFDKALPNDENKLRSLISDLKQHGQILLVVDQPATIGALPVAVARSEGVLVGYLPGLAMRRIADLHAGEAKTDARDAAIIAEAARTLPHALRTLKLADEQIAELSMLCGFDDDLAAQTTQASNRIRCLLSQIHPALERVLGPRLDHPAVLDLLQRYPSPEKLASLGEKKLAAQLCKLAPRLGKRLAADIAQALAEQTVVVPGTNAAAVVLPRLALQLITLRKQRDEVALEVEQRVLAHPLYPVLTSMPGVGVRTAARLLTEVACRAFASAAHLAAYAGLAPVTRRSGSSIRGEHPSRRGNKALKRALFLSAFATLRDPISRAYYTRKMSQGKRHNQALIALARRRCDVLFAMMRDGTFYTPQAS

SEQ ID NO: 454450 - protein, 420 aa, unidentified
MNTLSNQSFTAFVGIDWADRKHDVCIQEANCDRREFAVIPHKVELINEWAQSLVQRFGSPIAVAVELSKGPIVYALQKFDCFVIYPINPSTLAKYRETFTPSGAKDDPTDAEFAVDLLLRHPDRFKPIQPQSVEMRTLTTLVEQRRNLINDKVRITNRLRSALKQYYPQALDWFDHIDTPLFCDFIEHWPTLTQAKRARKNTLTTFFHEHNMRFAQVLEERLTAIKNATPLTMDDAVIIPHRLQAQVLIVQLRVTLAGIKQFDEEIERVAHKHTDYALFSSLPGAGPSLAPRLLVAFGEDRTRYRNAADLQKYSGVAPVTERSGKKHWVHWRWQCPTFLRQTFTEWAAQTINKSFWAGQYYRQQRAKGCTYQAAVRALAFKWIRILYQCWQTGKPYNESTYLKALERRGSPLLKQASETR

SEQ ID NO: 454451 - protein, 349 aa, unidentified
MATYCGVDFHARQQTITWCETDTGELKQCQLNHQPREAVRDFYARLTPPVIVGFETSGYSLWFEDLLSELGCELRIGDPAEIRRRARSRQKNDRRDADLIFDLLHKDEFPTVFRFSQASREILQQLRYRHKQVKLRTIARNCLHKLALDAGLSLQSKLLTKAGRAKLEGLSLRPFAALQRQEWLELIDQLNQRIARIEKALEPLAEQDPRVVRVRTHPGIGLLTGLALVHTLSPVSRFANSRKVTAYVGLEPVEHSSAGTQRWGGISKAGSRLLRFLLGEAAHNACQEDADLRRFYQRLSARRGSQKATVAVARKLLIRAYVLLREEIDYAEFQRRAVAARPARGNTKP

SEQ ID NO: 454452 - protein, 316 aa, unidentified
MSELVYVGIDIAKNSFEVAVTGELQTLNLANDEAGHAQLCQCLAPLAPRLILMEATGSYEQDLALALAGAGLRVSVVNPRQARDFARCVGKLAKTDRIDAQALRSFASMLDAQGHQPRALADDERRELTALVVRRRQLLTMLVSERQRLGVAHRKAKPSILAIMDAIAAQLHDVDDELKAHVQTHHADLAKLLTSVKGVGPTTACTLLAQLPELGQLNRKQITALVGLAPMNRDSGTLRGQRHIFGGRADVRRVLYVAALVGTRFNPVLKAFYAKLLAAGKAKKVALVACMHKLLVILNAIARTRSPWRDDFAERL

SEQ ID NO: 454453 - protein, 408 aa, unidentified
MEVVHARCGGLDVHKKTIVVCVITSGGRGKREIRTYSSMTEDLRRMVKWLEAKGITHVAMESTGSYWKPVFNLLEESGIEAIVVNAAHIKAVPGRKTDVRDAEWIAELMRHGLLRGSFIPDREHRELRELVRYRRSVVQERSREIARLQKVLEGANIKLDSVVSSVMGKSSRRMLERIIQGHDDPEDLAGLALGRLRTKKDELVKALDGLIGPHQRFLLEEQLRHIQELEDRISRLTQEIESRMRPFEAAVDAIDEIPGIGRIGAQEIIAEIGVDMSRFPTHGHLASWAKVCPGNNESAGKRRSGRSGRGNPWLRSTLVEAAWAAARTKDSYLRAQYYRLKSRRGAKRAALAVAHSILVAIYYMLADGTAYQDLGADFFNRLSTDRIARYHARRLKDLGFDVTITKAA

SEQ ID NO: 454454 - protein, 490 aa, unidentified
MKGQRAKRNQKNQKTSKTTSDKATPGKWDEMNRKQRREMMRQMQSGDLSLEVIHPDASGIDIGNESHYVAVPPSRDSQPVRCFGCTTAELKKMAEWLTQCRIRTVAMQSTGVYWIAVYDILEAAGMEVYLVNARETKNLPGRKTDVQESQWLMKLHTYGLLRNSFRPSQEIRILRTYWRQRHDLVRSAGRHIQRMQKALTQMNIRLANVISEISGMTGQAILKAILDGQRDPRELAAYRDHRVEASEEEIAQALEGNWQEDQLFVLRQEQAGYEFCQQHITECDQQLEKYLARLEDRTQGATLPKETRKGRLNKKKKRNPQFNLREELFRMTGTDLTQIDGIDVTVAMTVVSEVGWDMSKWKTENHFVSWLKLAPDNKISGGKVIGKGRTPTNNRATTVLRMAATTLRASDTYLGAQFRRLRTRLGPPVATKAMAAKLARLLYRMLRYGMKYVDKGAELYEAQHRKQQVIHLKRKAAQLGFEIIEVADAA

SEQ ID NO: 454455 - protein, 370 aa, unidentified
MLDTTTFVGLDVHARSIKAVSLDVMTGEVRAATFGYDAGAVAGWVRSVDPRARCVYESGVTGFDLQKRLSGLGVDCVVGAVSKMIKPSADRRRKNDRNDAEFLARMLSVGNVVEVWVPDDECEAARDLTRALEDARDDLSRSKQRLSKFLLRHGLVFDERTPTGRRKGNWTRAHWSWIESIRFAERADEEVLAYYVDAVRRAAEEKARLEGLVEGEARKPRWRRRVDSLRCLKGVDTATAADLVFEAGEFSRFRNARSFAAWVGLTPSEHSSGESDRRGAITKAGNKHLRKTLVEAAWHYLTCSGRPKDLARGQAPDRGARRHAAKGVRRLAERREALLARGVHGNKANVATARELACWVWAVGLMAEEA

SEQ ID NO: 454456 - protein, 356 aa, unidentified
MSEITRVGVDLAKSVIQVHAVDAAGRLVTNRQLSRDKFLAWCLQLPAGCLVAMEACAGAHHWARKLTALGVSAKIIAAHLVTPYRLQGKGGKNDANDAAAVCEAASRPNMHFVPVKTTVQQGLLCVHRLREGLKEERTACINRIRGMLTEFGLVVSKSPDKLREKLTDMLEDASNDLSGMARLVIQEAYDQWKDLDERIGWCDERIKAHVKDDAQAKAAKELMGIGPVTASAVVATVGDFHQFKNGAQFGAWLGLTPKQNSSGGKSSLGGVTKRGDMYLRTLLIQGAKSAVMTAHKRDDPISKWLCQLREKSGWQKAAVAMANKNARILWAMMTKGCRFDPRHVSIKPAAPAATTV

SEQ ID NO: 454457 - protein, 410 aa, unidentified
MDAIIERCAGLDVHQRTVVACILYGPLDRKPKQLVRTFGTTTRELLSLLDWLTEYEVTHVAMESSGVYWKPVWNILEGDFTLILANAQRIKNVPGRKTDVNDAVWIAQLLRCGLIESSMVPPKDIRNLRDYTRYRRKLLSAATSEKNRIHKVLQDANIKLTTFMSDVFGVSGRALLQALVKGKVLQHDQVQSMVHTHLKKKVPALVEALNGRVDQHHRKMIQYHLNHLDFVEKQIAEIEYEIEQLLIPYREEMGLLNSIPGIDKNAAAAILAETGVDMSKFPTEPQIASWGGVCPGNHESAGKKKSTRTRKSNRTLKAILCQVAHVNARSQNRISAFFHRIRKRRGALKAVVATAHLILRIIYHILKNRIPYHELGPEYDKAQKPSVHHWVQKIKQQGYEVFVTPVNGLP

SEQ ID NO: 454458 - protein, 354 aa, unidentified
MADEIAVVGGIDTHADLHQAAVIDSIGRHLATERFETTPKGYQRLLEWLRLHGEVLAVGVEGTGAYGAEIARFLTANEITVIEVDRPDRKARRDNGKSDPIDAYAAATAVLSGRACGTPKARNGIVEAIRALRVVRKSAVKARTQTINQIRTLVVTAPSGVRDRLRGLSTKELVDSLARSRPAGELADPACSVRIALRRLARRYQSLDEEIKEADQEIRPLVIRAAPKLIALPGVGPETAGQLLASAGDNPDRLRSEAAFAHLCGAAPVPASSGRTNRHRLNRGGDRQANNALHTIVLVRMKYDQRTRDYVARRTAEGLVKKDIIRCLKRFVAREIYRHLPRTIQTTESLPQTA

SEQ ID NO: 454459 - protein, 335 aa, unidentified
MIANVSKIVVGVDVSMKHLDVCIYKPDGFIEEDKAYLKEKIIRVENSLNGLGIMLEELSRYSFNDFEQIVWESSGGYEILMGKVLEKAGYTTWMVDPKRIRGFVASQGVKAKTDKIDAKMIALFAAQNKSDYKKNKQPEMYSDLRELVRRKIDLIEMVGMEKKRLRHPKQVICKEIIEAHIAFMEKQIEDVKSEINALIKDDDDWSRKAEIADSIPGVGEATIHAVLAEVPEIGSLTDKQVAAVVGVAPYPQESGSYIGHASIEGGRFLVRNVIYMAALTASRYNPNLKQFYQNLRANGKRPKVAIVAVMRKLIILINTLVRDNRIWSKSKPVIV

SEQ ID NO: 454460 - protein, 389 aa, unidentified
MFYLGIDIGKNTHVASLIDDKKKVIFKDFSFCNSVNGAESLISKLSNFKNELEVGMEATGHYWLSIYSYLVKNNFTVRLINPIQTDGWRQGIEIRKRKTDIIDSLLIADLLRYGDFVESSLLSEDFMSLRNLSRFRSYLISSIGDLKRKTIALLDQVFPEYASSFSDIFGKTSKQILETFSSPSDFENISSDDLSAFLESVSRKNYASRKIDQLSRKASTSFGINFSLDSFSLQIKMLIQQISFIQNQVSDIDKEIEELLEKINSPITTIPGIGPVNGATILGEIGDISRFSNPSKLVAYSGIDASVSQSGDYESIHNHMSKRGSPYLRRALFQAALIAEFNDSVFSAYYQKKISEGKHHLVATNAVARKLCHTIFAVLTKNEPYQIQS

SEQ ID NO: 454461 - protein, 342 aa, unidentified
MQITTIGLDIAKNVFQVHGIDAAEKVVVRKQVRRSQVLAFFEALPPCLVGMEACATAHYWARELTKLGHQVRLMPAKDVKAYVKRNKNDAADAEAICEAVRRPTMRFVQVKSAEQQSQLMLHRTRDLLMRQRTQVINALRAHLGELGIATAQGKAGLTELLAIIAGSADARLPTEAHASLMVLAAELQAMRTLIASVEKRIIAHHRSDEASKRLRSIPGIGLVGATAIVATVTDPKAFRSGRDLAAWIGLVPRQDSTGGKQKLGPISKQGDRYLRRILVVGAHAVLKLARQKPEKYPWLTQLLARKPFKVVAVALANKMARIAWALLVRGGRYRARALVAAA

SEQ ID NO: 454462 - protein, 347 aa, unidentified
MAEFVGLDVSVKETSVCVVDDTGKVLCERKVPSEPDDIAVLLTSVGGDYTRVGIEAGPLSQWLVNALSETGLPMVCVETRHMKALLNAQQINKSDRNDARGIAQMMRVGLFKPVHVKTLAAQERRMLLTSRKLLQRKLLDIECDMRGTLRNFGLKVGVVSTVGYEARIRHLVEGFPRLAAIVEPLLSVRRVMRQQLAALHKMVLDTVRHDPVCRRFMTVPGVGPVVALTYRASVDQPHRFVHSRAVGAHAGLTPKRHQSGEIDYDGGVSKSGDNMLRTMLYEAAQSMLTHSKKWSWLKAWAMRVAQRRGMRRAIVALARRLAVILHRMWVDGTDFRWSNAAVGAPMA

SEQ ID NO: 454463 - protein, 384 aa, unidentified
MKKNSIVAVELKKPRHRKGAKGRASQRSRSTPAPQQTIGVDLGDKSSCYCVLDAAGEVQSERTVATTKKGMTQTFGRIGPSRIALEVGTHSPWVSRLLRDLGHEVIVANARRVRAITASSRKDDRMDAQMLARLARVDPGLLCPIRHRGEKAQQHLALIKARAALVEGRTALVNTARGLTKSSGERLASCDTDRMGVHQLEGLPAEMQAVLRPVLEVVEAMTEQIQGYDSQLAEIARSEYPETALLEQISGVGPLIALTFVLTLEDPQRFQRSREVGCYLGLRPTRRDSGESQPQLRITKEGDVYLRMLLVQGAHCILGRRGPDTDLKRWGLKLAERGGKNAKKRAIVAVARKLAVLLHCLWVSGEVYEPLRHSQARAAQKIAS

SEQ ID NO: 454464 - protein, 465 aa, unidentified
MARKSKNVKSKHRQRLPRSLKTIYANAAGIDLGSREHWVCGPPREDGTPNVQRFGTTTPELFRLADWLKEQGVKTVAMESTGVYWIPLFELLDSRGLEVLLVNARHISNVPGRKTDMLDCQWIQLLHSCGLLRGSFRPSDDICRMRALIRERNTMVEQRSDWVRRMQKALDQMNICVHHAVSDITGVTGMAILRAIVDGERDPFALARLRDARCRKSEKQIAEELTGNWRPEHLFNLRQALKMYDQLCAVIEDYDTEILTYITKHQPEQAASHSAPAHSSKSKARTLAKRGQEPLRQALYAFSGFDLTTIDGIGVDTASVILSELGLDFSMFPDESHFVSYLRLAPNLSISAGKKVPSKFKPTTCTRVSNALRMAALTLRNSKSALGGLYRRIAWRKGASVAIFATARKLAQLIYRIVRYGQAYVDTGTEAYDARFNQRRLKFYTKALKEMGYSLQPLTENALTA

SEQ ID NO: 454465 - protein, 344 aa, unidentified
MQITTIGIDLAKNVFQVHGVNDRGMAVLRKQLRRDQVAAFFANLPPCLVGMEACGGAHHWARKLQGLGHTVKLMAPQFIKPYVKSNKNDAADAEAICEAVSRPTMRFVPIKNIEQQSVLALHRVRQGFVRARTAQANQIRGLLGEYGLIVPQGIGHIAIRVPGLIEDASNELPGTFRLLIHRLLEHLKQLQRQVAEIEGQIKAWHRSSEASRRLEKVPGIGLLTATALVATVGDAKNFDNGRQLAAWLGLVPRQHSSGGKSTLLGMSKRGDAYLRTLLIHGARSVIYRAGQRAHADTWLVKLIRRRNANVAAVALANKTARITWALLARDREFQFDYTTVAATA

SEQ ID NO: 454466 - protein, 344 aa, unidentified
MNNIDYIGFDIHKKTISFCAKAQDGTILEEGTIPALRNKLLAWAKARPRPWVGAMEATLFTGWIYDLLKPLAQTLKVAHPPMLKAIAAAKKKNDKVDARMIADLLRCNLLPECYMAPVPIRNLRRMLRYRNLVVRQATRMKNRIAGLLMETGTPYNKERLHGKAYFSELLGSLQEVPGSVVELLQLSRGQVEFFATIQRRLLKELKEHPELNQRVMRLQSIPSVGEILALSWALEVGEVDRLRSIAQAVSYCGLTSAQHSSAGKEQRGPISKQRNRHLQTILIEAAKLAPRHNPQLAAVHQRELQRGNRNRATLAVARKLVAYLMVVDKSGQPFQMWASGKEAA

SEQ ID NO: 454467 - protein, 319 aa, unidentified
MQHYCGIDLHSNNHVVVVIDEEDKRVLEKRLSNDLSLTLKVLSPYRETLQSVAVESTFNWYWLVDGLQEHGYNLQLVNTAAVKQYDGLKYSGDHQDAFHLAHLMRLGILPTGYIYPKAQRAIRDLLRRRLSLVRSASAQLISVQSQIWRSAGIRIKSETLRKPDFKAMLLDGYTLQAANAGLAVYAAIQREINALEQSAYQAVKLTKNFEVLQTIRGIGKILGLTIMLETGDIHRFASAGNFASYCRCVDSTRISNSKIKAQAMPKQATNISPGLFQKQRIFQYVLNHWHNASMNEKRPRQMASSPYALSLVNWPEPVG

SEQ ID NO: 454468 - protein, 501 aa, unidentified
MAAKKNAKTKADSAGEGVQAHGGVAAEVTDEVTQVVEYAAGIDVAKGFGMVCTRVPGSRRGSKRQKVWRVNATFKEITALMDHLVCEGIQRLVLESTSDYWRIWYYLAEAAGLDVWLVNARDVRHLPGRTKSDRQDAVWLCKLNERGMLRRSFVPPRAVRDLRMLTRTRSRLAQDQARHQSRVEKILEDALLKVSAVISDLFGVSGRRFLDALVAGERSPAALAALGDYRLKASKAKLEETLTGQFRDIHATEIAVHLRLIDAINAEITGLDAEIEKALPQVPRTAPVCTACGVAGGGHAPDCQNLGVLLLGLADRLDEITGIGPVNARVLIAELGTDPSQFPTPGHAAAWARLTSRLMQSGESSWNGRAGKGNPHLRGALGQAVMSAAKTDTRLGAMYRRIARKRGKQKAIVAVARVICEIAWRLICDPGARYIELGPDYYQPRSARQRTRSSIRQIEKDNPGKKVVLIDDPAIAGTPGSAGPAEPAALPAVLSRLPVTY

SEQ ID NO: 454469 - protein, 365 aa, unidentified
MWEAPVIRQRTSVGLDVHARSVLGCALDGDTGEVFQQRLSPDHGEIVAWLGDLPGPVAVAYEAGPTGFGLARALAAAGITCEVAAPSKLIRPTGDRVKTDARDAAHLARLLHLGQITAVTIPSASQEAARDLVRAREDCRGDLMTARHRVSKLLLRQGIVYSGGTTWNRDHERWLRAQRFDNPALQLTFEAAFDAMLACRDRRTRLDDAITAMAADSEFTPVVHRLGCIRGIATLTAFGLAVEVGDWHRLTGRSIGAYVGLVPCEYSSGDSRSQGGVTKTGNGHARRLLVEAAWHHRSPYRPSEQLRGRWGLACPAARARGQAANRRLHARWRSFDARKKRSVVANVAIARELAGWCWSLAVMPD

SEQ ID NO: 454470 - protein, 313 aa, unidentified
MLYVGIDIAKNKHDVTALNVPGKTVLKPLTFSNNKAGFELLDLSLRQLNQDCLIALENTGHYAFNLLNFLHEQGYKVYTYTPLLIKEFAKSLSLRKTKTNKKDAHGIALKLLSDPNREQFQHDNRQVELKILTRHIHRLKKKQSDWKVQYTRCLDIIFPELDKIVGKHSEYTYQLLTRYPNPQKRIEAGFDKLIEIKRLTASKIQDILSVAPRSIGTTSPAREFEIIKHYKRLIDKAETCVNDLMAEFNSVITTVTGIENRLGAVILAEIRNIHAFDNPAQLQAFAGLDSSIYQSGQIDLAGRMIKRGSPHLR

SEQ ID NO: 454471 - protein, 412 aa, unidentified
MPKIVYPICCGIDVHKSFVVACIATTDKNLVTTYSKSKRFSTFTNELRRLAQWLADNNCKDVCMESTGKYWIPVWNVLESTCNLVLAHPKYLKAIKGKKTDKRDAKWIADIFKHDLLNGSFIPPPEIRQLRDLVRYHFKLTNYTTGEKNRAQNCLTVSNIKLDDVFSDVFGKSATAITSYLLEHPGEAFDVAPFVDPRCKTPIEDIQAAVDGMMCANQAEKLRIIRSHMDSLGLCKMNLESEILSIAQKFWPQVLFVVTVPGILAFSAVTIIGEIGVDMSVFETSRHLCSWAGLAPQNDNSAGKKKTTRVSRAGSYIKPTLVQCANAAVRSKNHPEITNRYNAIKKRRGHKKAIIAIARMMLTAIYNILKKNEPYNAELYSQSNKPPIQREVAVEQAIFILQRQGYIVTASS

SEQ ID NO: 454472 - protein, 393 aa, unidentified
MICVGIDVAKDKHDCVILNSEGKVLAGVFTIPNNADGFDTLLQKIHGCTSPDDKIKVGLEATGHYSYNILGFLLNQGLPTYVINPLHTNLFRKSMSLRKTKTDRVDAKTIAAMLMSNVDLKSYTDTAYHNEELKSLTRYRFDKVQERAQLKQSVSRLVTILFPELEKLVPTLHMSSVYALLIEFPGAKQITEAHLTHLKSLLKDASKGRYGRDMATEIRDAAKHSIGSVMPAKSLELRHTIRLIRELDSEIEDIEAAIEAIMEELQSPITTIPGMGFRMGAMILAEIGDFARFDSPDKILAYAGMSPSTYQSGQLSLAGTYSHMEKRGSRYLRYALYNATKYVCHWDPGFAAYLAKKRAEGKHYNVALSHAAKKLVRLIYAMEKSRQPYKRAA

SEQ ID NO: 454473 - protein, 347 aa, unidentified
MKSIGCDFHPGYQQIAMLEDETGELTVMKLSHVGDDVRKFYTGLTGAVRVGIEASGHSQWFERLLAELGHELWIGDAGKVRRSTDRAQKTDRRDAELLLQLLLENRFPRIWVPTPAERDARQLLLHRSKLVRVRTQVKNQLQALALNQGVQRRRKLWSVTGRQVLESLPLLPWASRRRAELLKLLDELDGSITSLDGAVSQEALARPAVRRLMTHPGVGPVTALAFALTLGPAERFSRGKKVASYFGLIPKEHSSGGKQRLGHISKQGSSFVRGLLVEAAQSAVRHEPQMRREYQRLSQRRCRALAKVAIARKLAVRLYWMLRGGMDYAQLLQGSCAGQPGSSRGRS

SEQ ID NO: 454474 - protein, 433 aa, unidentified
MGNFAGVDWASEKHDVLIADPSGKELFAGTFAHDESGITSLCAALIKRDVEVVAIERPDGLLVERLLETGVQVLALHPNQVKAARDRFRASGGKSDRFDSFVLCELARTDRHRFRVLEPDSDETKALRALTRAREDLVAARVAMANQLRAELERFWPGPVGLFADLDSPISLAFLARYPSPTDAKGLGEKRLAGFLKSHGYSSRKTPAQLVERLRSAPAGRAGDVETRTRRSIVLRLTRTLQIMVEQIRELESEIAEALDAHPDGEIFRSFFLTRTSVICAATLLAEIGDCRARYPHRDAIAAQAGHAPVAVESGKRKSAKFRWACNKRLRRALDTVAMSTVRWNPWAADRYAQARQRGHNHRRALRSVGRAWSRILWRCWQTRTPYDPARHTGLQRHITLTIPSQSGPRPDHAATQQMAPDLTRPAAEPARG

SEQ ID NO: 454475 - protein, 361 aa, unidentified
MNKCIICGMDVHERTIKTCTAAHNGAPEVQTFPNTEGGRGALIRYLRGLAKKHDCREMVTAYEACSLGFGLHDELTGAKMINHVLAPGLMRKSRRDVRRKTDEADARLIFETIRGHILAGNNLPKVWVPPADLRDDREVVRTRLEAGNKATEVKTQIQMLLKKNGVRKPADVGDSWTARHRMWLHGMLAVKGPELGHGAKVALASLLRQLGALEEEIRRLDKAVEALSRLPRYQAASQALVRRIQGVGMLTAMVFLTEVGEMGRFPNRRRLASYLGLAPTSDESGEVTDRKGHINKSGTARVRWVLCQATWMRLRYDSQEAKVFERIRRGSTKLTRVAQTACMRRLSVLMWHTAKDAAKVA

SEQ ID NO: 454476 - protein, 346 aa, unidentified
MTLAIVDEARAVTGGVDTHADTHMAAALDTIGGLLGVQEFPATPDGYARLLAWLGGFGTVHLVGIEGTGSYGAGLARHVAAAGIRVVEVDRSDRQDRRRKGKSDPLDAVSAARAAQSGRASGAPRGRDGVVEAIRALMVAKRTARAQRTQTINQARALILTGPDGIRIRLTRQGPADLVAELAALRPRPGSMVRSRTLLALRELGRRAQFPGAQLERLDELIVPLVTARAPGLLRLYGIGPDTAAMLLIAAGDHPGRLRSEAAWAHLCATAPIPASSGKVTRHRLNRGGDRQANHALWRIVITRMSSHPPTRAYVARRIKEGLSKPEIIRCLKRYAAREVYPHLRG

SEQ ID NO: 454477 - protein, 341 aa, unidentified
MNNNTTICVDLAKEVFQVAVFNKAGKAKLNKEVSAKKMCLIIAQYPDAAIFMEACGSAHHWARRFTSSGHKVGLIPSHIAAKYRVSNKSDKNDVLSIYEASKNQQLHCVQIRTLEQQDIATLHKFREGYKKERNQLANRLRGFGREYGVNFALGISKLLKQVPIALEDAENEMTVVARRVVFRLLEQLRHVILLMKEVTDEIEAIAKQIDACQRLVQLPGIAWLGASMMYAKFGSAECFRRGRDASASIGLVPAHSGSGGKVTIGRITKRGDTYLRTLIINGARSLVIHVKEKTDSLSCWVRQLLSTKGFNKTIVAVANKLVRMATAMLKSGLEYRQPVAQ

SEQ ID NO: 454478 - protein, 364 aa, unidentified
MLIIGCDYHPSGQQVFGIDTESGEVFADRWIAHTGKELDEFYSALPAGTVVGVESSGNMLWFERRLAQYGHRLRLGDAAQIRTKETRKQKHDRRDAELIARLLVEGTFPDLQWVPTLAERDQRQLLMHRHKLVRMRAQVKNQLQHIAMNQGEQKKRQLWSKAGRELLEKLALDPWTGRRRDDLLRWLDLLDRDCEGLEMAVKQAAEARADARLLMTHPGIGPVISLGFVLTIGTVERFERSRQLVSYLGLNPAEDSSGERRRLGGISKQGSSFMRMLLIQGAQTAVRGDEALNRQYRRLASKKHRAVAKVMVARKLAVRMFWMLKTQKTHAELVRMRGSSSHPGVGKTELLSERPASPRIQPQG

SEQ ID NO: 454479 - protein, 320 aa, unidentified
MMAQNDGVVVGIDVSKDKVDASIRVLALRQTCPSTSQGRRKLVAWLRKHQVRKAVMEASGGYERDWAKALREAGIEVRVVDPKRVRNFALSAGRLAKNDAIDAEMIAWFAETFSEGPSQIHDAAREELQVLVKARLGLVNLRMRLECQNEHAAPGLVQKAYAHVLKSLDDQIAKLEAAISAKVKSTPDLAERAEIIASVPGLGETSATNLVAGMPELGQVSDEIAAALIGVAPYDDDSGKRRGERHIKAGRRWVRNAIYMPCVGAATLNNPVLKAFYQRLIAKGKEPKVAIIACMRKLIIILNTMLARRQKWDPSRSALG

SEQ ID NO: 454480 - protein, 350 aa, unidentified
MITIGIDPHSRTHSAAALDEGGRILAELTVGSNARELDRLARWIAGMGPERVVAIEGARGFGLALSRRLLGAGETVVDVAPALTVGERRAARRPGKDDRGDAVAVGRIALRERSLPRVYPEVTGTDLKLLVDARDQLVAEATRTRNRLHALLVAIAPGYHEQVRDLTSSTALMVARRLASRARRTDRVRSTLACAAISRLRSLSGEIGALERELTAALDREAPANLLAICGVGPLVAAKILGEARDVGRFSSSSAFASYAGTAPIPASSGTVIRHRLDRGGNRQLNRALHTVALTQARRDDRARAFLVRKRGEGKTPREARRALKRHLAVAVYRALVLDAEEARSAGVLT

SEQ ID NO: 454481 - protein, 320 aa, unidentified
MTILTSQTVVGVDVAKAEVLVYRADLQTTQAIPNNRTALKRWLKTLPAQSGIAVEATNIYHLDTVELAHELGHQVYVVDGYRLSHYRRGVGQRAKNDPCDARLLARYLAHEQGGLRAWSPPPKAYKALQSLLHRRAALIKARVSLAQSWADEPRLEEELKCLMETFKHSDLAIQKKLRDLSKEAGVAENIERCKAIEGVGVLTATGFATAFLRGEFKDSNAFIAFLGMDLRVDDSGKKTGSRSLTKKGDPEIRRLAHNSAMAACRSATWKPFYEGYLARGFKKTQALVILARKLARVAFALMKNQSEYQPNRPLQGCPAT

SEQ ID NO: 454482 - protein, 353 aa, unidentified
MVQYLGLDWAYRRAAWCAVGEGGAVSGEGVVAADEDGLARLVLAVGVEVRACVEMMSGAVWVRDRLEAAGWEVQVAHPRKVRDVAPLACKTDKVDARVLAELCRRDLVPALWIPSIDDRALRERLRRRMHLVRMRASAQNRIFGLLTQWGLRVSLKRLREPDAMAMLEARGVPEAWRASIAEALAVIDLLDARAAPFERELRALAAADRRVMLLRTIPGIGDLLGLTIASEIGDVSRFSSPRKLIGYAGLAPRVSQSGDRSRTGALSKAGSRTLRWAAVEAAHQSWRPTNPWHELYSDITKRAGKNPAKSAVARKVLIAAWHVLSREQPFKPARPRTNDSTNVSASSRCFLAA

SEQ ID NO: 454483 - protein, 429 aa, unidentified
MTPPSSTTRTAWVAIDVAKYVHQVLIERPDGSRRAVRVANTVGDIDRLVTELRSLAAPCTIAFEPTGDYHRAVMHRLGQAGFQLRQVSSVAVARTRDALFNSWDKNDPKDAQVILHLLKTGATQQFLDPLVTGHHDLQEMANTYQQVSLRKVRLHHAILTHHLPMYFPEAERYLHSTRAEWFTELLLLTPCPAAVRRYSKADFIRAVGLHVGGRKVDKARWLADFYETAGTSLGLPVAEDTEAIRMFRLVLEEYRQLCHRRKALEAEVVHRLTGHVDFGRLQTIPGIGPILALLILAETRDLRRFGHVRQFLKFCGLDLCTEQSGQFRGTTHLSKRGNARLRYAFWMAGTVAIRMRQNSFCRKYEDDIRPDPQNRDRRRTAYTAVAAKMARVVYAVITSGIDYRRFPEATRPGGRISSWQSVEASQTTS

SEQ ID NO: 454484 - protein, 413 aa, unidentified
MRVMIERVAGLDVHQETVVVCVLIGKPGERPTKEVRTFRTMTRDLEALREWLLSLGVTHVGMESTGVYWKPVYAVLEGSFELIVGNARHIRNVPGRKTDVKDAEWIADLVRHGLIAKSFVPPPPLRELRDLLRYRRKLVESQAAERNRLLKLLETANIKLASVVSDVFGVSGRAMLRALIEGTASAQIMADLAKGQLRRKRADLVLALEGRVEEHHRFLLGMQLRRLEAAEEEIAALDARIDEKLEPYRAPHALLMPIPGVDRLVAAVLIAEIGIDMSVFVSVYHLASWAGVCPGNHESAGKQKSGRARNGNVHLRTMLVGAAISASRAKGSYLKDKFYRLKARRGSMRAALAIAHKILVAAYHMLAKGVGYREIGEAYLDQISQTRTVANLKRRLERLGFHVTLQSKAQPTA

SEQ ID NO: 454485 - protein, 436 aa, unidentified
MSEETRERQEEFAALIGIDWADREHHVCMRVVGSNTVTSRKLLQTPEDIAEWIAGLRSQFPGRQIAVAIEQSRGAVVYALMQYDFLTLFPINPVMVAKFRQAFTHSRAKDDPTDAELLVDLLLCHRDKLRAWKPDGEATRRLQILAEHRRKAVNLRSQLSNRLLSLLKVYFPQAVELCGSYLFYPVACDFLAVWPTLEAAKSARKETIRKFYYAHNIRRPETIEQRLKLIAEAQPLTTDAAVIETHALAAAMIVGQLRSLHKFLLKYDQQIAQTFRSHDDAGIFSSFPGAAEAMAPRLLAAFGSDREHFGSAAEMQQFSGVAPVTERSGQSQWVHRRWSAPKFVLQTFHEYANISIRYSIWAKALYEHLRAKGKGHHTAIRAVAFKWIRIMFRCWQDRVPYDEIAYIKTLQKRGSYLFGRIADAQQTTPMQGAIIG

SEQ ID NO: 454486 - protein, 355 aa, unidentified
MSQAYVGLDAHFKTCTYTIGDSAGQIGSEGTVATSSLALLAWQRSHDLPAGTPVALETGTVSFHVARVLARLGLDPHVIDAHEVRLKAYRPRQKCDRRDARELYEGLRRGLYRSRVYVPDANLSRLRETLSRRRHFVRLMVMQRNAARRLLRAHGLHVAVPRLASEKAWVQLLAALRGDVALHDWLALHAQQWRAARQCVTTLEQSLQEQRLGYATAADLLETIPGFGLIVALTVIAVFGDVRRFVSAKHAASYGGLVPASHDSAERVAHGRITRSGSSELRAMLCEAAHHARHPRHPLHRHFGHLCVRHGAKRAVVAIAHQLCRIAYAVLRDQVAFDPARCRPRQPQLAQAAAH

SEQ ID NO: 454487 - protein, 429 aa, unidentified
MNFKPIAGIDVGKFFSEMAILSPSNKVVARMKINHDSYTDVKRAIELLKKAEKDFDSRPSIVMESTGHYHKILFHSLCKFGFEVSIINPIQTDSIKNIGIRKVKNDKIDAQKIALLHRFQELETTNIPNEDIECLKSLCRQYYKLSDELTTYKNRLTGIVDQLMLNFKDVFPDIYSKTAIAVLAEYPTPTTIIKADKDKLVSIIKGNSRKSLEWATAKYELLVLKAKEFEPLSVNNTANVTMLTVYISMVKNLQNSLTKILKAIHQLIDDDLSKDVPVISPTLELLQSIPGIGFLTAATIIAEIGDFSAFSKPKKLVAYFGIDPSVMQSGEFTGTRNKMSKRGSRLLRRVLYTTALANIRTKRNSEPCNPVLMDFYKRKSQSKPKKVALGAVMHKLVYIIFAVLRDRKPFELRTPEEHAKMLTRKHTAA

SEQ ID NO: 454488 - protein, 322 aa, unidentified
MSETGSVEAVFVGIDVSQERLDVGLWPADETFQETNDREGIERLAERLAALHPRVVVLESTGRLEVPMALELGEQGVPYAIVNPRPVRDFARSMGKLAKTDRIDAVMLARWAESARVAPKPLPDAQRRELRALLMRRLQLVENRVAEEHRLRGETHPRVRKSLKASIAWHERQIAELDKELDRTIKADPTFTARSELVQSVPGVGPQTARMIVACLPELGTLTRQKIAALVGVAPLNKDSGKSQGKRFCWGGRIEVRCALYMAALVASRFNPVISVVYQRLRAKGKPAKVALVACMRKLLVILNAMARDKTVWRQTDSAAAA

SEQ ID NO: 454489 - protein, 366 aa, unidentified
MKKISTVVVEGMQIFKENQLTIGLDLGDRISRYCILDEAGQIILEQELPTTAKGIEQVFSKIPRSRIALETGTHSPWLSRQLGQYGHEVIVAHARNVRLISESSRKDDRLDARTLGRLARIDPALLSPVRHRSAKAQMHLTIIRARAVLVSARTALVNAARGLTKSNGQRLPQCGTEQIHREIAKGLSQELRDALDPLLREIESLNERIAEYDTRIEQIAREMYPEVARLRQVKGVGPLIALTYVLTLDDPFRFRSSRDVGCFLGLRPGRRNSGRSEPQLHISKEGDRYLRTLLVQGAHYVMGPFGQDSDLRRWGLKLAERGGKNAKKRAVVAVARKLAVLLHKLWVSKEVYEPLRNNRKGMAQVA

SEQ ID NO: 454490 - protein, 355 aa, unidentified
MTSAKYIGMDVHKESISIAVRNAAGKVVMECVIETKASMILQFFDGLRGDLHVTFEEGTWAAWLYDLLKPHVTKLVVCDPRRNALLQDSNQNDRVDARKLSDLLYMNKLNAVYHGDHGLRTLKELGRSYLTITRDQSRVMSRIKAIYRSWAIPCSGKQVYGSRHRAEWLGKIGEPGVRRRAELYYQQLDALRTLRQEVRRALLAESKKHKVWKRLCAIPSIGPIRAAELLGILQTPHRFRTKRQLWTYCGLGVVTSSSADHEVANGQLRRKKKHVEIRGLNENCNHDLKNLFKGAAVVASIKPGPLAEFYAVLVAKGMRPEMARLTLARKIATIVLIVWKRGVCFDAHHLKPQTA

SEQ ID NO: 454491 - protein, 368 aa, unidentified
MDKAITFFVGLDVHKETIAIGIAAAGDTPPRFVGTVGPVLSSLLTALERIGPPGSLRLVYEAGPTGFHLARELAGRGYDCQVIAAAKIPRRPGERIKTDRRDCQMLARLARAGELVAVVVPDARDEAMRDLSRAREDAVAARLKARQQLKAMLLRHGHRYSGKTSWTAAHERYLAAVSFPHPAQDLAFAEYRLAVAAADAQVTRLTAALRTEVETWRMQPVVAALCTLRGIDFVAAVTLLAELGDLTRFAHPRELMGFLGLVPSQYSSGETRRHGAITKTGNGHARRVLVEAALNHRFPARMSRLLQQRQTGQSEAVRAIAWKAQIRLCHRYRRLIERGLPKNKASVAIARELAGFVWDIARQVQPKP

SEQ ID NO: 454492 - protein, 335 aa, unidentified
MNFVGIDLHKKTITLEALNQDRHVVKRPTLACSDPQSIRRCFEQFRPFQAVVEATASYEWLWELLEPLAQRLVLAHPGKLRLIAESKNKSDRVDAHVLAELLVLDLIPPACRPGPRQREHRRLVRQREYLTHRTTAVRNKIRRLLSDYNADRPNLFTRDGLAYVATVAVAEADRFILQQLLAEWRHHEEQLQAMDKRLRQFAQAGPAREQEAQDVLASIPGVGPVTIDVVLSEVGDVGRFRSAKEVVAYAGLAPRQRESAGKRKELGITKQGSRSLRWVLVEAAWRLVRCSRRWQTVFERLQRRGRKKAIVAVARRLLTVMVALLRTGQRYRRAA

SEQ ID NO: 454493 - protein, 382 aa, unidentified
MLWTATSHFAEAGQSDCITMHVGLDVHKDSIEIATADVRGGEIRHVGRIGGDLPALDAALARLRCPVAGMQVVYEAGPCGYAIYRHLVARGIACAVVAPSLTPRRPGERIKTDRRDALKLARLSRAGELRAIRVPDTEDEAIRDLLRAREDTVRVQRNARHRLKALLLRQDVRYTGKTAWTPAHERWLARVRLPTPAQQIVFQEYVDSVHQATLRIARFDTVTGDLLPHWTRYPLVRELQALRGVRQLHAAMLIAEVGPFERFDSPRQLMGFLGLTPSESSSDSRRRQGAITKTGNAFARRALVEAAWQYRFPARVGITIARRQGECSETARAIAWKAQVRLCARFRRLQARRMLSTKAVVAIARELSGFVWAIACAEAASH

SEQ ID NO: 454494 - protein, 415 aa, unidentified
MEDLGLRALYRRVAGIDVHRMLHVVTVLIEQADGSMQRQTREFGGFRRDCRALAAWLGELGVELVVMESTGIYWKSVHAHLENAGIAAWVVNAHMIKHVPGRKTDMADSEWLAVLGRFGLVRASFIPPKDLRELRLVSRYRRKLSSMCASEINRLHKVLDDGGIKLGGVVSDINGVSARAMVSALIEGKPIEHMLGLARGRLKQRRDDLGASLEGDLSARHLFVLRHIHAHVEMLQREIAEIDVYLLAAMQPYAWAHLLLQTIPGIDEIAAAMILIEIGDDMDRFGCAGRLASWTALSPGNNESAGKRKSGRTRHGNSIIRFILCECANAARMTKSTLAAKYRSLTVRKSHKRAIVAVAHKMIRLIFVMLSRRQPYIDQSIDYAAISAKKNAPRWIKQLKIIGRWPTAKTAAAVH

SEQ ID NO: 454495 - protein, 356 aa, unidentified
MSSIALKRDEVIIGVDTHKEEHVGVALDGLGGRIGELKIPATGAGYARLCEWARGLGRVHAFGVEGTGSYGSGLARFLRRQGELVVEVGRPPRKGERRADGKSDPIDAEHAAREVLSGQATAQPKLANGVVEAIRLLKIARDTAVKAHSQALIALKATLVTADDELRSRLEPLSAFQLVKKCSGFQPDALPPSDPRTAMLYVLGSLARRWLQLHEEIKAHTRALEQLTARAAPRLVEAFGIGFDSAAEMLVTAGDDSGRIRSEAALAKLCGACPIPASSGKTNGRHRLNRGGNRQANAALHRVVIVRMRWHEPTRAYVARRTAEGLSKKDIIRCLKRYVAREVYRLLPDPLPETAG

SEQ ID NO: 454496 - protein, 482 aa, unidentified
MKKRNIYQNQSQELLHLFEEAGSSEKVMCVPMDYAKKDHLVMFCNGHGDILRKPFSVKNTPEGIAYIDDQVTRSCRRRGIKKKHVFFGGEDANSFAKNFVSTLRSNGFLVANVNAHDAKKQRGNVQASTDRIDLMGIATMLLNCRANCGPAQSGIYRNLRTLVRHRRKLVQMLTEVKNRVHGIVDELFPGFLNERNSGIIPFTQSSLYLMEDRFSPKQIRRRRRQKLIEILKRFGTSKAEKTAAKLQQYAAKVLHAPVEYVDTMQLSLTQHVKHIRCLKESIAQMDKDIALNLAQTQGAFLTSVRGIGLVLAAGVTAEIGDLNEQKPLNNLASYSGIIPRVKQTGGSDGKTYTGPVAKRCNRILKDYVVKSAYHLGLHGPQDLMTDYKRRDASGQHADFGMGRRYLRMAINLMRTSQVYLPPNLRKDDYTLEERAGYYLMSWPYLKEKWKKVGALEAAFAKKRPLGLWRQIVQELYDIKLKL

SEQ ID NO: 454497 - protein, 428 aa, unidentified
MNYTQNEKIAQVTEKTLIIGIDIGSESHYARAFNWRGQELGKKVFHFNDDMLGYQAFGQWISGLKDSLSAEKVIVGCEPTGHYWFNVAQYVKEAGMTLVLVNPYHVKQIKELDDNSPKKTDFKDPKTIAKLVVDGRYSIPYIPEEIYAELRLAVSSRDRIVKELNALTNQIKRWLKIYFPEYLKVYKVFSAESGLLLLEHSPLPKGILELGAEGINQIWREHKLRAVGMKRATTLVESARKSVGIDGGVCVEMELQLLLADYRMKQEQLKNVTEVLEAETLKVPNVEELLAIKGIGLLTVAGFLAEVGEIGRFDSPKQIQKLAGLELKENSSGKHKGQTSISKRGRKKLRRILFQAVLPLLRSNAEFADVYEYYTTRQNNPLKGKQAVIAVGCKLIRIFYVILTKGMDYDANRMRSDIIQPQNLPQAA

SEQ ID NO: 454498 - protein, 440 aa, unidentified
MTTPSLTVLDPTAAAIDVGSEQLHVSVAGGPPKVFGTTTGQLYELRECLKAQGVRSVAMEATGVYWLCPYEVLEKAGLEVVVVNGKYVKNLPGRKTDMKDCQWQATLHAHGLLKPGFVPPEHIRRLQDYLRLRTDHITMAGSHEQHMQKALDRMNLKIHEVISDLTGVSGLKMVEAILAGQRNPVALLAVCDPQVQKNKAGRLRAALEGSWKDEHLFALRQAYELWQTYRQKIAECDRAIEGVLREMVGPEDPQAPAPPPAIKRGGVNTPQIAGLHGLLWRLCGCKDLTALPGVANYVLLQLLAEVGTDLAKHWPTEKHFTAWLGLAPGSRQSGKRRGNQKRGRNRAGRLFCVIARSVGRSVDKALGGFYRRLKGRRGGLVANLALARKLAELFWRLMVHGIAYVEQGLKKYEEKVAQTEQRLLQKLARKYNLVLQPKAA

SEQ ID NO: 454499 - protein, 422 aa, unidentified
MENSDVAVELVERVAALDIGKKALMACVRVPHEDNPGRRRQEVGEYPTTTRSLLALADRLRCQGVTLVVMEATGDYWKPVFYLLEAEGFTCWLLNARHVKNVPGRPKTDKLDAVWLAKVAERGMCRPSFVPPKPIRRLRDLTRYRRSLVRERTREKQRVEKILEDAQIKLSSVITDIFGVSGREMIEALIAGQRDPRVLAQMARSSMRAKIGVLTEALTGHFDDHHAFICQMMLERIDELTARITQLNAKIEEQIAPFQAQVAQLDEVTGVGLICAQELVAELGTDMGIFPTASHLVAWARFCPQAKQSAGKNKGSGATGNGNPWLAATLGEIAGACCRTSTFLGARYRRIAKRRGNGRALVAVCNSILTITWHLLSDPQAHYQDLGPEYYDTRAGHDRQARNLVRQLERLTGQKVTFQPAA

SEQ ID NO: 454500 - protein, 336 aa, unidentified
MRFIGVDLHTTQITVCYLKAEAEFEIRKYQLCEIDKFISSLQKGDEIAVEATCNTRWFSEQVRAAVRRVVLVNPRQFEVVKNSCKKTDKNDALNLARFLKADLLPEVRAKKEEAEKVQSLVQTRTKLVRLKTSLINKIHGLAVSKGRKLKKTSLASEKGLDKVLLSEWSAIERIELEIIIEQIRSLKVSLKKLDTAIEAESEQLQGYQNLVSISGIGSLSAGILLAVIGEVKDFGTADKLASYFGIVPRVSNSNETVNHGRITKRGNKTGRTTLVQCSLAAIRKSEYLKKYYEQVKARRGHGKAKIALARKYLGIIYNTLTNNWVFADFNNFELAE

SEQ ID NO: 454501 - protein, 347 aa, unidentified
MIIIGCDLHTRSQQIAGLDMETGEVEERRLEHANGEARAFYAGLREPALVGIESTGYTQWFEELRVEFGHELVVGDAAKIRKMEVRKQKHDRRDAEHLLNLLVKGDFPRLWLPSAAERDVRVWLEHRHQLVQMRTRALNGLQAVALNQGLGLRQKLWTKRGQEELKKLPLREGRARRRADLLALRAQLDGWIAELDQRLEQEVAQRPDAQRLMTHPGVGPLTALGTVLVLGPVERFPDARHVTSYVGLIPQEASSGGRQRFGHLTKQGNGLLRFLLVEAGQTASRLDPGLRRAYRRLTFRKGRASAKVAVARKLAIRLYIMLRDKIDYEEFCRRGSHAGMLGEVALA

SEQ ID NO: 454502 - protein, 364 aa, unidentified
MKIVGCDLHAGQQSIAMMDSETGEFTEKVLKHEGNAVREFYGSLEGPVVVGIEATGAMQWFLELLEELGIECRVGHPAQIRAAETRQQKHDRRDAEVILELLLMKDRFPDIWMPSTEQRDLRSLLRDRHQWVKMRSRLQHTLQAIALNHALRKGKALWTVRGRQALQDLALPDYSAQRRDELLRLYLQLEQRIQQLDKQVEKEAQGRPQARRLLTHPGVGPVTALATEVFLGDAHRFTTAKEVASYIGMIPCEHSSGKRRRLGKLTKEGNSLLRYLWTEATLHAAVKDPELKRFYRRKLVQKGMGKARVATARKLGIRLWIMLRDEIDYEEFCRRGKLPQKGKTHAGMPDFNSGPARAVTGSTE

SEQ ID NO: 454503 - protein, 398 aa, unidentified
MKVTTLGIDLAKSVFQLDGVDARGVVMLRKQLRRKQVLPFLTRLSPCLVGMEACAGSHYSAREIGKLGHRVRLMSPHLVAPYVKSNKNDRNDAEAICEAVSRPSMRFVPIKSAAQQDLQSLHRVRSQLIRSRTALANEIRGLLGEYGIALAKELRVLRRALPLILEDQDNGLSGVFRETLVEMVERLKFLDERIKRYEQRVKQLFEQDERCQRLAQIQGVGPLIATALIAAVGNAREFRSGHELSAWLGLVPRQQSSGCRNVLLGITKRGDRYLRMLLIHGARAAVRYAERRTDPGGAWISRLRRVADPTSPQSRSRTKTRGSPGSYSAPAKAIVRRNHCPPPTRKRDERAPLGGQRTGRRGAVRVVADPKPAVFPPPSKSARGRAKKPLLAAGAKQP

SEQ ID NO: 454504 - protein, 411 aa, unidentified
MEAMIERCAGLDVHQETVVACVLFGPLDKKPKTSIETFSTTTTGLLALSDWLVTLQVSDVVMESTGVYWKPIWNILEGSFHLVLANARHVKNVPGRKTDVKDAEWLAKLLRCGLIESNFVPPEDIRDLRDLTRYRKKLIHHRTSEQNRIHKILQDANIKLTSVLSDIFGVSGRRILEAILNGEKIETDGLRKMVDWRTKASITDIASAINGRIRRHHRDMLRYHWEHMGYLEKAIEELEKQIDQLLSPYRKEVELLDGIPGVNKAAAATFIAEMGVDMSVFKSAKHLASWAGVSPGNYESAGKKKTSKTTQGNKALKTMAVECVLATSRQNNRIASHRKRISKRQGKMKGRIASAHLLLTIAYNILKTGEPYHELGSNYLEEKQKNNKELKMIEYLKKKGYTIAPSKQQTA

SEQ ID NO: 454505 - protein, 417 aa, unidentified
MSQEYRRCCGLDIHKETVVACVLPSDANRDEPPRRKVFATFTRDLIRLRCWLKQCKVTDVAMESTGVYWKPVWNVLEGHFDVLLLANPGQVKALQGRKTDHRDARRVGEFLQDRRLDPSFVPPRHVREWRDLTRYRAHLKQDRNRIHNRIHRALEESNIKLDCVASDILGTSGRHMIEGLIDGKFGPEFLADRARKRLREKIPQLKQALRGTLTDHHRLLLRQLLADLDALDAKVARLEAEIAARLQPHSDLIERLCTVPGIDVIAAWTILAEIGSDVNAFSDADHLVSWAALCPGNRQSGGKRISGHTRKGNRYLRSALCQAAWAASRTKDTYLSALFFRLAARHGVKKATVAVAHQLLRIAFHIIRDGGRYRELGGNYFDRLHPERTRKRLIRRLEALGYRVTLAPHDNPGPNTA

SEQ ID NO: 454506 - protein, 364 aa, unidentified
MDETIWLGLDVHAGSITICKLVGQSDKEQSWTIPNEAKDVRRTFTRLKQEGQIRACYEAGPCGYHLFRQLQGLKVDCRVIAPALIPRKAADRVKTDRRDAIKLARLYRAGELTTITVPTTSQETARDVVRARESIRRDLTAARQRLSKFLLRHGRRFSGTAWRGVHRAWLRAQDFTDADRVVFDHYHAQVLHLDDRLAALDREILSLARSEPFKPIVDRLCCLKGIAELGAMVVVTELYDLRRFSSPRQLMSFLGLVSSEHSSGEKTHRGRLTRTGNGHVRRILIESAWAYRYRAGRSARLRRALEGQPAAVVAISEKAEHRLTKRYARLIERGKARPHACECVARELCGFVWAMALADGRVVV

SEQ ID NO: 454507 - protein, 342 aa, unidentified
MSRYLGVDLHRNRFTVCTQLESGRQYLATLKMEALPKFVSRLRPDDEIAVEVTGNTRLFYDAVAAHVRRVVVVNPSQFHVIRKSVKKTDEHDARALALFLSKDLLPEVRMKDQEHAEMASLAQTRDTLVKSRTALKNKVNNLLSARGVNLSKESLASEKGLREVLGMCFGTTVDVELRVLVDQIRSLNQSIAELEKAISEQGPKLPGYENLKSIKGIGDVGASVLLSVIGDVNDFADEGKLAAYFGIVPRVSNSNETQHSGRITKRGSKLGRTILIQCALIAKRYSDYLQRYYERIKARRGSGKAIVALARKFLGIIYRTLKDDLIWEDFPNGVIRDGEASA

SEQ ID NO: 454508 - protein, 412 aa, unidentified
MEVIHTRCAGLDISKKDAKVCVRVAGAGRRKAVETVTTWSSMTLRILALRDHLAAEQVTCVVMEATGDYWKPFYYLLEDLPGVEVVLVNARHVKNLPGRKTDVADAAWLAQLGAHGLVKGSFVPPEPIRQLRDLTRTRTAITRERSREVQRLEKLLEDAGIKLSSVATDIVGVSGRAMIEALIAGDHDAGRMADLAQRRMRVKIPQLTEALVGRFTDHHGFLARVHLDLIDQHTAVIDQLTERIEAMMEPFRGFHDLICTIPGISTLTADVVVAETGADMSRFPTAKHLASWAGTTPGNNESAGRVKSSRTRPGNPYLQGALGASAMSIARTPGTYLNAKYRRVASRRGPQKANVAIQRALLVAIWHMGTTGTLYDDPGADYYSRLRPERARQRAIHQLEAMGYRVTLDQAS

SEQ ID NO: 454509 - protein, 346 aa, unidentified
MLYAGLDLSRKRLDVHVLREDGTTALVTAISPDGDAMRSLVRRVAAEGEPVRATIESMNGARFIHDRLEFLGWEVLIADAQRVRGLAPLAAKTDKIDARVLAELTRRALVPEIWLPTPEVRAERERARFRLHLVRHRSALKNRIHAILIAFGRACPMSDLFGVAGRELLDSLALPEPWQTNLVESLAFVDDLTARIDALELELRRLGAEHPSMRLLMTVPGVGWVLAYTIASEIGDIDRFASPKKLAGYTGLCPLVRQSGGKDRRGPLAKNGPTYLRWALIEAATHAARDPRYRERYERTKQRLGRQRGAKVARVDLARQLAEAIWHVLTKNEPFHPAGPAMGLVA

SEQ ID NO: 454510 - protein, 360 aa, unidentified
MIVQGTSVGLDVHALSVVAHAVDEETGKLARARLCPDHSEVLGWLHQLRAPVRVAYEAGPTGFGLARAINEAGMECVVAAPSKLQRPAGDRVKTDARDAAHLARLLRLGEITAVRVPEREIEAVRDLVRAREDARADLMRVRHRLSKLLLRQGIVYYGGTPWTGLHGEWLRRHRFDDIHLKAAFDHGFDAVLAATAARDRLDEQIMEVAASARFADPVNRLGCLRGISALTGLALTVEIGDWSRFTGSAIGAYVGLVPSEYSSGSSRTQGSITKAGNTHVRRLLIESAWHHRKSYSTSGPSLRARWAKVDPALRARGHTGNRRLNKRWRSFTERGKNPQVANVAVARELAGWCWSLATMQ

SEQ ID NO: 454511 - protein, 381 aa, unidentified
MMVNSTATSNEQSICAALELSKNSWLLAIQVPGRDNPSLHPLLGGDAEGLMAKLDAARDRVAKATGQPPAVTLCYEAGYDGFWLARFLEQRGITCQVMEPASLQVNRRARRVKTDRIDVESILHTLVAWCRGERHVCSMVVVPSVEEEDLRRCHRERDRLIRERTAHTNRIKGLLFGQGIRGINVKSRYKTLKPSELVTGDGRPLPDRLGREITREIERLAQVQAQIVSVERERDHPVTSCAATEIKRHDLLRLKGLGPALSSTLTREVYYRRFTNRRQVASYIGIAPSAYDSGDGHRSQGISKAGNRLARVAMVEAAWLWLRHQPDSALSQWFHDRTQGQKGRIRRIMIVALARKLAIALWRYLETGLIPEGAILKSRVR

SEQ ID NO: 454512 - protein, 339 aa, unidentified
MTSVMVFVGLDYHQNSVQACVLDAEGNQVLNRKFPNNTGAIIRAIRRLGQVKGVAIEACCGAADLADEILQEAGWSVSLAHPGYVARMKQNRDKTDFSDARLLADLLRVGYLPKVWLAPKELRQLRHLVRLRQDLVAQRRKLKLQIRALLRENRIVAPGGTKAWTCDWLAWLRTTDALTDDDRWIMDRRLESLGEMIQKIRVVEQRLRERTKDDAVIQKLRSFHGVGLVTSVIMRAEIGHFDRFATGKQLARFCGLSPRNVSSGERQADAGLIKAGNTQLRVVVIETAQRLLWQLDNHWARLAVRLLRKGKPRNVVVAAVANRWIRWLYHQMQPEWLAA

SEQ ID NO: 454513 - protein, 524 aa, unidentified
MALELPAVAVFASGLRTKLPAHRIFTAVWLEKGESARSSEIRSAHRGPRSTTIGKGQRMTVMIGVDPHKRSHTAVAIDADDVELAAIEVRASQAQVAQLLAWAARFEARTWAVEGAGGVGYLLAQQLVAAGERVLDVPATLAARVRVLGSGRSNKNDPNDGYSIAVAARHAPKLEQVAGADHASVLRLLAKRNRELGSARTRTVCRLHALLVALVPGGISKEITANRAAALLATVTPMNPVEATRHDLAREHLEDLRRLDEQMRASKRRLADAVRASRTTVTEVFGFGPVGAAIAIGQTRDVSRFADRDHFAAYNGTAPIEVGSGGHSVHRLSRRGNRQLNHAIHIAAITQIRHAHSPGRAFYDRKLAEGKTKKEAVRALKRRISDALYQRLVADAATNAGPGGQAGTTEQVSVTGLAPQEPALRNSHSRTHTERRTRPPTAATTRQHDAPKRHQQGLDNKEVFDRRSVTAGASCIRAALDRRAHPRFLPGAPREVLDRSHHPAVPRSRGVRTAARERLRRSSA

SEQ ID NO: 454514 - protein, 387 aa, unidentified
MTKNKGRVVGLDVHPDSFAGAVVEGRDPASAVVSSTSTRVELEQLEQWALRHSRREDTLVLEASGNAFAVAARLRAIGREVEILDSHRAGKVGKVYCANDRVDAVKIARIYLSALSPIVWQPDQKTLERREVFSAYQAVVKESTRAKQQLRSMLNEHCVRLEKGFRLCHPRAITRLLKLREWTPARSMLLQQLHSTLVAARARRTLLRRHMAQEIAAEEALLRLTRLCGINLITLYGVVAAVGDVRRFTQSKKLVAYLGLNPSVSQSGNFQGSGALKRHGRGALRALLIQSGKKLLEVNNPLQKWGLALAARRGRNKAAVAVARKLCVALWHVIMGHAIGTLERLDTLQTKLSKFATEIGPAALTAFGYNNKADFVEKKLYVLRSYP

SEQ ID NO: 454515 - protein, 404 aa, unidentified
MNAVGIDVSKGKSMIAIMRPLGEVVATPFEVGHTAAELNELAKFILKISGETRVVMEYTGVYFEPIARALYDAGLCVCVVHAQLIHNYCNNTIRKVKTDKADAIKIANYALDNWGKLNPYTPIDEVRRQLKAYSRQYRKFNKLKTMLKNNFIALTDSTFPGVNELFSSPPRKSDGHEKWLDFAMKFWHAECVCSLSQKAFTERYRKWCHKAGYYFLESNAEDIYAAACGHIGLLPKDENTKQLVQQTIIQLTSICSSLSVIENKMTELAGLLPEYPIVMEFRGVGRILGPQIMAEVGDVLRFEKKESLVCFAGLEAPPYESGKFESHNRTISKKGSPHLRAALFQVMDCLIKTQPVNDPVFQFVDRKRSEGKHYYSYMCAGSAKFLRIYYARVKEYLTALEQNT

SEQ ID NO: 454516 - protein, 348 aa, unidentified
MTIVAEKYDYVIGVDTHARTHTYAIVHAANGACAVTEAFPTTPAAIARSLAWAKRNTSGRVLAAVEGTSSYGAGLTRALTRASIEVTEVKPPRKASRAGLGKSDPIDAVVAARHVLARDITKLTTPRAEGIRGALRVLLTGRRGLDIHSTANRNALNALARTVDLGIDARKPLSNTQITNIAAWRPRSADTIEQRIARVEATRLATAIKAANTQLRDSKKRLAELCEQVAPGLQDLVGLGPVTAAILLTAYSHHGRIRSEAAFAALAGVSPLPASSGNTVRYRLNRHGDRQLNMALDVIVKVRMMRDDDTKRYVARRTAEGKNYREIKRILKRYVARNIYRQLQTLMP

SEQ ID NO: 454517 - protein, 316 aa, unidentified
MPNNHHEHNKIFIGIDVSKATLDIHIHPQATNFTIKNDAKSIVEWIKSSAPKYATIIFEATGGYERILLKILTKHPNLLAKRIHPSQVKSFARAFGKQAKTDAIDAEMLAKAGIFLGNLLHDTTPENEIQELRDLLARKAQLQAMLHAEQCRVKLESLNKAVVADLKSNINALKKRIFSIESAASALIAQNNYLQKRADRLQKVVGIGAQVAMTVLAFLPEIGKVDRKKIASIAGLAPITNQSGKSLGKARVQGGRQMLKKALYMATLVGIQYNHVLKTFYQSLLEKRKPKMVAIIATARKLLLHINAIEKNAQFE

SEQ ID NO: 454518 - protein, 349 aa, unidentified
MSDGIPVGRRFVGVDLHLHRSVIAGLDEAGEQLGWVRIDNDPKMLVREVGKAGGRGCPVAVEATYGWYWAVDALLAAKFDVRLAHPYGMKAMRKRKRVKTDQRDAYELANLLRLGSLPQAYIAPPDLRELRELVRHRRQLVKLATATKAGVRALLAKHNIRLAATDLDGDTATGLMDAVDLPGTYAIRLAAQRRLLLVLADEIAAVEVELARRLKDHPGYRRLLGVKGIGPVLAAVFVAEIGDVSRFPTAAALCCWAGITPRHYESDKTVRRGHISKEGDTLVRWAAVEAVQRNCEPAIRDVRDRIIARRGKDARNTAKVAAGRVMLETVYYLLRDGESRRLANHASAA

SEQ ID NO: 454519 - protein, 335 aa, unidentified
MHYLYYVGLDVSKETFDASLVAFEDANEMAHRKFANSRKGICSCLHWVEKRHGIRLVDVIFCAEDMGSYISEMAVCASDRTLNFNFSLISPLVIKYSMGIARGKTDRVDARRIAEYAITHYRKIALYLPAEKELCQLRTWLILRAYLAKQRVAKLVLLEKLDYKEKFADVSIQRSMLQEEIAYAETHMKTIEREMKELIAADSNICRNYKLLTSIKGVGPITAIVMLCSTLNFTKITDHRKFACYCGLAPFEHSSGTSVRGGCHTSSMANRDIKVQLNRSALIAIRCDPQLKAYYERKVAEGKHKFSVLNAVRAKIAARCFAVVRRGTPYVALQI

SEQ ID NO: 454520 - protein, 423 aa, unidentified
MEVIYPRCAGLDVHKETVVANVRLAAGTKVTREVMTFETTTSGLQSLLAWLTEKRCTHAAMEATGVYWRPVWNILSDGRCKLILANAAHIKNVPGRKTDVTDAAWIADLLAHGLIRSSFVPEQETQELRELMRTRKQLSRQQVSHIQRLQKTLEAANIKLDSVVTDIVGKTGRAIIQALIAGETNPVRLAALADPRIKASPQQLREALHGRVTHHHRFLLHLHMQYVDFADASIRDIDEKVTALIDRMDRGVQAGKAPFRILISLLMTIPGIDLLSARVILSEIGPDMGRFPTAGHLLSWAGLCPRNDESAGKRRSTRLRKGDRWLRTVLVQCAFPAARKKGSYFKAQFHRLASRRGPKKAACAVAASILTMVYHMLKNGTQFQDLGADHFDRRSKDVRAKRLLAQLARLGFDAKLTPLAQAA

SEQ ID NO: 454521 - protein, 406 aa, unidentified
MQGPVITVDVSKGSCHYQPYVSNGHPMRKPKVLHDMVEGFQSLSDLIDTMKDRYECETIPVIFEATGVYHHCLQKYLDDHQIPYYIISPLMSASYRKTTPNSNKTDDLDCSHIAKAYYGECNLFPYDKPSKSFHNLRELNRYYECELNHLRMRKNTFRKYLDIVYSRLDKCFKGHSSLYDEIPMEVIKQYPHPSLLLKHKEETIVKKIEKKTSHNALFIQNIVHEMYECSMHCYSGADVTDVESMILPELVDDLQSQKERCDEILKQLVSEAQKTPYFTSIVSIVGIGDNLAARIIAELGDMSRFSCRRAITAYAGLNPKIRQSGDMDGIHLAISKKGNKHLRCLMYLAVSCNYRLKKGDVLYEFNQKKRQQSFSPLKPKAATIATAHKLLLIICALCTNGTVYRS

SEQ ID NO: 454522 - protein, 366 aa, unidentified
MENIIAFDSHKRYSLALVETKNGEKVAEQRISHKRGNIAGFLLPYPPGSPVAVETIGNWYWIVDEIEQAGMNPRLVHARKAKLMLGSINKTDKLDVRGLNILQRTGTLPVVWIPPGDLRDKREIPRTRMVFAVQRTRLKNRIHSVLAKYGLQDQFEGLSDIFGKQGRQLLKCCMRQLPAQTRWTMRGLLRQLDAVEGEIRRIECRMEEVFNPTKDVELLRTMPGVGPILAVVISQEVGDVGRFGSSAQLASYSGTTPRVHASGDKVRYGRLRPDTNRYLKWAFSEAGNSIVVNRYKYPHRYAVGLYNRVRRRRGHATAVGALARHLAESTYWVLTKKEPYRERGISQQNEQKVRVFADESMRACVS

SEQ ID NO: 454523 - protein, 340 aa, unidentified
MGEISTIGLDLAKHVFQVHGVDEQGNVVVRKVLRRGAVLKLFAELSPCTVGIKACSTAHYWARELTALGHMVRLMPPAYVKPYVKRGKNDAADAEAICEAVRRPTMRFVPVKSAEQQANAMVYKVRELLVRQRTQLINALRSHLAEIGIVAAKGPGKLDHLIAIVGEREDGWLPQPARQALQELAEQIATLDARIERLHQEIAAQLRSNETARRLTTVPGVGPPIAGALVAMVPDPGGFRSARHFASWLGFAPQQKSSGGKQRLGSISKQGNRYLRSLLILGAANVLRRRSASRSTWLVALRGRRPFRGVAVALAHKIARIVWALMVKGGSYRAAMPAAG

SEQ ID NO: 454524 - protein, 349 aa, unidentified
MIYVGLDLHKNFSVITMMDAQGKEMVKQKKLANDSEIVKLLHEFDQPVAVAMEATRSWYWLYDLLEEEGIEVKLSHPLKTKAIASARVKNDKIDSRILAHLLRADLLPLSYVPPKPIRMQRELLRYRASLVKIQTGVKNKVHAILAKNNITHDFTDLFGKQGKAFLNSLSLPEIYRMALDGYLSVLDELEQQIKVVNKKIVVSARDDEEARLLMTIPGVGYYSALLIKSEIGDVNRFPSAKQLCAYAGLIPSTYSSGDTTFHGHIIKQGSKWLRWITAEAIEHCITKPGHLQAFYWRLERRKGRKIAKVATERKLLEWVYHMLKERRTFEEMERIASNRGEPVSVSGSK

SEQ ID NO: 454525 - protein, 356 aa, unidentified
MKSTIKYVGMDVHQSTISVAVLDAEGKRVMQSILATHAAAILDFIHGVRGTLQVTFEEGTQSAWLYDLLVRHVAKVVVCNPRKNALLKAGNKSDQIDARKLAELLRADLLSPVYHGENSCRILQEFVRSYTTLTEDTTRIMARIKALYRSHAIACAGKKPYGKRHRQEWLQHIQQPGLSSRAQRLYDQLDAVQTLRRAAKREMLAESHKYGAYRLLCSIPYLGPVRSSILMARAQVPNRFRTKRQFWAYCGLALETRTSAEYRVVQGQVQRSRKPVFIRGLNFNHNHDLKNVFKGAATAASLHDGPLRQFYDRLLAQGMKPELARVTLARKIAAMALILWKKGESFDPKYLMLQAA

SEQ ID NO: 454526 - protein, 316 aa, unidentified
MTAQCVAGIDVSKARLDVFVLPQRLAFECTNDEAGITMLRQKLQGLGVERVVLEATGGLEYCAARALADAELSVERVQPGRIRAFRTVLGKRAKSDPLDAKLAARFAQAMPEEQARSIPNHQAEAIRSLSARRRQLVDLLVQEKTRLKMSRDRFVLESLKITISHLKQERARIEALLESAIEKDVAIARKNALLRTIPGIGPVVATTLITDLPELGRLNRHEVASLGGLAPHPERSGISRPGDHIGGGRACVRTALYMAAVCAIRCNPGLKTFYKRLVEGGKPHKVAVVAVARKLIVLANTLIRTDAPWNPAFGIG

SEQ ID NO: 454527 - protein, 351 aa, unidentified
MIIIGVDYHPSFQTIAFLMEETGEYGEQELNHSDGEAERFYRELKERGVSVRVGMEATGHARWFERLLAELGFELWIGDPAEIKTKRVRKQKTDREDARLMLKLLRENRFPKIWVPSPENRDLRQLLWHRHRLVQMRTRIMNQLQAVAMNEGYRWKKKLFSEKGRALLEKLSLAPWASRRRKELLELLDQLDPKIEELTAAVDQEAKKRPEVLLLRTHPGVGPITGLAYVLVIGTPDRFLCGKQIGSYTGLIPCENSSAGKQRLGHISKQGNSLLRFLLVEAAQAAARCNPAWRRRYAHLMMRREKRIAKVAMARKLAVRLYWMWRNNWQYSQLVEFGSNAGKLGTVHGVK

SEQ ID NO: 454528 - protein, 362 aa, unidentified
MAKTFETTVAVIGIDIGKNSFHIVGLDRRGAIVLRQRWSRGQVETRLANVPPCLIGMEACVGAHHLSRRLKALGHDARLMPAKYVRPYSKGQKNDFRDAEAIAEAVQRPTMKFVATKTVEQLDLQALHRVRERLVSQRTGIINQIRAFLLERRIAVRQGRLSLRMALPQILAAPPDVLSPRMLHIIEDLTGDWRQLDERIQALSDEIGAIARQDIGCERLMSVPGIGPIISSAMVAAIGTGEAFSKGRDFAAWLGLVPKQVSTGDRTILGKISKRGNRYLRVLFVQAAWVVLVKRKSRECLGLDRWLEAPRNGYTTMCWLSRSPTSWRALPGAFLHTAEPSPSETSLKPPLRPSNPRATTAR

SEQ ID NO: 454529 - protein, 455 aa, unidentified
MQANGFLGIDVSKGYGDFLLLDDHKQVMEEGFQLQDNKAGRKQLRELIEKWFSLGLKILCCGVESTGGYENNWYYFLKSLAQHFDVKVARLNAKAVKAVSDASLKRTITDEVSAENIAAYLISFPEKIDYGKCEAEETGTKFREGRRHSTYVRMLQKQKVQLTNQLEKLLYQYFGEMLVYCRHGIPAWLLRMLNHYPCAARVMKAGEKKLSAIKGISAAKAKALLDKATKCEQSVSKQIEHVIAATSKEILHKEQLLGVEKDFLTEMNREAEEVKLLNSIPCIGEESAVALMLEIENIGRFESAKKLAAYFGVQPTYKQSGDGIWTVGMSKKGRGEVRAVLYMATLSGIRHNVILKQIYARFRAKGMKHYQAMGVAMHKLLRIMYGVLKKKTKFDAAIDQKNTEQAKEKQNQQQFKEAKKFKEQKKYRYQSATTDAPISRIAAQKRKKQAASQAS

SEQ ID NO: 454530 - protein, 338 aa, unidentified
MSIAVLGVDLAKNVFQLCGVDGKGRRVVTRRLPRAQLLPFIATLPPCIIGIEACASAFHWARQFQARGHTVRIISPQFVKPFIRGNKNDGNDAEAICEAVQRPNMRFVPLKSIEQQDVQSLHRARQRLVNHRTALISQMRGLLLDRGIVFAPSATQARRQIPLIVNEPTSDLSPVVRDILRTLLELLRELDTRIKVFDQEIARVFHASPVCQRLARIEGVGPKTATAIVAAVGDGRDFKNGRHLAAWLGLVPRHRASGERITIGHISKRGDQHLRTLLVHGARAVVRTAGHKTDAKSQWVMALVARRGVTRAIVALANKNARVIWALLARGDEYRRAA

SEQ ID NO: 454531 - protein, 352 aa, unidentified
MQHFIGCDVHTRNQVVAWIEEETGEIKKRQLEHEGQEVKEFYAQFARGTVVGIEATFPAYWFERLMGELGHELWVGDAARIRAREIRYQKTDARDAELLLDLLRTGRFPRIWVPSLEERDLRQLLVHRMKQVRARTQVKNQLHALAISQGVCRKRKLWSAKGRKELESLGLLPWAARRRKELLESLDRLDEQVRELDRAVEEAGRERPEVARLRTHPGVGMVVSLAFVLTVGPVERFANSRKLVSYWGLNPRENSSGGRQRLGSISKQGNTMMRWLLVEAAQTAARLDPQLRRIYQRLKQQKTSGVAKIAVARRLAVRLFWMLRTRHNYTQLVHMSGSPSSAVVPPQGGPNL

SEQ ID NO: 454532 - protein, 412 aa, unidentified
MKDLLEISCGLDVHKEKIVACILTGPLGKPTHSEIREFTTLIPDMIALRDWIISQNCHHVAMESTGIYWMPVYEILEEAFSGNITLLVVNARHMKNVPGKKTDMRDSEWISTLLRAGLLNGSFIPEKTIREFRDLNRYRKSVIRDITSQKNRVEKFLQSSGFRLSSFISDIFGASGRNIILHLIEHGQIDRTALNSCLKTKTRNRIDEILMSVNGTLSEHQKAFLKILMGHYDSLKEHLAEIEKNLEADMIPFALQVEQLSSIYGISTTASCAIIAEIGIDMKPFKTAEHICSWAGLCPGNNESAGKRKSTSVTKGNPYIKSMLCEIAWVIAGKRNTYLSAWYWRIKQKKGAKKAIIALARKLLVIIYTMLKQGTLFDESCFEARRKSCEQKQLSRYIRELEKHGYHVEAQA

SEQ ID NO: 454533 - protein, 426 aa, unidentified
MAYRIAGIDVHKKMVAVVIADVDVAGTWQFDRRQLGTSPAQLRGLADWLVEREVVEVVMESTAQYWRPVWEALERSWQPRMQQTDPAPRAGTLHLAQAQSNEGPRGRKRDVPDAERLVKRLVAHELTLSFVPDVTQRLWRTVARRKYQSTCNRVQLQNRLECLLEEMHIKLSSLVADLIGPSARRMLRAIANGDTDPGAVVALGSRRLHATPDQLRDALGACTDLHPVYRRLLALTLDELEVIERHIHQLDEELAQLLRGHQDAVERLAAVPGLGVDSAQQIITEVGPTAATFPAAKRLASWVGACPGHDESAGINHSHRAPKGNRQMRRLLNQAANAAVKAKGSIFQLVYRRLVVRLGHAQAIGAIAHRLCRLIWKILHDGVTYEERGPAVTKHRAQRRAAKMIRELRSLGYRVERDLPPASALA

SEQ ID NO: 454534 - protein, 341 aa, unidentified
MSTITIGLDIAKSVFHLVWMSTTGKVLKRKMLSRKQVAEYFSNLEACTVVMEACGSTHYWSRVITRCGHEVKAIAPQFITAYRKGNKNDYNDAEAIAEASQRENMRFVPLKSLEQQDIQMLHRIRERLIKNRTALSNQIRGLLAEYGLVMVKGINHLKAQLPGFLEDATNELSTSTRRYFLALSEELDELSIQIKSVDSEILGINKQNNVCQRLSTMTGIGPIIATAFYAGIGDGKAFKSGRHVSAWLGLVPKQHSTGGKPVLLGISKRGNTYLRTQLINGARAALRHCENKTDQVSLWARKLKERSNYNNATVALANKMARMAWAMLHHQEDYRLKVVTK

SEQ ID NO: 454535 - protein, 337 aa, unidentified
MNDSPFSLFVGLDVSSNKIDVAWQNGLAWESQVIANTWPDTQAFAAQLYNIFPQACCIVEYTGTYSSKIALALFQAGLKISLITPTQSKSFAKMRHKTTKNDQSDARLLAEFGKSNVSQLRFYTPLTEQQLQFKQLIEVVEQLEQMRQQIRNRIHAYAQLPPQHQQQVILDSYQNTEKQLDREIEDLYQILRLQDHHDEDMNLTKQLMTTVKGIGEKTSNVILAKTQGIKRFKSPKELSKFAGLSPTENNSGSSIRGRRGINRSGNASIRKALYCATWSALRYNKACRALYDRLRAKGKPAKVALIAVANLLIRQIFAVVTTQKPFVNELYSQMLTP

SEQ ID NO: 454536 - protein, 327 aa, unidentified
MQKSKIQRILYCGIDVSGDTLDICFQTSDGELISQKITNDASGYKQLWQLTGLNYQFIMESTGVYQLPLCFFLEDKKARYSVINALQIKRYIQMKLERNKSDKKDAFHICMYGVENKPECYEIPVPLYFECRALNNAIETITTEITSFKNKIHSLSKLEIDSKVIMSGYKKILRDLQAELKKFEVVLYKKLSAWQPDLVKQVGSVVGIGKRATAILIVTTQGFRHTANYKQLISYAGLSPKEYSSGSSIRGKVRICKQGGSLLRHTLYMCALNAKSTKAACKALFDRLVAKGKNKKLAIIAVANKLLKQVFGVVKNGTLFDRGYYGK

SEQ ID NO: 454537 - protein, 323 aa, unidentified
MSVFVGVDVAKKSFDIATPLPNGKTRTKAKLSNDPGGFKQFSDWLERHAEPGAWIVMEATGTYHEALAEHCHNQGYRVCILNPAVIAKFADVELRRVKTDKADAKVIAAYGQQKAVLLRQWEPEPPAQRRLRALVRRLDDLKEMRQMEQNRLDVAQDAVQQSIQDVIGHITEELEKTRKAIEQTIDDDPDLRKRRDLITSIDGLGETTAALLLAELGDPLKYQSPSAIVAFSGLNPVVQQSGEFIGQSTISRTGASRLRAGLWMSGTVSIRHNPVVKELAERLSSRHKAYKQIVCAAMRKLLHLVYGVVKSGIPFDPKIPLAG

SEQ ID NO: 454538 - protein, 400 aa, unidentified
MATRKYDRPRVLAHRRPSGHIEREVTYMIAGIDTHKDTLAVAVVDDSGRLVAGGDVPNTRAGFAQLVDMFTAHRVQRVGIEGSGSFGRAVAVHLALCWQSGQPVAVVEVPTLMTSRERHGQLGKGKTDPVDALAIARITTREQQLPPVRLTLGAAADLRALLDYREDLVRERGALVNRAHAELGGLRPGYQQQIPILTTRAQVRAAVDLLGDDSSIRATLCRRRLERVIAIDAETAELKRQITRLVAAADTTLTDLYGVGPLVAARFLAEVVDIRRYPNRNAFASANGTAPLPASSGRTVRHRFNPGGNRQLNRSLYTIALTQIRGDTEGRAYYERKRAAGKSKREALRCLKRRLSDIVFTTMRHDAAGADASPEQASPPAGPVLVGVGAVDANEARLTA

SEQ ID NO: 454539 - protein, 359 aa, unidentified
MEPAGLNSTCKHLYVMSKFTLFCSIDISKADFDAVYGSPSAYRHVKLSNDVKGISQLLKLLLALETDRTKILVCCENTGSFMNKLASILKGEDIFLWAVHPLLLSYYSIELNRFKTDKADAHKIFNYMLSNQSRAVCFHLPSVAVQQLRDLFTCRKNLIETRSAYRCRNEDKQQRVNANPMVMEIEKQLMIVLGRYIDMIDKAIHAAIASDVKTKRMYQILISIPCIGPVTAWHLLFITDRFERFDNWRALACFIGSAPFPKQSGTSVKFKDRVSKKAYKPLKADLHQGIVSVCTRPGLLFYNYYQAMIKQNRPHLYIMNMIKNVLLKLVFKLIRSNDLFDKEIFFKNKVSWQKYLAMS

SEQ ID NO: 454540 - protein, 351 aa, unidentified
MPRATSNANVIATIGIDIGKNTFHLIGLDDKGAIILRHKLSRGQVYARLANIPPCLIGMEACVGSHHLGRQLSALGHHTRLMPARYVRPYSKGQKNDFRDAEAIAEAVQRPTMKFVALKTIEQLDLQGLHRIRERLVCQRTSVINQIRAFLLERGIAVRQGLRALRTEMPIVLAKTDKLSQRMIHMLEDLCTDWRHLNGRIEAVSKEIETLSEQDDGAKRLMTVPGIGPIISTATVAAIGTGEVFSKGRDFGAWLGLVPKQMSTGGRTILGPISKRGNRYLRMLFVQAARAVLLRPQSWEKHGLKLWIEAAARRLNRFKLAIALANKIARIAWGVLHGGRNFEVRPMNQAA

SEQ ID NO: 454541 - protein, 315 aa, unidentified
MEATPVYIGIDVSKAQLDVAERPSGERAVMPHTEDSITTLVERLRHRQPAGLVLEATGGLEVPLASALAVAGIPVAVVNPRQVRDFAKATGQLAKTDAIDAQTLARFAEAVRPAPRPLPDEAAQAFSALLTRRRQLIEMLVAEQNRMQRAPRPIQPQIQAHVTWLKQQLAALDEDLTHRIQSTPIWREQEDLLRSVPGIGPVVSRTLLAELPELGTLTHKQIAALVRVAPLNRDSGTLRGRRTTWGGRAVVRAALYMSTLVATKHNPVIKVFYQRLRAAGKAPKVALVACMRKLVTILNAIVKHRTPWRLAVPNT

SEQ ID NO: 454542 - protein, 410 aa, unidentified
MEVLHPRCCGLDVHKETVVACVRLVIDGKTVKEVRTFATTTASLIALSEWLTETKCTHVAMEATGVYWKPVWHILSDEDFELVLANAAHIKNVPGRKTDVKDADWTSDLLAHGLIRPSFVPDPPTQEMRTFLRTRKQFVREKSSHILRIQKTLEDANIKLDSVITDIMGVSGRKMIEALIAGEEDPAKLARLADRRVKASQESLREALRGRVTNSHRFLLRLHLGHIDALDAAVAELDREVEAAIAPFRTAVEQVTTAPGVKALAARTILSEIGTDMSRFPTSGHLISWACICPRNDESAGKRRSTRIRKGSPWLKTTLVQCAWAATRVKDSYLSALFHRIKARRGPKKAIVAVAASILTAIYHMLKDGTMYQDLGPNHIDPRAKERQKKRLLRRLTDLGYAVEFVHQAN

SEQ ID NO: 454543 - protein, 343 aa, unidentified
MTLYVGLDVSQKTAAICVVDHGGQRIWRGECRTLPDEIAAVILRHAGYSAQIGIETGSMTPWLVHELRRRTLSVVCIDARHARAALKMQINKTDRNDAEGLAQIMRTGWYRAVHVKSFEAHRARALLAARLQLIETTTRLSNHIRGVLKTFGLLPGAVRGLRFDARVELLLEGREELALIVTPLLVAWRQLREQIAVFDKSILALVRTSPVCRLLMSVPGIGVLSVLAYVSTIEDPARFSSSRSVGAHLGLTPRQYQSGEVDRSGRISRCGDSLARTLMYEAAVVILTRIKRELPLKSWALAIARKCGNGKARVALARKLSVILHAVWRSGEPFRAASTQAAA

SEQ ID NO: 454544 - protein, 353 aa, unidentified
MTSLTDLREVVEVVIGVDTHVHTHSAAVVDARTGGVLGEVTVEATEHGYVELDAFAEEHAGLRAWAIEGTGGHGAGLARHLARHDQLVVELDRPERAQRRNGAKSDPLDAIRAAREALSRARLGTPRGGGDRQALSVLLAARRSAVQAATDAQRQLFSLVIAAPEPVRQRFRGQKLPAMLRTAAALRTHSTWDIETTTTVTTLRSLARRAQALLREAAEHRSNILTIVRAWRPDLLDQPGVGPIVAATVLCAWSHPGRIHSEAAFAMLAGAAPIPANSGQVTNRHRLNRYGDRQLNRALNTIALSRIRYHQATRDYVTRRTTEGKTSREIRRCLKRYIARDLFRILEHTPKTP

SEQ ID NO: 454545 - protein, 453 aa, unidentified
MCLEDRPVLEPNAAGIDVGAREMFVAVPPGRDENPVRVFATFTEDLERLADWLEQCGVTTVALECTGVYWIPLFEILEQRGIRPCLVNARHMKNVPGRRTDWHECQWLQFLHSVGLLRAAFRPGQDVCAVRTILRHRNELVAAASQHVQHMHKALTQMNLQIHHVISDITGLTGRTIVDAILAGQRDGAELAKLRDPHIKADTETIRKSLEGNWRPEHLFTLGQSRDLYRIYQQQIVNCDLEIEKMLQGFAPRIDPGEKPLPPDRKRNRAGSKRRRKNGHPHPEFDLRTEAYKLFGVDVSQIPGLEENALPLFSEVGRDMSRWPSAAHFVSWLALCPDNDISGGKLLWRGARRVKNRAGHLFRMAAYALHRSLTPLGNYLRRMKAKLGPQAATMATAHKIAVIFYTMIKNQVEYDETIWDARDAQREKKLQAKLKRQAKQLGYELVPIEPQAA

SEQ ID NO: 454546 - protein, 341 aa, unidentified
MTAIGIDTHKATLAACAVDGLGAPLDERTFPNDPDGHRALAGWARRVAPGAIIGLEGSASYGAGAARFLISEGEQVREVPPHLSRRERIRTRRAGKSDPGDALAIARVTAREVELPPVRVADRTREIGLLVEAREDAVAEATRVRNRVHADLVVLLPGYQSVAQNLVAACHRRAIARQLRRLDSVQAALALGRLARLRALDAETRELTARIAVLVGAHPLLALPGVGVLTAAKLIAETGDVGRFRSSDAFAALAGVAPIPASSGQTSRMRSDRGGNRQLNRALHTIATVQAVHYAPAREYLARKRTEQKTKREALRSLKRQLVRTVFRMLREGAPDLALAS

SEQ ID NO: 454547 - protein, 342 aa, unidentified
MQITTIGLDIAKNVFQVHGIDATEKVIVRKQLRRGQVMKFFAALPPCLVGMEACATAHYWARELTKLGHEVRLMPAKDVKAYVKRNKNDAADAEAICEAVRRPTMRFVRAKSAEQQGRLMQHRTRDLLLRQQTQVINALRAHLAELGIVAAQGREGLKQLLAIIADQADARLPLDARASLIVLAAQLQALHTLIKSIEKRLLVQHRANEASKRLESIPGIGIIGASAIAATVTDPKAFQSGRDFAAWIGLVPRQDSTGGKQKLGPISKQGDRYLRRILVVGAHAVLRWAKQNPGKYPWLTQLLARRPFKVVAIALANKMARVAWALLASGAKYRAPRLAAAT

SEQ ID NO: 454548 - protein, 427 aa, unidentified
MKEECIRVEEFRQLKKEIRGAKDYLIVGIDVAKNKHRAFLGTATGRTVLKWLVVENSESGFEHLLAHVQFYMGRDGFSRVVFGLEPTSVYHKPLAEFLIQHDFMVVYATNEAIKKNRALLDGRWDKNDTKDAANVADLVSQAKCHYYDFPDKALRDVRSLLSLRRRLKRQEHGIRIRIRNNLVAQYFPELDKYWNRSQTEALAIVRWCLAPEKICRLEFEDFFQMVTTAYRGNSQYQRLMKIWHMAPYSIGCQAGRAVGVEAKILVEDLKQVQGQLAEVEKAIEDLCSGLAEYKFVLSIPGFGPYISAVVTAAIGAPDRFENISQVLRLAGLDLSASRSGEKSSTAVPVLSKKGKAELRYALYQAALIASAANTRFMFYYQKLLKGREREKGIRTKMRVKLAAKLLVIAWTLMKKKEPFDPGCLKIE

SEQ ID NO: 454549 - protein, 359 aa, unidentified
MFAGIDSQKDTLAVAVVDQVGLAVAVVQEPNTRAGFVRIGELLAKHEVIRVGIEGSGHYGRCIAAYLALDRDQSGVGVFEVPTLMTSRERGARPGKGKTDPVDAVAIARITMREPDLPLVRLAVGQAADLRALLDYREDLVTERSDLANRAHADLHGMFPGYQDQITNLITKAHLDAAQQLLADDTRVRAELTRRRLARVIEIDRERAELKQRIAGYVAASGSTLTSIYGVGPIIAGRFLAEVVDINRYPTRNAFASVNGTAPLSASSGRTQRHRYNPGGNRRLNRCLYTIAITQARADTEGRAYYLRKREAGKTKREALRCLKRRLSDIVYSTMRRDADGVDAASATRARPTANRPAS

SEQ ID NO: 454550 - protein, 391 aa, unidentified
MDEEGREMGYPTFPNTLSGAKALESQLLQIIKAKGFSTLKIATEATSFLDLHLVDFLASSQDLAPFNPSIYQFNPKLVRNFKRAYPDKDKTDKIDAFVITDRLRFGRLPEPYESHRPYLPLRRLTRYRFHLVKTISREKAYFITHLYLKFSAFSIEKPFASLFGATSLALITEFSPDELVHLPLEDLTQFIIKNGKNRFKDPEKIVETLQRAARESYRLRPALSSSIDLILATILQTLRALGEALKEVDKAIEKEFQAFPNTLQSIKGIGPVYSAGIFSEIGDIHRFHTEDALAKFAGLTWKQYQSGNFEAEETHMSKTGNEYLRYYLIEASNALRVHNAEYKAYYETKFQEVTKHQHKRALALTARKLVRLVYALLKKGQLYRANYQQEA

SEQ ID NO: 454551 - protein, 427 aa, unidentified
MEEVTDEPLYRDRVCGIDIGKAELYATIRVPSDKNPARRASETRSFAATKRGVLALADWLRAWQVPAVVMEATSDYWKGPFYRLEAEGLECVLADAKQVKNLPGRPKRDPSDSSWLAACFERGAIRPCFVPDPEFRIIRLHTRYRRDLIEERTREKNRAEKLLESAAIKLSSVVTDLHGVTGRDIMGHLIAGHRDPRMLAQLARGRARRKISELEQALEGAEFFTDHHAGLLKTMLARIDQIDAEITRLTEVIEQLLAPWEEQLQQAESQPGWGRRSAEDVLAETGPDMSKFPTGGHLVSWAGRAPLDKQSGKRQGRSRHKKGNKYVAAATGETAISAGKTSTREGARYRKLARSRGKGIACVAVGNTQLKVYHKLLSNPGMRYEDLGPDYYDNRASVRRQVNALEKRARELGYTLIPDLTGCPEVA

SEQ ID NO: 454552 - protein, 323 aa, unidentified
MNPSVMPTPRVIGCDVGKNTIVACDSLTGRTTDLANRPETLTAFLADLPQTCLVVCEATGGYETTLLLAAVELGMPTHRADARRVKAYIRSLGRIAKTDRIDAHGLARYGQDRHADLPRWQPADTARDDLRTLVRLRTQLVKHRAALTNQIKAPGGTVAKHRLRALLAAATEQIDAIESDIANLVERQPAIARTVDLIRNIPGCGPVTAVTVTALMPELGTMTGRQAASLAGLAPHPHQSGQRDGYRRTRAGRPDLKRALFMAAMAARNHNPQLKPVYERLVANGKKPIVAITALMRKLITIINARVRDALAKQSCQLSCQLS

SEQ ID NO: 454553 - protein, 394 aa, unidentified
MKLVGIDVGKNSHHFCVMDKETGEFNVTPTSFSNNKEGFDFLINSLKPYSKKSILLGMEDTGHYHVALLKFLLSNGYTVALINPKTTDLTRKMEGDITKNDKLDTITICDVLDTPERKKQYRITKVDRFDLYEQRQLTRHHHNLKEELNIYCNRLQKSIDLVFPEFNTLFSSKYGVVYMNLLKTFGSAEAIASADIRTIRKCFEIKGRGNRISLTPEKLKECAKNSIGISSEVETIQIKHLVSQITLIKEQIAEIDKKIEEFSITNNSPILSIPGISHFSGTSILAELGDIGNYSKPSQIIKFAGVAPYHYESSQFNAQHTAITKKGSKYLRKTLYQIILPVINNNPVFKKYYRLKISQGKGHRCAQGHCIRKLLRIIYHLLETGQSFDPALLR

SEQ ID NO: 454554 - protein, 345 aa, unidentified
MTNNIQFSSVCGIDIAKSVMQVYKVTSDGVVSNKAVKRADFLNEFRNIPPALIGMEACGGSQHWARELQSLGHTVHLMPPKLVKPYVTGLKNDKNDARGIYKALEMSVREVPVKSAAIRDLALLQTMRTKRQREKVAKINHIRGILTEYGLVMGKSINAFLAKAGSLIVQLKERADVSPYIVSELTALFREVKEAMEKIKELETNIDSIAKTLKQYDLFRSAPGVGPITAATMLVLLCNPAVFKNGREFAAYIGLAPKSSGSGGKNFVTHIPKKCECNNDVRALLVQCAHSICRCKHKSDWVSSILARKPKKVAIIAIANKLARQLWIMAKKGEKFERRFILAAV

SEQ ID NO: 454555 - protein, 413 aa, unidentified
MPYTVAGIDIHKKVLMVVVVKQMDGGTEELQRCRFGTGTSELRRLTAWLREQAVEEAVMESTAQYWKPVWYELEPHLRLQLAQAFSNRAPRGRKHDFKDAERLARRLLAEELILSFVPPPEQRAWRMLTRTKVQLARDRVRLHNQLEGLLEEMRIKLSSVLSDLLGLSGLRILRALADGESDAKKLAALGDDRLHCSQEQLEDALRGTFQAMHQQLLKLYLDRLQLLDQQMAELNLATAEAMRAHGEAVARLAEVPGFGADSAQQVIAEVGSEASTFPSAAQLASWVGTNPGRQESAGQNQSSRSAKGNKYVRRILTEAAQAAVKTKGSHFQVVFRRLLPRLGYKQALWAIAHRLCRLVWKILHEKVRYIEQGAQRDLKALKKRMHSMARSLRQLGYDVNLEIAPAGSAPATS

SEQ ID NO: 454556 - protein, 336 aa, unidentified
MYCGIDLHSNNNYVAILGGDLGDVACRRLRNDLEQVLKFLEPHRDELVAVAVESTYNWYWLVDGLKGAGYDMRLVNTTKASDYSGMKYTDDRHDARWIARLLALGILPEGYIVPPEERGVRDLLRRRSFFVQKRTAHLLSLRTYFERSTGRQVPADEIQAWDTETVHKLIDDRFVAESIAVVLPVVRVLTAQIKAVEKSVLAEGKLRDEFRLLRTAPGIGIVLGLTIMCETSDIGRFPKVGNYSSYCRCVKSERRSNDKKKGAGNRKNGNKYLSWAYAEAAHHAVRYEPLAKRYHARKRSRSHPMVAWKALSNKLARGCYYVLRDQVPFDPTRAFS

SEQ ID NO: 454557 - protein, 392 aa, unidentified
MRERITEMQMMIEGQSHFQPFGLSYWGFEDLNKGVGSMTASYEYHIGVDYHKSYSHLVVQDSSGKTLRSGRVKNDRQSLGGFLERYRENSHAVVEATRNWMVMYDWLDDICDDVVLAHPLKVKAIADAKIKTDKIDATVLAHLLRADLVPEAWAPSERSRDLRVALRERMFYVRLRTMTKNRIVTVFDRYPEQTAQLKKLGDLFGKAGRVQLAQVNVSEIDRIQIDRGLAFIGDIDMRIKQSEATIRAMTKANANVKLLKTIPGIGEFFARLIDAEIDDISRFRHSKKLAAYAGLVPSTYSSGGKTFHGKIIKQGNKWLRWAFVEAVTPAIASDPQLRAQYEHLKIKGVNKARVAIARKLLTIAFQILRDQRAYEPRGTATMEGASTISRLS

SEQ ID NO: 454558 - protein, 310 aa, unidentified
MAYVGIDVSKDRLDVHVLPQGDAFAVARDGKGVAELVERMKAIGAERIAVEATGGFETVVAAALAGAGLPVAVVNPAQVRHFAQAVGQRAKTDPIDAAMIARFVEATRPELRSLPDEATRLLADLVARRRQIIEMIVAERNRERRVSVKRIRKSIARLIAALEKELGEIDAEIDLGVRGSPAWRAKEDLLASVPGVGPITARALIAELPELGRLDGKKIASLAGLAPFVRQSGQWKGKSMIAGGRKTVRSALFLAALAACRCNPVLKAFRQRLIDAGKPKMLVAIAAARKLLLILNAIIRDNQPWRSEIA

SEQ ID NO: 454559 - protein, 363 aa, unidentified
MHSITNTELSSHEETRCQFNGGNWAIKIGIDVHQDFYVVVEQVGGTNPKPPQRFRKQAFLHWAAKLKQRGAEVHAVYEACGFGFSLQRQLAALGIHCHVVCPQKLDERNKRVKTDGLDAKALCLKLDCFVQGNRDALAIVRVPTEEEERSRAIHRQREQLVGARKRLEAQGRSLMVNHGVEPVQNWWKPRTFAALPMPQWMRELLLNSQPILLALQEKIALLTLQLQSAAAPNQPRGLGKMTSVVIDREIGDWRRFNNRRQIASYTGLCPGEYSSGNTRLQSCVTKHGNPRLRAALVELAWRLVRFQPNYKPVVKWRQILAKGALATGAARKKAIVAVARQLAVDLWRVRTGRCKPQALVLEI

SEQ ID NO: 454560 - protein, 414 aa, unidentified
MTETAYAAYVGIDWGTATHQVAVLDAQRAPLGERAVAHDGAALQAFTEWLTLLTGGEPARVAVGLEVPRGAVVDTLLERGFHVFALNPKQLDRFRDRYTVAGAKDDRRDAFVLATALATDRPAFRRLELEAPLIVELREWSRVEDELREEWGRLANRLREQLHRFSPQLLALCPAADESWFWALIGLAPTPPAAQRLRRAAVVTLLREHRIRRLTADQVLAVLRSAPLRVAPGAVEAASAHVALLIPRLELIDRQRRDCARRIEHLLDALATTGEHQGHRDVTILRSLPGVGRVVAATMLAEASRLLAARDYHGLRTQAGVAPVTRQSGKRLLVGMRYACNPRLRNALYYWGFISVRYDAHSRQHYRRLRGHGHSHGRALRGVADRLLTVLMAMLAQQTMYDPARRRAALEQTP

SEQ ID NO: 454561 - protein, 343 aa, unidentified
MHVNTIGVDLAKNVFQIHGVDSAGKVVITRQLRRKQVLEFFSKLPGCLVGMEACGTGHHWAREISKLGHTVRLMPPSYVKGYVKRSKSDAADAAAICEAVTRPSMRFVPLKSTDQQALLMLHRTRDLLIRQRTQLINALRAHLAEFGLVAEAGREGLAQLGAIITDESNRGSLPSAMKQALQAIVDQLAALELQVGALDRAIHAHHRANDMSCRLETVPGIGVIGATAIASTVTDPSGFKSGRDFAAWIGLVPRQHSTGGKERLGGISKQGDRYLRRLLVIGATAVVRQARLHPQKHPWIMRLLAKKPAKLVAVAVANKMARIAWAIMAKGGHYRAPELAAAA

SEQ ID NO: 454562 - protein, 342 aa, unidentified
METAVTIGLDLGKSVFQVHGVSGAGAVVVQRRLTRSRLLQFFAKQPACLVGMEACAAAHHWGRELSKLGHRVRLMPPRYVKPYVKRQKNDAADAEAICEAVTRPTMRFVEIKTCEQQGTLVLHRVRLMLMRQRVQLSNAIRGHMAEYGLVAPVGRNGLQRLIAILGNPDDERVPAVARASLAPLVCQFGLVNDQVLENDRRVRASARSTEIGCRLLEVPGVGPVLASAMVATVPDPTAFKSGRNLAAWIGLVPRQNSSGGKEKLGGITKQGDRYLRQLLVAGALAVIRYAQRYGTKRPWLVHLLARRSPKIAAVALANKMARMIWAMMVTGERYREPVVAVA

SEQ ID NO: 454563 - protein, 355 aa, unidentified
MTTVPHDEVRVTVGVDTHEDIHVAVTLDQLGRWLAETSIPTNTGGFARLIDWASEFGVIDTFGVEGTGSWGAGLARWLRAEGLVVIEVDRPKRKHRRHGKSDAIDAEAAARAVLSGEATAVPKTGDGPVEMIRVLRLTRRSAVKNRTMTANQINALVITAPDALRDQLRAMTTRRRVAVAAKFRTGDEPTTVLEATRYALRELARRYQHLTEQITRLDAQLDRLVAETAPELIAKVGVGTHTAAALLVTAGDNPQRLAREGSFAHLTGSAPLDASSGKQERHRLNRGGDRDANCALYQIALTRSSAHEDTKRYLQRRIAEGKTKKEAFRCLKRYIAREVHQTLVRTPALQAALDT

SEQ ID NO: 454564 - protein, 347 aa, unidentified
MRFYTQQHKYYCGIDLHARMMYLCILDPAGEVVLHRNMKAKPEPFLKAIAPYREDLVVAVECMFTWYWLADLCREQDIAFVLGHALYMKAIHGGKAKNDRIDARKIAMLLRGGMLPQAYVYPREMRATRDLLRRRIHFMRKRAELLTHIQNTNSQYNLDPFGKKITHKIHREGVAELFSEPSVALSVQMDLGLIDHYDRQLSEVELFIVRHAKAHDPQALARLHSVPGIGKILSLVILYELHDIHRFPRVQEFLSYARLVKCAKESAGKRLGTSGKKIGNAYLKWAFSEAAALFLRHNTQGQKYVAKLEKKHGKAKAMTLLAQRLARAVYYMLKRDQAFDMNKFFAV

SEQ ID NO: 454565 - protein, 318 aa, unidentified
MNSIILGIDISKETFDVALLNNNKVKTKKFDNSSKGFCGLKQWLNSKEVQLVHACMEATGGYEVKLAQYLYDNNFKVSVVNPARIKGFSLSQLSRVKTDKADCQLIAQFCLAMQPDLWQPTARHIQKLQQWVNRLDALNASKFQESNRLEGVDSEVAAHIQSHIDFINKGIEEVEKLITNHIKQYKDLNDKNRLLASIPGIGAKTIAVVLAFLANIEDFDSAKQVVAFVGLNPKQRQSGSSVHGMTRISKTGDANLRKAFYMPAIVSLRFNPIIKDFSERLSNAGKSKMVIVIASMRKLLHIIYGVLKNKTLFNVNIN

SEQ ID NO: 454566 - protein, 342 aa, unidentified
MDHFAGLDVSVKETSICLVDDTGRIVREVKVASEPEALLKVLGNPAYRFKQIGLEAGPLSQWLFSALAEAELPVVCVETRHMQAVLKAQINKTDRNDARGIAQMMRVGLYRPVHVKTLRSQKLRMLLTHRKLLQSKAIAIENDLRGTLRNFGLKVGMVGTVKFEARIQELVENIPDLAVLVEPLLIVRRALREQIVILHRRLLAIVRDDEVCRRLMTTPGVGPVVALTYRATVDVPARFRKSKSVGAVFGLTCSRYQSGEIDWSGRISRCGDEMMRVMLYEAAQSMLCSKKWSWLKAWAMQIARRRGMKKAIVALARRLAVIMHRIWVDGTEFRWTRESVAA

SEQ ID NO: 454567 - protein, 333 aa, unidentified
MKKDYYIGVDISKKTIDVAIYVKNPTGKFPIPHETFQNGNDGFKEMNRWLRSKGVTISKSFFCMEATGTYTYELCQFLEEHKVPYSVQSPLHLKRSFGLTHGKNDKVDAGRIAYYAYLHREDIKVSRLASDSVRKLKSLLAERKSLVVEIARCKAQLKEVGAHTPESGTVKRTQALQAFLEAQVEAIEEEMTQTIESDEKLNKNYRLLLSVDGIGLVNAINTIIATHNFEMFDNARQYASYIGVAPFEHSSGTSVKGRTHVEPGAKMLKADLTGAVRTCINHDKEIKKYYERKMAEGKAYGVVANAIKFKLLLRMFAVIKRGEVFWRKAEHLI

SEQ ID NO: 454568 - protein, 383 aa, unidentified
MQAVGGGNLGVITRPRSHSPPQELATGTTSTASTAAAGLILALDLGEYKTAACLYDGDPAAARFRTRDATRADLRRLVEGRRPAVVVVEACALAGWVHGLCAEVGLPCRVANTASEAGKFKHAKRKTDRDDALRLAQLQALGQLPAVAVPPPATRPWRALIAARQDLLGRRVAVQNRIRAPFVGRGPPAPRGHRAWTAAGVAGLAARAQPLADCGAEELGRGLLGLALAEYRQLRGLLAEAEAKLDALARHDAGVRLLETVPGVGTRAAEVVAHLGDARRFASGKQVSAYAGLVPRQFQSGESDRRGRITRRGPGVLRKALVECAWVALRYHAWARAGYDRLSRGRARTKPAVVALARKPLLRCWALLRDRAPWRAGPARAPA

SEQ ID NO: 454569 - protein, 458 aa, unidentified
MANQAHKTRAVKAAASLPVINPHAAGIDVGSTKMFVCVPPDSCPEPIGIYDTFTQDLQALSAWLKECDVRTVAMESTGVYWIPLFQILEHAGFEVILVNPNYAKKPRKTDVEDCQWLQYLHAVGLLTPSYRPAQQVCAVRSIMRQRSRHVKQAAAHILHMQKALTEMNLLLHNVISDITGVTGLAIIDAILAGERNPHKLAQLRHGGIKATPDEIAKSLVGDYRHEHLFALKQAREVFSFCHTQMAECDAEIAGMLAQFDSRIDPDQHPIPKSRTSCATPRKNEMTLAGNDMRTEMYRILGVDLTQVPGLGALTVHGLFCEIGNDLSAFASAGHFASWLGLCPDHRISGGKVLSKTTRRVKSRSATLLRVSAQALARSQSYLGGFYRRMKSRFGPVSANTATAHKLARIIYHMLTTKQPYDESKFDSIEKRFNEKRIQKLQKDAQYLGFKCVQLELVS

SEQ ID NO: 454570 - protein, 319 aa, unidentified
MEIAPIFIGIDVSKARLDVAMRPSAEKLSVSNDEAGIQALVKRLSELKPVLIMLEATGGLERSVSGTLGSAQLPVVVVNPRQVRDFAKATGQLAKTDRIDAEVMARFAEVIRPPLRPLPDEVSLELRALIARRRQLIEMMVAEKNRLSAASKTVRKRIEAHIRWLETELDRADKDLDHSIRQSPIWQEHEDLLRSAPGIGPVVSRTLLAELPELGRLNRKQIAALVGIAPLNCDSGTFRGRRGIWGGRATVRAVLYMAALVASRRNSVIRDFYKRLRDKGKAPKVALVACMRKLLIILNAMIKHKTRWSEIIPQTSLDF

SEQ ID NO: 454571 - protein, 342 aa, unidentified
MESAVTIGLDLGKSVFQVHGVDAGGAVVIQRRLTRGRLLAFFAKQPACLVGMEACAAAHHWGRELQKLGHKVRLMPPRYVKPYVKRQKNDAADAEAICEAVTRPNMRFVEIKTCEQQGILVLHRVRLMLTRQRVQLSNAIRGHMAEYGLVAPVGRNGLQRLIAIIEDPDDGRVPAVARASLVPLVRQLGMVNDQVLENDRLVRASARSTELGHRLMEVPGVGPVLASAMVATVPDPTAFKSSRDLGAWIGLVPRQNSSGGKEKLGGITKQGDRYLRQLLVAGALAVIRYAQRHGTRRPWLMHLLARRTPKIAAVALANKMARVIWAMMVTGERYKEPRAAAT

SEQ ID NO: 454572 - protein, 401 aa, unidentified
MVSDFMKGRYNLMKIFVGIDIAKLNHFAAAISSDGEILIEPFKFTNDADGFQLLVSKLESFDKNSIIIGLESTAHYGDNLVRYLVAEFYQVCVLNPIKTCQMRKNNVRKTKTDKVDTFVIAKTLMMQDDLRFITFFDLDMMDLKALERFRQKTIKQRTRLKIQLTTYVDQVFPEIQYFFKSGLHQNAVYALLKEAPSPKEIASMHMTHLANLLKVNSHGHFTKEQAKELRVLAQKSVGANDSAISIQITQTIQQIELLDSQLDKIEAEMTDIMKFNDSVIMTIPGIGYINGGMILGEIGDIHRFSNPNKLLASAGLDPSVYQSGNFQAKTTRMSKRGSRVLRYALVNAAWNVVRNNATFKAYYDAKRAEGRSHYNALGHCAGKLVRVIWKMLTDEVEFNLE

SEQ ID NO: 454573 - protein, 353 aa, unidentified
MKYVGLDWAYRTAQWCALAPGGEIAGEGRIAADRDGLARLVLELGDEVKACLEMMSGAAWVRDQLVACGWQVEVADARKVKTVAPLAAKTDKVDARLLAELCRRQLVPALWLPSLDERALRERLRRRMHLVRLRTSAKGRIFGLQTQWGVRVPLQRLRRADGLALLERAGMPTVWRRSVSECLAVIDFLDARLEPLDRELKPFAHADPRAVLLDTIPGVAELLALTIAVEIGDISRFHRPEQLVSYGRLAPRVRQSGHGRPHSGPLSKSGSRLLGWAAVEAAQQAWRETNPWHELYLDVGRRSRHNNAAKAAVARKILIAAWHMLSRNEPFKPAPRTTRGNSVSASSRLALAA

SEQ ID NO: 454574 - protein, 462 aa, unidentified
MKAKREDKASQNGRMQLQGLPLMKADVAGMDIGSETHWVCAPTRDGSGREIGDFGATTPELIRMAEWFKARQVESVAMESTGVYWIAPHEVLEAHGLKVLLVDTRQLSQVPGRDKKTDPTDCEWIQRLHSCGLLRGSFRPAEEICMLRTLVRDKATLVAESGDWVRRMQKSLDQMNVRVHRAVSDISGTTGMAIIRAIAEGERDARNLAQLRDPHCHKSEEEIAEQLTGHWREDHLFSLCQALKMYEAMVERISAYEKEILRKLGEMEQEEQGGKNAPPLKNTNKAKMIKKRGQEQKRQALYRMSGVDGTQIDAIGVETVEVIVSEYGPDLSRFPSEEQFVSHATLAPRVAKSGGKPVKKKKRNSASTRVATALRMAAQSLRHSDTALGAYYRNTARRKGPGIATFAAARKIATFIYRLLRWGQPYVDEGAEAYEKRYQKQRFAGLASRAKQLGYQLTPLTA

SEQ ID NO: 454575 - protein, 313 aa, unidentified
MYYIAVDVSKKVLSVYNGKKDMTFLNTEGLSSLKKYLKKHYQDFNQLIFLLEATGSYSDYLIEMCAEYRIKAVIINPKTSHHFAKSLGIRNKTDKIDARMIYQYQRLIDTQMITVPRINKEAKILSAYLVSYQLAMKQRIALDNHLEHVRDKDLFGLLQKDLKRAYKLEEQILKRITAYILKHPRLKADYQRLLTIPGIGEKSAPALLYLFITYQGTNRNQITALCGLDPIQRQSGTSVKGKPKISKHGSRLIRKVLYMPMLSAIQTNPRIKAFYQRLLRNHKVKKLAVIAAMRKMILIAHAIYRDKTEYVPV

SEQ ID NO: 454576 - protein, 347 aa, unidentified
MKFYTQQHKHYCGIDLHAKAMYVCILDQAGTKLVHKNLPTTPEAFLRTVAPYREDLVEAVECIFPWYWLADLCAKERIPFVLGHALYMKAIHGGKAKNDKVDAHKIAILLRGGMLPQAYVYPAEMRATRDLLRRRCHLVRKRAELLAHIHTTNSQYNLPEIGKKLAYKANREGVEEHFPDPSVRKTIEVDVSLIDHYDQLLGEVELYITRSAKAHDVQTFARLQSVPGIGQILALVLLYEIQDIARFPRVQDFVSYCRLVKCAKESGGKRLGTSGKKIGNVHLRWAFAEAAVLFLRQNQPGKEYFTKLERKHGKAKALTVLAHKLARAVYYMLSREQAFDLNRFVAA

SEQ ID NO: 454577 - protein, 364 aa, unidentified
MKRKVYVGMDVHKETIQIAYLTSNSKEILKEQQIKHNEVQIKKFIKKLKTEWNEIHCCYEAGVTGYPLYRYLKSLGVNCILVAPGKIPRQNTDKIKTDKRDAIKLARLMRSGELESIHVPSKEDEAVRDYLRSRDSLRLDLGRNRQRLMKFLLRKDIKYSTTKYWTVSHYKWLNNLHFNNEILQETFNDYYSRVRVQEENLKSMDKKIQEIAESEPYREKVGILRCFRGVDYLTAMFLLCEVNDFKRFKTAGSFMSFLGLVPGEYSSGSKRKQTGITKTGSPRLRRILTEAAWQHRFPGTGSKIITARRSGQPALVVALAEKASLRLHKKFRNLQLRGKTPQVMITAVSRELSGFLWAAMNLVA

SEQ ID NO: 454578 - protein, 353 aa, unidentified
MKPVYIGMDVHKKYTVAVAMNEEGEVLSKEKLLHGASIRRVPWKAYLGQFAGPVHVALEASEVSYPICEAVEPYSETVTMAHPLKTRLIAEQRVKTDTIDGRALAQLLRTDFLPKAYIPPRPIRDQREILRSRISLVHWQTNIKNRIHGVLRRCGEFYEGSDLFGKAGRDYLRELSLGEPYRSEIEQLLRLLESLQVELKELTHAVYEDVAMLPEALRLTTIPGVGRYLAALIYWEIGDIERFASASKLVGYCGLGPRVYSSGGRTFHGPITRQGNRFLRWAFVTAAQKYHQRKGPLGDFFRRVERQHGSKAARVALARKLATITWHLLKKRETFNEARIVADQGGRVPIQFG

SEQ ID NO: 454579 - protein, 322 aa, unidentified
MAKHTTICAGIDTGKRKLDVAIEGRRELLQVDNTAEGHKVLLAWLRQRRVKRVGIEASGGYEQPVVAELRRKRFVVVVFQPAQVRAYAKFHSQRAKNDKIDAALIAACTAAVRKIHAAPDPRLLPFAEQLTMIDQINEDTARLKNRIESCRNARINKLWQEDIARLEMREKAELKTLVASIRKHPDLAKRLELINSVDGIGLPTAVAILVRLPEIGRITREQAVALAGLAPYDDDSGEQVGVRHIEGGRKRLRRALYTASLAASFRWNRQLIQLYQRLTAAGKEHKRALVACARKMLIFANTVVARGTPWCDEPPVGSLSVS

SEQ ID NO: 454580 - protein, 403 aa, unidentified
MKVRERIWVGIDVGKAHHHACAVDETGKVVFSKRLGNGQAEIEALIARAGKAAGRVRWALDMTSGSAGLLLAVLRQAGAELVYVPGRLVNRMAGAFAGEGKSDAKDAFTIAETARLRHDLTPIIEPDVLVAELQVLTARREDLMGDWVRGVNRLRDLLASIFPALEAAFDYSTRSALVLLTGFQTPSGLREAGAERIAEHLRTGGAWPKGIPAMVDKALAAAAAQTIALPTEAAVAPLIARLAAQLLDLDREIKDLDKQITGTFGGHPHAARITSVNGFGPILGAQLLADTGGDLAAAFGSSARLAAYAGLAPVPRDSGRVRGNLHRPKRYHRGLRRVFYLAALSAIKPDGPSRTFYQRKRAEGKLHTQALIALARRLIDVIWALLRDGREFHPSPPLTTNAA

SEQ ID NO: 454581 - protein, 353 aa, unidentified
MDRYAGLDAHAETCTLGVIGPSGRRLTSKVIETNGRALVEAVRSIGGRVHLCLEEGTQSAWLYELLGPHVAEIVVTTPPEAKGAKDDLRDALARAEELRIGAIRTRVYKAPQHLAGLRSAARTYRIATQDVVRVKNRLKAVLRSRGIRAGSGVYDKETRAEWLEQLPAFGHRSAAEWLARELDELQPLREDAEDWLLKEAKAHPIIRKLSTVPGMGPLRTTQVVGIVGTPHRFRTRRQFWSYSGLAIVTRSSSDWVQDKRGHWVRAEVRQTRGLTRKRQPVLKAIFKGAATTVIMQLSTHPLHADYERMLRSGIKPNLAKLTLARRIAAIVLSMWKHEEVYDPERHKPMIEKT

SEQ ID NO: 454582 - protein, 342 aa, unidentified
MKIIGCDFHPSFQQIAMVDIETGEYTERRLTPEEARQFYAELEGPVLVGMEACGNTLWFERLLASLGIELWLGDAARIRAMEVRKQKTDRRDAALLLRLLLENRFPQVWVPTPAQRDTRQLLLHRHKLVCMRRQVKNELQHLALNQGVQQKRKLWSVAGRQRLEELPLAGWTARRRQDELELLDELDGRIAKLDIAVQQEAEKNAVAKLLQTHPGVGPITALAFSLTLGEIERFQRSRQVVSYLGLNPAEHSSGGRQHLGGISKQGNPMLRSLLVEAGQSAARYVPELKRAYQRLKHRKHSGVAKVMVARKLAVRLFWIWKTQQPYTAARTQGSPSHHVVAG

SEQ ID NO: 454583 - protein, 347 aa, unidentified
MLIIGCDYHPSWQQICWLDTATGETGERKLEHAQGEAERYYRSLPGAVRIGMESTGNCQWFSELVVSLGHELWIGDAAKIRAAEVRQQKTDRRDAALLLKLLLEERFPKIWTPSPEERDQRQLLLHRHKLVEMRVRVKNELQHLAMNRGITRGRRLWNKTGEKVLRELPLLPWASRRREDLFKVRATLDGQISALDAAVQKVAEHNERARLLMTHPGVGPITSLAFVLTMGDVSRFPRGKQVGSYLGLIPREHTSGGRQRTGSITKQGNRFMRTLLVEAAQSVVRYEPEFRREYWHRCHGREKGVAKVAAARRLAIRLYWMLRSNTGYPEIVRVESSSRVPLDRQPA

SEQ ID NO: 454584 - protein, 355 aa, unidentified
MNDAKYIGLDVHQATISVAVLDSAGKLVMEAILETKAETILQFIHGLRGSLHVTFEEGTCAAWLHDLLKPHVAQVLVCDPRKNALIKAGNKSDRIDARKLADLLYLNKLNPVYHGETGIRALKEVARSYLALTRDTTRVMNRLKALYRSWAIPCAGQRVYAPRYRSEWLAKITEAGVRRRAEIYYQQLDALRSLREQVRRDLLAEGRKHSAMKLLRQIPSIGPIRAVLLIALMQTPHRFRTKRQLWAYCGLALKTSTSGEYRIVEGRLKRSKKFLAIRGLNANHNHDLKNIFKGAATRAAAVAGPFQEFHAGLVARGMKPTMARLTLARKIAAITLIVWKKGVRFDAEYLKQQAA

SEQ ID NO: 454585 - protein, 318 aa, unidentified
MTDPRAFVGIDVSKDTLDVHVRPHGDAFAVPNGPQGLADLVARLAGARPALVALEATGGLGHACAAALAAAGHAVAVVNPRQARDFAKATGRLAKTDAIDAEGLALFAERVRPEPRPLPDEQAREFEALLQRRRQLLEMRAAEQNRLGAAAAAPVRASLQAHIDWLSKQLEKVDKELGAAVEASPVWRAKDELLRGIPGIGPAVSRTLLAALPELGALTRQQIAALAGLAPVSRDSGRRKGQRSIGGGRAEVRSLLYMAALSAARYNPALRGFSERLRRAGKAAKVRLVAVARKLLTIANAVLRDGRWDAALCGTERG

SEQ ID NO: 454586 - protein, 367 aa, unidentified
MKQDQQDTAKINSQLNNAPSPLSSAVGIDLGDRWSRYCVVNSVGEVVIEDRVRTTPEGMERLFKEMPTTRVVIEAAAHSPWVSRQLEGYGHQVIVANPRKVRMIYESDRKNDRVDARMLARLGRVDVSLLGPVHHRSASAQADLAVVRSRDTLVAARTRLVNAVRGIVKTTGHQLPRSTTAAFAHKILPLIPTELKPALLPLLRSIKALSEQIHRYDDRVEQLAETKYPQTRLLQQVKGIGPLIALTYVLTLEDPKRFTHSRTVGSYLGLSPRQYESGKCAPELGISKAGNNHLRWLLVQAAQYILGPFAPDSSLRRWGLTLAGRGGKKSKRRAVVAVARKLAVLLHRLWTTGDVYDPLHSLQIQAA

SEQ ID NO: 454587 - protein, 347 aa, unidentified
MNFYHSTHRHYCGIDLHARSLYVCILDQQGEVLLHKEIKARPEPLLALLEPFRDDLVVGVECMHCWYWISDLCEEHGIHFILGHALYMKAIHGGKTKNDRIDSFKIAMLMKGGNFPLAYVYPKEMRATRDLLRRRTRIVQHGAMLKAHVVNTTSQYNLPPNKVNLKNVGAREQVRATFADRDVQHNIDLDLAIIECYHRELSKLEEHLERQAKQHDPTSLSVLRTIPGVGRILALTMLYEIGDIQRFETVQKFASYARLIKCKAESAGKVYGTQGNKIGNAHLKWAFSEAAVLYLRGNDKAQRYLQKLQKRMNKPKALSALAHKLGRAAYFMLKHQRVFDEQRFLKG

SEQ ID NO: 454588 - protein, 384 aa, unidentified
MNKHSILFIGLDTHKEFNEVAYIEEHRGVQPVHLGRVSSSKVAVQKLVRQFESKYSGATLHFVYEAGPCGYWIYRLITSLGHCCYVVAPSLIPKKPGEKIKTDKRDALKLAKLLKSEDLTPIYVPEPEDEAVRDLSRAREVAMKDLKDAKYQLKALLLRNNINYKGTANWSQKHLRWLTEIVLPHPAQHIVLQEFLHTITERISRLERLDNELTHHVHQWRYYPVVKAIQAMRGVRLLVATGVVAELGDLSRFDHPRKLMSYLGLVPSEHSSGGKRHIGAITKCGNGRARRLLVEGAHTYRYAANISTDMQKRQEGLPKDIIDIAWKAQIRLCKRYKKMIAKGKHYNLVVTAIAREMIAYIWAIAKEVVLTPVNTKLRLARVPA

SEQ ID NO: 454589 - protein, 342 aa, unidentified
MKKSLFIGIDFSKKNFDVSVIHSNNLQVVDYHQFENSKEGCLSLLKWIKSLTKEPVTSWLFCGEHTGLYSICLSDFLVKKDFFLWLENPLQIKQSSGIRREKNDRVDSREIALYAYRFQDKARAYSLPDKALKSLELLLSFRARLLSNKHALLVSSAEIRGVIQRNPTARYIYEQSKKDIERINKEVQEVEGRMLEQIKSDKSLQENYTLVSSIKGIALINTATILVATQNFTRFDNSRQFACYAGMAPFGKQSGTSVNTKPRVSRLADKNIKVLLTQAAKCGIRHNANIKQYYERKLAEGKDKWLITNNIRNKLIHIVFAVVKNKQPYQVNYINPPIKAVA

SEQ ID NO: 454590 - protein, 422 aa, unidentified
MSYCPVAGIDVSKQFSDMCILSPDNKIFAQEKIYHDETSINRANALLQKAERLFFSKPVIVMESTSHYHLILFQFFSEHGYDVIVVNPLQSNSMKDFSIRKRKTDRVDAFKLAMMYRTKTLRPSQIPQTATRALRQLCRHRAELLNDVSSYKNRLTALLDQTFPGYDKVFSDVGGVTSCAVLVRFPTPTILLVEEESELVDVIAAASKAGYNFAKKKAGLLISAAQKAQTLGIHSCADETLIVCTIQMLRTLSESVLQIETAIDNLLAQIKEMRNNVSLLQSIPGVGSHSAALLLGEIGDISLFKKPKQLAAYFGLDPTERQSGSFRGTKNKLSKRGSPYARAALHMGVVNSICKRGKDSAANPVLLSYYEKKCKNKPAKVAQAASMHKLVFIVFAVLRDQKPFELKTPEQHAVEQGFVKAA

SEQ ID NO: 454591 - protein, 454 aa, unidentified
MKAKAVSALRSKRGLHRANGAEPQVVGLTPQTTNEWKANTMKTYILRDSQPVEPQKSIRSPRPKTVIPPTADGLPRPSATHQGPVLFIGLDVHNDSIAVSLAPSETTEVRRYGIIGGEHDDVLKLAKKLAEAHPGMTLKFCYEAGPRGFALCRCLRAHGWDCILVCPSKIPRKPGERVKTDRRDADDLARLYRAGELTGIYVPEPEDEAMRDLIRARFQVGRQQHRARQQLKMYLLRHNLRYGGQSSWTPAHLRYLAKIKMPFPTQQIVFQEMLDVISEATARLERYDQEIERAVPGWRWEPAVRALMSLRGMALLHAATLVAELGDFNRFEHPGQLMGYLGLVPSEHTTGKDRQQGGITKMGNAPARRALVEAAWQYRIPARLSPHLKKRQEGLPQAITDIAWEAQRRLHHRYTHLTRVGRKKSQVAVTAVARELTGFVWAIARQVKPKTAVG

SEQ ID NO: 454592 - protein, 482 aa, unidentified
MKKTNIYQNQSQELLHLFEEAGSGEKVMCVPMDYAKKDHLVMFCNGHGDILRKPFSVKNTPEGIAYINDQVTRSCRRRGIEKKHVFFGGEDANSFAKNFVSTLRYKGFVVANVNAHDAKKQRENMQASTDRIDLMGIATMLLNCRANCCPAQSGIYRNLRTLVRHRRRLVQMLTEVKNRVHGIVDELFPGFLNEKNSGIVPFTQSSLYLMQDRFSPKQIRRRKRQKLIEILKRFGTSKAEHTAAKLQQYAAKVLHAPVEYVDTMQLSLAQHVKHIGCLKESAAQMDKEIALNLAQTQGAFLTSVRGIGLVLAAGVTAEIGDPNEQKPLNNLASYSGIIPRVNQTGGCEGKTYTGPVAKRCNRILKDYVVKSAYHLGLHGPQDLMADYKRRDASGQHADFGIGRRYLRMAISLMRTSQVYLPPNLRKDDHTPEQRAGYYLMSWPYLREKWKKVGAHEAAFANNRPLGLWRQIVQEIYDIKLKL

SEQ ID NO: 454593 - protein, 340 aa, unidentified
MNATTYGLDVAKRVFQMYWVDAQTGEIVNRRFRRDELIRFLAQRPAGRVALEACGSGHWWARKIKAVGHEVVLLHAKFIRPFVQTNKTDAADARAIWTAVQQPEMRTVAAKTEDQQAMLSLHRMRALLVKFRTMQVNQLRGLLYEFGATFRAGRVAGLAEIRARMVELEEALPGTLIGSLQDQLQRIEALEQDINRLEQQIGAWQKQEAACRAIAAVPGIGKLTATALVATMGDAKTFKSGREFASFLGLVPRQSGTGGKIRLGSISKRGDPYLRTLLIHGARSVLYHAKVPTPWQREIRARRPANVAAVALAHKMARTAWAILAYGREYQRDYASVKAA

SEQ ID NO: 454594 - protein, 419 aa, unidentified
MSFKIFKFNCCGLDVHKTWIYACIGITDSFKRTEYKQARFSSFTKGLQELCLWLAKYNCIDVCMESTGKYWIPVFNVLEKNNIFVTLSHPKYTKPQKGNKTDRKDAKWICDLYMCGMVKPSFIPPADIRQLRDLVRYRFKLTCMITGEKNRAHNCLTVSNLKLDDVFSDIFGKSSRSITEQILQHPGEVFDVAPFVDSRCKTPIEEIQAAVDGAISKEQVVKLRQCLDHIDELNKHISEVEQEILRLSDKYEAALNLIRTVPGFNKNPLTAIQVLSEIGGDMSVFPTAKHLVSWAGCCPRNDQSNQKIKSTRISRAGSYFKPVLVQVANALIKSKKHSEFTSRYKRIKARRGHKKAIIAICRMILTAIWHILTDLKPYTPDGFLESHPVVKEKVLTTSQALNLLKQRGYVIHDEPSPAC

SEQ ID NO: 454595 - protein, 352 aa, unidentified
MTVTIVETATQVCAITGGVDTHADVHVAAALDAIGGLLGVQEFPATPAGYARLLGWLGGFGTVSLVGIEGTGSYGAGLARHIAAAGVRVVEVDRADRQDRRRRGKSDPLDAVSAARAAQSGRAAGAPRGRDGLVEAIRALMVAKRTARSERIQTINQARALILTGPDDVRTRFTRHGPAELVAELAGLRPRPGSMVRYHTRLSLRELGRRAQFLDAQLERLDELITPLVTARAPGLLALYGVGADTAAALLIAAGDHPGRLRSEAAWAHLCATAPIPASSGKVTRHRLNPGGDRQANHALYRIVITRMSSHPPSRAYVDRRTKEGLSKKEIIRCLKRYVAREVYPYLRTPGR

SEQ ID NO: 454596 - protein, 461 aa, unidentified
MILRMGIDIAVRAPHQASLADERGELVWSGHRFRTTAADLETLWQRLPVDQATEDVTVVMEPTRNAWVPLAAWFRRRGAQVVLVSAERSSDLRAYYAKHTKSDRLDSVLLARLPLLHPEGLHPERGIGPGDPLRRATKLHSTLVKRRTTSLARLDALLEILGPDWHAAFGTHLGYNTSLRFLAAGYADPHTVRRLGRARLARFFYRHSRGAFGDELASAVLAAAHATLDLWGEELSFPDLAEDIAIEARLALALTEEIKELDERVEVIVRDRDPSSIITSAPGVGSVTGAAILGRLGDASRFSSLAAARSFSGLVPALDSSGVSGRHGGPTKRGDALLREALFISANQARRIDPTLAAKYHRLMVEAGKHHNSALCHIATTLLTRVVACWKNQTPYELHDIDGRTVTRDEARAIIADRFQIPDEIRKARTTTQGTGRRNKESRRAPSTGPSNHNAKRPGAA

SEQ ID NO: 454597 - protein, 398 aa, unidentified
MTRKNTLKSLPTDTEFRVVGLDLAKSDVSVAAIPVDDNTPSLVDRMTYADLLDWAGKISPTLFAMEPCNGYSLLCLQLENLGHEIKVISGWTVSMWINTHLSGQKTDLNDAIALARLAVSDAELTPIRHKSITEIRIQTVQAVRQQLMSQRSKSIVSFKALAQQWGIPCAAGHRNLKKLRESIEAKVDLITRPVANAMLFLLDAVKSLDRQIGQLNQTLQELVMSDERGRLLQSVLGVGTQISTRVITVVGNVERFNSPCSLVAYVGVAPRNFITGHKNLTKKKHGNCPDLSHKGQGKISRRGDKLLRSLFIQGAACLYMQFCKDQLPECQLKRWILKQLASQKPYGKLIVSLAAKLIRIVWAVLTYGEKFNIQKAGMTRSMWSEMALETPLNKEVPA

SEQ ID NO: 454598 - protein, 404 aa, unidentified
MTAPATLAPHRIALDLRAPSRHDYAVSLDGSPCMSELPAGTRPARLKLEASPRPPGARKPETELGAASTIAVPHPDSRSGPSPHSQGRVMDEQRAVFVGIDVSKDRLDVHLRPSGEAFSVLRDDRGLADLVSRLQRLPVVLVVLEATGGFEATVAAVLAGIRLPLCIVNPRQIRDYARAMGRLAKTDTLDAEVIALFAERVQPEARPLPEPERNHLVELVGRRRQLIEMIGMETNRGRQAAGKHLARRLARHVTYLQKELDAVDHDIGNAIKQSPAWREAEALVKSVPGIGDVTARTLLAELPELGTVSRHQIAALVGVAPINRDSGLMRGRRAIAGGRTSVRAVLYMAALTASRRRSTFRAFYDQLTARGRPKKVALVAVMRKLLTILNAILRDHTPWRHANA

SEQ ID NO: 454599 - protein, 450 aa, unidentified
MSDLSKVFVGLDVHKDSISIGVAQAGQQPARFVGKIVHDVPKLLKQLERIAQAADILIVYEAGPTGYGLQRALTARGYTGQIIAPSLIPRRPGERVKTDRRDCLRLAELARAGELKAIWIPQPEDEAIRNLARAREDAVNLRTQARHQLKAFLLRGGVAYSGKTTWTKTHARWLATLSFAHASDQIAFTEYCQAVSSADERVQRLTSALSQAIAGWRFESVVRALQALRGIDEVAAIGLVAEIGDIGRFAHPRQLMGYLGLVPSEASSGDRVRKGDALPRRPIGPHTTQTFTSEWRAYLFTVWGASNYDMASSSTERAGWLPEMTKDFEGGKVDPARTDGLYTGPSRGHTIPKYAQLIGMPRGYGYGASMGAWFIDYLANWAGEWAFVRHSDMKYRGPALTGDVTYLDGEVTEVNHDERDVLVARVEVHMTSQRGTRLADGTAEVELPRE

SEQ ID NO: 454600 - protein, 370 aa, unidentified
MKKSIMYVGLDVHKNSIEVAFAEAGRHGEVRSYGKIDGNLTALDKVIRKLEGKGSELHFAYEAGPCGYEIYRHLISNGYDCIVVAPSMIPRQSGNRIKTDRRDAQMLARLHRAGELTSIYVPALEDEAMRDLTRAREDARSVERKAKQRILAFLLRHGYRYGGKTPWSRAHFRWIALIKMPHPAQQIVLQESLDALSECTERVNRLTEQIQRLLPQWRMYPVAQALQTLRGVSLIVATTTISELGDLTRFSSPVQLMSYLGLVPSEHSSGEQTKRGSITKTGNGHVRRVLVEAAWSYRLPARVSTKLHLRQEGMPQHICALSWKAQLRLCTRYKRLQAKGKAHQLIITAIARELCGFMWAIANEVESQAS

SEQ ID NO: 454601 - protein, 411 aa, unidentified
MDKIYDRCCGIDVHKKLIIACFRWGKKREIREFGATTRELLELADWLKEGGCEMVAMESTASYWKPLFNILESSDLKAMVVNARHMKAVPGRKTDVKDAEWIADLLQHGLLQPSFIPDKDQRELRELVRYRKSLVGERTRELNRLQKMLEGANIKLSGTVSDINGKSARSILEYLLTGESIDEAKYDEMYEQKVIAHNLKATKEQIIDDLNGVMSSLQRRMMKELLLHLDELNAHIKNLDDEIDNFMKPEEKQASRAIQDVTGIGNTSAQAILSVIGADMSRFPTDKHISSWAGLCPGDNESAKKRKPGKTRKGNALLRTTLITCAHAAVKNKKSYFYAQFMRISAHRGPKRAYVAIAHSMLIAIYHILKDGVVFKDLGADYYNQFNKERKINAYLKKLKALGWEAPVVAA

SEQ ID NO: 454602 - protein, 400 aa, unidentified
MRAVFGIDVSKTSSEVAILVNGEKVHGYTILNDAIGFNRLLGDLKTVHNPEIIFEATGVYSRRLQAFLEEYSYAYTRLNPLEAKKQLDSLRVRKTDKIEAEKLAKSQLVHNRKPTYVQEEVYQHLRDLSRFYQNMTEDLVRTKNRLHKVLQVTFPELETLLSTPTGEQYWNLVMAFPCKEFVLSLSQSNLCEIVRQSTSKRISEKRITYLTDKLIKLAKQSFCAVKNTSPMLEEVRYYAQELLRLSERRQVVLNDMVALAQPLPEYDILRSIPGIAETTATSIIGELGDIRRFQSSNQINAFIGIDLRHYESGNFLAKEHITKRGNPYARKILFKCIHNIASASHTNPCHIADFYEKRKRQSTIASTKPHTIASIHRLIRTMYYLITHNKLYDYSLTQNR

SEQ ID NO: 454603 - protein, 336 aa, unidentified
MKKVFVGIDVSKRWIDLCITVNGKAVVHKQFDNNKAGFRKMVSWLKQYGKPSEWLLCMEHTGIYAQPLWYYLTEKSITYAVVPGSLITSGLEIRRGKNDKIDAADIARFTMRYADELKPHRLPAQVLRRLKMLFAYRDRLVKAKKIISVPAAEASVFAAQESKEVRSDSSSLVQVITARIAKVERIMLQVINSDEETARIYQLIESVPGFGLITASYLLIITQCFTTLCNSRKLANFGGIAPHPHKSGTSIKGKTRVSPVADKKLKALLSNGTASQIQYNRSMSLYFERMIAKGKHENLVRNNIKNKMLHTVCAVVKRGTPYVTAYIPQQTTSSFN

SEQ ID NO: 454604 - protein, 344 aa, unidentified
MDHFAGLDVSVKETSICIVDDTGRLVRETKVASEPEALLAVLTNPAYHFKRIGLEAGPLSQWLYSALAEAGLPVICVETRHMRAVLKAQINKTDRNDARGMAQMMRAGLYRPVHVKTLRSQKLRMLLTHRKLLQSKAIAIENDLRGTLRNFGLKVGVVGAVKFEARIKELVENVPDLAVLVEPLLMVRRVLRKQLGILHRRLLVLVRDDEVCRRLMTVPGVGPVVALTYRATVDVPARFKNSKAVGAVFGLTPAKYQSGESDRTGAISKCGDEMMRVMLYEAAQIMLVRSTRWSWLKAWAMQIARRCGMKKAIVALARRLAVIMHRIWVDGTEFCWTRKEAAAT

SEQ ID NO: 454605 - protein, 401 aa, unidentified
MVACVRIVSGGEVSRAVRTFETTTARLIELAEWLEASGCTQAAMEATGVYWKPVWQVLAGSGFELVLANAAHVKNVPGRKTDVNDATWLAELLAHGLIRASFVPGPEIQELRGLLRTRKQLVREKASHVQRLQKTLEEANIKLESVLSDVMGRSGRAMIQALIAGETDPAKLAALAHPKVRAPQARLREALRGRVKRHHRFLLGLHLQQIEALDAGIAAIDREVDAGLASFRDAVKQLSTIPGVSELSAQVILSEIGTDMSRFATAAHLRSWAGRCPRNDESAGKRRSTRLRMGAPWLKAMLVQCAWAAARTKATYLNAQFVRLRARRGPKKAVCAVAASILTAAYHMLKDGTFYQDLGATHFDRRRPEAHARRLVKRLADLGFSVQLEPWQPSHDRSVSL

SEQ ID NO: 454606 - protein, 346 aa, unidentified
MDKIIRIGMDTSKTVFQLHGVNAAEHPVLRKKLPRKAMIDFFRHLEPTVVGIEACGGSHHWARLLGSFGHEVKLLAPQLVKPYVKRGKNDAADAEAICEAMSRPTMRFVPVKTQDQQAALMMIGMRDRLVKRRTQLTNAVRSHAAEFGLVSARGIDKIEPLLERIAADESLPALAKQLFASFAAEYAHLQSQFDEIDAKVMAWHRQDQYSRRLAEIPGIGPIGASMLVMKVPDPSGFKSGRHFAAWIGLTPKNHSTAGKVKLGGITRAGDEALRSVLVVGATAVIRQVVSGRGKPAPWLVELLKRKPRKLAAVALANKMARVAWRLMTTGEFYDSTYVLAPMGQAA

SEQ ID NO: 454607 - protein, 359 aa, unidentified
MIPHLICFGKELKLYPWRCLMELYAAFDLHSSNNYLAVIDEEGKRQMQKKLPNDAGAIVMALSPYRKNISGIAVESTYNWYWLVDLLMAKGYEVHLANPAAIQKYKGLKHADDQHDANWLAEMLRLNILPEGYIYPKEKRSLRDLLRKRGHLVRLRTSLIISLQHIITRNCGIMMNVNDVKRLKEDRISPLLHDNEDILMAGAVSKETIDYMTRKIKGIEKTVEGKIELSSSYQKLLSIPGVGKILALTIMLETGPISRFQKVGNYVSYCRKVSSTWTSNGKVKGRGNEKNGNRYLAWAYSEASELARRFDEQARAYFQKKAQRSNRMVAHQALAHKLARAAYYIMRDDVSFMANKLFA

SEQ ID NO: 454608 - protein, 419 aa, unidentified
MSFKILKNNCCGLDVHKTWIFACIGITDSNKRTVYKQARFSSFTKGLQELCHWLAKYDCTDVCMESTGKYWIPVFNILEKNNIWVTLSHPKYTKPQKGNKTDRKDAKWICDLYMCGMVKPSFIPPADIRELRDLVRYRFKLTCMITGEKNRAHNCLTVSNLKLDDVFSDIFGRSSRSITEQILQHPGEVFDVAPFVDSRCKTPIEEIQAAVDGAISHEQAVKLRQCLKHIDELEMHKSEIEREIFRLSDKYEDILTLIRTVPGFDKNPMTAIQVLSEIGGDMSVFPTAKNLVSWAGCCPHNDQSNHKIKSTRISRAGSYFKPVLVQVANALIKSKKHPEFSTRYRRIKARRGHKKAIIAICRMILTAIWHILTDLKPYTAKGFLEPRPVSKEKVLTASQALNLLKQRGYVIKDEPIFIS

SEQ ID NO: 454609 - protein, 365 aa, unidentified
MKKISTVQTRGKKIFQGQLTIGVDLGDRFSAYCVLNESGEIVLERKVATTPEAMKQVFGSMPRCRIAMETGTHSPWVSRLLTALGHEVIVAHAQKVRLITKSRRKDDRLDARSLARLARIDPELLSPVKHRSVQAQLHLTEIRARAVLVSARTALVNAARGLVKSYGERLRKCGTEQFRRDTTSGLSTGLREALEPLLQEVESLNERIQDYDRRIEKMAKVTYPETALLKQIKGVGNLIATTYVLTLEDPHRFRKSRDAGCFVGLQPGRRDSGESAPQMRISKEGDEYLRTLLVQGAHYILGPFGEDSDLRRWGRKLSARGGKTAKKRAVVAVARKLAVLLHRLWVSGEVYEPLRNSQKAMNAAA

SEQ ID NO: 454610 - protein, 404 aa, unidentified
MNNVAGIDVSKGKSIVSVLRPFGEVVAKSFPVGHTGSELKELADYLKSLDGETRVVMEHTGRYYEPVARFLHEEGIFVSAVNPKLIKDYGNNTLRKVKTDKADARKIARYGLDNWVELRQHTPMDTIRMQLKTLNRQQGLYSKTKTMMKNNLIALLDQTYPGVNALFDSPVREDGSQKWVDFATTFWHVDCVRNMSLTAFAERYRKWCKRHGYNFSQSKAVEVHTGAQDLIAMLPRDALTKTMVRQAIDALNAISASMERLKAEMQALAAQLPEYPVVMAMHGVGDSLGPQLMAELGDVARFTHRNAITAFAGVDPGADQSGTHEAKSTRVSKSGAPELRRALFLVMDCLLKTQPQDDPVYRFMDKKRAEGKPYLVYMTAGANKFLRIYYGRVKEYLASLENSD

SEQ ID NO: 454611 - protein, 443 aa, unidentified
MKVLHERVAGIDVHKDMVKVAILSPGDKPWTRKTGVFEFRTFYGVLQEMARFLREREVTHVVMEASGVYTEPVYHALCEQDFTEVIVVNPAHVKALKGHKTDARDCARLAGLLECGLLRGSFVPPAEQKELRDLTRYRTKTVQARTSEIQRLQKALESAGIKLGSVASDITGKSATAMIEALIDGERRTQVMADLALRSLRQPGKQADLKMALAGRFTEHHAMLCRMHRDQVKLADHAIARLDARIAAMAARWQRELDLLLTIPGIGPVTAAIWLAEIGPEPHRWFDGHGKLASWVTLCPGNHISARKRKHGKTGDAGTYIKPALIEAAWGAIRVKGRLQARYRRLVRRFGGDKNPGARKKAITAIAHTLLKIAYQVLKSGQPYQEPGADFYTRRESPAQQQDWLIRRLQKLNPGCTITITPPPITPPPAPPGAPPPGRAEAA

SEQ ID NO: 454612 - protein, 388 aa, unidentified
MRYFIGIDISKFKHTAAVIDQDGVVHIEPFDFDNDIIGFNSFFTSVSSFIQDDFIIGMEDTGHYADNLRKFLLSKNLKVAMFNPLATNHIRLAFNLAKNDRLDSLTIASALAMPRLYRIIEDEHFTYHEIRELSRYHQSLSKTMNRYKNRLQKFIDVAFPEFNKLFDTKYSKTYLKILKDFQSAQNIANTDIRTLRKALLSKGRCVSITAEELKSAARDSIGHSHIALDLEIQQTVEMIEKIDSNLNIVDKKIEEFSLQLNSPILAIPGISHISAMSILSELGDFTQYESAKKIIKLSGTNPYIYESGTYSMPRTRLEKKGSKYLRCTLYNIIQTVINNNPVFKDYYDRKISQGKSHRCAQGHCVRKLLRVIYHILTTGCEFDPSLLR

SEQ ID NO: 454613 - protein, 361 aa, unidentified
MAQVRSWAGLDVHAAKVLAATVDRETGELGVRRLSGETGEVVAFCAGLPRPTRVAYEAGPSGFALARALEAAGVGCVVAAPGKIERPAQDRVKTDRRDAERLVRLLMVDGLHAVRVPSVQEEALRDLVRAREDVRGDLMRARHRLSKLLLRHDERFDGSARAWTTRHRDWLSRIDLGGPAQLTLLDYLGAIDALVVRRDTLEGHIERLVPSSPWAEPVARLRCLRGIDTLSAVGLCSEIGDWQRFQRASRVMSYLGLVASEASSGDRRRQGQITKTGSRHARRLLVEAAWHYRRPPRRGTTLAARQAGQDAHVLALSWKAQQRLHHTWQRLDTQRGKRRTIVAVAVARELAGFCWAIATAD

SEQ ID NO: 454614 - protein, 472 aa, unidentified
MKPSQQNKPQKASCRPEQGSWQPMNRKQRREMTRKMHAQDLSLEVVHPHAAGIDIGNEAHYVAVPPDRDNKSVRRFGCTTAELKEMAAWLKQCGIRTVAMQSTGVYWITVYDILESCGLEVYLVNARETKNLPGRKSDVQESQWMMKLHTYGLLRNSFRPPQEIRTMRTYWRQRNDLIRSAARHIQRMQKALTQMNIQLANVLSEVSGVTGQAIIQAILAGERDPRKLAAFRDKRVKAREEEIARSLEGNWQEDLLFMLKQEQDGYEFCQKQMSECDERLQQYLRQREDRSRGAELPEENRKERLRKNKTNKPRFDLRTELFRMTGTDLTQVDGIDVRTAATVISEAGWDMSKWRTEDHFASWLRLCPDNRVSGDKVIGKRRLPINNRLSVAFKTAASTLRQSITYLGAQFRRLKTRLGPPIAIKAMAARLARLVYRMMRYGMRFVDRGAEFYETQHRRRQINSRGKPPTSD

SEQ ID NO: 454615 - protein, 386 aa, unidentified
MVFVGIDIAKHTHYACVTDDAQKILSAPFPFENDQKGFAKLLSSFASYAKTDVIIGLEATSVYGENLISYLANLGYEIALINPIETSSVRKKNIRNAKTDKIDAKVICKYLATEEYRFLQSKELQTLQLRGLCRFRQTLKKSNSRLKTQLVSYLDVSFPEYPSAFSTVHGKGAYAVLLEFPSASAVSKANITKLTNLLCKSSRGKFNRSKAEELKALAKRSVAATDCDMGFQIKQTITQIQLISAQMNDTEKQIVTVFESLNSVIATIPGIGAINGSMILSEIGDIRRFSNPNQLIAFAGLDPIIRQSGNFRAKTTRMSKRGSGVLRYALINAAWNVSLNNVTFKEYYSEKFSQKGRHYAALGHVAGKLTRVIFAMLKNEMVFNLP

SEQ ID NO: 454616 - protein, 347 aa, unidentified
MRFYTQEHKFYCGIDLHARSIYVCILDSHGEILVHRNMSAGPESFLKAIEQYRDDIVVAAECMFSWYWLADLCASENIPFVLGHALYMKAIHGGKAKNDKIDSRKIAGLLRSGMIPMAYVYPAEMRSTRDLLRRRNYLMRKRSDLLSHIQNTNSQYNLPEFGKKIARKIHQVGLVEQFDDPQVQRSIAIDLELIDHYNRLLTNLERYILKTAKYHDPQALYLLQSIHGVGKIISMVILYEIQNINRFPRVQDFASYARLVKCARESAGKKHGSSGRKIGNMHLKWAFSEASVLFLKSNPEGMKYRKRLMSKHGRSKSLSIIAHRLGRAVYYMLKREKAFDMKKFLAL

SEQ ID NO: 454617 - protein, 412 aa, unidentified
MEVLHERCAGLDIHIKTVVACVIVAGPKGQVRKEIRTFSTMTDDILLLSDWLASNGVTHVAMESTGVYWKPIYNILEGNFELLLVNAQHIKAVPGRKTDVKDCEWIADLLRHGLVRGSFVPDRPQRELRELTRYRTTLVRERAAEVNRLQKTLEGANIKLATVASNVLGRSGRAMLAGLIEGAADTATLAQLAQGRLRDKIPQLERALKGRFGQHQRFLLTQQLEHIDYLDRAVEEVSHEIEERLRPFDKTIELVDTIPGIGRRIAEILAAEIGMNMERWPSARHISAWAHLAPGCNESAGKRKSGKTGKGNPWLKSVLTEAAHAAAHTKGTYLSAEYHRIAARGGAKKAIIAVAHSILVITYCMIKRNETYRELGSNYFDEIDKKAVERRLVKRLERLGNEVTLAPIAKAS

SEQ ID NO: 454618 - protein, 348 aa, unidentified
MDATTVAVDLAKNVFEVVSANRDGRIVARQRLNRARFLAFLGTRPPTRFVMEACATAHHWGRVAQGHGHEVVLLPAAYVRPYVRRNKTDRTDAEALLEALRSGQLPAVPVKRVEQQALVALHRVRAQWIATRTARINALRALLAEYGVLLPARTTVALTAAPAILADAALPAHLRQVLTGLHEEIRALEAHIRTVDQQLRGLAATDPVVQRLRTIPGVGLLTATALVGSVGNIHAFRRGRQFASWLGLTPAEYSSGNRRQLGGITKRGDRYLRCLLTHGARAVLVAARRDAPDRPSTRLRQWALAVHQRRGQNKATIAVANKLGRIVWAVWTRDQDFRATPALMNSAA

SEQ ID NO: 454619 - protein, 407 aa, unidentified
MEVVYRCCCGIDVHKKVIVACLVNGGEQELREFGTTTSEIKTLANWLTESGCEMIAMESTGVFWKPLYNLFELMDLDAMIVNAAHMKALPGRKTDVKDAEWIADLLRHGLLRASYIPSREQRELREITRYRKSLTEERCREVNRLQKILEGANIKLDSVVKDITGKSARKLLQRIIDNDIPDSDEVSRLIHGRMRSKLDQIVASIDGITTPLQRKLLAQIIDHIDDLNRRIGELDKLVQAYMTEYEAAIEAIDEIPGIARRSAEVILAEIGIDMSRFPSAAHLCSWAGICPGNYQSAGRQKHGKTTKGNKALKTILTQCAKSAKTVKSSYFSAQYQRIAARRGKNRATLAVAHSMLIAIYHILSKKVAFRDLGADYYDSFNRDRKINSYLKRLKALGWEPDPIPSSA

SEQ ID NO: 454620 - protein, 414 aa, unidentified
MEVVNERCAGLDVPKKVVVACVLTPEEVGPSGQPKPVLRRFGTMTEDLVALAAWLAERGAVQVAMESTGVYWQPVWNILEEAGGFALLLVNAHHIKAVPGRKTDVKDAQWLAELLRHGLVRASFVPDRAQRELRELTRYRMALIEERTAHVNRLQKTLESATIKLGAVASDVTGVSARAILARLVAGDDDPVALADLAQRRLRAKLPELERALAGRFGEHHRYLVPRILAAIDFLDEQIADLDARIAELERPVADAVERLDGIPGVGPRVAETIVAEVGGTVDRFPSAQHLASWAGVCPGNHESAGKRLGGKTRKGNAPLRRALVQAAHAASRARQTYPDAQYRRLAARRGKKRAAVAVAHTILIIAYHLLARNATYTDLGPDFFDRRDTDAIERQLVKRLERLGNKVTLEKVA

SEQ ID NO: 454621 - protein, 463 aa, unidentified
MSKNHRITKTGRGARQRAVIEGSLQLLRQHAAGIDVGSEEHYVSVPPDRDPEPVRHFGCYTSDLHRMAEWLKSCRIETVAMEATGVYWVPVFEILEEYGFEVYLVDDRHTKTASGRKTCVVDCQWIRQLHSYGLLTAAFRPEQEIAAMRAYWRHRQGLVESWSRQIHLMQKALEQMNVQLHKAVSDVAGMTGMSIIRRIVAGERDPVALAKPRQKGVKRSEAEIAEALNGNYRGEHVFALAQALESYDFFQGQMERCDRQIQQCMAGIASKTSPTESEQVLRRRWKNQPHFDLRAELHRICGVDLTRIESIDAVTAQTVISECGTDMARFPNDKHFASWLCVCPNNKKTGGRIRSTRTRGHRRNRAADALRRAAQSLHHSKSALGAEYRRKRARLGAPKAITAMAHKLARLIYRLLKYGEAYVSEGLEQYEARHRERALRGLRHQAQNLGYLLVVQATGEVVS

SEQ ID NO: 454622 - protein, 320 aa, unidentified
MPTTIAVDLAKSVFEVAISDRPGRVRTHHRLSRTQFSRFLSERRPATILMEACGSAHFWGRHAQASGHRVVLLPPHAVRPYVPRNKTDRADTKGLLEASRNEGIRAVPVKSIAQQTLGALHRLRSTWQATRTARINTVRGLLREFGITIPVGSHQVVPRVRELLSDAEPVLPEALRPALAEATNEIRELEARIHAIEKQINALATQTPVVTRLRTVPGIGLLTSTALFAFVGDVQRFPSGRHFSSYLGLTPRESSSGLRRRLGAISKRGDAYLRMLLIHGSRAVLLHAKKNPHPGHLQTWRSLSMTMRQSVSQFSVDPPC

SEQ ID NO: 454623 - protein, 423 aa, unidentified
MNIVYPICCGVDVHKRFLVATLITTEGIEPKYKKQRFSTFNNEILKFKSWLLENNCRDVCMESTGKYWVPVSNLLEDSINVTIANPKWVKTVKGNKDDAKDSKWIGDLFRIGLVPGSFIPSKDIRILREYTRYRFKLVSAKASEKNRYQNVFTVCNVALDAVVSDMFGKSASSVTDYIINSDTFDPVHCVSLLRGSLKQKADEVIESIEGFQMTDSQKERAKMVREHYDYLAAHIKKLDAVIDVLVKPFESAVTLLCTNPGIKRNSAVTIISEIGTDMSQFGSSKRLCRWAGLTPCNNESAGKKKSVKISRAGVYLKPALIEVAHAAVKDTKNPYYRIKYERIAKRRGKKRAIIAIARMILTAVYHMLSTGELWNPVDLNQIDMPPELREKEIQKSLRRAAKLLVAHGIIAPDIIHFPDAASG

SEQ ID NO: 454624 - protein, 421 aa, unidentified
MERVVEHAGALDVHKEQVTACVRTPGEGGEPRGEEVREFKATVRGLLALRDWLAEHKVTHVAMEATGVYWRPVWHILEGEFELLLCNAAHVKNVPGRKTDVADAVWLCRLLEFGLLRSSFVPPPAVRDLRDLTRRRRTLVRERAQEANRLHKTLQDTGIKLDGVASDLLGVSGRLMLDALIAGQTDPKALAQLAKGRLRSKIPALIEALEGRFTASHRLLIGGILRHIDFLAAEIDALEEAIAAHMAKSGDVEDRPFELAVQIACSVDGIQKRTAQALIGEFGTDMSRFPSDAHFASWAAQCPGNHQSAGKRRSGKTRKGPRWLDGALHDAAMGAIRVKDGHFARKYRRIKARSGHKIAIGAIKHAILIALYHMLKNGEMYRPPTPSPLHEAKQRERATKRLTAQLERLGHHVTLTAAAPG

SEQ ID NO: 454625 - protein, 327 aa, unidentified
MAQKMDVVGIDVSKATLDAYALTSQQARQFANDPAGHQGLVAWLQELGVGVAVFEASGGYERAAAQSLRRAGLVAHVVDPKRVRHYAQAAGQLAKTDRIDARMIAAFGAAFLLGKPSGVAGGDDPARQDLAELVGTRQVLVDHRTSLQQQADAVTSAIAKKLLLATLKQFDRQIETSDRQIAAAIARHEPFAALARRLDTVPGLGPVSIAALIAWLPELGQLDRRQLAALVGVAPFADDSGKRTGQRHIQGGRMKLRNVLYMATVGAATRHNPVLQARYRRLLENGKKPKVALIACLRTLLTILNAMVAHQQDWNPTRLPATEPVAA

SEQ ID NO: 454626 - protein, 352 aa, unidentified
MQHFIGCDMHTRYQVVAWLDQETGEICARRLEHEGQEVEKFYRQFKPGAVVGLEATLPMLWFERLLEGLGHEWWIGDAAAIRAHDVRAQKYDERDARNIEDLLRTGRFPRVWVPSREERDLRQLLVHRMKQVRTRTQVKNQLHALAISQGLCWKRRLWSEKGRAELEKLELLPWAARRRKELLEGLDRLDEQVRELDRAVEEAGRERPEVALLRTHPGVGTVVALAFVLKVGPIERFANSRKLVSYWGLNPSEHSSGGRQRLGAISKQGNSMMRWLLIEAAQTAARLDPQLRRIYQRLKSRRHSGIAKVAVARRLVVRLFWMLRTRHNYARLVRMSGSPSSAVVPQDGESTV

SEQ ID NO: 454627 - protein, 339 aa, unidentified
MKLKRIGVDLAKQVFQVHGVDSHEQVACRKQIKRSGLLDFFRQLEPCRVVMEACGGSHYWAREFRALGHDVRLIAPQFVKPYVKGGKNDANDAEAICEAGSRPTMRYVPIKSEEQQAALSVHRIRSRAIRARTALVNEIRGLLGEFGLIEARKGVAATRALLARTLEESSGLPAAMRELMGELQDELQEKDKRIALLDRLIQQQARQDERVQRLMQIEGLGPISATAMVAAVGDARQFKSGRQLAAWLGLVPNQHSSGGKERLGSISKRGDTYLRTLLIHGARSALNASAKKTDPRSIWINEVKCRRNTNIATVALANKNARIIWALLSKGERYKNAAC

SEQ ID NO: 454628 - protein, 323 aa, unidentified
MTVYLGIDIASKKFDVAELCDGNYRCKAFENTSAGFLALYQWLGQSTMPDIHACLEATGDYGTSLATFLYENKIKVSVVNPARIKGFGASELSRTKTDKADSKLIARFCKAAVPDGWKPTPAPVRKLQALVRRISALNGILRMECNRRENADANIQASLDRIISLLKTEIEFVRQEIKDHVRSDDELKKQDALIQSVPGIGAVSSNLILSFMSGKGFRKAKEVTAYLGLNPRHHQSGGSVRGKTRMSKMGDARLRSALYMPALVALRYNPDIKAFGQRLLLAGKPRMLVVGAVMRKLIHIVFGVLKSGTAFSSRIAVHSVVTS

SEQ ID NO: 454629 - protein, 348 aa, unidentified
MTVYIGVDFHARQQTISYLTTEDGEIQRRQLDHGQPDEVRQFYGQFAGQRVVVAFESSGRGAWFEELLEELGCEIWIGHATAIRLFARRRQKNDRRDADLILELLVRGDFPRIHRYSAESRAMLQQLRYRQRLVKMRTMVLNSLVFMAASRGVVLRSQLKTKRGLERLRQIPLPPTLGEQRDELCQLLLELKTRIDKVESSLAAKAESDIRVLRLRTQYGIGPLTGLCLAHTLECPERFANPRKVTAYVGFDPVEDSSGERRRIGSISKQGSRLLRFLLVEAGQIAVRRDQELARVYRRVLVRRGHAKAKVAVGRRLLVRAFIMLRDEIDYAEFQRRGVAARSSREIA

SEQ ID NO: 454630 - protein, 433 aa, unidentified
MLFGTLVAETILASAHVRAHRKMPWGLAADSLERLPVSKARRVPVMTQTPIPNSVSTALDYDRTLVLAIELSNKSWVLAAQVPGLLRVKAKRTIEPTTEALLAAIQGYRERAQAAGRQVDRVVATYEAGWSGFWLARWLTTHGVETHVVQPSSVPVDRRARRAKSDGIDAELLLRTLLAWLRGEPRVCSMVPIPDEADEDARRCIRERTELVAERVALVNRIGAVLATLGVGEYNPLLRNRRERLDALRTALGTSLPPHAHAKISRMLDRLDLVRAQITALEQERDAVLENEAPDRAGEMIQQLATLRGIGVQSATVLVREAFVREFANGKALGSYAGLCATPYSSGGTEREQGISKAGNRRLRTVMIELAWLWQRYQPGSAQVSWFRERTGGTGARMRKVMVVALARKLLIALWRFATQGVVPEGVVMKPAT

SEQ ID NO: 454631 - protein, 397 aa, unidentified
MIAVGIDISKAKSTVAVIDSDGTVLASPFTMAHTQPEMEAFVTYLKGLGEPTTILMEYTGHYHYPVLKKLQDEGFPVCIVNPYQMKKYGDVEIHKAKTDKKDALRIAAYALEKSYKLVPYSSMEQKYEDLKFLSRQYSQRITYVAKLKVQLIALLDQTMPGITRILPLNSRNPEKCALLLFIKRFKSFDEIHRIGKARFLASYDILAKKVSERSASSKGLSIYELAVDSITTRGEDPYIWLSQNQCVDLLSATQNAADEIISQMRNIAETIPEYKVLRAMHGVGDRLGPIILAEIGDIRRFHSGKALNSYAGNDAPPYQSGQFESRNRHISKRGSSALRKACYEVMQALKLTKPQDDPVYLFMLKKEQEGKPFNVAKMAGVNKFLRIYYARAMELYK

SEQ ID NO: 454632 - protein, 415 aa, unidentified
MQVLYTHWAGLDVHKKTVVACLITPDPQGGWHQETRSFSTMTHDLLALSDWLLAAGCTHVAMESTGEYGKPVFNILEAHFEVLLVNAQHIKAVPGRKTDGKDAQWIAELLPHGLWRASFMPPPAQRELRELTRQRSNFVGERARLVNRVQKVLEGANIKLAAVATDVLGVSGRAILQALIAGQSEPGAMAELAKGRLRNKREQLTLALEGRVQAHHRFVLTELLAQIDSLEETIARFNQQIAESAKPFAEGIALLATIPGVGRETAEVLMAERGADMSRFPTARHLAAWAGVAPGNRESGGKRFPSPTRKGNQALRQSLILAAHAAAHTKNTYLAAQYRRLAARRGKKRAIVAVAHSILVIAYCLLSRQEPYRELGGDYFDRLRPEATAKRLVRRLENLGYQITLQAPQEALASG

SEQ ID NO: 454633 - protein, 328 aa, unidentified
MTFVATPDRRERSMPLFVGIDVSLSKLDVARSDQDAVVAVANDAAGIGELVRQLAAAAPQRVVIEATGGYEQPLLEALLEAKLPVARVNPRRVREFARGLGKLAKNDRCDARVLAEYGRLAEPRLAERRRQVQDELEALVTCRRQLVATRTVHVTQLKQTRAKPAISAIRQVVKTLDGQVASLDTQIRKLIEGDDDFGRKDRLLRSAPGVGAVASSTLIAELAELGKVDRRQVGALAGVAPFDHDSGKFKGTRCIGGGRSSVRRALYMCALSAIRCNPVIKPFAERLRAAGKKNKVILVACMRKLAAILNAMLREGLRWDELRLAKGA

SEQ ID NO: 454634 - protein, 444 aa, unidentified
MLRFVGCDVHKRTAVFTILLEDGALLATYTVPVTREALKAFAERHLGSEDRLAMEATTNTWAVAGVLRPFVKEIVIGNPLRVRAIAEAKIKTDKVDSRVLAELLRCEYLPRVWQPDAETQRLRRLTHRRAALVSDRTRLKNRLHSILHHTLVPLPEYDLFSKAGITWLKQVPLSKEEGLARDSDLRLLELTELEIAQMEEILVREAWQDDKVRLVMSIPGIDYTVAQTCLAAIGDISRFPNAKKLSAYLGLNPSTRQSGTHCYHGPITKQGNAHARWLLVQAAQHLGQYRGPLGQTMRKIIKRKNRSVAVVAGARKLAVLLWHVLSSGEPFRYALPKSLQAKYSRLRVRATGQRRRGGTPKGTPRPTQYGHGRTRGVPSLPQVLADNGLPQIDPLPKGERIMLDRKRLDLFYRELQTPSRIQTNTKTPQVAENKGNLKSELTQS

SEQ ID NO: 454635 - protein, 355 aa, unidentified
MTTVPHDEVRVTVGVDTHEDVHVAVAVDQLGRWLAETWIATNTGGFARLVGWASEFGVIDRFGVEGTGSWGAGLARWLRAEGLVVVEVDRPKRKHRRHGKSDSIDAEAAARAVLSGEATAVPKTGDGPVEMIRVLRLTRRSAVKNRTMTANQINALVITAPDALSQDLRPMSTRRRVAVATKFRTGDEPTTVLDATRYALRELARRYQHLTEQITRLDTQLDRLVAETAPELVAKVGVGTHTAAALLVTAGDNPERLAREGSFAHLTGTAPLDASSGKQQRHRLNRGGDRDANCALYQIALTRSSVDEDTKLYLKRRIAAGKTKKEAFRCLKRYIAREVHQILVRTPALQVALDT

SEQ ID NO: 454636 - protein, 441 aa, unidentified
MSRKQRKHIRGKRGEAFLQIVRGIDRARILCVSLDVSKYFHVVIMHNAYGEIVSPSFEIDIFRSGFEHLCHVIDETAAGIEAEVVLIGMEPTGHYFENIARHLNARYEHVYLVNSLAVKENRGQKLMHREKTDEEDAAAIGDLLCRGEGTPYRPTQGIYLEMQHIDRVRIAKLKMRSALKNQIIGHLDRIFPGMIISHKAAQERYSPLFTTSCQMAQHLMCVCPDPRRLSHMTPQQLIDAFHEQGYRMGPHWAAKIITFAQQTLHPDPEIIAVRSQLLQRDLALLQQVEGHINQLEERLCALLSLTPGYIWTRLKGVSSIQVASLVAAMGDPNHYDYAAQVFRRSGLVSGRNDSGTRQRKGKGKRVTKVGDVYLRRALINLVETLSLHQPILGDYRSRLKGVKPHPGVARVATVRKATGILFAIQRDQRINDLRVKKEPPM

SEQ ID NO: 454637 - protein, 320 aa, unidentified
MMAQDDLVVAGIDVAKDKVDVCIRSLSLRCAFASTSKSRRELASWLRRRKVGKAVMEASGGYEREWAKALRAARIEVRIVDPKRVRSFARSAGRLAKNDAIDAEMIAWFAETFGEASHQIHDAERERLVQIVNARQALLELQTGLQNRSEHSPPDIVQKVQERLLKKIAAELATLEVAITATIKATPQFAERAEIIESVPGLARITSAGLIAAMPELGQVSNKVAAALLGVAPYDDDSGKRRGERQIRDGRRKIRNIFYMACLGAATRHNPVLKAFYRRLVAKGKERKVALVACMRKLIVILNIMIARGQKWNPDLHAMG

SEQ ID NO: 454638 - protein, 410 aa, unidentified
MVKENFIYVGIDLHKETHTAVMIDCYNQKLGEITFPNRPADFPKLVTKVKKCNTDGKEVVYGLENAYGYGRALAVWLIDKGYLVKDVNTAISHRQAKHRGAMYRKSDSDDAKAIALATLNMLDKLPDACPNDAYWSLGQLVHRRDNIMKQRTRLVNQLHEQLCIAYPSYKQFFNDISRPTALYFWEHYPSRKYLKGKSVEDLRAELVPVSHNRCSTKNCEKILDAVASDKVKNNAYQDARDMVTLSIVSDLQHYDSQLAEVDKMLEQMYKMLGCTLTTIPGVNVITAVKILAEIGDIKRFSNANKLAQFAGIAPLHLSSSGKGKDVATKQGNRRLQATIYFLAIQMVQVSSKGTPRNSVVRAYYEKRKAEGKTSQQALICISRRLISIIYGMLKHGTEYRMPVVESAGEK

SEQ ID NO: 454639 - protein, 412 aa, unidentified
MADGTVSWFAGVDWGSERHQVCLLDAAGQVVGERAFRHGGAGLAALCDWLVSVAGEPSRVAVAIEVPHGPVVDALLDRGFAVHAINPKQLERLRDRVSLAGAKDDRRDARVAAGGLRTDPHLFRPVEAGDPAVIALREWSRLAEELQQERTRLSNRIRQQLWRYYPQLLAVSDDVTAEWVLELWTLAPTPAKAARLRETTLARLLQRHRIRRVDAEQVVGLLRQPAIPVAEGVTEAAVLHLRSLVARLRLANREFYQAERKLDELCATLRESTAGADGAPRDAAILSSLPGIGTVTLATLLSEAAGPISRRDYAALRTLSGVAPVTKRSGKSCIVTMRYAAQVRLRNAVFHWARVAALNDPTCRSRYAALRARGHSYGRALRSVADRLLGMACVLLQRQVLFDPDYGSSTAA

SEQ ID NO: 454640 - protein, 411 aa, unidentified
MDRLVERCAGLDVHKDSVAATVRVPGGGRERLQETRTFSATTRGLLTLADWLASYGVTLVGMESTGVYWKPVFYLLEERFECWLLNARHLRNVPGRKTDVQDSAWICQLLEHGLVRASFVPPKPIRELRDLTRYRKTQIEERSREVQRLDKVLQDAGIKLSSVASKTLGLSVRRMLEALIAGTHDPEVLAELACGRLRAKLPALREALAGSFRSEHHGLLVAQILAHVDYLDETITTLSERIEQLLAPFSRQRELLETIPGIGRTAAQVLIAELGVDMSVFPSSAHLASWAGQCPGNRESAGKRRSGRPRHGSKWLQTTLTESAKAAARTKGSYLSAQYTRLRGRRGPGKATGALRHSILVAAYQILDQNVPYHELGADYFDQRSSEQRTKRLVRQLEQLGHNVTLEPLAA

SEQ ID NO: 454641 - protein, 340 aa, unidentified
MEQMKVYAGLDMHSETITGTIKDSEGNPLRVQKVETSKEGVKKLFTRFKKKQVRAVFEASKNWPYYAQLLKPHCGEVIMAHPLKIRAIASARIKTDVIDSNILCDLLRGNLIPESYMPSLEIVELRELLRYRATLSNLRARFKTKVKNIISREGKKCEWKDITAKGARLWLNNVPLNDLNRRELDYTVSLMDNLNDEIKDLDKTIDKEQYKYPEADLLKSIIGISTFSALLIIAEIADFSRFATPHKLAAYAGLAPSTYQSSTTLYHGRITKQGSKWLRWILTQCTHAGVKSTKSHKLKSFYLRLQRKKGKQKAIVATSRKMLVVIWHLLDKNEYYATRN

SEQ ID NO: 454642 - protein, 414 aa, unidentified
MSSKRIALDRTLVVGVDVASEEHVALIRGPAGLEVGPFPFANDRSGFLLLASKVSKARAASEVEEVALALEPTGSYGEALARWARERGWRVLGVLGAHTKRAKELWGNSPLKSDAKDARVICDLAVEGKWVTFSLREGAYAELKGLAIYRQQLVRKQTALKHQTRALLYVLFPEFVSVVGRGLFKKSGLNLMERFPTPRSYATIDVDQLTLLLRGWSRGRLGKERAERVLRAAQESVGVAVGVKTRSWVLRRAVRGLRGFEREIAAVEARMERWLKRIPYGACLLSMPGVGVVTVASLLGECGDLRDYPGTGELLKFCGLNLVSFSSGKRRGRNRISKRGSGLVRHQLYLLAGRLVKQEGAWRAAYNRLRERGAARKAALVALSRKAVRVLFAMVRDNAFYSSPVMEEDLKIAA

SEQ ID NO: 454643 - protein, 406 aa, unidentified
MVVVATTAEEVEDAMGAQVQFQCRKFGAGASERQRLVGWLQELQVQEAVMESTAQYWKPVWLELEPHFPKLHLAQAQSNRAPKGRKHDFGDGKRLARRLLAGELMLSYVPEPEQRQWRQMTRGRLQLVRDRIRLRNQIEGLLEEARIKLDAVISDLLGVSGRRILRALAEGTTDPWQLAELGDPSLKCTQQQLADALNGSPDGCQLELLKMQMQRLTLLDEQIDQLSRMAAEALHPHQAAVLRVAKVPGWGAESAQQIIAEVGVDAEAFETPEALASWAGVCPGSNVSAEQNHSSRCPKGNRYVRRLLTEAAQAAVKKKGSQFQKVFRRFSPKLGYKGAIGVVRHRMARLLWKILHEGVEYIERGQDTTPQARKRRAQKLAQALRRLGYAVTLTDTVIQKPIEAGA

SEQ ID NO: 454644 - protein, 463 aa, unidentified
MDILQRICAGLDVHKDTVVAWVRWLDDRDRAHTEVRTFGTTTTDLLELLDWRRRQVPIVAMESTGVYWKPVFNLLEGALQGLLVNPEHIKKVPGRKTDVADCVWIAQLLQHGLLKASFVPERPIRELRDLTRQRTQLTGEKASVANRIRKVLEDANLKLGSVASDVLGLSGRDMLRAIIAGQTDGVVLANLARGRLRDKLPQLRKALTGCVTDHHRFLLGLHLDHLTHLETLIGQLDQRVGQEMAKDRPPESPAPGGVPEAGARIPPPAPGTTTVPPGVAEPCGVNAPFPPPPGGARLPLWSALWLLTTIPGISRRTAEVVLAEIGSDMSRFATSGQLASWGGLCPGNNESAGQRRSGRMVHGDRWLRSALVQAAWAASRARKTCLAAQYRRLARRRGRKKALLAVAHTLLVMCYQVLKKGEPYQELGPDYLEQLEPERRTRQLVRQLERLGHKVTLEPQAVA

SEQ ID NO: 454645 - protein, 347 aa, unidentified
MPFAGVDAHKRYSRVVVKDETGSILCRASLQNDVAAFQGFFSNINGPTKAVLEAGRDWGVIYDLLEAIGVEPVLANPLKTRAIAEARIKTDTVDATILADLLRADLIPVVHVPPKEVRAQKNLLRQRLWLVELKTRIKNRIHNIIDRNHAGPPPAADLFGKAGRRFMDQLHLPSPDDRLLKAHLELLDLAQNQIGRSEEWIDEALSQRPELAIMRTLPGFGKVLAAVVALEVDDVRRFHHPSKLCAYAGLVPTTYASGGKVRHGRLLPSCNRWLRWAFVEAAWAAQRCSAYCHAYFERIKRRKGANCAVSALARRLCEITWHCLTDSRAYEERVMMPTRTELARPPS

SEQ ID NO: 454646 - protein, 342 aa, unidentified
MPHYAALDVSNDETAIHIVDETGRTIWRGKRASDPEALATALRRHAPDLVRVGLETGFLAPWLYHSLKELGMPVVCLEARHARAATALQRNKTDANDAETLAQLVRIGWYREARVKSFAAHAVRHLVGARAQLMGVSIDLSNQIRSTLKTFGLMAGKGAGRAFALRVRELVDGRPTLAAIINPLLAAWQAVREQVAVLDRRLISLAKADPTCRLLMTCPGVGVIVATSFAAAIEAPEHFRRSRSVGAYLGLTPARHQSGEIDRTGGISRRGDRLLRTYLFEAAASLLTRVRQDSAIKTWGRDLVKRMGFKHAAVAVARKLAVVLHAMWRSGTSFQPWSAEAR

SEQ ID NO: 454647 - protein, 346 aa, unidentified
MKHFGLDVHQVKTTVVWVDDQTGEVSRSRDLPTAGVAEHLLGVGEVLRVVMESGLHSKFLARQLLSCGFDVWVLDARKVAAQMPAYKTGKTDQLDARALAKMSFENALHKMRVWVADEHTEELRALTRTRKKLVEQTTALRNEWRAQLAAFGLLCPANDVLSPKSAHWLAEHFDQLPQWGQFCLQRLHESLLALREQIKLLDHELERHAAHDPACQKVRSLPGCGALLAVTIVAELGEVARFASLGRACSYAGLTPSVKQSGERSYTGRIARRGNPHLRRALVLLAQHFAWQKDLGETTLKKSYCRTLHKHGPNAAKVALARGLLRVIVAMLRAGQTFARPQQQAA

SEQ ID NO: 454648 - protein, 461 aa, unidentified
MAKKAKKVKTAKGAELRIVNPDAAGIDIADGIMQVCVPADRSKDNNRTFGAYTSDLHAISAWLRECGIKTVAMESTGVYWIPLFCRLQEDGLDVVLTNARDVKNITERKTDESDAEWLMLLHQYGLLKASFQPHNDAKRMRTLTRHRDTLSREASSIVLRMQKAMQQMNIKLTLVLSDITGKSGIRIIEAILAGERDPKRLADLADIQCKTPKEEIAKALEGNWEEDLMFVLRQNYDTFKHYCIQLGECDAELEKLMENYRAEVAKVEGTSYSPAKKRRDYKKTRHTVGFDVERKAYEMWGVNVFEIPGISHLTALELMSELGHDFTRKFPSSKQFCCWCNISPNTKISGGKRISSHVPHRRNNVGLIFRSIASSLANAKNQLGNFYRRIRSRTGGKAAVIATAHKVAEIFFAMVANQTTYNPEKVGIDEKVLLEKRITRYKRELERITGTHIEIGNACVP

SEQ ID NO: 454649 - protein, 345 aa, unidentified
MTESKIVAFDLAKRIVQACVIDGTGAVIAEERMGPERVLSFTARHPHATVALEACGGAHHWGRALERQGHRVLLLPPQRVKSYGDPACKDDRRDARAIAEAASRSYLRPVPVKSEEQQALQSLDRVAALLARQRTQTVNALHGHLSEFGITLPKGPHLLKRRFTELEASPRWRELPEELRAAMGELFAAFLALEDRLSVLKARLAKGAKQSKLGRLLLEIPGIGPITAVSLEAAIGDDPGRFASGRQFAAWLGLTPRVSASGERRQLARITKRGSARLRSLLVVCAQAMLRQYRQGRHGDPLACWARHLLARKRWNVAVVALANKLARIVWKVASSGAAYQARTA

SEQ ID NO: 454650 - protein, 348 aa, unidentified
MRFYTQQHRYTCGIDLHARSLYVCILDDTGQVLVHKNIKASPEALLKLITAYRDDLIIGVECMFSWYWIADFCTDHDIQFVLGHALYMKAIHGGKAKNDKIDSEKIARLLKGGMFPYAYVYPRGMRAHRDLMRRQIRLTRERGELMGHIKNTLSQYNLPANTENLRYAKHREPLRTAFPDPSVQRSIDLDLARIEFYDEQLAKLKWYLKKTAKSVDPNTIIRLKSVHGIGDILSLVILYEIHDIERFPRVQDFVSYCRLVKCQRESAGKKHGTGGARIGNPYLRWAFGEAAALFLRGNPPAQRWLEKKTRKHNKAKAMTILAHKLGRAVYYMLKRGTLFDQDRFLAQR

SEQ ID NO: 454651 - protein, 373 aa, unidentified
MNNTTVYVGMDVHKNSFFLCCYAVRDDACSHYVKIDSDYRLVLEYIESMRGIYGNDSKFICGYEAGCLGYTLYHQLNDHGVECIILAPSTMAKSPVQKKKKTDKRDSEVIARCLAHHSYHKVHVPTSEEEQIKEFIRMRDDHKLALKKIKQQILAFCLRHGFIYNAGASRWTAAHLSWLRSLEPEGLYKDILSEYLLTYDKLTDTLERLDRRIEELADQDAYRESVRKLCCFLGIKTQTALAVIVEVGDFKRFQKAQQFASYIGLVPGEDSSGDGINRLPITKAGNTHVRRLLVEAAQSYGRGSIGFKSKALKARQEGNSPEVIAYADKANERLRRRHYRMTLKCRKKVNVVKTSIARELACFLWGMMTGETA

SEQ ID NO: 454652 - protein, 346 aa, unidentified
MSITMIGLDTAKAVFQVHAVDGAGLVVTRRKLRRDELIAFFEKQAACTVVLEACGAAHHWARVLTGLGHEVKLIAPEAVRPFVKKGKKNDAADAAAICEAASRPGMRFVPIKSLEQQGVLALHSARSLLVKQQTMLANAIRGLATEFGLTVALGMGKLGELMALVDADEAVPAKARQALTALFDQCSALHESIETFEAEIVAHARHDDTARRLATIPGIGPITASLIAATVADIGVFPSARHFAAWLGLVPRQHSTGGKTRLGRITKAGNREIRRLLVLGATSMVRRAAGWNSAAGAWARGVLERRPARLVTVALANKMARIAWAVMTRKEVYHATGRVAAADAVA

SEQ ID NO: 454653 - protein, 432 aa, unidentified
MEKIHPHAAGIDIGSKAVFVSLENEPVQSFGTFTSEFKALAAYLKEHKVTTVAMEATGVYWVVLYDILKQTGLDTWLVDGRQTRQVPGRKTDVKDCQWIQQLHSYGLLNRCYVSDGLLKELRSYQRLREDHLRSAAMHIQHMQKALIGMNIRLPEVLSQVHGKSGMAMIEAILSGQRNKEMLLSLCHQSIREKKGEQVLLALEGYYTEEGLFALKQAYEGYQFYQSQIAACDSKLEETLEKLNKDKGLPPGTQPSKRKPIRHHKPAVEDLGKHLLKAFGGRDATKLSGFTDYNWLQLYSELGEDLSLWPTEKHFTSWLGLAPGQNNSGKRKRNKKKGNPSVGQIFKTIAQSLLTSKYIGWGAFARRLRGRKGPSIAIKATARKLAVQYWRLMVKGAGFVENGIKAYETQLKKVKEKQLNRLALELNMVVTSA

SEQ ID NO: 454654 - protein, 483 aa, unidentified
MQDNTFMDSMDWEGLQMQHRFCAGLDLSSTFHCAYIPPHLVKAEQANAPDGGRVVNFDSDQTGLEQLARELIIYGVERVVIESTGIYWFGVYRVLMRHHIEVCVVNPRHAKNIAGRKTDENDARWLCRLHAYGLLKASFVASEECWELRDLMRQRDHLIKDRSRYALKITKELDQMNVKLHKVISDLTGKTGMAIIRLIAQGVPPTDTDWGRFHHAKLKVSKADFVRSLQADFSQYGCFLLAQHLDSYDRIQQQIDALDEYAERILFCQVEGVSSEDLDQQLQQQEHQGFIRPLRTKSGALRKSAASKNTPLFDQAYYLQQIWGVDMTTLPGMETQTLLNIFAELGTDLQDKFPSAAHFASWLQLSPNNKISAGKVIGKKRVTSVNRVHVLFRNCAYSLSGSKGYFGQFYRSIKMKKNGKTANKALACKLAKIFYVMLTTKQPFDPNRIPNSEQHQLRQLKRLEKQAKKLGFTLSKTDQSIAC

SEQ ID NO: 454655 - protein, 361 aa, unidentified
MRIIGCDLHARQQTLAMLETTTGEVVNLTLMHEGNEVRDFYSKLPRPVLVGIEATGSMQWFLNRMEELGIECRVGHPATIRAAEPRKQKHDRRDADLILKLLVENRFPAIWLPSKELLDLRALLLHRHQWVRIRTRVQNALQAIALANGLRRGPGLWSYDGQAKIAFLPLSPHASYRRSALQALYRKMEEEIENLTKQVAEQAEQRSRARQLMTHPGVGPVTALATDVFLGDPGRFVDGKALASYVGIIPREYSSGGNQRFGGITKQGSPLLRFLWCEAGAHAVRRDPELQRFYRRKLVQKGLGKARVAVARKLGIRLWIMLRDEIDYQEFCRRGQKQQSGAACAGMLEVANGANSHRPID

SEQ ID NO: 454656 - protein, 370 aa, unidentified
MENITYVGLDVHKATVCVAIAEGSRSGEVRQLGVFENRPELLLKLVARLGKGGRRLSFCYEAGPCGYGLHRFLSGCGHDCVVVAPSLIPMKAGDRVKTDRRDAVMLAKLHRAGELTPIWIPDAAHEAMRDLVRARATAGRVLSKARQHLQSFLLRHDQIYRGVRAWTLAYRRWLTTVRFAHPAQQIVLQDYIHAVQDAEARLDRLTRQIEELLPSWSMAPVVTALQAMRGIALVVAVTVVAEVGDFRRFANARQLMAYLGLVPSEHSSGASIRRGGITKAGNVLARRVLIEGAWTYRMPARVSRKLHDRNEKLSPAIRDIAWKGQIRLCSRYRRLAAAGKPKVVVTTAIAREMVGFIWAIARIAQPTLQG

SEQ ID NO: 454657 - protein, 377 aa, unidentified
MKRIKFVGLDVHAETIAVAVAEQEGEIRSLGVIPNREESVRKLLKKLGPVEQLRFCYEAGPTGYALYWQLTRMGAKCEVVAPTLVPVKAGDRVKTDRRDALKLARNYRAGELTAVWVPDAEHEALRDLVRAREAAKKDQLRARHRLSKFLLRQGQRPPVGVQPWTVKYSEWVKRDVHFAVKAQEATLLDYLHEVEHMAARIVRLDSAIEEAVKVAPAKMRAVIEGLQALRGIAQLSAVTIVAELGEVTRFSKARELMGYGGIVVSENSSGERQRRGSITKTGNAHLRRVVVEAAWAYRHRPAIGFTLRKRQENLSEEVKEIAWKAQHRLHARYGKLMAKGKNKGVVVTAVGRELLGFIWAIGVQVEAQQKESLRQAA

SEQ ID NO: 454658 - protein, 409 aa, unidentified
MLKIVYPNCCGIDVHKTFVVAVIAITDNQGITQYHRRRFSTFTNQLKELRKWLDYYSCFHVCMESTGKYWIPVYNILESDHDICLAHPKYVKAIRGKKTDKKDAQWIADLYKHDLVAGSFIPPAKIRQLRDLFRYYNKLTSIQTSEKNRFQNSLTWSNIQIASVVSDVFGKSAQKIIQSVLDDPSQMPDIETLVHKSMIQKVDRLKLSIEGEISDEQAEKIRVIKAHFDAIVLCKNDLEQLITELAQEYQPQIKLIQTVPGFKKELTSIRLISEIGVDMSKFPTSGHLCSWAGVVPANNESAGKKHSTKISKGGRYLKPLLVQVANAVVRSKKHPEIRNKYLQLKKRRGHKKAIIAIAHRLLVAIYHVLSNKEPYNPDLYHVTNYIPPDKELSIEEAIQFAKSHGFKIA

SEQ ID NO: 454659 - protein, 349 aa, unidentified
MKIIGCDFHPSYQQIAVLDLATGEMMEKALSHERKEEVRAFYAGLGGSVRVGIEASGQSQWFERMLGELGHELWIGDAAKIRASCERKQKTDRRDAELLRRLLAEDRFPRIWVPTAAERDGRQLLLHRHKLVRMRTQVKNQLQALALNQGVQRKRKLWSEAGRKQLEALPLWPWASRRRAELLQLLDQLGASIAELDRAVAEQAKARPAAQRLMTHPGVGPITALAFTLTMGPAERFQRGKQVASYLGLIPSEYSSGGRQQRLGHISKQGNPFLRGLLVEAAQSAVRLEPEMRRAYQRLAQRKCRGLAKVAMARKLAVRLYWMLRLQVNYAQLIQGSHAGQPGSFCGRG

SEQ ID NO: 454660 - protein, 338 aa, unidentified
MNTYLQFSLGTDIAKLTLAMRLVSIGSSPEVVGKPQTFENTAQGHQEVFQWLHQQGAGPTNTQVVMEATGVYWEAFAFFAYEQGFTVCVVNPAQIKYFARTILMRGKTDTMDAELIARFGAVMSPHRWEPPSLEMEHLRLIMRQRDAYVAMMTEETNRLHALEGHAHPHKEMIKITKKHVRFLEQQIHRMEETFKDTLNNTPAWKRHIELLMTIPGIGLITAGTLLTETNNFAAFVDAHQLTAYAGLSPAPFLSGTSVRGKTKISKIGNARLRRALYMAALSAIRSDSVFKRQYQRLREQGKPCKVGLVAIARKLALVAFALIQSQQPFNVEHVSVRH

SEQ ID NO: 454661 - protein, 345 aa, unidentified
MKITTIGIDLAKNVFQVHGVDEHGRTVFNKPLKREQMASFFVNLPACLIGMEACGSAHHWARKLQSMGHTVRLMAPQFVKPYVKTNKNDAADAQAICEAVTRPSMRFVPIKNVEQQGVLALHRARQGFVKARTAQANQIRGLLAEFGFVIAQGRHHITERVPQLIEDACNELPGAFRRLIQRLLEHLQELDRQVQELEVQIVAWHRQSDLSRKLEQIPGIGPITACALVASLGDAKSFKDGRQVAAWLGLVPRQHSSGGKQNLLGISKRGDTYLRTLLIHGARSVIYHAQNKDQDSPQCCWVNGVVQRRNKNVAAVALANKNARIVWALLAHERSYESGYVREQA

SEQ ID NO: 454662 - protein, 369 aa, unidentified
MGDRITYVGLDVHKEGIVVAVAADGIGGEVREYGRVANSAAALDRLLRKLGRDGVRLRFCYEAGPCGYGIHRHLAARGHDCAVVAPSLIPKRAGDRVKTDRRDAASLARLHRAGELTAVWVPDPGHEAMRDLVRARLDAVHALRRARQQLSGFLLRHGCHYGRPAWTKLHRRWLAGLKFEQAVLHLVLEDYVQAVEAAQARRDRLTAQIAAMLPDWALAPVVTALQAMRGMALVNAATLIAELGDLSRFANPRQLMAYLGLVPSEHSSGASVRRGGLTKAGNSAARRLLIEAAWCYRFPARVSRELLLRQEELPKPIRDIAWKAQLRLCARYRKLARTGKPANVVTAAIARELSGFIWAIARRVPPAAS

SEQ ID NO: 454663 - protein, 360 aa, unidentified
MAKAKTLVGLDVHATKIVAVVLDAETGQLQTFSMDGDAAGAAGFCAGLPRPVRVAYEAGPTGYGLARELAKRGVECVVAAPSKIPRASGDRVKTDRRDAEHLVRLLLAGKLHAVRVPGDEEEALRDLVRARDAVRRDLMRARHRLSKLLLRHGIRFDDGQAWTERHRQWLATITLDWPAAHTTMLDARGAIDALCHRRDGLEREIVALLPACPWAVQVGRLRCLRGVDTLTAVGLCAEIGDFERFARAEQLMSYVGLVPSESTTGQQRRLGSITKTGSGHARRLLVEAAWHYRPRPSIGKALTDRQADQPPEAIAIAWSAQRRLHRTWTRLEARAKRRTIIAVAAARELAGFAWAITQIE

SEQ ID NO: 454664 - protein, 410 aa, unidentified
MGVVSPLLWEVQGEYQFERIRYGSNPEQLRLLAAWLIEHEVEEVVMESTAQYWKPVWGALEQYWKPSGQKRETTGPMSGTLHLAQAQSNRGPRGRKKDFPDAERLVKRLVANELSLSFVPDAEQRLWRTVMRRKYQLTRNRVQLQNRLEALLEEAHIKLSSLVSDLLGASARRMLKALADGETDPAALASLADKNLRATPAQLCDALGACTELNPVYRRLLKMFLEELQLIDQQIGQLDKEMATLLGQHQTAVERLAEVPGLGVDSAQQIIAEVGATAATFPSAKQLSSWVGACPGDEESAGVSKSHRSPKGNRHMRRILNQCANAAAKSKGTIFEIVYRRLVSRLGHNQTIGAIAHRLCRLIWIILHQNVRYEERGPSVSAKSRQRRTHKMIRELRNLGYRVEPVVTTL

SEQ ID NO: 454665 - protein, 368 aa, unidentified
MKRRLAVKKDNRFRFTNTSKMTMGIDLGDRYSYFYTLDAAGENRESGRVATTRSALEKRFRGGEAARVVIEAGTHSPWVSRLLAEWGHEVLVANPRKLALITKNERKDDPVDAELLARLGRVEPQLLSPIVHRGAEAQADLAVIRARDAVVAARTQLVNHVRGAVKSLGSRMPRCSPRSFAQRGESEVPEPLRAALQPLLEVIEGMTEQIKGYDRQIEEACREKYPETELLRQVGGVGAVTSLAFVLTLEDANRFGRSRSVGGFLGLHPGRDQSGAQDPELRITKAGDQLLRRLLVGSAQYILGPLGPDCDLRRWGLKLASRGRKNAKKRAVVAVARKLAVLLHRLWVGGEVYEPLRLAALTALSTPA

SEQ ID NO: 454666 - protein, 341 aa, unidentified
MKNLFIGIDFSKEKLDVAVITAVGLSETAQRECYEFKNSVSGFRQLVKWVERNSNGISTSSWLFCGENTGDYSKPLCNFLYGKGYDIWLENAKSIKDASGIRRLKSDRADALMIAEYAMRNYDKAFMYEPLSASLSQLRELFLYRQMVIRHRCSFQVRRGEKRLAMEKSPVKTIISQSGRHIVSELNKEIEKIDKRIAELIDSEEELKEIYHIVTSVPGIGCQNAVCLMVYTDNFRRFNYDARKIACYYGIAPFGKNSGASVHTDPHVHYLANRQIKAMLTQAALAAINHNPVLSQYYLRLVERGKKKQVAMNNVKNKLIHLVTAMVRNRQVFSPEYKISA

SEQ ID NO: 454667 - protein, 400 aa, unidentified
MLSIGIDVSKGKSTVCGMKPGGEIVYTPFEVQHTREGMSELVSLLRGSGEEVRAVLESTGSYHCPVVTALLENGIFVSVVNSLRMKRFCSQSIRKVKTDRIDAMQIALYGLAYWQELQPTRPPEDTYRELQLLARQYYQMTSLLIKAKVDFNALCDQVLPGMQELMSDHAGRHKLSDFVLRYCHTTHILEMGETRFRKDYCKWAEKKGYRNCERMAALIFATAQNGIPVLPNAPSTQIVITEAIRVLHTVEASRDAILTQMQALAKTLPEYSLVREMPCIGDTLAPRLIAEIGDVRRFHSKRALIAYAGIDAPPYQSGKFCANNRHISKRGNRYLRKTGYEVMQSYVMHKPANDPIFTFIEKKRGEGKSGKLAMVAGLNKFLRVYYGKVTELYRSLPAIE

SEQ ID NO: 454668 - protein, 426 aa, unidentified
MAYRIAGIDVHKAMLAVVVADVEVEGEWPFMRRQFGATPSELRLLSAWLVEHEVEEVVMESTAQYWRPVWDALERDWQPVQRRRVDAGPTAGALHLAQAQSNHGRPGRKRDFPDAERLVKRLVAHELTLSFVPESTQRLWRTVTRRKYQLRQNRVRLQNRLESLLEEAHIKVSALVSDLLGVSARRMLRAVATGETDPAALAALGSARLRATPEQLGDALGAAADMPPLYRRLLVMTLAELDLLESHLQQLDEELAALLRSHQDAVQRLAAVPGFGVDSAQQIIAEVGPTATTFPTAKHLASWVGACPGHDESAGVNRSHRAPSGNKPMRRLLNQAAHAAVKSKGTLFELLYRRFVGRLGHAQAIGAIAHRLCRLVWKVLHDGVTYEERGPEVNKARAHRRATRMIRELRSLGYRVDVTPAPPGNS

SEQ ID NO: 454669 - protein, 346 aa, unidentified
MMNAIMIGLDIAKNVFQVHGIDAAGAVTVRRSLRRGQVEQFFAELPGCVVGLEACGGAHHWARLLRRQGHEVRIMPAHYVTPYVKRNKTDGRDAEAICEAMGRPSMRFVPVKSEEQQAVLTLHRTRAMLVRQRTMTANALRAGLSEFGIVTAQGAAGLRSLMQKLAANAAPLPEAARAALSLLASQWESLDGAVRKLDAQILRSVREQEAARRLMEIPGVGTLSASAVLAKVSDVGTFASARDFAAWLGLTPRQYGTGGKPRSGGISKQGDRSLRQLLVLGATARLAQARRRGSADPWLHALMARRPFKVAAVALAAKIARTIWALLKTGAPYQPNRRRASAAAPA

SEQ ID NO: 454670 - protein, 309 aa, unidentified
MDIVVGIDVSKDRLDVAVAPSGLAFAVVNTQAGIDELVARLQSVKADVVALEATGGFETPAVAGLSSAGLSVIVVNAAQVRAYAHAIGRKAKTDPIDAALIAAFVMATRPTLRPLKDAETQALSALVARRRQIVQMIVAEENRARMALAKETQKSIRRLLSALRHELESLDADLDDHIRKSPLWRVRESLLTSVPGVGAATARTLLAEMPELGRLDRRQIASLAGLAPWTRQSGSWKGKSFTGGGRGKVRSALFMAALVASRHNPVLKAFRERLVAAGKPKIVAIVATMRKLLTILNAIIRDQKPWKSA

SEQ ID NO: 454671 - protein, 358 aa, unidentified
MKIIGCDLHARQQTIAMVDTETGEITEKTLSHEGNAMREFYAALEPPVVVGIEATGAMQWFLELLEELGVECRVGHPAKIHAAETRKQKHHRRDARLLLDLLVMKDRFPEIWMPSTEQRDLRTLLRDRHQWVRMRARLQHSLQAMALNHALRRGPALWSAAGQNALQALPLPPYSSQRRTELLRLYVQLQKRIQALDKEVDVQARQRPHARRLLTHPGVGAVTALATEVFLGDPNRFDTGNQVASYIGMIPCEHSSGKRQRLGKLSKEGNSLLRYLWTEATMHAVGKDPELKRFYRRKLIQKGMGKARIAAARKLGIRLWIMMRDQIDYEEFCRRGKLRQEGKAHAGMPDYNSGPALQ

SEQ ID NO: 454672 - protein, 331 aa, unidentified
MSVWVGIDVGAKAVEMVVRREGKHSKPLSFEQTPAGHRQLIRELKRLKPTLIVLEATGIYHFDLAVALEEAGLPVAVIDPKSARRFAELKLERTKTDGVDAGLLAEYGERMRPPLWKAPQALQLALRDLGRQINRLIGERSAAKNRLHALSSKRSTLKLLLEDERRGIAQLDRRIEKLQAAALELIEQSPQLVEQMSCLTAARGVAEATAISLLAEFCVLPQELKAAQVSRHAGLDVRLNDSGSRVGRPGRLSKVGNRYLRAALYMPAMSAIQHDARAKAFYEALLARGKKKMQALCAVMRKYLTGLWVCFVRSEPFDSAKLFDERHLMKT

SEQ ID NO: 454673 - protein, 414 aa, unidentified
MELGYRLMVGIDWATEAHQVCVLDSQGRLLEQRRVEHRAEAIAAMIDRLIGLAGGDPASIAVAIEVPRGAVVEALVERGLHVFAINPKQLDRFRDRHTVAGAKDDRRDAFVLGDSLRTDLSAFRRIHLDDAWTIQIRELTRIEENLNTEINRLANQLRDLLLRFYPQLLRLCPAADQPWLLALLKLAPTPTKAQRLRRSSIERLLHQYRIRKWTADQVRTELKTAPLSVAPGVTEATSAHIALLLPRMELLMAQHKLCSRAVQTALNERVSAEEQGREHRDAEIILSLPGVGRVVAATMLAEASQLLAQRNYHALRTLGGVAPVTRQSGKRWAVRRRYGCNHRLSNAFYHWARVSSQCDPRAQHHYQTLRQLGHSHGRALRGVADRLLALLVAMLRDQTLYDTTRAHAPKPIAA

SEQ ID NO: 454674 - protein, 435 aa, unidentified
MRLKDYGRNPKKRKEYVQQPSLLLIGIDVSKAKHDACIGTKDGIIQRKIIFAHSREGFRMFENAIRKSMFKAKCRRVLIAMEPSGIYWYALYERLKSCGYGICLVNCQAVCNNRKTLPGGINKTDQKDAYSVFDLLCQGKFFLPVVRDPELQAAYRMMQRHMALKKRVSRIRNQLRQAIHLAFPELNPLISDLSLPTSLRFLMANPTPRSIRYNGKRRFLEKWRPRRRCGQWRPQKFELIYDLAGKSIGLKDPHRIYEFEIKTLAQDLADAVEKSKMWLHKAIELLEPRADYQLLLQLPRMGKPTAAAILTAIGDVQEFTYAKQLVKLAGLDIRRFESGSTVKKRPRISHVGSAFLRHWLYHYALRLVAYEPQFQNFYQRRKKNSPGKGAARRALIAVSDKTVRIVYRMLKDNKPYMPQKDRLYAKQYGTLKKAA

SEQ ID NO: 454675 - protein, 366 aa, unidentified
MNAIKAAPAASAIALKNEKSAKAKRILIGTDVHLRGYQAARKVDNGVIGVVENFRSEEALLLHVEKQCKRAEQVVVVYEAGPLGYTLYRKLTACGVLCYVCAPDSSEQKRKRRKNNKIDARNLTSKLFNYLNGDEGALQLARVPTEAQEQLRLASREHDQMVEERKRLGAKGNALLLSQGFGSWSNWWRPKAWAQLSSLVPEWLLERLKIWVDVLKMLDEKICLAKVALARACSGPRPKGVGALSQIQLQSEVLDWSLYTNRRKIACLAGMVPSEWSTGDTERRGSITKVGVPAIRRIIVEMVWRIVLFQPQYKPVQKWQKVLQGTNPALKKKAVVAIGRQLIVDLWRLQTGRVSAQELNLVMVGA

SEQ ID NO: 454676 - protein, 456 aa, unidentified
MGHARARKVPAQLVEDEEYQLRYERVAGIDVAKAKADVCTRLPPAREGGRRGSRVEEVPATAREVLALAGRLAADGVQVVVMESTSDYWRIWYYLLESAGLTVQLVNSRHARQLAGRPKTDRLDAQWIARLAEMGLLRPSFVPPPEIRALRDLTRTRLQLVRDRTREWQRLEKLLEGAAVKLSSAVHSLAKTVTARVILQALADGERDPLALAGLADPRVRGGRAAIAEALEGMTVGAHHRMLIRVHLDHIAFLDRSAAAVEDEIQAALVAIPAAQGVSADGIRCASPGPDAAVLPAAERLAEIPGVSLDLAHAIIAETGLDMARFPTAAHLVSWAGLSPVTRQSGPRSRKPQKGQGNDYLKGYGTQAATGAARTDTFLGERIRRLSRRLGPNKAKCAVARSILVIAWHLLASPDARFTDLGSSWHERKTSRDRKIRTHVRQLEALGLNVTITPAA

SEQ ID NO: 454677 - protein, 392 aa, unidentified
MIYVGIDVASTKHDCFIVSDKDENSNLLISINNDIDGFTKLKETIYDFISVNDDEVRIGLESTGHYSHNILHYLVKEGFDTMLINPLLTNMERKSSSVRKTKTDKIDAKSICTFLMRNQEFKPYTIKSYHSSALKSLSRSRFALVKQLSKQKQRLHMLVTITFPEYLKVFSTLHGKTSLEILHKHSLPSKIAKARIDGLTNTIVKASKGHHGHDTALLIKELAAQSTGDPNQVHAIEIKLCIEMIRFLQQQIQIYNNEIKKIVDEYCPIILSITGISYITGAIIIGEIGEISLFSSPDKLLAFAGLDPGVYQSGNYNANNISVSKRGSSYLRWAIHTSASIIIHHDNTFSQYYAKKRMEGKHHLVALGHVSKKLVRVIFSILKYNNSFVPQS

SEQ ID NO: 454678 - protein, 387 aa, unidentified
MIYVGIDIAKEKHFAAAMTADGEVLIPPFGFTNNSEGFSLFLSKLGSFDKDDLLIGLESTAHYGENLVFYLYDQGYRIAVINPIQTATLRKANIRKTKTDKVDTLLIIKAMIINTPRIFTKTDIDSIRLKSLCRFREKTKKSKAKLKIQLVSYVDVLFPELQYFFKSGIHINTCYELLKKHSTPNDIAALHLTYLGNLLQKASHGRFGKEEAIALKGLAKSSVGTGNTTVSIQITQSISQIELLEKQIIELDETIKSIMLEMNPIILTIPGIGFLNGAMILGEIGDISRFTNPSKLLAYAGLDPAVNQSGQFNAKSTRMSKRGSKLLRYALINAAWNVSLNNNTFNDYFMLKKAQGHNHYSALGHVAHKLVRVIFKMLKDNVAFKLD

SEQ ID NO: 454679 - protein, 430 aa, unidentified
MKSNTQNAKIEAITEKTLVLGIDVGSEMHYARAFDYRGIEYSKKPFKFSNTEAGFVTFKEWILDLKERHEKDKVVPGMEPTGHYWFNLGKFLQDNEMKPVLVNPHHVKKSKELDDNNPTKNDRKDPKVIAGLVREGRYMIPYLPDGVYADLRTASNIRFQLQAELTRIQNRISRWFNIYFPEYKTVYGKPDAKSGMLILKTAPLPEDILTLGIDGVNQIWRDEKLRAVGKARAKTLIEAAEHSVGSKEGAVSGKMEIRMLLEDYESRNTRLQEVMVLIEELIRKIPMAEKLLEIKGVGIRTVSGFLAEVGDISRFNNPKELQKLAGLALVENSLGKHKGETTISRRGRKRLRYLLFEVAMSLVAKNQEFRELHVYYTTRKLNPLKKMQSLMAIAAKLIRVFYAMLTKGVDYDPKKMVSDIKRPAAYLQTE

SEQ ID NO: 454680 - protein, 414 aa, unidentified
MGTTYEILVGIDWATETHQVCVLTPEGKPLLERTVEHKAPAIHAFIETLIARVGGRAASIAVAIEVPRGGLVETLLERGLHVYSLNPKQLDRFRDRHSVAGAKDDRLDAYVLADALRTDLHKFRQVALDHPLVIQIREISRADEDLRDEANRLTNRLREQLYRWVPHLLSLSPSTDEPWFWDLIERITRSDSMRLNRGQLEKLLRKHRIRRHTPDAVLAALGTERMNIAPGAAEAARSHIRLLLPRLRVVHEQRKQCAKQLTSLLDQYAAEDDDERGSSPSDVHLLRSLPGVGAGVTATLLAEAASLLRAADYPALRAFGGLAPVTKRSGKSRVVLMRYGCNTRLRNAFYHWARTSVQHDDAARNYYATLRARGHSSSQSTTIDNTSWLRILTAMLNSRTMYDPLHKRLVRVVA

SEQ ID NO: 454681 - protein, 356 aa, unidentified
MGLYAGCDLHAKSNFWGIVDGEGKRVFKKRVGNDGERILEILERFRGDLVGVVVESTFNWYWLVDLLMEGGYKVHLANPSKMEKYSGLKHVDDEDDAFWLGEMLRLGVLPEGYIYPKEDRPVRDLLRKRGHLVRIRTSALLSLKNIVSRNCGRGVKSYILKGEKGVGGLLEGNEDLALAGQVSKEVIDYLSGKIAEVEKAILGRREIRESYEGLLTLPGVGKVLGLTIRLETGPIGRFGDVGNYVSYCRKVPSRWFSDGKVKGQGNRKNGNRYLSWAFSEAAELARRFHTEPRAYYQRKRAQTNAAVAHSALAHKLARVAYYILRDGVRYDAAKLFGLNRAGAESLKGGLGKSHET

SEQ ID NO: 454682 - protein, 433 aa, unidentified
MKVLYERVAGIDVHKEMVKVAIRSPGEKPWTRKTEILEFRTFYGVLQEMARELRRRGVTHVVMEASGVYTEPVYYALCEQDFTGVAVINPAHAKALKGHKTDAKDCARLAELFECGLLRGSYIPPAELKEVRDLTRYRMKTVQARTSEIQRLGKALESAGIKLGSVASSITGKSSTAMVEALIDGERRGQVLADLAIGRMRSAGKLADLSMALAGRFTEHHALLCRLHLDRIAVFDDAVDGLDEQIAGKAARWQREAGLLTSLPGFGDVVAQAWLGEIGPAPHLHFATHEKLASWVTLCPGNNISARKRKHGRTGDAGTYIKPMLVQAAWAAIRVRGRLQARYNRLVRRFGGDKNPAAKKKAITAIAHTLLKIAYQVLKTGAPYDEPGADFYTQRESPEHKQAWLERQMQKLHPGCTITITIGPPEAALPPGG

SEQ ID NO: 454683 - protein, 345 aa, unidentified
MQTMYYIGLDVHKRTISYCVKDGSGAIHAEGAIPATRFDLDRWMKTLPQPWTAAMEATVFTGWIYDHLQPHAAALKVAHPLMLRAIATAKKKNDRIDASKICDCLRCDFLPECYMASTAIRERRRTLRYRNLLVRQLVQMKNKISGLLMEAGVSYNKRRLHRAGYFRELLATNPGIDEGLCSLLRLCRETVVRLQKTESALVRSLERDSLLMDRVERLMTVPAVGPITALTWALEVGDAQRFSSIKKAISYCGLCGAEKSSANTVQRTPLSKQRNKHLQTTLIEAAKMAPRYSPNLAMLYDKEKQKGNANRATLAVARKLVAYLMAVDRGQRNFQVAETSNCIAA

SEQ ID NO: 454684 - protein, 360 aa, unidentified
MKKHNTERREQKGKGRKTIGLDLGDRTSRYCVVDEQGEVILEGSVATTESALRSWVEEMGPCVVAMEVGTHSPWVSRLLKECGQQVIVANARRVRLIIESSRKNDRLDARTLARLARMDAALLAPIRHRSAQAQQHLIMIRARAALVETRTKLVNTVRGMVKATGKRLRKCSARSMGPAAARQIDDALAQVIKPLLASIESISGQIQQYNRQIVEVAKQYPEVARLDQVWGVGTLIALTYVLTIEDPGRFERSRDVGCYLGLRPRQRQSGARSPELGISKEGDRYLRTLLVQAAHYILGPFGPDTDLRRWGLRLAGHGGKNAKKRAVVAVARKLAILLHRLWVSGERYQPLRDAEIATAA

SEQ ID NO: 454685 - protein, 301 aa, unidentified
MSKKNTRNALDTSLSYAVIGLDLAKADCAVAAVPCADDELGLIDRMDYESLFEQAEKLGPTLFAMEPCCGYSQISLRLQNMGHEVKVISGHAVKNWIATHKSNQKTDLNDATALAKLALYDHDLQPIRVKNVEECRIASVQAIRIQLRTQATKSLVCFKSLCQCWGIVIRRGSLNTKKMAEAVAAVEKLLGAEVASSLMILRDAYKFTMKQINALDKLLDALVEANEQARTMKTVLGIGTQTAARLAVTTGDIKRFPMPRSYVAYFGLAPRNIITGHSGTPSPSKRGALKPVEKFPAAATE

SEQ ID NO: 454686 - protein, 392 aa, unidentified
MIFIGIDVASEKHDCCILSEDGCVLRAFTFLNNKCGFDEFLSVVAEYCGGDDFRNVKVGLESTGHYSINLTNYLLAKHLSVKIYNPLQANMLRKAQSLRKTKTDKSDARFLAQSLFSDDSKPYSQSLYYISELKTLTRSRHRLVDMRTRLRLSVSRLITVLFPELSGVVWSVNQKSCYALLSEFPTAKSIAEAHLTKLTNILSNNSHGKYGRDKATEIRELAKQSIGLDSRAMGLELKQTIRLIQNLQFEIDELDSEIKSVMLDIDSPVLTIPGVGFTLGSIILAEIGNIENFDNPYKLLKFAGLEPSVYESGKYTASRASMVKRGSKYLRWALMQAARLVAYRDSTFGAYMAKKRKEGKHFNVARSHVAKKLVRVLFHLLNSGESFAPQMA

SEQ ID NO: 454687 - protein, 347 aa, unidentified
MSITMIGLDTAKSVFQVHGVNETGKVEIKRKLRRSELIPFFEKLETCTVVMEACGAAHHWARILSSLGHEVKLIAPEAVRPFVKKGKKNDPADAAALCIAASRPDMMFVPIKSIEQQGILALHSARSLLVKQQTMLANAMRGLATEFGLTVPKGIDRLEELLTLVDADKAFPGKARQVFTGLFDQCRALAESIRALEAEIVAHARQDETARRLLTVPGIGPITASLVVATVVDISVFKSARHFAAWLGLVPRQYSTGGKTRLGRITKTGNREIRKLLVLGATSMVYRAPQWNSVVGAWTRGVLERRPVRLVTVALANKMARIVWALMTRKELYRASGRAAAATEAAA

SEQ ID NO: 454688 - protein, 416 aa, unidentified
MRRLLFVGDDWAEDHHDVEVMDEAGRRLGAAKLPEGIAGITRLHAMIAAQLDPDGDLEGRAGQVLIGIETDRGPWVQALIAAGYQVYAVNPLQAARYRERLGVSGAKSDPADAHLLADMVRTDHHQLRVVAGDSELAEAVKVVTRAHKTLIWERTRHTPRTRSTLREYFPAALEAFGDLTAPDTLELLAKAPDPPGAARLTTAQITAALKRARRHHRDRRAVEIQAALRTPQLGQPAMVAAAYAVAVRAQVAILVVLNEQISVLQEQVEAHFGRHPDAEIYTSQPGLGQILGARVLAEFGDDPTRYADTRARKNHAGTSPITRQSGKKKVVLARYVHNDRLLDALGWQAFAAISRSPGARAYYDKQRARGLGHRAALRQLANRLVGILHGCLKTGTRYDETTAWSHHTQQDQLTAA

SEQ ID NO: 454689 - protein, 474 aa, unidentified
MIKSVGIDFHQGKHVARCLDEKAQLCDGFSFQTTPEGLATLEEHIFRDGSNPVIVFEPAGLTWFILAICIRARHPDCRLVRAKGQKVAALRRYLRGSSKSDRIDALTLAKMTFIDPEQLDEVYLPPAKIHALQRLSRQRKRLESDISAHKTRIGAIVESYVPGVRKAFSDPWSTQARAFLRCQLNPLAVAHDGEKALHSFLVRARHRNKTDKEESHRIYLACQSAADLYELSSRAEAVDDEFFSVFQEEIERELRLMELEEAESEAIAKRMEELYRELHPSDNLRSIPGVGRVTAPMFLATVGDPARFHNQSAFVSWTGVVPRTRQSSDVEAKGLRMTKAGPAIMKWALFQAGDIGRRFDPQLASLYYREMVHHGKNHKQAMGAVMSHLAARVIKVLQDGRPYELRDNEGKAISPAEAKKLILLNYQVPENIRRERRRRNPVKRGSLKSQGTELPRTNEAAVAPQPVKATIPEN

SEQ ID NO: 454690 - protein, 340 aa, unidentified
MEQIIGIDLAKRVFQVHIVSTEGEKQANKMITREKLMTFIAQQPASRIVMEACGSANYWSRQFKQYGHEVKQISPQYVAPFRMGNKNDRNDAVAIVEAASRPGMRYVPEKTVEQQDIQCLHRVRQRLMKNRTALINQVRGLGLEYGIAIPEGSHKIMASLPDALEDAENELTTLSRELFQEMLQELRESQQRIKALDVRLKQMSAQNEDTVRLESIPGIGPLGASALTVALGDSSDFQNGRHFASYLGLVPKEHSSGGKVRLLGITKRGDGYLRGLLIHGARSVVYRVANLPDEQCGGLQRWLKGIIVRSGINKAIVALANKNARIAWALVSQKTEYVFK

SEQ ID NO: 454691 - protein, 297 aa, unidentified
MQTLVERGCGLDVHQATVVACLLIVLKNGRVQKQVRTFGTTTRELMGLREWLLSESCTHVAMESTGVYWKPIYAILEGAFEIVVANAQHVKKVPGRKTDVKDAEWIADLQFLEQQMDQLDQELASLLHPHQDAVQRLAEMPGLGVDSAQQIIAEVGPTAETFPSEKCLSSWVGACPGDDESAGVNYSHRSPKGNRHMRRVLNQTANAAARTKGSIFDIVYRRSVPRLGHNQAIGAIAHRQCRLIWLILHQGVRYEERGPAVTKQSKQKRTARMIRQLRALGYRIDPPNPQPSQAHAQ

SEQ ID NO: 454692 - protein, 358 aa, unidentified
MKKKIKELDFSNQLIFVGIDVHKKSWTVTIQIGGIKIKTFSMDPNPEQLSKHLKMNYPKGIYKTVYESGFSGYWIDRKLRSLGIENIIVNAADIPTSNKEKIQKTDKIDSRKLARELENENISGIYIPTEKREALRTLSRLRMQLTKDQTRIKNRIKSLLYFLGVKFPEDYELKHWSGKFISYLSELELKHPAIKATLDELIEYVQQVRKQLARVLKKLKAILRENAAANKILNYLETIPGVGFITAATLFTEIMDIKRFNKLDKLSAYVGLSPATHSSGEKEKVLGLSKRQNSFLRTTLIESSWIAVRNDPALTMAFSSLTQRMKKQDAIIRIAKKLLNRIMYVWRNEKEYVCSVVK

SEQ ID NO: 454693 - protein, 373 aa, unidentified
MPKYSTAFGMDVHLRSTTVCALDADTGEAVTRRFPGNPWGEIAGWMDGFPGPSLAAYESGYLGFAPQRELAGLGVECVVAAVSKIPRSAADSASKNDRNDAARMAKAILAHDISPVWVPSPEVEGIRDLAGAHDGATARLAAAKQRLLAFLAKRGFVYGGTTPAGNPRKYWTYDFLRWLDKVRPEDDGGVRTLAALRNEVEAAAEARADLLSEYRAAVDASPIAAEVAALQSIKGCAFALAAAFSAEVGDFTRFRSGRQVTAYFGLAPSQRSSGDSVRLGGISGAGNALVRKLAVEGSWCYAAARHQPKLMPRDTGVPLEIRMHGRKGSERLLRRREEMLARGMPAAKANAATAAELVRWLWALGMMCREGAE

SEQ ID NO: 454694 - protein, 414 aa, unidentified
MEQKMIYVGIDWADEHHDIVITDDSAKTLDLFRIDHTPDGFALLHSHIANHQASPGLVLVAIETSRGLLVHELLQKGYTVYAINPKAVNRYKDRHVLSKAKSDALDALSLAHLLRTDRHLFQPIKPLPEDYRLLDRLCGDLRKVVDEKSRVTNQVISCLKEFYPKALEIFSLNSQIFIDFFKAFPDHDTLSACTKKAFLAFLKKHRYPCTAKAEELWKTIQSPTLQPDKVVARSGRLRLGMLLDQLENLKEHITHYEQEIQAILDKLPEANPIKSLPGVGERLAPELVATLGPNSKDGHHRFQAAEEIAKLSGCVPVVRESGKWRNVSLRYACVKSLRRTFHDWAFTSINYSSWARAYYDYHKKRNQNHCTILRNLGKKWIKILFAVWSNGTSYDEALHVQNLKARNVPWAMAL

SEQ ID NO: 454695 - protein, 337 aa, unidentified
MLNYGLDVHKKYTSICVMDDQGTIIDEGRALTAELPAHPAFSLKGEKRAVMEAGGNWHFVYDILQPHVDELMLAHPLRVRAIATARVKTDTIDARTLAHLLRSDLIPAAYVPPPEIRELRELLRFRLDLVKQRTATKNRVHSLLTKAGFESPVADAFGRRGRQWLSELFLPTGIRCRLDGFLRVLDCLAAEIKLTEERIRLEVARDPDAQLLMTIPGIGALSALLILSEIGDVHRFLDASHLVSYAGLAPRVRSSAGRTKLGQITKQGPSALRWVLVEATHMAVRRPGRLQEIHRRLRAKKSSSVAVVACARQMLIAIYWMLKRGVAFRADGSPGLA

SEQ ID NO: 454696 - protein, 355 aa, unidentified
MTNSNDFQSHSQLTIGMDLGDKISDYCVLDAEGRTLEEARVPSSPEAFARDLSRFRGAKLFLEVGTHARWALETLESQGIEATAINPRQLKLIAQSRSKTDKKDARLLAQIGQKLPGILCPVSFRSREMQGDYRLVQSRDQLVAQRTAIVLMIKGQAKSAGVRLSGATTVFHRDLLEKIPPHLAASCVPLVKVLETLTQQIRKIEKELERLCRERYPVTQLLRQICGVGLITALSFVLVIRDPKRFTNRRRLGSYLGLAPAQRSSGDQNPQLGITKHGNPYLRRILVQAAHYILGPFGKDCDLRRWGLALCERGGKNARKRAAIAVARKLSTVMLALWKSGEDYDPFYNQREQAA

SEQ ID NO: 454697 - protein, 412 aa, unidentified
MEVLHERCAGLDIHAKTIAACPIVPGPGGKPKKEVRTFGTMTDDLLALSDWLAANGVTHVAMESTGVYWKPVYNILEGNFEVLLVNAQHIKAVPGRKSDVKDCEWIADLLRHGLLRASFVPDKPQRELRELTRYRTTMVRERAAEANRLQKTLEGANIKLGNVASDVLGQSGRAMLAGLIGGVADAAALAELAKGKLRDKIAQLERALKGQFGPHQRFLLAQQLEHIDYLDRTIEEVGGEIARRLDPFEEIIALLDTIPGIGRRIAEILAAEIGMDMDRWPTARHIASWAHVSPGCNESAGKRKSAKTGKGNPWLKWVLVEAAQAAAHTKDTYLSAQYHRIAARRGSKKAIVAVAHTILVIAYYIIKRREPYRELGANHFDESDRRAVERRLVKRLERLGNKVTVEPMAKAS

SEQ ID NO: 454698 - protein, 360 aa, unidentified
MTESTPIVAFDQHAASVMAAVLLPGERTPALHPLPPDCPSIRRFLERLALPGVRCCYEAGPCGFDLQRTLLTAGIACDVIAPALIPRRAGDRVKTDRRDAAQLAVLYRAGALTAIHIPTEQEEAVRDLLRCREDICTDLLRAKHRLSKFLLRHGRRCPDGRAWSKRYIAWLTGQRWPLSALEQTFTSYRRAIDDTVARLRSVDADLQAALTVAPLAPRVARLRCFRGIDDLTALTIAVELGDATRFPAARQVMGFTGLVPSEYSSGATQKRGGITKTGNTHLRRVLVEAAWHYRHRPAVSHRLRIRQQGAPPAAIRVAWSAQHRLHARYRRLLARGKSPQLAVTAVARELSAFVWAALAP

SEQ ID NO: 454699 - protein, 461 aa, unidentified
MTETRKKKMELDIINPNAAGIDVGSRSHYVAVGQSLEDVKEFGVYAEDLTALCLWLLSYGITSVAMESTGDYWQNLYAELMKHGIEVVLCNGKFTKHAKGKKTDVKDCQYIQKLHALGLLTSSFLPDETTEKLRTYCRQRNNLIASASGASRKMQKYLKFLNFRLDVVVKDVCGLTGLAIIEDICKGNLDPELLSEHRHYNCRKSKEEIAKALHGNNREDFLFGLKQEYQSYQFFQKQIEACDKEIDKFIKEELRKSPEKKKLKTTDKPYKRQNKNAVSIKNFNQIAFQYFGGVDLMAIEGLSHASVLAIMSEIGPDGFKKFGTSKQFVSWARLAPNNKISGGKVLSSRIPKGSNRLKIALRQAANAIGNLKDTHLSDFFKRVAFRKGRQAAVSATARKLGVIIWTMVTKQVSYSPPKEYLFLDQKRKMGIAKKIKKQMAKFDIKPDEIGLGNSLIPNYNF

SEQ ID NO: 454700 - protein, 382 aa, unidentified
MQQTASGSKYSGGGGKLYLALELGWERWKVAFSTGPGRRVWQVSIAARDRSRFEAVLFQARTRLGLSAGCEVVSCYEAGRDAFWVDRWLRSLGIANLVVDSSSIEVNRRTRRIKTDRIDAAKLLSMLMRYEAGERKVWSVVKVPSAAQEDARHMHRELRTLKKEQTRLVNRIRGLLASQGVDGRMGRRGLLVALEKIRIWDGSPLPAGLRQRLERELERHAFVHQQVLACDMRVREMVGQCEEAPVSQVRRLSRLRSIGRIGAMTLVREFGWRDFRNRRQVGALAGLSPTPFQSGKSFREGGMSRAGNRHVRGIMVDLAWSWLRWQPGSELACWYRRRFGTGSSRVRRIGIVALARKLLIALWRYWAEGHMPQGAVLKSYVG

SEQ ID NO: 454701 - protein, 423 aa, unidentified
MAAVMIGVDPHKASHTAVVISVAEEPLGELRVRACAGQAERLLAWAAAWPQRTWAVEGAGGLGHLLAQQLLAAGERVLDVPPKLAARVRLLATGNINKNDPDDARSVAVAALRSAGVREACGDDHAAVLKVWSKRYRDLGRARTQMACRLHQVLCELIPGGVAGEITAGQAERILASITPAEAVQAARWELAAEFTEDLRGIDARIRQTRKTLAAAVAAAGTSLTGLFGAGPVIAAAVTGDVRHVSRFPDRDHFAACNGTAPIEVSSGGRKIWRLSRRGNRRLNHAIHMAAVTQIRHRHSQGHACYQKKLAEGKTGKEALRALKRQISDAIYACLQADAQRAAARMKGPGGQPGNGSGSSAAGSHPGHRLFGQATPGPATHPTTPAADPAAGSLPVSLPSRTSGRPGPGPGKARPPSGASRRP

SEQ ID NO: 454702 - protein, 313 aa, unidentified
MGGVNAAIEVGKQQLVVQLGSQGEQFSEANEPRAIKRIAKRLGQAGCERVLIEGGSYQSVLIAGLRAAELPVLIVNPRRVREFAKSIGQLAKTDTIDARLLALYGEQTQPPLRELPDEQSQALRALWVRREQLIEMLGMEENRLEHVAEKAKTVRHNLRSHIDYLRKQIKQADDDLDREVRNSSLWDKYEVLSSVPGVGLVLSVALLSDLPELGRLNRGEIAALAGVAPFNCDSGILRGKRKIDGGRSRLRRVLYIATVAAVRCNPVLKPFYLRLRAGGKPAKVALVAASRKLLTILNAMLKTKTAWKPPCPA

SEQ ID NO: 454703 - protein, 311 aa, unidentified
MQDIIGIDVSKGQLDAFRTSDRCHKPFPNDAQGHRGLVQWIGNGGNVRVIFEPTGAYHRHLEAALASNSISFVKVNPRQARRFAEATGTQAKTDRVDAMLLARMGAALDLAPCTTRSKNLHELRELHVARMGLIKDRTAARNRASIATHAILKRQAGARLALIEKQLAEIDAFMTAMIAQDPGLAQRLEILISIPGVGCATAFALLIDMPELGTLDNKQAASLAGLAPVSRQSGTWQGKERIRGGRATLRCAMFMPALVAARHNTDLKRKYEQLIANGKPPKLAITAIMRKLVVLANALLAKGRKWTEMPT

SEQ ID NO: 454704 - protein, 409 aa, unidentified
MTSETRRWFAGVDWGSETHHVCLVDAAGAVVGERAFAHGGAGLAALCDWLVSLAGHSSSVAVAIEVPHGPVVDMLLDRGFAVHAINPKQLDRLRDRFSVAGAKDDRRDARVAAAGLRTDRHLFRHVAVSDPGVIELREWWRLAEELQQERLRLANRIRQQLWRYYPQLLALTDDLTAEWILELWSLAPTPAKATGLREATIAKLLSQHRIRRLGAAGVLEVLRRPAIAVAAGVTEAAVLHTHSLVVRLRLANAEFRRAERKLDELCAGLSQDAAVKPGDADILRSLPGIGTVVLATLLAEAGDPLARRDYAALRTLSGVAPVTKRSGKTCIVVMRYAAQNRLRQAVFHWARVAILHDPKSRSRYEALRARGHSYGRALRGVADRLLGVACVLLQRHVLFDPDHGKPAAA

SEQ ID NO: 454705 - protein, 358 aa, unidentified
MKEYISFDSHKHYTLVEQENRETGRTRQCRVDHGPGAIRSFLKKFCEPGTPVAVEATGNWYWIIDEIEQAGLCPLLVHPRKAKLMMGMINKTDKLDVHGLNRLQRNEVLPTVWIPPSDLRDLRELTRTRMVLSRQRTRLKNRITSTLTKYNLQLRDVSDTYGRRARPTLLQSIEQLPPQTRAVTELLLAQMDSTNGQVNQLEKWIRELVRETPAMTRLKTLPGIGDILAATITLEIGDIGRFASAERLASYSGTTPRVHSSGGKTRYGRLRPDVNRYLKWAFIEAGNSTALNHKRCPDRHVSVLYQRIKKRRNHAKAVGAVARHLAEASFHVLSKKEAYRDPSLPKRSSQGSVSASLS

SEQ ID NO: 454706 - protein, 410 aa, unidentified
MEVMFDRVAGLDVGKETVTVCLRTPGPRGGRRSETRTFKTMTGSLRVMRDWLVEAGVSIAAMESTSTYWKPPFYCLEEQMTVWLLNAAHMKAVPGRKSDVRDAEWIAQLLEHGLLRPSFVPPPEIRRLRMLTRYRVQLMGDRAREIVRLELMLEDASIKLSSVASSLKTVSARAILTAMINGESDPLRLADMAKGRMRRKIPDLAQALTGHFDANHARLARSMLRRLDLVEQALAELDAVIMDACQPWAHQIELLQTIPGVGPKVAETIVAETGADMTRFPTAAHLAAWAGVAPAMHESAGRQTPAGKRHGNKWLTAMLVEAAGSVGRMHGKNYLAVQHARLTKRRGMGRAQVAVAHSILVAAYWMLKRDEPYHDLGADWHSRRNDEAHTRRLIGQLEHLGHTVIIDPAA

SEQ ID NO: 454707 - protein, 376 aa, unidentified
MSEITRLMLLIVRVGVDLAKNLIQVHAVDASGRRVVARAFKRDQFFGWCEQLPKGCVVAMESCSSAHHWARRLRALGLDARLIAAHFVTPYRMEGKSGKNDATDAAAICEAASRPSMRFVPVKTPEQQGIMSLHRIREGFKEERTACINRIRGVLAEFGLVFGQSPKVLRAHLADVLEDASNELSYTARLVLQEAFEHWRNLDDKLLWCDRQIGQHVRGSAQAKRAARITGIGEVTASAVTAGVGDFRQFKGGAQFGAWLGLVPSQNSSGGKVSLGRITKRGDDYLRTLLIQGAKSAVMSAHKRQDPTSRWLVQLKDRIGWQKACVAMANKNARILWAVMTRDAAFDPKHVSVKPQCKVPPGQRAATSPPSAACTA

SEQ ID NO: 454708 - protein, 339 aa, unidentified
MNRIVVGVDIAKRVFQLHWVEPETGEIVALQLKREKFLEHFANRSSCLIGMEACGGSQHWARSLQKLGHEVKLLSGRMVKPFVGGNKNDAADARGIWTAMQQPGIKAVAVKSEEQQAVLALHRMREQLVKFRTAQINGLRGLLTEYGEVMPQGRAGIKRDIPGALGRLSDRLPAMVIETLREQYARLSELDEQISQIERRLHQWQREDSATMRIAAIPGVGLLSATAAVATMGDARAFKSGREFAAWLGLVPRQTGTGGRVRLLGISKRGDKYLRTLLIHGARSVLTHSKSPPEWLSELVKRRPKNVAVVAMANKMARTIWALTAHERAYQSGYVSQPA

SEQ ID NO: 454709 - protein, 435 aa, unidentified
MSFTSPASIDPVWAAFAAIDWASQKHSWSLLPAEGGSIESGQLDNTPEAVELWAAELRRRFPQAPIAVALEQKRGSVVYMLSKYQHLVLYPVPPSMSAAYRRAFCPSGAKTDPGDANLLLDLLVHHRQQLSPIATDTAETRLLRFLVEQRRQLVQQKVGLIQQLTDSLQQYFPQIRTWFGSLDTVLVTALLHRWPTLSDLQHAHPGTLRRFFVDHACRNDDLIQQRIQAIYAALSATTDPVVIEAGTRKTAAIGSLLAAAREQIHALDKRIAAVVADHSDAELFASFPGAGAATVPRLIAAFGTDRNAWTSAAALQCFSGIAPVHKSSGNSTVVVMRHACPKFLRQTFHEFAGQSIRFSEWAKAYYRHRREDQKVSHHTAVRSLAFRWIRILYRCWKDRQLYDERLFLEAQRRRNTLRTGWNTAAGFHKPATPNS

SEQ ID NO: 454710 - protein, 345 aa, unidentified
MPIVGGLDIHRKQITFDYLDTGTGQVCRGQISPADRVHLRAWLARFAGREDVAFALEACTGWRYIAEELTAAGIAAHLAEPADTAFARGRKRHAKTDRTDSRHLRMLLAEGRLPECWIPPGHILEARALLELYHDLRAEHTAWVQRIHAVLFHHGAPALGGGTLRTEKGVAALRAAAAGGLSPAGQLQVATALEVLEALETRMHAVRHQLLAAARQLTGAKVLAARLYGVGPVTALAITCWLAGEGRFSSSRKAVRFAGLDVTVWSSDRKGPPGRLSRQGPPVLRWAVYEAGKTHARSSAPDHGYYATVKDREGGKRAALSEARKILRQACHILTELGDDALSAA

SEQ ID NO: 454711 - protein, 338 aa, unidentified
MYYTGIDLHKKTSFITTIDKDGKIVTRANLQNVEEDILAYFSKLGDETKIVIESMASWYWLYDLLTGEGFEVVISNPAKTKAIASAKIKNDKLDSHMLAQLLRADLIATVHVSSLETRKLKELLRHRSKLVRDATRMKNRIHMLLMKNNFRSPFSDLFGVKGLRYLEEIDLPDYHRQHVETYLLLYQKLREQIEPLTKRVRALAKENHTAQLLMTIPGIGPITAMFIIAEVDDISRFRSYRNLASYAGLVPSLDASAGKEKRGRITKQGSRYLRTALVEAAQAAARMQNCRVSIFFRRRIVKGGYQKAIVATAHKILQYAFYVWKNQTPYRETYPVCA

SEQ ID NO: 454712 - protein, 438 aa, unidentified
MSNKVIFNLDELFISVGIDVGADFSWMSIALPNQQFVGKPYKILHNSIDSLTTAVSKIKEAEELYSLESRIFLESTGIYHYPLFCYLRDKGFNCSVINPIITKNSTNINIRKVHNDRFDSKKAALVGLKPNLKVSLMPSDLALNCRNLSREYYDLMDNRSAYVNKLQGELRMAFPQYLGIFSKVTINTSLTLLETYTSPSAFLEADKQEIIDIIKSTARFGLTYAQNKYNAIIQAATDANQFGYIIDSNIKRIRLYISFIRKYDEEINSILESLHELVDANEDTDFVKQIHLIETFKGAGFLSAVSIMGEIGDFSAFSKPKQLFAYFGLDPAVKQSGKFEGTKVQMSKRGSAIARRVIHTLTLQSISISRNGEAKNPVLREYYIKKCDSKPKLVAMGAVSHKVCNMIFAILRDNKPFKIIAPHEHIKQYNAAKCDIAA

SEQ ID NO: 454713 - protein, 319 aa, unidentified
MEKEKVYVGIDVAKDSFEVAVYSSQQRWDFANDETGISQAVERLRELAPALVVLEATGGFELQLVTALAVAKMPVAVVNPRQVRDFARSVGKLAKTDVLDAQVLAHFAASVNPQPRPLPDTETMELGALVARRRQINGMLTAEKNRLVTARAAVKINIQEHIDWLENDLANIDQDLRRKIQESPIWREKENLLRSVPGVGPILSITLVTELPELGKLNRRQIAALVGVAPFNRDSGTFRGRRTVWGGRAPVRAVLFMSALVATRFNPVIKEFYQRLCAAGKAKKVALTACMRKLLTILNSMIKHRTSWSFIAPKVAISC

SEQ ID NO: 454714 - protein, 361 aa, unidentified
MHATTVAVDLAKSVFQIAVSDDKWKLVEQHRLTRTQFERWFANREVGLVIMEACGSAHHWARWLNRQGVEVKLLPAAYIRAYVKRNKTDAADACALLEAARCADIVPVRIKTVEQQALQGLHRIRSLWMSTRTSRINALRGFCREFGLAVPTGARTGVEVMSRTLADPNSPVPILIRGSMKLLIEEIRLLELRIAQLEKELTALAKQSPACTTLLSIPGVGLLTATAMVAATSGDVSHFKDARHFASWFGLTPKESSSGNRRTLGRISKRGDRYLRMLLTHGARSVLRTASLARQGGRGLDGLKNWALGVQGRTNHNKAACALANKLARICYAVLRDGADYGKPAPRLSRKIERASFAIAA

SEQ ID NO: 454715 - protein, 324 aa, unidentified
MLPTLGIDISKDSFHVELSINNKLRHRRFANRKEGFAELKAWLGKHKTTSVHACLEATGPYSEGLALYLHEQGHTVSVVNPAQIKAFGQSELLRNKDDRPDAGLIRRFCEKQQPAAWRPAPPHLRALQALTRHLENLLETRQQQLNRLEVANTKEVAKSLRKLVTHLDAEIQRTERQINDHVDRHPDLKQQCQLLESIPGIAKRTATRLLAEIEDISQYKSARQVAAYAGLTPRNNRSGTMRGPTRLSKTGNARVRKALFLPAMVAKQHNPVVRSFCQRLAQHGKTKMQLVGAAMRKLIHIAFGVLKSGKVFDPEHELLFNSVS

SEQ ID NO: 454716 - protein, 345 aa, unidentified
MKKFKLVCGIDISKSSLSTASIAGDEIVAQKSYPNTAAGLEQLYQDLLKLEREASQILICLENTGVYMEKLLLAFKESGFFLWVVNPLMIKYARVSFDRLKTDQVDARKIAQFGYMMQSKAQQYRPLRAQEAQMKDLFLLRSQLVKLRTQVKNFAATNLDKAIPCLMSNSIWKQVSEQLTAMIKEVERQLQQIALSDKAMKRTYKILLSIPGIGPVCAWQLIYTTQHFERFPSHKQFAAYSGTAPFEVQSGSSIKRKARISKKAAVNIKTNLSLAALRQIRKNMVFHQYYKYMKEYEHKHHLWIINSIRNMLIKLAFDLVKKDKLFDLEIFLKNKKSWAKFLTLS

SEQ ID NO: 454717 - protein, 343 aa, unidentified
MEIRSVGIDLGKTTFHLVALGDNGKVLLKKKFTQRQLIAFTANLQTCLIGMEACSGAHFLGRTLREQGHDVKLIPAQFVKPFVKSNKNDFIDAEAIAEAVDRKNMRFVPIKTDDQLDLQALHRVRDRLIARRTSVINQLRAFLLERGLVFAKSPARLRERMPEILENADEDLTPRMRNLLALLWNEWKDLEQQLVDLNQEVERIASSDAACTRLRQIPGIGPLVATAIVAAIGNGAAFRKGREFAAWMGLVPKQYSTGGKAKLAGISKRGNRYLRKILIHGARAVVLRSKRDRIAMGEWMTALEARAPRNVLIVAMANKLARIAWAVLSSGQDYRAVQEPVAA

SEQ ID NO: 454718 - protein, 350 aa, unidentified
MTMVGGFDVHRQQITFDYVDSDGLVRSGQIRPATRRTLRAWLAGHCPDGDADFALEGCTGWRYVTEELAAAGVWVHLGDPAEVAALRGPKKRAKTDHADARLLRTLLLEGRFPESWIPPVHVLEIRTLGRLYCTLMDERRAWQQRIHAQLFQQGCPPVKALLSVAGREALAQAQLSPVGRQYVDTALGRIDQLSAEIDPLRTQLVRFAMAQPGCQVLRGQYGVGWLCAVIMWAEIGDARRFSSSDQLVRYAGLDVTVYSSDAKRSPGRLSRQGAPELRWAAFEAAKCASRRGSPDNAYYHKLAVKRDGHNGKNPTLAVERKILRRCYHMLRELGDAALAPPTLDDTEVAA

SEQ ID NO: 454719 - protein, 468 aa, unidentified
MARNRKGKMSKKSIHALKVIKPDAGGIDLGSREHWVAAPPFEDDTPNVQRFGTTTPELVRLADWLKEQKVTTVAMESTGVYWIPLFEILASRGFEVNLVNARQISHVPGRKTDMLDCQWLQLLHACGLLRGSFRPSDDICRLRALMRERNTMVDQGSDWVRRMQKSLDQMNICVHHAVSDITGATGMAIIRAIVKGERDPRTLAKMRDRRCKKSEQQIADELTGNWRSDHLFNLRQALKMYDQLCQTVAEYDAEILAYIKTLQPCVDDAQCALPPLSPSKSREIAKNGQAPMRQALYQLTGFDLTTIDGIGVDVASKVISELGPDFSAFPDEGHFVAYLRLAPNLSISAGKKVPGKLKGTTTSRVGTALRMAALSLRNSKSALGAFYRRISRRKGASVAVFATARKLAQLIYRLVCYGQAYIDIGAKAYENQFNSRRLTYFTKALKDMGYKVEPLAAEGAYSNECSFI

SEQ ID NO: 454720 - protein, 319 aa, unidentified
MITLGIDVSKAKIDCCIFPSALTGKRKTKRFDNAQSGFVKLVKWLTELDVNLSDTRAVMEATSVYHENLAHFLYDMELTICIANPARVRAFAKGLSMLNKTDKADSEALVYYANTVKLATWQPEKENVRILKALINRYAVLEEDLQREKNRLEKAQSTQTFPQVLLSINIRIQQLEQEIIRLDETISSHVNGDSELKNDLALLTTIPAVGRKTGLLMLGLLRSHHFEKASQVAAYVGLVPIHFQSGSSVNKRSRLSKAGDSKIRSSLFMPSIVTLQYNPHIKALYQRLREKGKRAFKILCQPNWLEFNYIIEPAFKVNR

SEQ ID NO: 454721 - protein, 347 aa, unidentified
MSIRMIGLDTAKTVFQIHGVDEAGKAEIRRKLRRNDLIAFFEKQATCTVVMEACGAAHHWTRMLTGLGHSVKLIAPEAVKPFVKKGKKNDAADAAAICEAASRPDVKFVPAKSVEQQGILALHAARSLLVKQQTMLANAMRGLATEFGLTVPKGIHKLDELMAVVDADEIIPKPAKQAIAGLHDCCNNLSDGVETFETEIVAHARRDETARRLATIPGIGPITASLIAATVGDISLFKTARQFAAWLGLVPRQSSTGGKTRLGRITKTGNREIRKLLVLGATSMVYRADGWNSAVGAWLRSVLERRPVRLVTVALANKMARIAWAVMTRKEVYRPKGGVAAVAQAAA

SEQ ID NO: 454722 - protein, 342 aa, unidentified
MKGYHYVGLDVHKKTIAYCVKEADGAVLDRGTINATRSDLYAFADRLPRPWAGAMEATLFTGWIYDALLPRADALKVGHSYMLRAICASKKKNDRLDAEKLADALRCDWFPEAYMPSEDIRQLRMALRYRNLLVREEVRMKNKTAGLLMEMGAEYNKQKLHGMKYFRQLLDSLDHIPDSVKELTQSSHESAKYFEARQKQLVAALAQRPALAERVERLMTIPGVGQITALTWALEVDDPHRFATVKKAVSYCGLCSAEIESAGKRHRSPLSKQRNKHLQTVLIEAAKLSKRWSPAMARIHQKALDRGAHKNEATIAVARKLVAYLLCVDKSGKDFIEKEIQN

SEQ ID NO: 454723 - protein, 244 aa, unidentified
MDTETGELRERRLAPREGAEQFYGKLREQGISVRVGMEARGHSRWFELLLGELQFELWIGGAAEVRTKRVRRQKTDRQDALLLLRLLIEDRFPRIWVPDAENRDLRQLLWHRHRLVQMRTRVMNQLHVVALDEGLRRKKALWRPAGRQGLESFALAPWATRRRQDLLNLFDQLTPKILELTRAMEAEVEKRLLTRRLMTHPGVGPLTALAFELVIGTPERFHCGKQVASYVGPVPSEASSGDRR

SEQ ID NO: 454724 - protein, 360 aa, unidentified
MKTNVEMFSEKVNQLYVGLDVHKNQWSVCMRTEEFEHKTFTQPPNPEILYDYIQKNFSSYQVICAYEAGFCGYWISEQLKSYGFECLVLNAVDIPGSDKDIQRKTDRVDCRKIARELSKGEVQGIFQPDRAQQGFRNLFRQRNKLVKQLRVVKNNIRSLLFFNGTQIEKEYENGNWSLSFRKWLQAIPMDTNTNRLSLDSMLRRLDFLQQEYLVVVKQLLSYVQTNHKENYKLLNTIPGIGKIVSIALLCEIGDVNRFKRVDEFCSYMGLVPNIYQSGDKLRVRGLTKRCQSVLRSYIIEAAWTAVRKDPELIEYYKRHVGKKVTGKIIVKVARKLLVRIYYTLKFKRPYIINYNQINPK

SEQ ID NO: 454725 - protein, 471 aa, unidentified
MSCFRGAIQNRLRKEDFMKKQDSYDYYVGIDCAQNKHDFAMKNNQDKFLIKRGHFSNTLQGYEKFLNTVLSKCLNKDKILFGMEVTGIYGTNLYERLKSDGYHVVMISPDSVKNYRDYKRLNKTDKIDSGCIAELLLNGDAQIVHVAKNGYTDLKAYIRRRNALKVTCTQETNRFLAKVCLYFPDLLKVFPSGRATLKAIFSIYPTPYSIIEADFDELVSVLQKASKNKFGVDKANELIHAARNSIVVRKSISDGELYNIHSLIDSIDSLESEIRNLEKIIDSKAEEFSAYHVLLTLTGCGKITAATIVAEIGDISRFHKASQIVSLAGLYGDNSKSGSSVNKRGKISKKGSRYLRHAIYMVAEFARRNNPIFKAYFTRKKNGDRTKHTLAVNAVANKLCKVIYSLMKNQSTYIIQYRDLVKLSESTQNEFFQNAETDFSAKTRRKKYLYEDEYGELHEFVFKSIKTALIE

SEQ ID NO: 454726 - protein, 353 aa, unidentified
MERIYIGVDFHARQQTICYLKIETGELVFCELAHENKEQVRAFYAAFPSQVIVGLEASGYSPWFERMLEELGCEVWLGHATEIRRRARWRQKNDRRDAELILDLMLHEEFPRLHRPAVQSREVMRMLRYRQKLIKMRTMSKNGLQALALQSGLARRSRLFTREGKHELSIALMSPAMQWQRDHWWQLLQSLNEQLQETMGWLKTHAQGDVKVARLRTHPGIGLLTALCLVHTLQPVDRFRNTRKVAAYGGFDPLERSSAERKCFLGISKAGSRILRHLVVEAANVAVRSDEDLKRFYKRLAERRGRPKAKVAVARKLLIRAYIMLRDEIDYAEFRHRAVAARLAREITKASSA

SEQ ID NO: 454727 - protein, 414 aa, unidentified
MLFVGDDGAEDHHDVEVLDEAGRRLGRARLPEGVAGIDRFHALVGRFADPDDESGAGQVLVGIETDRGPWVAALVAAGYRVFAVNPAQAARFRERHAISGAKSDTGDAHVLADMVRTDAHQLREVAGDSALGEGVKLLARAHQSLIWERTRHLLRLRAGLVEYFPGVLAALAAGGLDLGDRDALELLATAPDPDTAAGLPAEQITDLLSRGARRGDLPARAEAITAALGAPQLTQPPVLAGAYAIVTRSLVAVLTSLAEQVTELESQVGAYFGQHPDAEIYRSQPGLGVILGARELGEFGDDPHRYTSAKARKNYAGSSPITRASGRKSVVLARHVRNRRLADALHAQAFSALRASPGARAYYDALRARGIGHHAALRQLSNRLVGILHGCLKTRTLYDEHTAWAHHQDQQKVA

SEQ ID NO: 454728 - protein, 340 aa, unidentified
MNLIAVGLDIAKSIFQVHGVAAHGRSPLRKQLRRSEVLRFFAKLPPCLVGIEACHSSHFWGRELSKLGHRVRLIPTQYVKPYLLGGKNDANDAAAICAAVMRPDMHAVAIKDAEQQSLQSLHRMRQRLVLERTAKSNQIRSMFAEEGVVFPVSITHLRRSVSNAIGDPRSAITPILRRLGTMYLEQLAALERWLAELNEQLHQIATERDDCKLLTSIPGIGPIVATALVGTVGDPRQFRNGRQFAAWAGLTPRQRSSGGKISLGGITKRGDVYLRTMLIQGARAVVRFVTRRTDRQAVWLQRLMQRRHKNVAIVALANKIARVAWAVLTRRTAYNLCQQP

SEQ ID NO: 454729 - protein, 355 aa, unidentified
MNGLKHQKEKRSMDYFGGLDVSVKDTSVCIVDDTGKIVREVKVASEPDALLAVLTNPSYRFNRIGLEAGPLSQWLFSALAEAGLPAICVETRHMRAALKAQINKTDRNDARGIAQMMRVGLYRPVHVKTLRSQKLRMLLTHRKLLQSKAIAIENDLRATLRNFGLKVGVVGTVKFETRIKELVENVPDLAMLVEPLLIVRRALREQIGILHRRLLAIVRDDDVCRRLMTVPGVGPVVALTYRATVDVPARFKNSKAVGAVFGLTPSKYQSGEIDRTGGISRCGDEMMRAMLYEAAHIMLVRSTKWSWLKAWAMQIARRRGLKKAIVALARRLAVIMHRIWVDGTEFRWTRETAVA

SEQ ID NO: 454730 - protein, 408 aa, unidentified
MNDSSKRYIGLDVHKHYLIVLGVDADLNVVLPARRVELRYLESWMKKSLTRADEVVLEMTTNTWQLYDELVEYAGSVMVVHPPHVALITRSQVMNDKIAASILARLLAKGLLVGIWIPPQEIREARSLVAQRQKMVRLATQAKNRLHAVIQRHHLIPPEGNPFGASNKEWWQELSLGKLEKLNLQSDLETLQFAEKQVKRMTEMMEGMVCEQEPIGRLLHLAGFGVVTAVTVWAAIGDIRRFAEPRYLVGYAGLGTRIHESGMTMRSGKITKAGRRDLRTVLIEAANVAANSHPHWKAELARLEPRLGRNKAVVAIARKLLIAVWYVLQGQTDKYAKPEAIAQKMLKFAYAVGKANRPKGQTAAQFARTRMDVLGLGSELTSIPWGSKKPIPLPPSALRERSDVPNLS

SEQ ID NO: 454731 - protein, 374 aa, unidentified
MGKVHRISHTVEGFNFLKSKIEELEKKTNEEVVAVYEATGVYTKPLERFLEKNEIKQYSISPLQSAKQRKTEIHNKKTDKKDPESIAEVYYIKELRENEKEADLYHELRTANRVYEDCLVHLRKYKVTFQSHLSIVFPGYMKLFQDGYSQISLQLLEMYPHPDRLKNKQPEKVAKKLNKHTDHSFEVCLKTAEKVIEFANKTYPGCDKEDAWVAVLVDDIHHLQDTMEEAEAKLDKIIELAKATPYYSIILSIDGIGPNLASRIIAEFGDISKFKTRGAMVAYVGNDPNRAESGDIEGYHLSISKKGNKRLRCILYLAVTCSIRSRKENPINAFYQKKRQQSTPLKSKAAKVACITKLIRTIHGMCKTGTVFTS

SEQ ID NO: 454732 - protein, 490 aa, unidentified
MAHLIPFGRVLQSRCSRARCHVSPYDIVEAARAQRKPKSSRSKPTLPPQLAAVNLHAAGIDIGAEAHWVAVPPSDDLQPVRCFGACTADLEALADWLATCGITTIALESTGVYWIPLFELLETRGFAVLLVDPQQVQKIKGRPKSDRHDCQWIQRLHTFGLLAGAFRPADQICVLRSYLRQRAMLLTSAAQHIQHMQKALTQMNLKLQHVVSDITGVTGLAILRAILAGERDPAKLAQLRDYRCKHDEATIARALQGTWRDEHLFALAQAVALYDVYHQKITECDQHIEASLQTFADRSDGQPLPPPARPRKRGGNQPAFAVREPLHRISGVDLTQIEGIDETTSLVILSEIGLDMSRWPTVKHFTSWLGLCPHHRVSGGKVLSRRTKPCANRAATALRLAAACLHHSQSALGAFFRRMKARLGTPKAITATAHKLARLVYSMLKHGTAYVRQGMEEYEQQYRDRMVQNMTRRAKALGYTLVKATEGTPV

SEQ ID NO: 454733 - protein, 353 aa, unidentified
MDKITHIGVDLAKNVMQVHAVDSAGRVVVRKAIARERFVSWFANLEPCLVAMEACGAAHYWARKLRALGHDVRLIPPQFVAPYRKGGVHVKNDALDAEATCEAASRPHMRFVPVKSPAQQSVLVLHRMRTGYVEERTALVNRLRGLLAEFGVFVPQGIGQLRKHFVDRIEDGNNELAGPARQALMRGWAQWQALDEEIAWFDRQIAEHANHDSQAQRCMDVCGVGRLTASAAVATVVDARQFKNGRQLAAWLGLVPRQKSSGGKQRLGRITKQGDDYLRTLLFQGARSAVVTAHRRHDRLSRWIVQLQARVGYYKTLVAVANKHARILWAVLAKGERFDPSYAPARTRMAAGA

SEQ ID NO: 454734 - protein, 403 aa, unidentified
MNSVGIDISKGRSTIAVMRPFGEVVISPFEVRHTDSELSELARQLKSLDGETRVVMEATGNYHTPVAKLLHDAGLYVSVVNAKLVHGYGNNDLRRVKTDKKDAVKLANYGLDRWLTLPRYIPEEDTRLLLKNCYRQYRQYSKVQTVLKNNLISLLDTVFPNVNRLFSSPIRGDGSEKWVDFVAEFWHCRCVSEKSERAFTSKYLRWCRKHGYNFREAKAHTIYAEASGHIGVMPKSETTKLLVEQAVAQLRATSTALAALKHEMQSLASQLPEYPVVMDMFGVGPTLGPQLIAEIGDVRRFYSKKALVAYAGLDAPPNDSGDVTGRHKSMSKIGASSLRRTLFLVMSVYLQTAPLDEPVYQFMDRKRAEGKPYRVYMMASANKFLRIYYATVKAYLESLEHTA

SEQ ID NO: 454735 - protein, 461 aa, unidentified
MARRNRAQPTPVRRRGLELTHPNAAGVDIGSASHYVAVPADRDDEPVREFASFTADLNRLADWLTACGVDTVAMESTGVYWIPLFELLDARGFTVLLVNARHVKNVSGRKSDVLDCQWLQQLHSYGLLHGAFRPDAQICELRSYLRQRAMLIRYGAQHIQHMQKALTQMNVQLHHVIRDITGKTGMAILRAIVAGERDSQQLARLRDGRCTNDEATIARGLDGHWRADHLFELRQALELYDVYQQKIAACERQIESLVRGWTVDRPDGPVPERARKRQQYYAAFSFDAHSLLYRLTGVDLTRIDGIDTATAFTVIAEIGLDMTRWPSAKHFSSWLGLCPGTKVSGGKLLNSRSRPSASRAAAARRLAGQTLLHSRSALGAFARRMRARLGAPKAITAAARKLATLVYSMLRYGTDYVDRGEQEYEARYRDRVVRSLVRRANALGFQLVPQPVGPHPAPGPV

SEQ ID NO: 454736 - protein, 417 aa, unidentified
MDEYGGRQYVGIDLHRRRSVIVRMTPDGQRLGSAVRIDNDPFELARQVGSWGESPQVVLEATYGWYWAADVLADAGAVVHLAHPLGIKGFAYRRVKNDERDAADLADLLRMGRLPEAWIAPPEIRGLREAVRHRCKLVALRSGLKAQVHAVLAKQGVRISVSDLFGVGGQKLLDELSLDAPFHARVVSLRRLIDAFTFEIDVLAKRTEAQLKTHPGYQSIQTIRGVGPVLAAVFVAEIGDVTRFARPEQLCSWAGLTPRHRESDTKVHRGRITKQGNHLVRWAAVEAVQTLRSGPIGRAWANTAARTSARPPQPANSSRWSSTGYATGTSVAWPDQRDHQPGAARTRGRWGYDPHQRWRGRVNLIDPAWLQPHHSMPPQRARRRDDRQPDHRLRHIVHSGHWRKRPHNRTAAFPAPR

SEQ ID NO: 454737 - protein, 365 aa, unidentified
MEPSVFVGIDSGKARHHVVGLDTAGASVLDQPVANDEAALVAIFQAARAIGAPVVCVDQPGSIGALTVAVAQAQGLPVVYLPGRRMRHVAETFAGQAKTDVRDARIIAETARSMPHAVRPLTAPSPVVAELRVVCGVDDDLVKQLVAGKNRIRGLLTSAMPALERVIGPRLTNAGVPELLEKYPTAAALRRLGRTRMTRFLARRGSRRAAQLAADVQAALAQQTMELDSSAGLARVLPLLVEQLQLLRRQRAAVQVEMTQLLAAHPDTAILMSLSGFHTRTVARTVVELDGKVFASAAQLASYAGVAPVTKQSGTSLKHQIRNRHGNKPLRQAWYMAAFASLRTDRRYLTARRAKGWATSRPSSR

SEQ ID NO: 454738 - protein, 391 aa, unidentified
MVCVGIDVAKDKHDCCILDSDGTVRADCFTIPNNMDGFKQLLQTIRDCTKKSDKIKVGLEATGHYSYNILGFLLDNGLPTYVINPLHTNLYRKSLSLRKTKTDRVDARTIATMLLSDVDLKSYTDIAYHNEELKSLTRYRFDKVQECAKLKQSVSRLATILFPELEQLVSSIHGTSIYALLGEYPGAKQISEVHLTKLTNLLTTASKGRYGKEKAIRIREAARTSIGSVMPAKSLELKHTIKLIQELASEINEIEDSIQKIIDELNPPILSIPGMGVNSAAVILAEIGDFSNFSSPDKILAYAGCSPSTYQSGKLTNCYAHMEKRGSRYLRHALYNATKYVCYWNPVFAEYLAKKRAEGKHYNVALSHAMKKLVRLIYALQKSGKAYLATA

SEQ ID NO: 454739 - protein, 490 aa, unidentified
MSESIFKSASNNLNNLRDVLDAYKPTQILYAPIDVAKYNHSAMIVNFLGDIIIPKFDFPYNLHGIDFLKTKLQMACKLTQAKKLFLALESTGHYHENLVASLAASGYDIAIIRPIDSKNERDNVHAKTDAIDLAAIARVVIAGKGTRSNMPDAIYYNLQRASRTHRQLTWQETRLKNIITMLVDKTFTGLWNPAERSHDNAIFSDKWGKASLLFVSHYPTPQQAIKIGVRRLADFFRKQNTKLGVDTASKIIALAKNTPARPLEVMESDIRALKSNIHILEALVPEILQQKKQMVKFLIQTPGTYLLSIPGISVVYASDFTAEAGDIHRFAYAKQVISLAGTAPRRYQSGEVDKANLPTSHKGKNLLRMTVNQIALSLNAHCPDFHQYYSEKLFGYQDAPPKARTATANRFIKLAFAMMKNETLYCPRTGNPLTSQREYYSSVFIFSSVGRRNDSKVKEKLSDYLGDDIPEDNYLTRIQRQLEEKYGTNL

SEQ ID NO: 454740 - protein, 338 aa, unidentified
MGQYVGLDVSLETTKVHVLDEQGKRVGTCVTHPTAIEATIRQHAPEAVRIGLETGPLTTWLWQALTEVGLPMACLDARQAQAALNMRINKTDDNDAEGLAHLVRSGWYREVRVKSREAMLTRSLLGARTQLLGIVTELSNQILLKTLVVPKGAGKIFEANVRRLLEGEPAVAAIILPLLESWRAVRVRAAELDRQLLAAAREDRACRRLMTAPGVGAVVAASFVAAIETPEAFRRSRDVGAWIGLTPRRYQSGEVDYDGHISRRGDARLRSLLYEAATSILTHVHADSTLRSWGLALKKRLGFKRAAVALARKLAVILHAMWKTGTNFDARASASAAP

SEQ ID NO: 454741 - protein, 351 aa, unidentified
MKKIVIGIDVAKEKLDASAIDVRNGQLGVVKLGYRQFENRPMGFRRMLVWARCLIKDVSLCEVLFCCETTGGYDRMLCDYMYANGADIWRESALQIKLKSGLRRGKDDKADSLIIAEYAMRHMDKAVIYQSPSSTIRELKALLLYRHKLTQEKTAKKVRMTQLKETAAKSKSMSFIIRDARKSINMLEKSIKECEKQIQEVFKSDESLQKNFTHLKSIKGVAIVNATAMIAYSNNFKNISTANKMATYYGVASFRKKSGTSIDKKDNVRQYSSSMLRAYLTQAAECTIEEHGIYHDYYMRKKAEGKPYGVILNNIKNKLIHLAFSLVENDMDYEENHEFIRLQKNKANENI

SEQ ID NO: 454742 - protein, 372 aa, unidentified
MKENTTSSARPRKARKTASNKAPARLTVGIDLGDQNSAFCILDAEGEVLSEGTLRTSEHGFSQQFQRMAPCRIALETGTHSPWVSRLLKKCGHDVVVASARHVRMIYESDRKNDKVDARTLARLARIDKDLLHPIQHRSEKAQADLALLRARDALVQVRTKLMNCARGMVKSVGGRLPGASGECFAKRAREHVPDAVRIALLPLLDQIEHVSQEIREYDKRIEKMAQTEYGQTQLMRQIPGVGVITSMAFTLTIDDPNRFRRSRDVAAYLGLLPRQCDSGDSKPQLSITKAGDPMVRRLLVGCAHYILGHWGPDSDLRRWGLTLMEHGGKNAKKRAVVAVARKLAVVMHKLWVTGEVYEPLREANGAEVTAA

SEQ ID NO: 454743 - protein, 335 aa, unidentified
MLYSGIDLHKRSLVIHTLDADGTTTREAQRKSDRGAVLAYFGSLVGPHRAVVECVQSWYWLRDLLAPAGVDLRLAHAKYVKAISYAKVKTDRVDARMLAQLLRVGLIPEAHMIGAEHRETRDLLRSRLQLVTRAVRCQHAVGSLLEKYNVATPAELPELARMQATLQDEQRTLLRTHIKRVEATLKQRLLPTADVQRLVWVPGIGKLGAYALVLEIDDVTRFPTVRHFHSYCRLVPGADNSAGKTRHKRSRDGNRYLKQVFHTAAIRAAQYHPEIRQEYRRLARRKGKIIARALIAKELASIVYFVLRKQEAFNGRFRGHVLTPKPAVWPRLASP

SEQ ID NO: 454744 - protein, 343 aa, unidentified
MVHYIGLDVSLKRTSICVVNQVGSVVREGVVESEPEAIAAFVRSKAPGAVRIGLETGPTATWLWTELKQLGLPMICIDARHARAVLKMQINKSDRNDAAGIARIMQTGWFKEVRVKDLESHSVRALLASRALLVKIKRDLENQIRGLLKNVGLVIGRAKFNVFTVRAEELIEDRPELMAVVRPLLKARQAIEQQTDDLDRKVLKLARVDAQVRSFMTVPGVGPITALCFKATIDDPTRFKRSRSVGAYVGLTTRRHASGEVDWTGRISKCGDAMLRSYLFEAAGVLLTRVPKWSALKAWGMRLAKRNGLRKATVAVARKLAVILHRMWIDGTEFNWSKKEVAA

SEQ ID NO: 454745 - protein, 375 aa, unidentified
MKETVRFLGLDVHAETIAVAIAEPDGEVRSLGTIANRAESIRKLVKKLGPPAHLKACYEAGPTGFVLYWHLAKLGVACEVIAPTLAPMKAGDRVKTDRRDAERLARSYRSGDLTAVWVPNEGSEALRDLVRAREAAKQDQLRARHRLSKFLLRSGQRPAQGVKAWTQSYMAWVRQLRFPQIAQEFTRLDYLHEVEHMGERVKRLEQAIVEAVKLASPELQEVIKGLQALRGVAQISAVTIAAELGNITRFQGARQLMGYSGAVPSEDSSGQRTRRGSITKTGNAHLRRIAIEAAWSYRLRPGIGPALRKRQEGVPEEIKEIAWKAQHRLHKRYLKLSAAGKDQRKIVTAVGRELLGFIWAIGVKAEAAVRQPIAA

SEQ ID NO: 454746 - protein, 433 aa, unidentified
MRVMHERVAGIDVHKDMIKVAIRSPGEKRWTRKTEIFEFRTFYGVLQAMARDLRARGVTHVVMEASGVYTEPVYYALCEQDFDEVAVVNPAHVKALRGHKTDAADCRRLAELFECGLLHGSYIPPAHLKEVRDLTRYRMKTVQARTSEIQRLGKALESAGIKLGSVASEITGASATAMIDALIDGERRGPVLADLAIGRMRTAGKIADLSMALAGRFTDHHALLCRLHRDRITLFDDAVAGLDGQIAQKAGRWQQELDLLKTIPGFGDVIAQAWLGEIGPAPHRHFASHEKLACWVSLCPGNNISARKRKHGRTGDAGAYIKPMLIQAAWNAIRTKGRLQARYSRLVRRFGGEKNPAAKKKAITAIAHTLLKIAYQVLKSGQPYQDLGADFYTRRESPAQQHAYLERRLQKLYPGQTIIITISPPPGGPAEAA

SEQ ID NO: 454747 - protein, 341 aa, unidentified
MQKFIRIGVDLAKNYFQVHALPAEGSPAVKRKLKRSKMHEFFSRIEPCRIGMEACGSAHYWSRQLVAMGHEVILMPPFYTKPYVKRGKNDAVDAEAICEAMSRPGMRFVPIKSAEQQATLALHKARELLIKQQTMSVNALRGHLAEFGIVVAKGIGRVDELLDLAETDTMLPEAVKAAVKVLAEILEGIEKAIDDLEKKIAEAHAQSEASRLLDGIPGVGKLIASMIAATVPDPGVFRSGRDFAAWLGLTPRQNSSGGKPTLGGITKQGNRHIRKLLVLSATSLLHRAGKYKGALAEWIVALRAKKPARLVTVAVANKLARIIWAMMKSGEYFRADLYAKP

SEQ ID NO: 454748 - protein, 429 aa, unidentified
MSYRIAGIDVHKKMLAVVVSDVEIEGEFQFERRMFGSNPDQLRALVEWLQQQKAEEVVMESTAQYWRPVWETLERYWKPTRQKREGARSTSGTLHLAHAQSNRGRRGRKKDFLDAERLVKRLVARELNLSFVPDAEQRLWRTVTRRKCQLRQNRVRLQNRVESLLEEAHIKLSSFVSDLLGLSAQRMLRALADGETNPAALAALADRKLHATPEQLCDALGACTELNVVYRRLLNMMLGELRLIDEQIGQLNQEMANLLSEHQDAVQRLAEVPGLGVDSAQQIIAEVGATAATFPSAKQLSSWVGACPGEEESAGVNYSHRSPKGNRNMRRILNQAANAAVKSKGTIFEIVYRRMVLRLGHKQTIGVVAHRQCVLIWKVLHDGVRYEERGPAVNKESKQRRTARMIRQLRSLGYRIDPPNPQPGQAPAQ

SEQ ID NO: 454749 - protein, 343 aa, unidentified
MQTVTTIGLDIAKSVFQVHGVDAEGKVVIRRQLKRRYVLAFFQKLPPCLIGIEACASSHHWSRELQALGHTVRLMPPAYVKPYVKRQKNDATDAEAICEAVTRANMRFVSTKTPEQQSGLVLHRARHLFIRQQTAVINAIRAHLAEFGIIAPVGRRGVEELLNVVADPNDKRVPEIARACLLAFGAQLRRLKEQILEFDRMIRAWHRSSETSRRLDDCPGVGPALATALVATVADPKSFRSGRNFSAWIGLVPKQHSSGGKNRLGSISKQGDRYLRGLFVAGALAVIRYAKIHGTQHRPWLTALLARRPTKVAAIALANKIARMAWAMMAKGERYKEPVALAA

SEQ ID NO: 454750 - protein, 345 aa, unidentified
MDHFAGLDVSVKETSVCIVDETGKIIREVKVASEPDALLPVLTKSAYHFKRIGLEAGPLSQWLFSALVEAGLPAICVETRHMRAALKAQINKTDRNDARGIAQMMRAGLYRPVHVKTLRSQKLRMLLTHRKLLQSKAIAIENDLRATLRNFGLKVGVVGTVKFEARIKQLVENVPDLVVLVEPLLVVRHALREQIGILHRRLLTIVRDDDVCRRLMTVPGVGPVVALTYRATVDVPARFRNSKAVGAVLGLTPSKYQSGEINRTGAISKCGDEMMRAMLYEAAHIMLVRSTKWSWLKAWAMQIARRRGLKKAVVALARRLAVIMHRIWTDGTEFRWTRGQTTAAT

SEQ ID NO: 454751 - protein, 394 aa, unidentified
MNSIGIDIGKRVHVAAVCRAGQLEAERRVLRFGADRAGFRDLASWLARQGEVSQVVMESSGHYWMPLAGELHRAGVPVAIVNPLEAKYFAKSRLQRTKSDPADARTLAALGMRDRPQTRVPLAGAELREAARFAMTLVTEQAKVSQRIVRLVDLGFPELAQAYDDPTCTSALAVLRAAPTAAQAARKRVATIADANRGPGQRAVGPAKAERIQALAKETVAPPELEAQVGFEMRLLIAQHDFLEQQITLAEARVASLLGGELARRLRTIPGVGPAICATLIAEIGDIHRFDDFDKLVAYVGVHPAEKSSGRKGADPETSWHMAKTGNAYLRAALYRMAVVGIQHNPVIKAHYARKRAQGKTKMNAIGHCMKKALAIVWGVWHGEHDFVPEVAKA

SEQ ID NO: 454752 - protein, 346 aa, unidentified
MEHHVGIDVSLELSSLCVLDATGKVIREAKVASEPEALVAFLRDLGVTIVRVGLEAGPLSQWLYDGLHRAGFDAVLLETRHVKAALSAMAIKTDRRDARGIAQLLRMGWYRPVHRKSVSSQEVRALLAARKQMQIKAMDLEQTLRGLLRGFGLKVGDVSRGKLAARIRELVSGHAMLERISEPMLTAREALWSEFTKLHREVLAIVKEDQVCRRLMTVPGVGAVVSLTYRAGVDDPARFAKSKLVGAFFGLTPKRYQSGDTDVTGAITRVGDASVRTALHDAANALLSRATKFSTLKRWAMDVAKRRGMRRAKVALARKLATVLHRIWVDGTQFVWGKDPAAMAAT

SEQ ID NO: 454753 - protein, 340 aa, unidentified
MEMTIVMGRDQHRAQIIAEWIDTETGEVMRSRISPAHRAGVRRFCERFREQELEVALEATTGWRFVADEFQRVGASVHLAEPAETAAMRGNKRRAKTDRADARDIRELLTGGRLPESWIPPGHILDLRARVRLRHTLSHQRGEWQQRIQAVLYHHGCPQRGNLITSEGRSWLAAQPLSAGAREQVTIALSVIDALDAQIVPLEKELRSFARRQAGCKALMGQFGVGELTAVTILAELGDARRFSSSRDAVRFAGLDITVHQSDQRRAAGHLSRQGPPALRWALFEASMCAARPCSPDYEYYSQAAERLGSNRARLSVARKILKRSFHLLRELGEEALAPA

SEQ ID NO: 454754 - protein, 411 aa, unidentified
MDVTYERCCGIDVHKRSIVACLRCGKKQEIRTFGTTSKEIRALAKWLWDEKCQMAAMESTGSYWKPVYNLFETSHLGVMIVNARNMKNVPGRKTDVKDAEWIADLLQHGLLSASYIPKREQRELRELSRYRKSLIAERARELNRLQKMLEGGNIKLSSVVSNINGKSSRSLLQKLLKKDAPLQKDEVEESLHGALRHKVEDVMQALDGFLTPLQKQLILQVVDHIDEMTKRIGQMDKLVKQYSSGYEDAIEKLDEIPGIGRQSAETILAETGLDMSRFATEKHLSSWAGLSPGNNESAGKRQSGRTTKGNATLKTTLIQCAKAAVKKKDSFLSAQYDRLVVRRGAKRATVAVAHTMLIAIYHILKLGEPFIDLGADYYNKFNKERKINSYLTKLKKLGWQPETATFSAAST

SEQ ID NO: 454755 - protein, 397 aa, unidentified
MYIVGIDIAKRKHEAAVIDGEGAVIIKPFSFTNNCSGYNRLLAMLTKAKLPLDEVSFAMEATGHYWLALFTRLQKEGFRVQVINPVQTNSIRSFYIRQAKTDPRDALLIAEVIRFGHFSESTLHPENIYELRELCRGRHAIVSMQADVKRKVVALLDQVFPEYETAFTNLFSDTSMAILQTCPTPKELSEMPLEELCHLIEVSSHKRFRMAKARELQELARGSFGFAMAGDVFSTMIRLYAKHLDFLKQQVREMDRKIAEIMETLDTPITTITGIGPTLGAYILSEIGDINRFSSAAKLAAYAGIDPTMRQSGEYNGVRNRMSKRGSPYLRHAIWLAASSAVLHDPALKLYFQKKRDEGKPYMASVGHACRKMVSIIYAVMRDNKAYTPCIPNEISA

SEQ ID NO: 454756 - protein, 337 aa, unidentified
MYPLYVGIDIAAEKAAVAWQVADSGECGALDIEQRRSDYARLAQQLRQRAAPAETLVVMEATGIYWLALADALHEQGFVVSVINPLQARRFAQLHLQRAKTDAIDAHLLALYARQMQPVAWTPPPAIYYHLQQRLSYRQDLVEMRTQERNRLHALTHNPHAEQAVVRRLRRHLSYLDRESKALEAELQALLAQDHPWADAARRLSTIKGCGLITIAWLLVATQCFAFCDTPEQAAAFAGLVPYPRLSGSSLHARRTVGRGGHARLRATLYMAALSAARYNPAVKALYDRLLARHKPNKVARVAAARKLIHIAWAVVVKERDFDPQYALSHQTRPIPT

SEQ ID NO: 454757 - protein, 312 aa, unidentified
MIEQCFGGIDVSQDRLDVLLLPQGTGFSVANNEAGWSTLIGRLRGLLLTAIGLEPSGGYERGVLRALLAAGLSVRRINPNRLRQFARARGALAKNDRIDARLIAEYVATMPTHVVRHDPAAARIAEIVTMRRQLCDEHVAIENQAAQLEDAMLRRLAKRRLARIETDIRLLEKRLTETIAAEADLARRYARLTSMPGVGPVLAFTLIALLPELGRMSRKQIAALVGLAPYDFDSGKLRGHRSIYGGRMPVRNVLYMAALSACRYNPALRTFHKRLAAAGKKPKVILVAVMRKMITTLNAMLRDGASWQPQAA

SEQ ID NO: 454758 - protein, 330 aa, unidentified
MTREYIGIDLHKAFFQACAVAGGGERLWEGRFARSADGIAAFRQRGIGEVHAIAVEASGPTWTFVDALAPSGARICVVDPRKTQLKAGVAAKTDRLDARRLADALRRDSVVSIYVPPPAIRELREVCRGRHQLVRLRTRLAQMIRALLLRCDAGDPPGTQLYAPKALAWLDHVTLRPDAQAALRRLVTAYRAVHTEAQAADTAVRTRAATDPIATALDAMVGVGPVLALTLRAEIGDIARFPGGPALASYAGVVPHVEQSAGHVFHGRITRHGSPWLRWALVEAARHAIRRQDATGRWARRLTGRKGIAKARVALARVLCNEIVATWPRL

SEQ ID NO: 454759 - protein, 414 aa, unidentified
MLFVGDDWAEDHHDVEVLDEAGRRLGRARLPEGVAGIDRFHALVGRFADPDDESGAGQVLVGIETDRGPWVAALVAAGYRVFAVNPAQAARFRERHAISGAKSDTGDAHVLADMVRTDAHQLREVAGDSALGEGVKLLARAHQSLIWERTRHLLRLRAGLVEYFPGVLGALAAGGLDLGDRDALELLATAPDPDTAAGLPAEQITDLLSRGARRGDLPARAEAITAALGAPQLTQPPVLAGAYAIVTRSLVAVLTSLAEQVTELESQVGAYFGQHPDAEIYRSQPGLGVILGARELGEFGDDPHRYTSAKARKNYAGSSPITRASGRKSVVLARHVRNRRLADALHAQAFSALRASPGARAYYDALRARGIGHHAALRQLSNRLVGILHGCLKTRTLYDEHAAWAHHQDQQKVA

SEQ ID NO: 454760 - protein, 410 aa, unidentified
MGYETINRRAHVMTRKNTLKSLPTDTEFRVVGLDLAKSDVSVAAIPVDDNTPSLVDRMTYADLLDWAGKISPTLFAMEPCNGYSLLFLQLENLGHEIKLISGWTVSMWINTHLSGQKTDLNDAIALARLAVSDAELTPIRHKSITEIRIQTVQAVRQQLMSQRSKSIVSFKALAQQWGIPCAAGHRNLKKLRESIEAKVDLITRPVANAMLFLLDAVKSLDRQIGQLNQTLQELVMSDERGRLLQSVLGVGTQISARVITVVGNIERFNSPRSLVAYVGVAPRNFITGHKNLTKKKHGNCPVLSHKGQGKISRRGDKLLRSLFIQGAACLYMQFCKDQLPECQLKRWILKQLASQKPYGKLIVSLAAKLIRIVWAVLTYGEKFNIQKAGMTRSMWSEMALETPLNKEVPA

SEQ ID NO: 454761 - protein, 360 aa, unidentified
MEIAHITFIRHKQRKGYSVMSNIMYFIGLDIACNDFAASIYQSPEKPIITKEAILNNQDGFNMFVSWLKSNNINNANSIICMEATGVYSKAITRYLVADGFNVCVEAPLKVKRAFDPVGHKTDAVDSKQIAEYAYRYRDELKYWHPKDEILEKIRQLLSARERFTKQSTAIKNASRAYEKEPIKVVLIIKSHKQTLSQLKKHIADIDEELDQYMHQNPTIFQNTNILKSIPGCGMLLSANLMVLTDNFENIKDHKRLSAFIGIVPYQYQSGTSINRKARIRHFGPQTTRKLLRLGAQSVATHNKAFRQYYLRKQAEGKAKALVLNNIANKLVKIACAMIRENKSYIKEHRSIHPMCLKTA

SEQ ID NO: 454762 - protein, 347 aa, unidentified
MNKIKLVGVDLAKSCYQICALDEQGKVLFNRKYSAQKFALAVHQLEPTIVAMEACAASHYWGRRLQALGHVVRLVPPQHAKAFRRVHKSDEHDALSIAEASQRPKLHFVPVKTVAQQDLQMLGGLREQCVAQRTGLINQARGFAREHGVSFPKSRQALMAQLPAALEDARNELSPLAREALAELYQEIRHLSARIDDLLKRMSALAREDIAFERLQTLPGVGPVLASAALAKVGHGQQFKSGRHCSAWVGLVPRQNSTGGKTQLGAISKNGDRTLRTLLVHGARTVVRWADKYDHAQSRWIKQVVARCGKNKAIVALANKMMRMIWVVLTQGINFDMHKAYRPQVTR

SEQ ID NO: 454763 - protein, 377 aa, unidentified
MHSENIAAYVGLDVHKETLAVAIAAPERLGEVRYYGTINNEAQAVRRLFQKLQGLYGNILSCYEAGPCGFGLYHQLTAMNIKCQVIAPSRIPKSPTDRIKNDHRDAISLARLLRAGELTPVWIPDLAHEAMRDLIRARAAAKRDSRVARQRILSMLLRTDKHYAGKHWTGKHRTWLANQSFSQPSQQIAFQHYCQSLEQIEDRILQLDQEISRLLPEWSLCNLVCQLQALKGVGQLIAITLVAELGDFSRFSNPKQLMAFLGLVPGEYSSGNSIRPRGITKVGNSELRRLLYEAAWSYRTPAKVGAWLIYYRPDSVTQYSKDIAWKAQQRLCSRYRSLTAKGKKSQVAITAVARELTGFMWDIALAAQSSFSQQKQN

SEQ ID NO: 454764 - protein, 373 aa, unidentified
MENNITFVAMDTHKKEHRVALVYPNYEEIIEFSVKNAPAEIRKMVKNIKGNAPGKVKFCYEAGVCGFTLQRRIEALECKCSVIAPSLTPRKPGERIKTDRRDAKKLLGMFMADMLTEVYPPDERQEAARELTRCREAAQENLKRIRHQLQKLLVRHGYVYTDGEHWTQKHLRWLDAVDFAQPLLREVFDCYFTEMRHCLQRVKTLDRELEKLAQSETYRELAGALRCFYGINTLTAISIITEVFDFGRFASARNFMSYLGLTPSESSSGEKQHKGAITKTGNKRARRLLTEAAWHYRHAYTVSKALNERRDGQPQWAIDIADRAGVRLRKRYHRLVNRGKLPCKAVAAIARELAGFIWSVLIEYEARKKKKAA

SEQ ID NO: 454765 - protein, 413 aa, unidentified
MEELIERCAGIDVGQAEVVVCVRVPDRVTGRPAQLVETYGTTTPDLLKLHDWLAGLGVTDVVMESTGVYWKPVYYVLEDAFAVILVNAAHVKHVPGRKTDTIDAVWLAQLLAHGLLSASFVPPKPIRELRDLTRYRKALINERTASVNRVHKVLQDAGIKIGTFASDVFGVSGRAMMRALIAGQDDPAAMADLAKRRMRAKIPDLTKALTGRFGAHHAFLLQRMLDHIEAQEADIAALDERIGQLLDPFATQVELLSSIPGVDHRSAEVILAEIGPDMSVFPTPAHLASWAGMCPGQRESAGKRGSGKTRKGSKWLRATLVQSARAATRAKGTYLRERYLRLRRRRGDAKAVVALGHEILLAAYRILDTGQPYIDPGPATFSAITAERERSRAVDELHRLGYNVTLAPALPAA

SEQ ID NO: 454766 - protein, 409 aa, unidentified
MFFVGIDIAKKTHQAAITSDDGKLIGKTFKFSNTIGGFNFLLEKLSAVTTNLSQFEIGMEATGHYWLNLYTWLSDKNFKIHVINPLQSDALRNLYIRKTKTDSVDSKIIADVIRIGQYSETQLADDKIISLRDLSRQRFFLVDMASDLKRKIIAMMDRIFPEYQDFFSDMFGKTSVQVMKECTSPEQILEIPTEKLTQLLKKASRGRFAEDKARELKKLASNSFAAMLSSDMTTLLIRQMLEQIDLLEKQISEIEKIIAVQFARFNTKLATIPGIGTTLGATILSEIGDINRFEKPKQLIAFAGMDPSIKQSGNYVGTESHMSKRGSPFLRRAVWLAAVVAVSHDPLFKYHLHQKMHSGKSYSQAMGFICHKLLNTIFAILKSGEDYNPVFPPDIDVSKLSDEAMNSQS

SEQ ID NO: 454767 - protein, 344 aa, unidentified
MQISILGIDIGKNSCSVVGVDDRGAVVVRRTMRRHTLIEFVEKLPTSAIAMEACCGAHHLGRLFAARGHEVRLMSPEYVRPYVKAQKNDDRDAEGIAEAASRPTMRFVELKSQEQLDIQTLHRVRSLLLAERTTLINQLRAVLLERGVIFAAGRVKFESVLDGLLAEADEVLSARIRSLVIELRDEWQLLDKKIGALNAEFVALARQNSAMRRLTSIPGIGVLNATALVAAIGDAGSFKHARDLGAWLGLVPRQFTTGGKARLLGITKRGNTYLRTLLVHGARAAMHTLSQSDTPIGQWLQTMLSRGIQRNVVIVALANKLARIAWAVLRKGQPYERAYGAAVI

SEQ ID NO: 454768 - protein, 426 aa, unidentified
MAYRIAGIDVHKKMVAVVIAEVDVAGTWRFERRQLGTSPTQLCGLADWLVEREVVEVVMESTAQYWRPVWEALERHWQPRMPPTDGRPRAGALHLAQAQSNQGPRGRKRDFPDAERLVKRLVAQELTLSFVPDVTQRLWRTVARRKNQSTGNRVQLQNRLECLLEEMHIKLSSLVTDLIGPSARRMLRAIATGETDPGAVVALGSRRLHATPDQLRDALGACTDLHPVYRRLLALTLDELEVIEGHIHQLDEELAQLLRGHQDAVERLAAVPGLGVDSAQQIITEVGPTAATFATAKCLASWVGVCPGHDESAGINHSHRAPNGNRQMRRLLNQAANAAVKAKGSIFQLVYQRLVVRLGHAQTIGAIAHRLCRLIWKILHDGVTYDERGPAVTKHRAQRRAAKMIRELRSLGYRVEPTLPPASALA

SEQ ID NO: 454769 - protein, 438 aa, unidentified
MDPNIDDVDVNEQEERLERVAAIDVAKASGKVCTRVPHASVERRRVTKVWDVATTTNALMNLGDELAEMGIERVVVESTSDYWRPFFYLLEARGLVVWLVNARDVKNVPGRPKTDKLDAVWLAKLNERGMLRPSFVPPKEIRQLRDYTRLRSELTEERSRHKQRIEKLLEDSLIKLSTVATDIFGKSGRAMLEALIAGERDPDALAELALGKMRPKRTALKEALTGRFDAHHAELIRMLLEQIDGLSAKIDQLTARVDQLVGQLPEAQTPSEGGAGLSVLDRLDEVPGIGPRAAQVIIAEIGLDMAQFPTAAHLVSWAKLSPRTIQSGPRSHSGRVGKGNPYLKGVLGEVASAAARTDTFLGQRYRRLLRRRGRQRALVAIARSILVVIWHLLADPSARFIDLGWDFYDRKIDINRRTANLVRQLHALGHQVTLTPVP

SEQ ID NO: 454770 - protein, 391 aa, unidentified
MSQDFRFDPSRSLTTLEQDSTIIAVIEMSQTKWLVAAVVPGVERQPLKKLDADKEALLKLLQRWRNEANRAGREIKRIVVAYEAGRDGFWLARWLLGRDVETYVIHPTSIAVSREHRRAKTDRLDTELLMRAFLGWLRGERRHCSMAAIPTIEEEDARRPNRERKNLVTEQTRIVNQVKAIFARFGIRTLRPTERKVEERLEAVRTAEGAPLPENTRAELRRHLARLRVVREQVHAVEQERLRKLAAAPAADKGSHAMVRLIARVLGVGVETADMLVNEIFSRHWRDRRAVARYAGLTGSPDESGSRRRERGLARAGNARVRCGMIQLAWRFLRFQKTSGLAQWFAARTADGRGGTRKTMIVALARKLLIALWRLVTGGEVPQGVVLRPAS

SEQ ID NO: 454771 - protein, 397 aa, unidentified
MLEQPRSIGLDVHREYVMIAGVDGQQQVILEPCKVPLSRFSRWSAKHLRATDQVALEATSNAWVIYDQLTAQVAEVKVANVYKVKLISSSRAKTDRHDAVVLAQLLAANLLPAVWVPPVKVRELRSLVAHRQRLVRDRTAAKNRLHSALHRHNLQLPAGDPFNEANQAWWQALSLSRPEKLRVRHELAHIQHLSTLLAEVETEIVHLSVQEPWNDQLAFVMQLPGVGLLSGMTILSAIGDIRRFPSASQLVGYSGLASSVHDSGKTRWTGKITKQGRRELRAVLVECAWSTVRYSPYWRATFERLAHRIGKQKAIVAVARKLLVVIWHVLTNRKPDRQADPQAVARSLMKWASRGRLATSIGLSRPAFVWRELDRLGLGPHMKHFEYTGHRYVRQPA

SEQ ID NO: 454772 - protein, 386 aa, unidentified
MQKAITYVGLDVHKDSIVVSLAEAGLRGRLREVREYGKVLNTPAALKAMATKLAAGGNELRFCYEAGPCGYGVQRQLSAMGHHCAVVAPSLVPRKPGERIKTDRRDAAKLAKLHRASELTPVWVPDPAHEAMRDLVRARLAAVRNIREARQQLSGFLLRNGHHYHRHPWTLMHRRWMADLKFDQPLHYIVLQDCIAAVEASEQRRDRLEAGIIAALPEWSLAPLVETLQALRGIALVSATTLVAELGDIARFSNPRQLMAYLGLVPSEHSSGRSRRQGGITKAGNAAARRMLIEAAWSYRFPARISRYQLSQQKRLPKLIRDIAWKAQERLCRRHRKLMRAGKPKTVVCAAIARELTGFVWAIATETSPANGKKGTGKPATMGAVS

SEQ ID NO: 454773 - protein, 429 aa, unidentified
MRKKQPYRAVRVKDVDRKTLEVRLACGSIHVGIDVAKQEALVVVRDSAGQFERPWKVRLPGEIHELVALLQALGERHPLVVAMEPTGSYGHALHQALSDAAIVVHRVRTQATQEYAEMFDGVPSNHDGKDAAMLAELCALGKSWPWPWEVLSEADAELKSLVLWLDAQQTTKLKWIGRLEGLVSCYWPEASRLLDLTSQTLLRALREYGDPRALAADPEASAKLSSWGGHFLKAEKIAALLESARRTTGLRMTAAEVKYLKRVAQATWEADAAVTAAERELQEAAKQDATIQRMAPIVGSNTACVLAVTLGKPQAYHCGEAYRKALGLNLKERSSGQQRGGVHISKRGPSLARRWLFFAALREIKQGSAKTWYERKKAKDQDRGMGAVVAVMRRLALAIYAVVRDGSSYSPARMFGPHPVPTSIPSANE

SEQ ID NO: 454774 - protein, 351 aa, unidentified
MKYYTSTSEYNCGIDLHSQQMYVCIMDREGEVRVHRNIRGNDFEYFLKIAKPYLHDLTVVCECTFNWYWLADACFEAGIGFVLAHALYLRHISGGKNKNDRIDSEKLAHLLRANLIPPAYVYPAARRPIRSLLRQRMSYVWQRAELLTHLSMNQMAQGLVPAPKFGRNREVWEERILEQVEHPLHRMGVACDMQIVRAYDRQIQLLGQEVTRQARKHEGRDHQLLLTVPGIGKILSLTILFEMDTVERFPTVKDFISYCRLVKGSVASAGKIKGLCGGKMGNPYLRWAFGETAVLAKRSNPLLKTYAERLVAKHGKYKGNSILAAKLARAVYHMLQKGTGFDVECVLSTSI

SEQ ID NO: 454775 - protein, 375 aa, unidentified
MTADLQSKSYVSESVLYMAMELSNSKWLLAFGDGARQRQVGIAAGDIAALSEQIAKVKAKWHLAEDTPVVSCYEAGRDGFWLHRQLTALGIANRVVDAASIEVSRRARRVKTDRLDARALLAKLIRYEGGERGVWRVVRVPDPVWEDRRQLEREREQLLGEKKRHRSRLQSKLVAQGIRIPINQHFVARLEEVKLFDGNALPVHLKAGLVREFERLQAVQGQLRAVEQEIGELVQSAEDLQAARVLPLLIGAGPVGAWTLVLEILGWRGIANRRELASLAGLVPAPYNSGTMVRDQGISKAGNRRVRTLLIQLAWLWLRYQPTSKHSQWFQERFGGGSSRQRRIGIVALARRLLIDLWRFVESGVVPQGARLKVA

SEQ ID NO: 454776 - protein, 463 aa, unidentified
MGHEPEAEHNPDAFRNNQLSPPTGMSTRECFGFSHPASIACLTEEEFTLQVLYPRCCGLDVHKKSITGCCLWFDAEGRRQEEIRKFGTHTTELRRLAVWLRQHEVKHVVMEATGSYWRPIWNVLEGEGFEQTLANPQHMKAVPGRKTDPHDAHWIADLFQHGLIAASFVPNQQMRHLRDLTRMRTKVTEDRARVINRIEAVLEDANIKLSSVVTDIMGASAQAMVKGLLRGERDTAQLAELAQGRMRAKRPQLQTALEGNLQPHHVFVLQRLLMQSRFLQQQREAIERQIKRRLDPEMRQAIAFWDSIPGVDEDIATILVAEMGIRSEQFADGAHVASWTAICPGNHESAGKRKSGKMREGNRWLRGALTQAAWAATHTKGSYLSALYRRIAARRGSKRAIVAVAHAILVSAYYMWKKKQAYHELGDNLLDTLQPEKTADRLLKRLAKLGYAVTVTGFPSPAA

SEQ ID NO: 454777 - protein, 462 aa, unidentified
MSRPRSTPATHRIEGLPTIFANAAGIDIGADEIVVAVPPDRDPEPVRVFRTFTPDLEALAAWLLSCRIDTVAMESTGVYWVPIYELLEQQGMVPYLVNGRHVKTVPGRKSDWNDAQWLQKLHALGLLAASFRPDAEIAALRTLVRYRAELIQHRAPHILHIQKAMQQMNIQLERVLSDIMGVTGQAIIRAIVAGERDPVVLAQLRNPACKSSEEMIAKALTGTWKEELLFVLQQALVIYDVYTAQIAVSDSELEHYLQQMEARSGDPTAPLPDLPPAKTDSHSKNAPSFNARAHYARLLGVDLVAVMGLSSSSVQTIISEIGTDMSRFPTVKHFGAWLGLAPRNDISGGKVLRSRTRKVTNRATQAFRQAAQSVSRSDSAVGAYYRSMRARKGPEQATVATAHKIARIVYHLLKYGEAYEAESAAAYEQQRQERELRQLTRRAAKLGYTLTPAQEPLADTSP

SEQ ID NO: 454778 - protein, 344 aa, unidentified
MDHFAGLDVSVKETSICIVDDAGKIVREVKVASEPEALLAVLKNPAYHFKRIGLEAGPLSQWLFSALADAGLPVICVETRHMQAVLKAQINKTDRNDARGIAQMMRAGLYRPVHVKTIRSQKLRMLLTHRKLLQSKAIAIENDLRGTLRNFGLKVGMVGKVKFEARIRELVENLPDLAALVEPMLIVRRTLREQIVILHRRLLAIIRDDEVCRRLMTTPGVGPVVALTYRATVDVPARFRKSKAVGAVFGLTCAKYQSGEVDRNGRISRCGDEMMRVMLYEAAQSMLRSKKWSWLKAWAMQIARRRGMKKAIVALARRLAVIMHRIWVDGTEFRWTREQATAAA

SEQ ID NO: 454779 - protein, 312 aa, unidentified
METKVFVGVDVSKDSLDVAIGSEKQILTFANDQKGVDALIEELSRIGPELIVFESTGGYELLAASSLAEAGLPLVIVNPRQVRNFAKATGILAKTDAIDARVIAHFAQAVKPDVRELKDRATSELTALVTRRRQIVEMIVAESNRLKLANKRNIKDIKDHIRWLQKRLDKIETDIGKTIQNSPIWRCKDDILRSVPGIGPITSASLICNLPELGVLSRKKIAMLAGLAPLNCDSGKFKGRRRIWGGRASVRSGLYMATLAATRCNPVIKGFYQRLTAAGKCHKIAITACMRKLLIIVNAMLRDQTLWQQNNT

SEQ ID NO: 454780 - protein, 343 aa, unidentified
MHNGENSPADTITVAGADVSQAWIDVACQNPGQGAVAESRFDNTPPGHSRLIGWLRKEGVPARITIEASGIYSLDLALALHEAEGIELMVAHPKALKNYRSARGRRAKTDRVDARLICDFCRRMPFQTWTPPSKEAFELRALARRLQTLIEERVREKARLHAATTSRHASSYVANDIEVNIRHLERRIERIEAEALALIGGHDALAQACEHLRSVKGIGDRSAVKLLGELVMMPKDLTVRQWVAFAGLDVRHHESGTSVSKPGRISKQGNARLRKALYMPAQVAIQNEPNVRAFYDKLLKRGKKPMVAIVAVMRKLLHSIYGMLKHDQDFDGRKFYRIPVSAA

SEQ ID NO: 454781 - protein, 395 aa, unidentified
MDEARPKAWAGIDAGKEFHWAHVLDASGEKLLSRKVTNDEADLSELIDEALSFAEEVVWSIDQPGGGATLLLGLLWERGQRVLYMPGLTVDRSRDTYPGESKTDARDAHVIADQARMRPNLEELTAEEGELAELEILLARRRDLVTDQTRSINRLRDALLSSFPALERALDFNNRGALILVSNHQTHAAIRRMGKKRLTTFLKNRSVKGAEALAGKALTAAKSQSVSLPAEEVSARIVAELAGEVLALKESIETLDGELRERFFARPEAEILTSIPGVGVNLGAEFLVAAGDLSAFESADKLAAYAGLVPAAHDSGKRTGNNKRMRGGNKTLKYVFYQSAFASLRSCPESRAFYDRKRAEGKRHIQALIALARRRVNVLWAMLRDGTTFEARSVA

SEQ ID NO: 454782 - protein, 337 aa, unidentified
MIVIGVDVHKYSLTVVAVDEVGRTLAERSGPVGDAVVVWARTLDAERLWAVEDCRHVTRGLERTLLAAGERLVRVPPRLTAPQRRRGRTRGKSDSIDALAVARAALQEPQLDGPRVGEETLRELKLLVDHRDDLVAERRRCQQRLRWHLHELDPTLAVPLGALDRAVWLDRLGRQLARREQTTQVRIARDLVGRCRTLTRSIGELDRELHARTAALAPRLLQLPGCGPLSAAKLLCEIGPIDRFPTDAQLARHAGVAPLDASSGKHQRHRLDRGGNRQLNCALHRIAVTQGRVHPPARAYLERKQNEGKTRREAIRCLKRQLARTVYTTLKNEPLLT

SEQ ID NO: 454783 - protein, 346 aa, unidentified
MTIVEAARAVTGGIDTHLDLHVAAALDPVGGLLGTEGFEATPAGYQALLSWLQTFGQVTRVGVEGTGSYGTGIARFLRRHGVEVVEVNRPNRQERRRQGKSDPLDAVEAARSALSGRAQGQAKSKDGAVEAIRVLMVAKRSARAARVKAVVQMRHLGITAPDQLHCRLKGLTIPALVAEGSKLRPTRSSDPVTAATKASIATLARRVQALDQEIADLDELIEPLVVAAAPELIALFGVGTDTAATLLVAAGDNPERLYSEAAWAHMCGVAPIPASSGKVERHRLNRGGNRQANSALWRIVMVRLVHDPDTKAYFERRVKEGRSKREVIRILKRYVAREVYRHLPRS

SEQ ID NO: 454784 - protein, 331 aa, unidentified
MKIKEIVGIDISKNEFDVRIHTSKEYEVFANQSKGFKRLIKWVFKVSSFAKDEIFFVFEHTGIYSYQLAAFLTEQEIPFAIIPGLEIKRTLGLARGKSDKVDATRIARYAYLRRDEITPYKLASKELQELNGLFTLRKRLVRQKAGYVASLGENKSVKRRKDNLTEFAVMESIIRTMTKKIEKIDQAMKAIIDNASSLKHLYTLITSVKGIGPQTAYILLITTQGFTKFKTSRQYASYAGVAPFPHQSGSSIRGKTKVSHLANKTVKAILSSAAQAAIKWDPELKIYYQRKVAEGKHPALVINIVRNKLLARVWAVVNRGTPFLDLCKYAS

SEQ ID NO: 454785 - protein, 447 aa, unidentified
MGARMSDLAVLDPRAAFVDVGSEKMYVSIAGGSPAVFGTVTSRLHALRDYLAEHQVRSVAMEATGVYWLPLYGVLEAAGMEVVMVDGRQTRNLPGRKTDMKDCQWGATLHAHGLLRAGFVPPANIRRLQDYLRLRGDHIAAAAGHVQHMQKALERMNIKLHEVISSLTGASGLAVIRAILASERDPQVLLGLCDIRIRNVKAERVVESLRGDWAEEHLFALAQAVQSWDHYQGLIAACDRQIEVVLRQMPDAKTPPSAASTKTGKPRTRPGVNAPDIADLREILAQICGAKDLTTLPAHSEYSVLQLIGEVGTDLTKWRTEKHFTSWLGLAPGSAQSGKRKASVKRRRNRAGQIFCVMARALARSKYVALGGFYRRMAARRGGLVANKALARKLATLFWRVMVKGLDFVETGVAQYEAKVLETKHRILHRLARQLGQQIVPSPVAAV

SEQ ID NO: 454786 - protein, 413 aa, unidentified
MLKIVYPICCGMDVHKSFVVACIASTNGQGVTGYKSKRFSTFTGDLRRCAVWLAEKECKDVCMESTGKYWIPIYNILELTCNIVLAHPKYVKAIRGKKTDKKDAKWIADIFKHDLVSGSFIPPTDIRQLRDLVRYQWKLTNFMTGEKNRAQNCLTVSNIKLDDVFSDVFGKAASAITTRLLENCEPFDVNPYLTKGIKAPVEEIQAAVDGELCVEQAEKLRIIRSHMQSIELCKLNLESLILSVAEKFLPQLNLVLTVPGIKIFSAIGVVSEIGVDMSVFPTSKHLCSWAGLTPQNNESAGKKKTTRISRACAYIKPLLVQCSLAVIKSSKHPEIRNRYLSLKKRRGHKKAIIAIVRMLLTAIYNILKKNEPYNPELYRKADRPPAHREVSLDEAIYIIQRQGYLVTAPVPAG

SEQ ID NO: 454787 - protein, 348 aa, unidentified
MLAVDAGELLDRAVRKALAAGYAGITVACEPTGHRWMVISQLAAARGMAMVCVQPLVVARAREAEDYTRGKNDDRDAVLIARLAAQLHCYLPEQADQGWARLRHLGARRSRLVEASTMCVQQLRDLLEVAWPAALSAAADPLESATWLACLSVALGRGDGDLGAVHAMGQDAFIAAARGGLGAWGARRICRRIAVAVYAALADGAGVEAQRPGALERAFSVLGDWKTVRGELAEVNARMLQALGTMGVLGVAGSVPGVSALQVAAILAETGDPSRFTTARAMVKHAGLAPCENSSGNHAGRAGISRRGRPALRLAVRPHVGRVAGSKSIRMSAAGAVGLAGVTGTARR

SEQ ID NO: 454788 - protein, 421 aa, unidentified
MRFYTKPHRYYCGIDLHARRMYICVLDAEGQVRVHRNGPATPEHFLTTVAAYREDLVVAVECIFTWYWLADLCAQEGIAFVLGHALYMKAIHGGKAKNDKIDAHKIAVLVRGGMLPMAYVYPRAMRAPRDLLRRRCHFTRKRAELLTHIQNTASQYLLPTLGKIAYHGNRVGVAEQFRDPEVRKSIETNLALIDEYDRLLTELELHLTETAKVHDVNAFYRLRSVPGIGKILALVLLYEIHDIHRFPRVQDFVSYCRLVKCAKESDGKHYGYSGTKIGNAHLKWAFSEAAVLCLRKNPVAQRYVARLAHKHGKGKALTILAHKLARAVYYMLHRGQAFEATRFFPVTARGAQPSRPEIDRVTGVDVHDAARSGPPGDDLEGGRYLDPPEIKRHTSRRRGHDRAGVTTKHAVGAAARVEEAS

SEQ ID NO: 454789 - protein, 421 aa, unidentified
MKESRAKKTKTIHEGTLIVAVDIGMVNNHGYCTSADGRSTKTFSFDNTREGLDTFWSMILASKARFQCTEVIVGYESTGPYGEPLIHCLKQKPVRIVQVNPVHTKKMKEINDNSPLKTDRKDPRVIADVIRLGHALSVVIPEGDAAYLRRLNNARERHVKERTALLNQLQQMVFLIFPEFTRIIKTIHSKTALYILKKYTTPAKISRIKIEKLGAEITKLSKGKFRAEHATALLNFAKTTIGIQEGVEGLVLDIQHVLIQLEMIDRLIAELEREMEITLQRIPYSRKLLAIKGLGIVTVAGLIGEIGDFTKFTTQAEIAKLAGLNLYEISSGKRQGQRRISKRGRSLLRKILYYAAMQTIRRNGIMHDYYQRLIGRGMKSIMALVAVSRKLLRIIFAIVRDDSEFIVKHESQRKEVTREAA

SEQ ID NO: 454790 - protein, 331 aa, unidentified
MKQVIRCGIDVSARTLDVAIDSGRAPFWTGTFDNTAKGHRKLIRRLVARHRRVRIVVEATGVYHLDLALALSESKTIDVMVANPKATKGFAKAHMQRSKTDKTDALSILEFGRRMEFQAWDPPASEVLDLRALARHMAALATMRAQEKNRLHAHTQVAGRTPALRAAIERHIREIDQIIKDLQEEALVLIEESRDLRRAFHHLVSIKGLAKTSAISVLAELAVLPRDMTVRQWVAHAGLDPRLYQSGTSVMAMPRISKVGNRNLRRSLFMPALVASNHEPRIKAYYQHLLDNGKAKMQALVAVMRKLLHAIHGMLEHDQSFDGEKFYASKA

SEQ ID NO: 454791 - protein, 362 aa, unidentified
MVYLGVDLHRKVSHVVALDAAGATVLSRRFEHSPDAFRRVFGELGPEPITVAFEATYGWGWFADLLADAGVEAHMAHPLATKAIGAGRVKNDAVDAATLAHLLRTNLLPEAWIAPPEVRELRRLVRLRGSLVRIRSRLKCQVHAICADAGVPAPASDLFGRKGRAALETLALPPRSASRLAAHLRLIDDLGREIIAADREIVAAFKGDDRVRRLLPIPGIGILTAATIVAEVWEVGRFPSADHLASWAGLTPTERSSADHVRRGHISKQGSRWLRWAMVEAATKIGGSRAAQLHRFADPIADRRGTKIARVALARRILTLAFYAIRDERGCRDYPPLPRPSRRPVTARSLTVMASPDGRLSD

SEQ ID NO: 454792 - protein, 384 aa, unidentified
MEKTQRTLRKEDSTKLVTLYMACELSHNTWKLAFSNGEKMRTVTMDARDMDQLQRAIEGSKSRFKIEGEVEIRSCYEAGRDGFWLHRYLLSCGIENMVVDSSSIEVNRRKRRAKTDRIDARKLLNMLMRYHGGERKLWSVVNVPSVDAEDGRHLHRELEALNKERTIHRNRIKSLLIQQGIAVKNPSSRKFVLDLGSFRTGDGRELPVDLQSRIIREHGRLRMVEEQIYTLKRERERRLVEEGDHPSIRKVSQLMTLRGIGVNSSWKFVKEFFGWRDFKDRRELGSLSGLTPTPYDSGGYQREQGISKAGNKRIRTLSVEMAWVWIRFQPQSKLSQWFIERFAGGGSRMRRIGIVAVARKLLIDLWRYLEHGVIPEGAVLKSEA

SEQ ID NO: 454793 - protein, 393 aa, unidentified
MLKQEKEYREGERTAVGIDPCKEFLQLAILSPDGKQEFKKLPLLPSITAEIVRSTVPERTQIGIESYGSYGKLFVFELLKKGYDVREINPSISKKLTDLITEDHSDCLDAVSIAKALLLIPDLPKVSFTEKKLMLAKLSRLRKRLVKDLNGYLNRLHIALTESYGAVYRGLFRTIFTGKALGYFERYPTINDAFSQKRKVIAIIGEEKWDLLEQAGQWERSPYLGLLKIEIRCLIRIIKALQASKKELEEKIKEVGAEDEDVKLLKTFPGIDYITAATLLSEIGNIERFEKEGCLSSYCGVSPVMWQSGTAKVKTKRRKRYSRRLKGILYFISLSQIRINPESKDYYWRKRKEGKTHWQAMNALSRQLIKIIYYMLKNRESYRRERIVHYILT

SEQ ID NO: 454794 - protein, 408 aa, unidentified
MSNHFQYFLGIDWGSERHRVCLMNREGHTLAERWIEHSGDSLAELADWVRQQTSDSTSALAGAIECPRGAVVETLLEHGFAVFSINPKQLDRFRDRYSPAGAKDDRRDAYVLADALRTDMHCFHLVKLDEPVMIRLRELSRLDDELAQEQNRAVNRLREQFHRFFPQLLQLCQSAEQPWLWDLFELAPSPSRAARLTEAKIERLLKQNRIRRITAAEVRAVLKTKPLTLAPGAAEAAIEHALLLLPRLRLLHQQRADLARRISALLDELATPVEGRQEHRDAAILLSLPGLGRKVAATMLSEASQAIAERDYHALRCYSGTAPITKQSGKKKIVIMRRSANERLRNALYHWARTSVVWDQASKNAYAQLRARGHSHGRALRSMADRWLKVLTSMLSTRTLFDPQRRPA

SEQ ID NO: 454795 - protein, 343 aa, unidentified
MNAAGIDVSGRKSMIAVLWPFWEVVMCPFEVGHNTEGLVHLAQQLKELDWETRVVMEHTGRYYEPVAKILHKAGLFVSAVNPLLIKEYGGNSLRKVKPDKADASKLARYGLDNWADLCDYTPMDTIRYDLKTLNRQFHLAVKQKTATANNLIALQEQSFPGIRKCFTSPVRKDGAQKRVDFTHDFWHADCVRGVSKNAFTERYRKWCKRHDYKFKQDKAEEVYTLAKSVVVLIAKSEVTKLLIQESADQLTSISRSAETYRAEMNRLASMLLEYPFVMQMYGCGGSTGPQLMAEIGDVCRFASKKVLAAFAGVDPAPNAFGDKVSKSNRTTKRGFSLSLKDAV

SEQ ID NO: 454796 - protein, 394 aa, unidentified
MLDSEGVKLSSFTVSNDLPGATALREAIFRTMDGQSVEVLKIGLESTSVYSFHPAMFFHQDEELRKLGAQVFVMNPKQIANFKKSYPDMDKTDEIDAFVIADYLRFGRLSMSVVKESQYVALQQLTRSRYQLVHQMTKEKQHFLQHLSYKCNTFQENVESSVFGQAMMDLFFEKYSLEELAQMSIEDLADYLQTKGKNGFHDPEKVAKSIQKAVRSSYRLDKVVEDSIDLILGTIIELIRTMKAQIKQIDKAITKIMAGLPNTLQSTPGIGPVFAAGIIAEIGQIERFEAEAKIAKYAGLYWRKHQSGRFTADDTSLSRNGNQYLRYYLVEAANSVRRHVPEYQAYYEKKYREVPKHQHKRALVLTARKLVRLVDALLRNHQIYTPQGSVKHEA

SEQ ID NO: 454797 - protein, 388 aa, unidentified
MIYVGIDIAKLNHFAAAVSSDGEILIEPFKFTNDYDGFYLLLSKLAPLDQNSIIIGLESTAHYGDNLVRFLISKDFKVCVLNPIQTSFMRKNNVRKTKTDKVDTFVIAKTLMMQDSLRFLTLEDLDYLELKELGRFRQKLVKQRTRLKIQLTSYVDQVFPELQYFFKSGLHQHSVYALLKEAPTPNAIASMHMTHLAHILEVASHGHFGKDKARDLRVLAQKSVGVNDSSLSIQITHTIEQIELLDSQLFHTELEMANLVTCLHSVIMTIPGIGFVNGGLILGEIGDIHRFSEPKKLLAFAGLDPSVHQSGNFQAKKTRMSKRGSRVLRYALMNAAHNVVKNNTTFKDYYDSKKAEGRSHYNALGHCAGKLVRVIWKMLTDEVEFNLE

SEQ ID NO: 454798 - protein, 349 aa, unidentified
MIRNKPQGAVTYGIDIGKNLFHVVGTDGEGKPIQKVKFRRDTLLQFFERAEPAIVGMEACPGSQWLARKLQERGHTVRIIPAQFVKPYVKSNKNDIIDAAAIAEAVTRPTMRFVEVKQPEQVDLQALHRIRDQMVRSRTRLICQMRAFCLEYGVPMRQGAGVFKLDLQRVLADDGNDLTPTMRRLLGDLADDLAHLERRIAVVSREIDALAARDDVARRLTTIPGIGALGATALLAAVGAGHQFAKARDLAAWLGLVPRQHSTGGKQTLLGISKRGNPYIRRLLIHGARSCMMHLDRSRDQLGRWIDQLQQRMHPNKATVALAAKIARIAWVVLTKPGALYARRDPVVA

SEQ ID NO: 454799 - protein, 390 aa, unidentified
MFYAGIDVAMDKHDCVVLDSDGDVVVEVFTFENSRDGFKTLKRVLQSCSKNPKKIKVGLEATGHYSDNLLVFLNKIGYDPVLFNPLHTNLFRKGLSLRKTKTDHVDAHTIATMLRTEDLKSYSQPSYHLSELKSLTRYRSNLVSDCSRCKVSLVRLCQILFPELKNIVPTLHMSSVYTLLSELPSADKIAKCNLTHLTALLSSASKGHYGRDKAVEIRELARTSIGIKSVVKELELQQTIDRIQVYLQQIEAVEEEINKIMEEMDSPITSIPGIANRMAAVILAETNNFHDFERAEQVLAFAGLEPSVYQSGQLTSSHSKMVKRGSKYLRYAIFNATKYVCNWDPTFHAYLAKKRAEGKPYNVAVSHAAKKLTRVMFHLVKTNKEFVPQA

SEQ ID NO: 454800 - protein, 433 aa, unidentified
MSLLNHERRIVHMKVVYPVCCGIDVHKRFLVATIVSVTKMQTLSYKRERFSTFNKNLQRLKHWLIENGCYDVCMESTGKYWVPVLNVLEPEMHVVIANPKWVRAVQGHKDDAKDSKWIAGLFCFGLVKGSFIPSKDIRILREFTRYRAKLTNMRSSEKNRFQNGFTVCNIALDAVVSDMFGTSAQRITKYLLTDKEPTAQHCSSLLHRSLKKKAVAVVESIEGFQLTEEQKFRMLQIRQHMEYLNAAIQVLDEKLDQMAAPYAAAIRLFCTIPGMGRESALTILSEIGTDMTQFGSSKRLCSWAGLTPGNNQSAGKKKSVRITRAGVYIKPMLVQVAHAAVKCTSQPYYKVKYENIARRRGKKRAIIAIARMILTAIYHMFKTGEVFCPTDLRQIDMPEELKEKRRSRKIQNAIHLLKQQGILSETFVAPTCA

SEQ ID NO: 454801 - protein, 362 aa, unidentified
MRATPSMQVGGRAMEHYVGIDVSLELSSVCVVDAKGRIVKEAKVASDPDALIAFVRGLGLSIERMGLEAGPLSQWLHAGLIEAGFETVLLETRHVKAALSAMTVKTDRKDARGIAQLLRMGWFKPVHCKSPGSQEVRALLVGRKQLLGKLVDVEACIRGILRGFGLKIGIVTRKGFEVRVRELCVGQPMLEQIAGAMLVARAALQKEYSRLHKVMLTIVRADKVCRRLMTAPGVGPVAAITFKTAVDDPARIRKSRHVGPLFGLTPKKYQSGETDVTGGITRVGDEMVRTALYEAANILLSRVTRFSALKRWGMDIAKRRGTKRAKVALARKIGVILHRMWIDGTSFRWTKEAPGVEQLERV

SEQ ID NO: 454802 - protein, 343 aa, unidentified
MEQISTIGLDIAKSVFQVHGIDEKGTVVVVRQLKRRRVLPFFSKLAPCLIGLEACATSHHWAREIAKLGHEVRMMPPRYVKPYVKRNKNDAADAEAICEAVQRPTMRFVPIKTPEQQSVLMLHRTRQLFVRQRTTLINAIRAHLAEFGIVAGVGRNGVEKLLELVAKGENERIPPAARECLMALAAQLHLVKRQILGADRRVLAWHRTSKTSKRLEAIPGVGPLIATALVASIPDPGVFRSGRDMSAWIGLVPKQNSTGGKEKLGSISKAGNRYLRKLLVIGALSVIKRAKILGYTKHPWLVRLMERRSTMIAAIALANKIARMAWAMMARNEAYRTPLALPA

SEQ ID NO: 454803 - protein, 343 aa, unidentified
MDHFAGLDVSVKETSLCIVDDAGRIVREVRVASEPEALLAVLKNPAWHFKRIGLEAGPLSQWLFNALAEAALPVICVETRHMRAVLKAQINKTDRNDARGIAQMMRAGLYRPVHVKTLRSQKLRMLLTHRKLLQSKAIAIENDLRATLRNFGLKVGVVGTAKFEARIKELVESLPDLALLVEPLLVVRRALREQIGVLHRRLLAIVRDDEVCRRLMTVPGVGPVVALTYRATVDVPSRFRNAKAVGAVFGLTPSQHQSGESNRTGGISRCGDEMMRAMLYEAAQILLVRSTRWSWLKAWAMQIARRRGMKKAIVALARRLAVIMHRIWVDGTEFCWTREAAVA

SEQ ID NO: 454804 - protein, 348 aa, unidentified
MSQSSSTLARMGIDIGKSVFHVVGLDAKGKPVFKGRFNRERLLEFLARASPTIVGMEACPGSNWLARKAAAQGHQVRIVPAQFVKPFVKSNKTDIVDAEAIAEAISRPTMRFTQPKTEAQLDLQALHRVRQRLVSGKTAIINQSRAFLLEYGITIGTGPAYFVRDMPSILSDENNGLTASMRQVLQEQWQEYRSVEARLLQLRRQIEAIAGADDVATRLTSVPGIAHLTATAITAFSGTGTQFKSGRHFAAWLGLVPGEFSTGGKQHLFGITKRGNPYLRRLLIHGARACVLHLDRTKDHLGVWISQMEAKGIHRNKVIVALANKLARIAWTILTRQGTFYLRQPQSR

SEQ ID NO: 454805 - protein, 416 aa, unidentified
MRAIGIDVHRDFCEMAVSEGGRLRSAGRVPSTPAELELLGASLAADDVVALEATGNALAIARILEPYVAQVIVASARELHAISDAKAKTDRLDARTLAKLLAAGMLEGTWLPGEEMRALRRRLAHRAQLVRARTRLKNEVHAALYRNLVGAPSATDLFGALGRRWLEDLVLPADERETLESCLRTIAFLDGEVARFEVAIARYARCSPEIRHLVTIPGVGLISAATVVAVVEDVRRFRSARKLVGYLGLDPRVRQSGSSPARMGHISKEGPAAARQALCEAAHAAMRTPGPLRAFGSRVAARRGRQVAVVAVARKLATIAWRLLTSGEDYAYANPAQVRLKLRRIELLAGAPSQKGHRTGVSLEVQQERELALAAERAYQRLVADWQASASARKGAGAAVGRASKKALVGPSSAAD

SEQ ID NO: 454806 - protein, 340 aa, unidentified
METSIKFYLGIDVSKSWFDVSVLKVVNHEKQPMLTEQFVNTKEGIGSFQKWLGQQGVPFDENTLIVIENTGVYHRPVWEFCSKHNLPLHIGNAAHIKWSLGITRGKNDQIDSKRLCNYCYKQADELKATAVLNPVFMNLKDLMTSRTRLVAQLQATKSYVKELLCTNDKALLKTLEKAHKAAIDGIEKSIAQIEKAINDLIVSDEKINRNYELIKSIPGIGSITAIYIICCTNNFANKPSGKQLASYAGVVPFEHSSGSSVRGRNKVHKMANKELKKLIHMCAVSSIRYSSEMKAYYDRKKAEGKPGLSVVNAIKNKLLLRVVAVVNKQEKYVENYQKVA

SEQ ID NO: 454807 - protein, 356 aa, unidentified
MVIVAIESHQGALHMQISTIGLDIAKNVFQVHGIDAAEKVVVRKRLRRRQVLEFFKALPPCLIGMEACATAHYWARELTKLGHEVRLMPAKDVKAYVKRNKNDAADAEAICEAVRRPTMRFVRIKSAEQQGQLMQHRTRDVLIRQRTQIINALRAHLAELGLVVAQGNAGVNELRAIVTDEQDTRLPIDARASVIVLAAQLEALESVIGAIEKRIKMQHRSSEASQRVEAIPGIGVIGATAIVATVADPTIFRSGRDFAAWIGLVPRQDSTGGKQKLGPISKQGDRYLRRILVVGAIAVLRRAQANPGKYPWLTQLLARRPFKVVAVALANKMARMAWALLAHGGTYRAPELAETA

SEQ ID NO: 454808 - protein, 337 aa, unidentified
MKPTESNHKFCLGIDISKADFHVAIQCQESAKIVARGKFANTPEGHTKLHVWLVTHCGADLPIHACMEATGSYGEMLADFLHGKVAKLSVVNPRAIKAHGDSELRRCKSDPADARLIADFCRVKKPTEWNPPSQDQRRIKSISRHISDLKKDITRESNRLEITTEKSVMKSLKSHITWMKKQIEKLEKELEDAIMSNEERGRDHKLLLSIPGIGAKSAANLIAELPDIKLLKNARQLAAYAGTTPRIFQTGTSGKTRTPMSKAGNCHLRKILFFPAMAAIRFNPICKNFAARLAAKGKPPIVIIGAVMTKLLHIIYGVLKYAQPFNPNHLQKAEITP

SEQ ID NO: 454809 - protein, 392 aa, unidentified
MVVSVGVDVSKDKHDCFIVSSEGEVLADVFTIPNTMDGFHYLLQRIRHCTAPQDKIKVGLEATGHYSYNLLGFLLDNGLTTYVLNPLRTNLYRKSLSLRKTKTDRVDARTIASMLLSDAGLKPYTDTAYHNEELKSLTRYRFDKVKERAKLKSSIARLVCILFPELEKLVPSLHIASVYALLEEFPGAKQVAAAHLTRLKALLETASKGRYKRDMALEIRDAARNSIGSWMPAKSLELQHTIRLIRELDDEIAEIEEQIQAIIDELNSPITTIPGIGFRMAAMIFAEVGDFTRFDSPDKLLAYAGMSPSTYQSGQLKNCYPHMEKRGSRYLRYALYNATKYVCHWDPTFAAYLAKKRAEGKHYNVALSHAAKKLVRLIFAMEKSRQPYRVAA

SEQ ID NO: 454810 - protein, 391 aa, unidentified
MAQVNDLSRSLTAFDPISTLVVVVEMSKARWLVSGAVPGVERQPLKKLEPDATALLRLIERWRSEAMRAGRPINRIALAYEAGRDGFWLARWLIARGIEAHVIHSASVAVSRERKRAKTDRLDAAMLMRVFLGWLRGERGHCGMVVIPTMEEEAERRPSRERENLVNERSRITNRMKSALARLGIRGFKPHLRKAPERLVGLRTAEGTGLPANVIEEFRRDMARLALVREQIRSIEKTRAERLERAPDTGSHAMVRLLARVIGIGIETADMLVREILSRKLRDRRAVARYAGLTGSPDESGLKSREKGLAKAGNARVRRGLIQLAWRFLMFQKDSALARWYRTRTEGPSGARKTTMIVALARKLLIALWRLVTTGEIPDGVELWPAARATL

SEQ ID NO: 454811 - protein, 409 aa, unidentified
MTVFAGLDVHKKYFHATVLEESGNVLVQKNFPNSSDGYDSLLAVTGKDVEVALEATYAWEYVFEELEDRVEEIKLAHPKRTEAITKERIKTDVKASEALAKLLRMGWLPEAWAPPKETRRVREKLRRRAYLVWKRTGFKNKIKADLAKLGIRKKVSYSDEGREWLRDLEVDSINDYLDMIEALNDPIERITKEVRREARATEDAKLLMTIPGVGFVWSLALTIELGDLERFSNPNEVPAQAGIVPSTEESGSKSIHGSITKDGNKYLRWAAVECAYLHERYADDTHLKRFFHKLAAKKNDQTAAVATGRKNPHSRLLDAHKERRVPSSWLTPQNQSLQVDGTGTPRFMDWGLDPAALIGGPSANYQCVALTTNRCMPKQVPAGVRDCSSHRLVSVVRVVEGNSFMRRIP

SEQ ID NO: 454812 - protein, 347 aa, unidentified
MARVARHFVGIDLHRSVMQVCVMREDGEVEAEHRWRLTGRGVEAWVLDRLETWKAGGRYVVEAMGLNRWLVNGMQARGMAVVVADPVKLGLKTLGTKTDRRDAREMARRLRLGDIDRCATTHYPGDREYGTRKLVRGRRKLVGLRTHLVNQVRAMLNAYRLQAPAGKLYGPKGLAWLQECGLPTQELRLLARVLGKALEGIQAQVLELEAGIQHAAERGLRGLEAQKGVGPVTGVALVYELGDVDRFRNARAVASYAGLVPRVSQSADHAHHGRLTRRGNAELRFLLGQWAVRLLARDPRVQAWAGPHLKRMHRNKVRTALARRLLVGVAASWRHREPFDLERCLAR

SEQ ID NO: 454813 - protein, 385 aa, unidentified
MTRELQYPSFIARNYDIFGGLDVDKKSMAVTFRDHGIMRKSLRLPYSASQLLKYTEKHFPGQRVAFVYEAGPTGFGLHDELTGASHACLVVSPSMVPTVQRKRVKTNRLDSLKLAEGLRGGQLRGIHVPAPGYRELRHLVQLRDTQVGQLRASKCRIKSLLLYEGIPFPAANGKWSAPALRELEALPCNATVRFKLDQLIDALQFHFLAAAKVQKQIRYFCQNDPELRRCISFLVSLPGVGTITATHALARLGDWRQIKDGRQIAGFLGLVSSEHSTGDKENRGQITRIGDSRLRNKLIQCAWTAIRKDPELRAFYRRIYERQPKKVAARKAIVAVARKLTTRMYAVLKEQRPFVIRADSSIAPLTAEETGGPRERLDTAQNEQP

SEQ ID NO: 454814 - protein, 420 aa, unidentified
MLKINPLSTLYVGIDVSSKSNYVCALDFYKNKYINSSFANNQPGAEELALKILECLKEHPDITTIVAALESTSVYSIHIANYLSSCEELMRFKPYVFVLNPKCTANYKKSYIGLGKSDPIDAFVIADYARAGNIESEPWRGSQFLALKRLTRHRLHLVECMTREKTYLVSNLYLKFSELQMLEGDDQPFCDIYGATSSSVLMEYFSPEEILDSSEEDLIAFLAKKSRNRIKDISKTADLLKKAARDSYRLDKALYEPLNVSIASSFNCIETFKREIKGLKPNAFIILQSIDGIGPVFAGGIIAEIGDITAFHSSDALAKYAGLTWKSNQSGDFDGEDTPMIKAGNRYLRYYLGEAANSMRKHNVEYGTYYRKKYNEVPKHQHKRALALTSRKFVRLVYGLLARNQLYSGVSLDTSIKDSN

SEQ ID NO: 454815 - protein, 342 aa, unidentified
MSISYVGVDLGSSKFHQVAINQAGTSTLNRELVTSEVNLVKAFADLHGEIHVHLEAGELAPWASEIIRPLVTQVVCSHPQTNAWIARDRDKCDRIDAYKLASLLRLNEFKEVHYPGEQRRRDFKTLVQHYDELTAQQARLKTKLKARLRMQGVIVSGEEVFSVRGRKAVLEQVNSTAVRTALKQLYAVLDQSIASQTEAQMLMLRAAQALPEIRIMRTAPGIGPIGACRFSAYVHTPQRFSSTRKLWKYCRLSVSHRSSNGKPLRRPRLDRMGCGRLKDVSRKAFEAALRRRDNNGFKRAYYRALETTHDATHARLTVQRKIVSTLRAMWINQTPYCDELMR

SEQ ID NO: 454816 - protein, 413 aa, unidentified
MAEETFAWFAGIDWGSEKHQACILDQQGSTVGEREFAHSGAGLAELGEWLLSIGGAASSVAIAIEVPHGPVVDTLVDLGFVVHTINPKQLDRLRDRFSVAGAKDDRRDTYVLGDGVRTDRRLFRRLHVSDPRLVELRAWSRLAEELQEERVRLSNRVHHQLWRYYPQIQKLTDDLAASWFLELWTIVPTPAKAGQLRKSTVEQLLKQHRIRRVDAETVLRTLREPAIKVADGVAEAASIHMRSLVARLRVVNRELRDAEGKLDKLCTALGETAAASEDCLQRQDVMILKSMPGIGRINLATLLCEGSGPLRSRDYGALRTLCGAAPMTKRRGKSHIVIMRYAAHVRLRNTVYHWARVATQHDPKSRSRYVALRQRGHSHGRALRGVADRLLGLACVLLRRQTLFDPQFGRPAT

SEQ ID NO: 454817 - protein, 347 aa, unidentified
MSQSNQYVGLDVSLKETSICIIDDADQIVWRSRVDSTPNAIALAVRQHAPHAVRIGLESGQLSSWLFHELKEAGLPVICVDARHAKAALSLKVNKTDANDALGLAQIMRVGWYREVTVKGRDCQAVRALLVARAQLVSQITTLKNSVRGILKTFGRVLPKGLRSQFPARVRAAIDGHPVLGAIIEPTLLVLEATRAQLLVYDRAVLQRARSDDTARQLMSAPGVGTVVALAYITGVEDPARFKRSSSVAAYFGMTPRRYQSGEVDYAGRISKCGDGMVRGLLFEAAKVLISRSARPNALKTWGEALGKRIGAKKATMAVARKLAVILHRMWTTGTTFQWNVAESLAA

SEQ ID NO: 454818 - protein, 353 aa, unidentified
MQSTATVTTIAIDLAKNVFQLALADRDLRVFRSLRLRRKEFLAFWSNYPAVQVVMEACGSAHHIGRWLSAMGHRVTLLPAQHVKVYRRRRNKTDAIDCVALLEALRAANIRPVPIKTESQQVIQMLHRARQQWQKMRTAQINLARGALREFGIAVPEGAARAVACMRAEQANAQLDPMIRGLLQSLLEEIAMLERRVADVDRQFAAASRTDVVLHKLQTLPGIGWVTASAIRASVGDIERFANARSFSAWIGMTPAQTASGDKRKLGRSKQGDTYVRTLVIQGARAVLAAAQRQRLTTRPLSAPGHWAATLADRRGFNKAAVGLANKLLRIVWATWKHDRPFDANYRPALATT

SEQ ID NO: 454819 - protein, 338 aa, unidentified
MTTGLAAGTYELFVGIDIAATTAEVATQRPGAKASRSFQIDQTPEGFNRLVNKLQATGHDPSHILVVMEATGSYWISLATRLVHDGFRVSVINPAQAHHFAKALLKRAKTDAIDAQTLAQLAMILQPEPWRPPPQIYYELQQRLAQRDDLLNLHQQVRNQLHALMQHPKVIEPVRLRMECLLSTFQLQIDEIEVEIAAALNQESAWAAAAERLQSIKGVGWVTAAWTLVTTLNFTTCDSVESLTAYAGLAPMPRQSGSSVWHRPSIGHSGNGRLRTAYYMATLTAARFNPAIKTFYSRLIAAGKPEKVARCAAARKLLHIAWAVVKKDQPFDPNYAQG

SEQ ID NO: 454820 - protein, 393 aa, unidentified
MFYLGIDIAKNTHVASLMDEKGKTVFKGFSFPNTTEGGKSLLEIVKKYSDFTDVTVGMEATGHYWLSIYSFLYDYDFHCIHVINPIQTDGWRKGTEIRKRKNDIIDSVLIADLIRYGDFVETTLSNEDLYSLRNICRMRNYLIQSAGDLKRKVICVLDQVFPEYQTIFSNTFGTTSKQLLLDYSSPSDFEELSVEDLTETLEALSRKKVGQSTAEKLINSAKNSFGVTFSKESFKFQLKLLIEQIQFIDNQVKECETKIKELMEKINSPITSIPGIGPVLGAVIISELGDIKRFDKPSKLVAFAGIDATVSQSGEFEGTHNVMSKRGSPYLRKALFQAALVASNTDPVLKAYYQKKRAEGKHHKTCIGAVSRKMCNIIYAVLKNDKPYEVPNK

SEQ ID NO: 454821 - protein, 408 aa, unidentified
MDLTPLHKRVIALDVHQAKITACSIVEHDNGRVEVTKHDFGAFKRDRRALAKWALEIRPEVVVMESTGVYWKSPFAALEAVGIIAWVVNARHVKAVPGRKTDMADAQWLATLARAGLLRASFIPPLPMRQLRLVARQRQKLVGMCSAEKNRLHKVLVDAGIRINVLVSDVHGTSARAMVKALIAGKPMHEVLDCKGRLRASREELFEALSTEQFSAVHRFVAEEITQHIEQIEQRIARLDQYLLDGLRPWQPQLKLLQTIPGIDEQGAAMLLVEIGADMSAFGSAERLASWVGICPGNNESAGKRKTGRIRKGNAWVRRLLCEFAQAAARTRCALKAKFDALAIRKGHKKSIIALAHKMLRTVYAMLANGTHYQDKEVDYEALNVQRNAPRWIRMLKKHGFIPTTASA

SEQ ID NO: 454822 - protein, 360 aa, unidentified
MRKRLSKKESWFKENSFTAEDEIHVGVDVHKVHYHVAIWHNGRIGCVYSMSSDNNKLLRDLKRIRGSLKKIVYEAGPTGYSLVRLLRSAKLPAEVVAATKTPRMVDSAGKTDRLDCQQLAQYAAKGLLTYIAIPTEQQESDRQVVRLRDQLMSKRKRVMQQIKSFLLQYGIAWPGGGWSKVVLCKLRKMDIGSELRFALDQYLDEYEFCSMKIAQTKSKLRQIFSSERHSAAIKIFKSHPGVGNIVAWEFRAEMLDITRFNQPKQVSKYLGFCPRISQSGNTCRHGPITKTGRRQLRAVLIQAAWAWHRRDPYARQIYNRLLRNTGNGKKAIVGLAKRIAIHLWRMLCDGCLYDANIVKV

SEQ ID NO: 454823 - protein, 411 aa, unidentified
MDTIVERPGALDVHKAQVTACVRTPGAGRVREAHFAEFQTTVAGLLTLRDWLAAHGVTQVTMEATGVYWKPVWAILEDDFELLLVNARHVKQVPGRKTDMSDAAWLCQLAEAGLLRASFVPPKPIRALRNLTRYRKTQIQERAREANRLHKALEDTGIKLDCVASDILGVSGRAMLDALVSGTTDPQVLADLARGRLRAKLPALREALQGRFDRMHALWIGSILAHIDFLDEQITGLTEMIAEQIAPFEKAVELLCTIPGVQRRTAETIIAEIGIDMTIFPTAKELASWAGQCPGNHQSAGKRRSGKTRNGSKWLDWALEEAALAATRSKDTYLAAQYARLRPRRGHKKALGAVKHSIIVACWHMLSTGEIYNDLGGDYFQRRDPTKTTKRLVAQLERLGHTVTLQDAKAA

SEQ ID NO: 454824 - protein, 305 aa, unidentified
MGWDVGDKFTDVCVGRPDGAIVDQQRVHTTKHSLEKQLTRYPGALVVLEVGVHSRWISDLVSCAGHAVIVANARQVQLIYKRKSKTDRSDALLLARLGRFDPALLAPVHHRTRSAQLDLACLRARDVLVSARTDLINHVRGILKPFGVRVPDCGSGAFVRHAEKVLPPELTPALAPVLACLRALEAELLRYEKQVEHLATVSYPETTRVSQVSGVGPITALAFVLTIEDASRFTVSRTVGRFVGLTPAKDQSGESDPEKHISVEEVLGRAAITHRNKSSAGSSQASCPPTAFVLANAHVEAARRQ

SEQ ID NO: 454825 - protein, 384 aa, unidentified
MDVHTSNYTLCSLDPGYGVEKDNYFAEVQFTNNFVTNVVNYVSNLKKKLKDCEFVCGYEAGCLGYSTYKDLTKVGIKCVIMAPSTMAVQKGGKKVKNDRRDARVIAQCLAYQTYKEVYVLSEHDEAVRGYLRMRDSHNKALKRIKQQIIAFCTGHGLFSPTKSNWTVAHLKWLKDLKFNDPVEQEILNEYLSSLTFLSDKIKAMDVRIEELASEKQYCENVKKLRCIKGIETNVALTLLAEIGDFNRFSKPTDFASYLGLIPGEQSSGDKVRGTGITKAGNSTLRRKLTESAKGYWRGRIGIKSATFKKLEKELPKEVTEYALKANTRLQRKFFNMTHVKGKNMNVAASACAREMACFVWGLITNHYEKAPAVPKTDEELLDLN

SEQ ID NO: 454826 - protein, 386 aa, unidentified
MHVVADRSAAPAAIRTDLGAIFVSLELSKSIWLITSLSPGSGEKMSKHAVRGGDITGLLARFAQLQDKAQVRTGRHFALVVIQEAGLDGFWIHRILEAEGIETHVVDAASIATSRRRRRAKTDKIDGEALVRALLAYKRGEPRVCAMVRVPSVKEEDHRRVGRERKVLVRERTCHVNRIKGLLFAQGITGYEPLRRDRRHRLEELRTGDGRALPEHLKGQIRRELDRLELVIAQIKEVQAERDALLAIEVAETPAATLLDLKGIGPECAAILYAEGLFRHFDNRRQVAAYAGLAPTPWQSGSVQHEQGVSKAGNPRLRTTMIELAWLWLRNQPGSALTRWFHERVIRNQGRLKKTAIVALARKLLVALWKYVTAGVVIEGSVMKAV

SEQ ID NO: 454827 - protein, 311 aa, unidentified
MTDDTIGVDISKATLDIHRLSDGKIMSFSNCPAGFRALAKFCAQTAVIRVVYEATGAYHSGLERALGVHLPLVKVNPLQARRFAQAQGMRVKTDAVDAKMLAVMGDAFALEPDEPATKIQHDLRELRAFRSGLIKDRTRIMSRLKTQTLSITCRQSKARLAHVDKQIAEIDAEVDRLINSNDRLAHSMKILRSIPGIGAVCASTILIEMPEIGSMDRKQVACLTGVAPMTRQSGQWRGKSFIQGGRKVVRNALYMPALVAMRHNPDLKAKYQAMIKAGKPPKVAITVLMRKLIELANALIKANRNWVKKEA

SEQ ID NO: 454828 - protein, 436 aa, unidentified
MSQAGTLSLAEVHVEALSHLQFTAYVGIDWADTKHDICLQAAGDTEHRFDCIPHQAARIDEWAKALHQRYGGPIAVALELAKGPIVAALQKYDFFVLFPINPSTLAKYRVAFKPSRAKDDPTDAELALDLLFRHPERFTPLKPQSAAMRSLLSLIEQRRELVNDKTRFTNRLCNTLKQYYPQALDWFEQTDTVLFCDFLNRWPTLMAVKRARKTTLEAFFHAHNGRRTKLIKARLESIRVATPLTEDPGIVAPCRLHVLALVEQLRTTLTAINLFDEEIAAVASTLPDYALFQSLPGAGPHLAPRLLAAFGEQRDRFQGAHELQKYAGIAPVTERSGKKSWVHWRWQCPTFLRQTFVEWAGQTINKSFWAGAYYRQQRAKGSSYQAAVRALAFKWIRILYRCWQTRTPYDESTYLNALRERGSSLLQNLDLQVQNA

SEQ ID NO: 454829 - protein, 339 aa, unidentified
MRTYAGIDLHSSNCYLAVIDEQQRRLFSKRLPNSLDHILAALQPFKDQLAGVVVESTYNWYWLVDGLQEAGYRVHLANPSAIRQYEGLKHTDDQSDAFWLAQQLLLGILPQGYIYPKSERPTRDLLRRRSLFVGHRTAHILSLQSMVQRCCGHGISANEIKKLTLPEASALFSDPQLGLTARFQVETIGFLSQQIRSIEKAVLPQVKLRPEFEILLTIPGIGQILGLTIMLEVGDIRRFAKAGNYASYCRCVKSQKLSDTKKKGEGNRKNGNRYLSWAYVEAANFTIRHSPRAKSFYQRKCAKTKNVVAIKALANKLARASFYILRDQCAFDEKRLYGG

SEQ ID NO: 454830 - protein, 480 aa, unidentified
MPDSIFKTTGTNLKDVLASHDLGEILYTSIDVAKYNHSAMVVNFFGDVIIPKFDFPYNDHGINFLKKKMQIAQKQTQATKLFLGLESTGHYHENLVASLTASGYDVQVIRPIDSGPAPGCDRGNERDNVHAKTDAIDLAAIAKVIISNKGTRSHMPDTIYYNLQRASRTHRQLTWQETRTKNIITFVLDKTFTGLWNPKDSIFSDKWGKASLLFVENYSTPQQATRLGVKRLADFFRKHDTKLGMDTAKKIIQLAKIAPARPLEVMESDIKAIKVHIQVLRTLTSAILEQKKQMVKFLVQTPGTYLLSVPGIGVVYASDFTAEVEDVHRFAHAKQIISLAGTAPRKHQSGEVDKTNLSTSHKGKNPLRVTVNQIALSLNSHCPEYHSYYSRKHFQYKDAPGKARTATANKFIKLAFAIMKNETLYYPRTGNPLMTHEEYYQGIWDKMKPKLTPYLCDDIPQDNYLTRIQHELKEKYGIKT

SEQ ID NO: 454831 - protein, 374 aa, unidentified
MQSQTKVLKNADFTNQNFYIGLDVHKRQWTVTFRLDGTYIKTFTMEPSPKVLIKHLQAIYPNGNYFSVYEAGFCGTSHHEELCALGIKNIIMNPADLPMTHKHKTNQTDHHDSRALAEYLEAGKLKPIHIFSREQQELRSLCRLRNRNRRDVTRCKNRIKGLLMYYGISVPLEYQEKKCWSKRFVNWFKQQQLTTVAGTSSLQFLIEDLEYHRTKLLAVLRKIKQLLKERFKEEWDLLLSIPGIGPLNVVTLLSEIGDIKRFITAARFANYLGLLPSEASSDETIIIKGINPRCNKYLRSMLVEAAWVAIRTSPSLLAYYKKHSYKDSNKAIIKVTRKLAMIIRGVWLNKEPYKEGYISTKSKDLLDNNKPNAA

SEQ ID NO: 454832 - protein, 368 aa, unidentified
MNTVKFIGMDVHKKTITIAIADAGREDQPRSYGTIANDLNALDKFCRKLISTSTQARFVYEAGPCGYGIYRHLIQKGFDCTVAAPSMIPKKSGDRIKNDRRDAINLARLHRSGELTAVFVPNEQDEAIRDLTRAREDAVIATRKAKQRLKAFLLRNRLIFNGGSKWSKAFFNWLSDIAMPYPAQQIVLQEYIDTVLESQNRVNRLTDQTRQLVPEWRLAPMVFALQAARGVSMVTAVTVLAELGDLTRFKKPTQLMAYLGLIPSENSSGPRIKRGGITKTGNSHVRRTLIEAAWSYRMQARVSRVLLKRQRNLSDQVCQIAWKAQLRLCARYRRLVAKGKSKQKVVTAIARELCAFLWAIAKQVPIAA

SEQ ID NO: 454833 - protein, 368 aa, unidentified
MDNDITAFVGLDVHQGSIAVAVADPGRAAPRFVGTTGPQLAQLLKALSHLGQPQQTLIAYEAGPCGYGLARQLGAHGYRCEVIAVAKMPRKPGERIKTDRRDALILAGYLRAAQLTPVVIPDERDEAIRDLSRAREDAVRARLKARQQLKAMLLRHGHRYTGKSSWTAAHERYLAQVRFDHPAQDIAYAEYRSAVREADERAERITAALREQVARWRWCRVVSALMALRGIEFVAAVTLIAELGDLARFAHPKRLMSYLGLVPSEYSTGESRVQGKITKTGNGHARRILIESAWSYRLPARMSRELLVRNEGQPKAVRDIAWRAQLRLCSRFRRLQARGLHQNKTCAAIARELAGFVWDIARQVPPAS

SEQ ID NO: 454834 - protein, 400 aa, unidentified
MKGPIVSIDVSNGNSHFQCFIQRGTKMGKVHRIQHTVEGFRFLKSKVEELAMKTKEEVVVVYEATGVYTTPLQRFLEKSEIKQYQISPLQSAKQRKTEIHNKKTDKKDPESIAEVYYAKELRKYEREADIYHQLRTANRVYEDCLEHLRKYKVTFQSHLSIVFPGYMKLFQDGYSPISLQLLEMSPHPDRLKNKQPETVAKKLNKHTDHSFEVCLKNAKRVIEFANKTYPGCDKEDPWVAVLVEDIHQLQAMIEQAEAKLDKIIKLAKTTPYYFIILSIDGIGPNLASRIIAEFGDISKFKTRGAMAAYVGNDPNRAESGDIDGYHLSISKKGNKRLRCILYLAVTCSIRSKKENPINAFYQKKRQQSTPLKSKAAKVACITKLIRTIHGMCKNGTEFTS

SEQ ID NO: 454835 - protein, 337 aa, unidentified
MEYFAGLDVSMEETHICVVDRDGVVMHEAMAMSTPEAIQAALAKAPACRRVVFETGRMAPMLYHGLSKHGVPVICIESRQAYQALKSLVTHKTDRNDARGLAHLSRTGFFKPVHVKSLPSHAVRSLIIARKKLVGQRVTLENQIRGLAVVFGVRLPRGLSPAFIRQAIDTSDSIDGLSGAMRGLIAARSAVLGAIAAINGDMKRLVRASDACRRLMTIPGVGQLTALAFTAAIDDPERFRRSRDIGPYLGLVPRRYQSGEIDYTGSISKCGDPRMRTLLYEAANVMLTRYKGPLKLKDWALAIAKRSTMRKARIALARRIAIIMHAMLRHGTEFKPA

SEQ ID NO: 454836 - protein, 344 aa, unidentified
MRYVGLDLHAKQSTLAILDPGDPARTAEGTRPRMEVGTVKGSLKRVLEAVARIKGPFEICFEASNGYGVVYDELAKVARRVVVAHPGHLRLIYRSKDKHDRGDAKKLAKLLYAGLVPEVWVPRREVRRWRHLIVHRHRLVAERTRAKNAARALLRSLAVEAPKRLWTKRNLRWLEAVAFEDPCDALIRDELVARIRYLDGAIRQAEKRLDAIASEHPGVALVRTIPGVGPRTAEALVAWIDDPRRFSHSKAIGKYFGLVPCEDSSGGRTRQGHITKAGPALVRRVLNQAAWRARALSPRVCAFFERVRGGDRDRGKIAIVATMHYVARAALAMLRTGEAWREES

SEQ ID NO: 454837 - protein, 407 aa, unidentified
MLEVKVERCAGIDVHKKFVMVCVLIGLAHQKPASEVRRFGTSVPELERLRAWLLEKSCTEVVMESTGSYWKPVFNILERNLKVILANAEKVKALRGKKTDPKDCRWLAGLLRHGLVQASFIPPRDIRELRDLTRRRRTLMQQGASERNRVQKILEDANVKIGNVLSNVFGMSGQAMLEALLDKDMTAEEMADLAQGRLRPKIPQIIEALDGHTMRDHHRKLLRQILKHMAFIEDMVAELDNEIWHKLKPYDQEVQLACSVPGIGRDAAASILAEIGPDMSDEGPFSGCHQLASWAGICPGNNESGGKRKSGRTRKANRWLRATLAQTAWAGIRKKNSVFRDRYQRLKPRRGPQRAATAVAHAQLIAIFWALRNRVPYQERVQQLDDRRRDAMIHHHLNRLKELGYPA

SEQ ID NO: 454838 - protein, 353 aa, unidentified
MDKITRVGVDLAKNVMQVHAVDDAGRVVVRKAIARERFVSWFANLEPCLIAMEACSAAHYWARKLRALGHDVRLIPPQFVAPYRKGGVHVKNDALDAEATCEAASRPHMRFVPVKSPAQQSVLVLHRMRTGFVEERTALVNRLRGLLAEFGVFLPQGIDKLRKHFVDRVEDGNNDLAGPARQALMHGWTQWQALDEEILWFDRQIAEHATQDPQAQRCMDVCGVGRLTASAAVATVVDARQFKNGRQMAAWLGLVPSQKSSGGKHRLGRITKQGDDYLRTLLHQGARSAVATAHQRNDRLSRWIVQLQARVGYYKTLVAVANKHARILWAVLAKGEQFDPSYAPARTRTAAGA

SEQ ID NO: 454839 - protein, 429 aa, unidentified
MNYNTQNAKIASITEKTLIVGIDVGSETHYARAFNWRNYEYSKKPLAFSNDEAGFSSFKDWMDDIAEKHGMKVVIPGMEPTGHYWLNLGAYLQEQGMKPVHVNPHHVKKSKELDDNNPSKNDRKDPKTIAGLVNEGRFSYPYIPTGIYAEIRNLSNLRIQTQEEITRIKNRIARWFSIYFPEIKDVYRNPDAVSGLMVIKQAPLPCDIKELGVDGVNKIWRDARLKGAGIKRATTLVTAAEHSIGNTEAPRSARKEIRNLLNDYEIYKNRMDELMEEIRETLSEIPYIDKLMEINGIGIKTVSCFIAEVGDIGRFDNPKQVQKLAGYAIVADSSGKHNGESRISHRGRKRLRYALYEATISVIGKNKEFKEIHSYYRTREKNPLKKMQSVIAVACKLIRIFYTILTKGVDYDGQKMLTDIVRPEMQLAA

SEQ ID NO: 454840 - protein, 344 aa, unidentified
MERYLGMDVHAESCSFCVLEASGKELRRDVVETNGQALIQYLKQFSGGLHLCYEESEWAGWLWEILSPHVSELAVLQAERKKGSKSDAGDARTLAERIRTGQVGTPIFKAPKRFAKLRELAQVYGLLTRDVVRAKNRLRSRFRRRGVRCSGEEVYSFERRKRRLAELPAAMRPAVELLGVELDCLEELKAETEKAMVEASHAAPISRILETIPGLGPVRVAQILPIVVTPHRFRTKRQFWAYCGFGVVMHSSGDWVRRDGGWVRDRVAQTRGLNFNFHRTLKYTFKGAATTVIAHARPNPFREAYDRLCAEGTKPNLAKLTVARKIAATTLAMWKSGEEYDPKR

SEQ ID NO: 454841 - protein, 364 aa, unidentified
MNSVNNKLKIINTHVKNINNSSNFSNINTFIGIDVGKFFIDVYFSLTGEYFLSIENNETSIKKLIAEIKKSFKTYNNKNKTNFSIENTLTVIDLTGNYEIICRDTFYNNGFKNIHLADGRKIKCFRQSKKLSTAKTDKSDAQMLSLYGEQNLDNLIFYKKEEIDNDLKELQKLQLRIDDLKYLLVQEKNRFKAPSIPDSIKKNVGEMLDFIEIQIEKLEKDTLNIINSNEELKTKFNILKNQHGIGDITAKHLITFLPELGKINRNKISALSGTAPIARDSGTIKGYRTTKGCGRKNIKHTLFMSMLSILRKKDSHLQYFYNSLINKGKTKKSAYVACMRKFIIYLRGLMKKDFYKNVSYGEKI

SEQ ID NO: 454842 - protein, 498 aa, unidentified
MAKARKSTFERLTGKNMNRKQRRELGRKVSSADPGLTIVNPHAAGIDVGNDSHYVAVPPDRDAAPVQEFGGWTADLVRMCEWLQACRIETVAMQATGVYWIPLYDQLKQHGFRVMVVNAQYTKNAERTCRVPGRKTDVQESQWVMKLHAYGLLRNSFQLEGDMEKVRTIWRLRDRHVKEAGRAVQHTERACRMQKALTKMNLQLANVISDISGVSGQAILGAILSGERDPYKLADLKHERVQASREEVARSLEGNWREDAARAFRVLFELQQAVDSYQFAHRQMQQCDGQLRQYLGALPERSLEESGASAEEPAQPGKKVRQAKPRGNAPGFDLKSELTRIAGVDLTAIEGIDVMTAQTILAEIGTDLSAFATEKQFVSWLGLTPSKDISGGKVIRSGRRKVQNRVAMSLRMAASTLRLSRSYLGARYRYLCNKLPSKASAVKAMARYLGVLVYRMLTKGQAWVDQGAARFEQRRKEWEVTALTKRAEAQGFKLVPIQ

SEQ ID NO: 454843 - protein, 346 aa, unidentified
MKYYAGIDVSLESASVCVVDECGLIVREGKVASEPEALIGWLVKPGSKLERIGLEAGPLSQWLHAGLSQADLKVELLETRHVRAAFKAMSVKTDRKDARGIAQLMRLGWYRAVHCKSLPAQEMRALLVARKLLQKQLHAVEMSLRGILRNFGAKVGQTTARGFEGRVRTLVEGQPTLQTVADALLASRTVLVRELAALEKRVRSAARHDDRVKLMMTAPGVGSIVGLNYVSAIDVPQRFRSSRSVGPHFGMTPTRYQSGETDISGRISKVGDGSVRSALYEAAHIILTKPVKNAGALKRWALAIAKRAGKKKAKVALARKLAVILHRMWMDGTPFDPTKAVGAAAA

SEQ ID NO: 454844 - protein, 555 aa, unidentified
MKKSTALHRITAEMAVNAGTFFISALLPMKGGKMASFDNNTMRGFRKEGKYTSSELSSSTLDDGTKVVTAPITNIKRRICGGIDVHKSVLMACACVTDKETLSAVFYVRQFTSSNSEIRRMAEWFAEYGVKDVCMESTGKYWIPVYDILEQNGMKPVLTHPKYVKQAKGRKTDFRDAIHIANLFRMDLVVASFIPPADIRDLRELCRYRLKLTYIRTSEKNRFQNSMTISKIRLDSVFTDPFGKSASRIMEYLINTPEDKIQDEKILSLVDRRVKASSEEILDSIHGYEFIGVQRDKLEIISKHIDDVNKCIDLIDKKLDYYRFKYASIINHLCTIPGVSTESALYILGEIGADMSVWNDSKSLASWAGLSPANNESAGKKKSTKIGKGGHYLKPLLVQCALASIKSTKKQPYFFRKYQTLKKRRGHKKAVIAIARKMLVSIYHMIKEDKDFLPIDYEQVMEQKQNDRELNLKNVILFLGERGVDDKVIRMIESQCSKEELSEGKAAETKLKKTAKEKQPESNTTAKPVKKRGSRKSSTRTKKETPSVQSSAATA

SEQ ID NO: 454845 - protein, 372 aa, unidentified
MAQCIIVGCDLHTKSLLLKYAADREAPAQASFANTRRERARMLGLLRTQAARHRAARVVFVYEASSLGFGLYDEVTAAGFACFVLAPHRIARSWKQRAHKTDERDAQLLFELARAHVLAGNDLPAVWVPDGQTRDDREITRARIDASQKLAGVKTQVQSLVKRHGIERPVRTGKSWTKAFRAWLDSLVGSRHLGTGASVALTTLLAQMRSYEQEVEYLDEHLARLAAEPRHAPAVAAMTRYRGVGLQVALTFLVELGDMRRFANRRQVASYLGLVPRSHESGEANDRKGHITHQGPPRVRKLLCQAVHTWVRWDPRAAAEYGRLVARRKKPCKKIATVAMMRRLGIRLWHRALDGQRLAAEAHASRKETCAS

SEQ ID NO: 454846 - protein, 340 aa, unidentified
MNRIGLDAHSASCTMAVVNEAGKVVKCVSRPTSARELIEMVGAVKGPKELVVEESPVAQWVKDTLEPYVDRLVVCDPRRNAWIAKDDYNDDKTSAVKLAQLLRGGYIQEVVHLDGSQAQLRRAFCHYADLNEQLTRFKNKLKAIYRQVGMSPKGDAIYEEGGHGEWLDRLQEHPASKSQAGQLFELIDTLGKMKQDSLKAMLVVARQDKGHGLLLTIPGIGPVLACGYVALIGTPHRFSRKNKLWRYASLGNTLHTSDDVVYQDRPSKSGNRLLKWVVTQHFMGAVERARRENVFTRRYARCIESGLSRQVARRHVCRSLLSVVRAVWMKGEAYRETPLS

SEQ ID NO: 454847 - protein, 475 aa, unidentified
MNIKGTKKKNQVVTVNIFEQQELLKKAEVIRENLTASTWRELETNGKFGKNEKRSFISDDMLILGCDIGSDTHYVRAIDTRGRELSKSAFPFSNTLEGFQSLMDWATKIAASNDKKQIILGLEPTGHYWFCLAAWLIGNGISVVQVNPYAVKQTKEVEDNSQLKDDRKDPKLIANLEKDGNFGMPYLPEKLYADIRRLSMLRDQINEDRIRDLNRLHREMKIYFPEYKDAFGKIDGAFCLEVLKVAPFPEDLVTLGVEGIRQIWHEAKLRGRGYVNATSIFENAKKSIGIQDGAESSKVAVKWLVHRMLESNEQLADIESRLHQMCMDIPYAENILAISGIGKNTLSGILAEMGDISRFDDVKEIQKLSGLGLVACSSGKHKGETKISHRGRKRLRYWLFQAAKSAVAHADEFKELHAYYTTRKENPLKKKQSLIVIACKILRVIFAILTKGTTYDPKKMLGDIVRPNEQSVQVA

SEQ ID NO: 454848 - protein, 360 aa, unidentified
MNSIGVDLHKETVVIVVLNDKGEIVERKTFATKCKNTIKAYFSSYGLQSQVAFESVGFYQWFWELLKPVVGKLYLADPVGIRAHAGRKAKTDRNDALLIAQLLHEGKLPTAYVPEEPVASLRKIVRLRHGIAKDLASARKSLRWISLKTNLPGPKILFSDNAQKWMLAQDEKFSECDRKAARLKLDIIISLERTLNDIEREIYDYIRKFPQMEKLWNLLKSIPGIGDIVAATIIAETGDITRFDNADQLSSYAGLCPRVSQSGESIHHGHISKMGPPLLRWVLQQAAWVAIRCSDEARRIFNRISRKAGKKKAATAMARKLLIYAWSVARRNQPFRWESSTAKKETENKTENTEVWCYQV

SEQ ID NO: 454849 - protein, 340 aa, unidentified
MAIVGGLDLHRKQITFDVLDTVSGQVRRGRISPADRQLFRGWLAGLAGQHVELAVEGCTGWRFVIEECQAAGVVAHLAEPAEVAGLRGRRRHAKTDRIDARHLRDLLLEGRLPECWIPPQLVLETRAKVRLYKDLADQRTGWQQRMHATLYHLGAPAQRDLLSGDRDRLARIEGLSPAARQAITVALSMIEALDAQIEPLRAELIGFARRQPGCRAIAAEYGIGALTSVVIWSEMGDARRFTHSRDAVRHAGLDITVYSSDSKRSPGRLSRQGSPLLRWALYEAARCSARTASPDHDYYRQVADRLGGQRAALSVARKLARRCHHRLRALGEHALAPPPS

SEQ ID NO: 454850 - protein, 338 aa, unidentified
MYYTGIDLHKFTSYLTTVDSIGIIVKQQNIKNVDHNFVQYFKSLGGKHMATVESTMTWYWLDDLLSSIKIPLVLAHAKYVKAIAYAKVKTDKVDSHILAQLLRMDYIPAAHKISNDKRVLRDALRARLKIVQRHTGITNSMHLLLAKYNYSSHEELGDIARYQYEQLSEVEALLKEQILDLEKQLYPDLIPDEDIQRLLWIPGIGKMNAFTILLEIDDINRFEDVKHFFSYCRLVPSARNSAGKIKQRSSKDGNRYLKSVFTDAATHAVQYYPVIRKWYNSKLRKKNKFVAKNILAKEIARIVFYTLKYKSDYNNKFKGKDLEHTKSLQWPRVVSPVT

SEQ ID NO: 454851 - protein, 331 aa, unidentified
MKRLNYVGVDVSAKTITMIIDQQGKRTEPLDLPNDARGHKKLIGTITRSRSHARVVLEATGVYSLNLSLALHRADRVEVMVANPRAVNQFAEAYMRRSKTDSLDARILLEFAMRMDFKVWSPPERHILDLRAISRRIEGMIKTATQEKNRLHAADRFEEMTDVVRADIEDNLEHLKSRIARLRSQALELIDEHPHLARSFGHITSVKGIATAAGIQILAELSVLPSDMNVRHWVAHAGIDPRHFQSGTSVNKPARISRRGNAHLRNALFMPALVAVQYEPHVKAFYQKLVARGKTKMQANVAVMRKLLHAIYGMLKHDRDFDGENFYMIGT

SEQ ID NO: 454852 - protein, 348 aa, unidentified
MTASHYIGFDVHKKTISYCVKTAAGEIVEEGCTPAERGALRQWAAARPQPWRGAMEATLFSGWIYDTLKPYGEQLEMAHPAKMKAISAGKKKSDTIDARTIADLVRCNLLPACYVAPPRIRELRRLLRYRSLVVSEAVRMKNKMAGLLMETGAAYVKEKLHRKKYFARLLEELEEVPESVIDLLRLSRGALEMFESTQKRLVRELLADPELTQRAERLMTIPAVGEITALTWALEVGDPQRFRSSSDAMSYCGLTAALKSSAGKQQRGPISKQRNHWLQTTLIEAAKLAPRWNPQLAALHARESERGNRNRATLAVARKLVAYLLAVDKSCQAFQVRAPSEEPTPKAS

SEQ ID NO: 454853 - protein, 386 aa, unidentified
MRDTTFIPQEYDVFAGLDVSKKSIAATFTSQQGFIRSLQMPHSVEYLLNHVRKHFANQKIAFVYEAGPTGYGLYDGLAAHGYSCMIAAPSMIPRAPGHRVKTNRLDSRGLSESLRGGQLKSIHVPSPVYRELRHLTQLRDTMVRQAAAHKQRIKALLLLEGIDFPPAAAGSQWTLRVKAQLRKLKCSRTVRFKLDQLLDTLEFSEKQVVNSTKEIGRFCKEDAELSQSIAYLMSIPGIGSIVASQLLARMGDWREIDNVRQLGSFLGLVPTENSTGDRVDRGSITRLGDGRLRSKLIQAAWSAIRQDTELREFYRSVCRRNPRGKGARIAIVAVARKLSTRIYAVLKNQRPYIVREQVHSAPLTQEETSPQGTTRRCAEPGETDDS

SEQ ID NO: 454854 - protein, 371 aa, unidentified
MREGGIKSTCLSLTIKLLFMLKYSLGIDISKKDFHACLSVIDKNQQVKVKASRKFENQETGFKDVLLWISKNKKEADVPLVIVMEATGVYYEACAWFLFQAGFAVSVVLPNKAKKYMQAIGLKTKNDKIDAGGLARMGAEQCLEQWQPMDDFFFNLRALTRHHQSLHELKTNVGNQLHADEHSIYSNKKVMAQLKKLIVTIDKEIKEIEQEIHKQLYIKPELSEKVKHIVAVKGIGELTVATILGETNGFALFKSIPQLISFAGYDIVENQSGNRAGKTRISKKGNSHIRRILYMPALSVVRYDPAGFKIFFDRILSRHNLKMKAYVAVQKKLLVLIYTLWRKNEAFKPGIQNKQNTSGNEETELSFALAQ

SEQ ID NO: 454855 - protein, 414 aa, unidentified
MKQQEVAAWIGLDWADKKHSIHLQIRNGKPEHQMLDQKPDVIHEWVAELRQRFQGQRVAIAIEQRKGAVVHALMMYDFIMLYPINPKALARYREAFRTSGAKDDPSDSELLLDLVSKHGDKLRSWVPDTVEARKLQLLCEQRRKIVNHRVALSNRITSLLKQYFPQALDWVGDVASIQACDFLSNWPSLSAVQRARKETLRKFYRQHNCRKTSVIDERISQISNAVPLTTDSAIIEPLSLSVQIYAAQLRSLIRAVQQFDKQIAETFAQHRDHDIFDSFPGAGQVCAPRLAAAFGTDRSRWQSAVEMQSHSGIAPVTERSGDSKWIHHRLACPKFIKQTFHEFADQSIRFSNWARAYYDQMRSRGKEHHAALRALAYKWIRILFRCWKDRTPYNEEKYIKSLLQRGSALGKNFS

SEQ ID NO: 454856 - protein, 468 aa, unidentified
MKSYYMGIDVSKGYADIAVLEESGGVCSCSGRHDDTPDGHNAVKGILEKLLGSEEEVSVVAGVESSGGLERNWLKMLKGQVTKVYLLNPLAVQMHLKKDLHRNVTDAQSAKGIAFYLRDGMRAKNMPYESSGLEGQVALYRCLRNATGRAAEMKNELQNLLPRVQPELVQFCRQGIPGWALSLLKAYPTAPGLAKAKAVKVAKIPFITLERAASLIENAKKSVASQDDVHTGMAVSFLSGELLAAEERLKEVKQMLCDELKDDVGVKIIQSIPGIGLWSAVCLRLEIGDIERFPTPECLVAYAGLDPRIHQSGDSERHCGISRRGRRQIRAILYLAALTAIRCNPVIRGFYCRLKEAGKKSMVALVACMRKLLYIIYGCWISGRDFDPDHQNKILLARRRGGAPDRESNNQRNTAPTPSLSLNAPISWREAKKRKAKALPQTRMTRDLRGLGSAFQIHCNTSDIKGTK

SEQ ID NO: 454857 - protein, 368 aa, unidentified
MENIGVVEGRRQEGLPMPKRPPEGTLVWMAIDISRSKAVYCLRWEGSEQRRLSTPLGIEHVRAVVEHYRGCQLHVAYEACGFGYELAWWLQQHGVAVSVIAPSRVERAPGLQVKTDRVDVGKLARKLEKGDLKAIYIPTRTIHEQRQIGRTYAQSLKERKRAQVRIRSLLQEQGRLGPLPGAGWTAYTAWLEAQPLPEPVRLCVQVHQQLRAVAALQAKRMKAELYTLAQSAAYRPLVAALRAQSGVGWHSAIRLVLELGDIDRFPTTDALPHYLGLTPSQYSSGELDHRGHTLKCGPGFLRALLLQCAWSAVRQGRDLDLKTRFEMLAPRVGRKRAIVAVARKLAIKLRRRWRQHLLASRPADAVAV

SEQ ID NO: 454858 - protein, 341 aa, unidentified
MGQVSTIGSDIAKRVFQAHGADASGRVVFRKRLMRAKLLAFFAAQPPCTVAMEACAGAHHWAREIGKLGHVVRLIPPAYVKPYVKRQKNDTADAEAICEAAQRPSMRFVPVKSEEQQANGVVFRARDLLVRQRTRCINALRGHLAEYGYVIPQGITHADAVIAHIEDPAFSVPESARAILTVLVATFRALEAQVQVLDAEITRRAKADPVARRLMTIPGIGPIAATAITALVPAPEGFRAGRDFAAWLGLVPLQRSTGGKQKLGAISKMGERTIRRLLILGASAVVRWAGQRGAPAGSWLAGMLARKPKMLVTVALANKTARIVWALLVKGGVYRAPAPAA

SEQ ID NO: 454859 - protein, 418 aa, unidentified
MSRVDSNAVLSVVHHHCCGLDIHKDKVSAALITTHEDGMVEESIYEFGTFTEDLYRLKDWVLEHGCHVVAMESTGVYWRPVHNVLEDSCQVILVNARHVKHLPGRKTDVSDSRWLAGLLRHGLLKGSFIPERHVRQWRDLSRLRKTFVESLADYKRRVHKLLECANIKIDSVASDLFGVTGRNLMDLLVSGEEITLEAVLRCTRGRLKGKEDELFKSIKGFFTEHHRFQLESIRTLIEGVEAQIRRVHERLSSLLSDRREKIHRLMEIPGINDVSAHALLSEIGDTLDQFETAASLASWAGLCPGNNESAGKRHSGRSPVKGGHLKTIMIEVAWGAIKKKGSYYREKYYGLRARKGAKKAIVAVAHRILKAVFHVLKFDRPYQELGEAYLIQLNNKARLHSLHKQSAKLGYTLVPAEV

SEQ ID NO: 454860 - protein, 321 aa, unidentified
MYTFVEDKPIKKKLRRAELLAFFANYPTSLIGIEACGSAHHWARELTKLGHEVILLNTRFVKSFVIGNKNDFNDAAAIFDAVTRPNRRIAAIKTIEQQDIQLVHNIRQGLVGNRTALVNQIRGLLSERGIIIPQGINRVREQLTLILEDAENDLTVLSREVFAEQYENLRGLDDEIKEQDRRISRLCNNNELSKRFLEVPGIGPMTASIIASDIGNGKGYPSSRDYAASLGVVPRQHSSGGKFVYLGISKRGNKYIRTLLIHGARSVLKNSGKKTDKLSLWLQSLVERRGFNKAAVALANKNARILWAMATQEKEYNALLV

SEQ ID NO: 454861 - protein, 334 aa, unidentified
MTIGLDVAKNVFQVHGVDQEGKVVLRKRLRRHEVLMFFGQLPPCLIGVEACSASHHWARELAALGHQVKMMPARYVKPYVQRGKNDALDAQAICEAVSRPTMRFAAIKTVGQQAVLTLHRSREILVKQETMLANLIRGCLGEFGVVVPLGIRRVPELIRVIKDETDHRVPLEARIAMTVVADQFCDLHRRIKAIERAIQVWHRSNDTSRRLATIPGVGTITASAVVATIGNPKEFKSARHFAAFLGLTPKEHSTGGRQRLGRISKQGDAYIRRLLILGATSLVRYARGAGGSAWAKQLLARRPTRIVTVALANKAARIIWALLTRGSVYRPASA

SEQ ID NO: 454862 - protein, 330 aa, unidentified
MKKWSFTLGVDVSKNTLDIHCAELNQYIRINNGTEGFLQLIKWCKNLKIDLNMSFVVMEYTGGYEYKFIQFCESHTILYTRIPGLTIKNSLGITRGKNDKVDASRISQYGDEKHKSLKADKPLNPVIMSLKELLSFRKRLVRENAGYMATIKERRHMYGENSKDIIVKKLLQKQKANIRDIQAIELEMMKIVQQDETINTNYNLITSIKGIGKVNGLMTIAYTENFTSFNNPRSYAVYVGVIPFDHSSGTSIKGRKRVSHIANKELKQELNQAARSAMEWDKEMRNYGENKLKTKCYKIVLNNIKFKLILRMFAVVKKGEMYVENYQKAA

SEQ ID NO: 454863 - protein, 385 aa, unidentified
MRSELFIPAQYEVFAGLDVAKRSISVTFTNHQGFIRSLRMPYSVEHLLNHVRKHFPEQKVAFAYKAGPTGYGLYDGLVAQAYPCLIAAPSMLPKAPGQRVKTNRLDSRGLSENLRGGQLKSIHVPSPLYRELRHLTQLRATFVSEVVAMKLRLKSLLLLEGSPFPPAPPGSQGSFRVKKTLRELPCAMTVRFKLEQLLDSLEFNEQQILKTTKESRRFCQQDPELSQCIRYVMSVSGIGWIVASQLLARIGDWRELKNIRQLAGLLGLVPTENSTGERTERGSITHTAEGRLRSQLIQASWSAIRQDGELREFFRSVCKTPARHLASRVAIVAVARKRRGRISVVLMKHRPYVVRQQIHSAPLTQEETGPQGTTRRPAEPGEKHS

SEQ ID NO: 454864 - protein, 367 aa, unidentified
MKKISTVAGKQSRNISQPKLTIGLDLGDRNSWYCMVDEDGQIRLEQRVRTNAQGLQEVFGALPRCRIALETGTHSPWISRLLNGWGHEVIVANARRVRLIGESRKKDDRLDAQTLARLARIDPKLLCPVRHRSAQAQADLTVIRARAGLVRARTALVNTVRGLAKSYGERLRGCNVRNMNPEKAEGLSPELQAALQPLLAALESLSEQIAEYNERIEHLAQESYPQVALLKQIKGVGTLIALTYMLTLEDPHRFRQSRDVGCYLGLQPGRRNSGQSEPQMHISKEGDPYLRTLLVQGAQHILGPFGVDCDLRRWGLKLAERGGKSGKKRAIIATARKLAVLLHRLWVSGEVYEPLHNSNQREMPAAA

SEQ ID NO: 454865 - protein, 411 aa, unidentified
MEKVYDNCCGIDVHKKLIVACLICGRKQEIREFGATTRELLDLADWLTQKGCQMVAMESTASYWKPLYNILESCDLQAMVVNARHMKAVPGRKTDVKDAAWIADLLQHGLLQASFIPDKDQRELRELVRYRKSLVGEKTRELNRLQKMLEGANIKLSGTVSDINGKSARNILEYIIAGNTFDECKFDEMFEKKQIAHNLKAPREQIIEDLNGVMSPLQRRMMKELLKHLDELNVHIKNLDDEIDNFMKPEEKQASEAIQDITGIADTSAQGIISVIGTDMERFPSDRHISSWAGLCPGDNESAKKRKSGRTRKGNALLRTTLITCAHAAVKNKKSYFYAQFMRISAHRGKKRAYVAVAHSMLIAIYHILKDGVKFVDLGAEYYNQFNKERKINAYLKKLKALGWEGSIAAA

SEQ ID NO: 454866 - protein, 340 aa, unidentified
MEKASMIGLDIAKNVFEVHGRSAAGAVVVRRSLKRGQVEKFFAKLAPALIGLEACGSAHHWARRLGKLGHEVRLMPPAYVKPYVKRNKSDAIDAAACWEAVGRPDMRFVPVKTVEQQAALSLHRSRDLLVSQRTQLSNALRSLLSEFGIVAGKGKAGLARLVDELRAGTLDLPADAVVAATALADQRAALDAAADALERRITAQAKADETAVMLKTAPGVGPLTAHATLATMPDPSLFKSGRDFAAWLGLTPRINGTGGKTRTGRITKQGNQPLRRLLVLGATAWVSYAKAHPEKASPWLRGMLARRPSKVVAVAQAARTARILWAMLTHNQPYRAPAIG

SEQ ID NO: 454867 - protein, 366 aa, unidentified
MPSMSQPVRRDQDETNLDDVVVGVDTHKNTHTAAVVTLLGALLATATFPATTAGYRELVAWTRGFGTLRRAGIEGTGSYGAALARYLRCKGVEVIEVNQPDKATRRRRGKTDVIDAESAARALLSGRATAAAKTGDGPVEMLRMFKLAKASALKARTQTINQLKAVLVAADPALREAMSGLSNTALVRHCAALEASTPDDVVSAAAYTLRILARRILALTTEISDLEQRITEAVKTRAPRLLDRPGIGPDNAATLLITVGDNPERLRSEGSFASLCGVSPVEASSGQTTRHRLNRGGDRNANAALYRIALSRLRWDPATRDYMQRRISEGKTRREVLRCLKRYIAREVHQIITKSTPDTTASPAAA

SEQ ID NO: 454868 - protein, 316 aa, unidentified
MAEAVYVGIDVSKAELVVAVRPSGERMTLANDRAGIRRLVGRLGELKPQLVVVEATGGLQRQVVAGLWMAGIAVAAVNPSWVRNFAKGRGVMAKTDRKDAELLALFAERERPEPRPPADAETQALQELVMRREQLLEMLVAEKQRLARAAGTMRKELRHHIAYLEGRIKQLEQDIDKTVRRSDAWRRKREIVRSVPGFGEHFSAMVLAKVPELGTLNRKQIGALIGVAPMPDDSGSRHGRRAIAGGRFEVRNKLYMCAMVAAHHNPVLKQFYERLVARGKPKKLALAAVMRKLIVTLNAMLKTNSLWRPPCADLSV

SEQ ID NO: 454869 - protein, 414 aa, unidentified
MSMEVFCGIDWAEDHHDVALVGRDGQLLARRRIGDDAAGLAALLDLLAEHGDSAGQPVPVAIETPRGLLVACLRATGRKVYPINPMAVARYRDRHSVSGGKSDHGDSVVLANVLRTDLAFHRPLPADTELAQAIAVLARAQQDAVWDRITAHNRLRSCLREYYPGFLAAFEAARGGIMRPEARVILAAAPTPADAARLTLAQLRGLLKKAGRRRGIDAEAARLREAFRAGQMRQLPLVEQAMARQTLALLRQLDAACASAEDLEQAAIESFNQHPDAGIITSFPGLGPLTGARVLAEIGDDRSRFCDAKGLKAYAGAAPITRASGKTKSVTHRRVKNNRLNATGYTWAFSALTASPGARAHYDRRRETGDRHAAAQRNLFGRLLGCLHRCLATGQHYDETIAFPDTTQKLPTAA

SEQ ID NO: 454870 - protein, 418 aa, unidentified
MAQKQFNESISVLHPVCCGLDIHKNKISACLITQQDDGCSMELREFSAFTDDLFALREWLLLHKCPIVAMESTGIYWRPVHNILENSMRVILVNARHYKNVPGRKTDIGDSQWLAELLRHGLLKASYIPSAEVRRWRDLVKTRNHYVATESDFRRRTQKLFETANIKIDSVVSDLFGVSGRNLMQLLLSTATDEITLNDVQQCLRGRLTQKGQELHRAIQGFFTGHHRFILDHYLHIIDTCRHAIDDIDRRIKQVMTPYNDILNRLQEIPGVGPIASSAILARTGTTLDEFQSSAALCSWAGVCPGNHESAGKRHSGRSPVRKHPLKTLLVEVAWAAVKVKGSYYRDKFYRLKSRRGAKRAIVAIAHRILKAVFAIIKHGEHYQELGEEYLGHRNKKLQLFRLKKLAERHGFELTAKA

SEQ ID NO: 454871 - protein, 487 aa, unidentified
MRPRTTNSSTQTLDVYSFSFESAGALAFVNEYSGFAVQPAHYIAFAERKLARPWSPIYHCRRCSVKPLSDRPFTAHVGIDWADAKHDVCLQAANSEQREFDRFAHQVASIDQWAKSLHQRFGGRIAVALELAKGPIVYALQKYDFFVLFPINPATLAKYREAFNPSGAKDDPTDAELALDLLLRHPERFKPLKPQSVAMRTLLSLIEQRRELVDDKTRITNRLGNALKQYYPQALDWFEQRDTILFCDFLSRWPTLSAVKRARKAGLKAFFYAHNGRRPKLIDDRIDSIRAAMPLTDDIGVIAPYRLQVLVLVEQLRVTLHAIDRFDRQIAAVAATLPDYALFSPLPGAGPHLAPRLLAAFGEQRERFMSADELQKYSGIAPVTERSGKKRWVHWRWQCPKFVRQTFVEWAGQTINKSFWAGVYYRQQRDKGSSHQAAVRALAFKWIRILYRCWQTGTPYDESTYLNALRQRGSPLLKQLRPTAQNA

SEQ ID NO: 454872 - protein, 369 aa, unidentified
MGEYSEAFVAFDVAKIKHAVAVAEGGRTGEVRFLGEIENREGPIERTVKKLAGRHGRLHFCFEAGPTGYGLYRQLQGLGHDCMVVAPALIPKRPGERVKTNRRDAVTLARLHRAGELTGVWVPDAVHEAVRDLVRARHAAADDLRRKRQQLLSFLLRHGRIYSGSGHWTLAHRRWLANQAFEHAAQQIVFQDGIDAIEDAIARLRRLEEQLVTIVPSWSMAPVVEAYQAMRGASFLVAVTFAAEIGDVRRFDNPRQLMSFLGLVPAESSTGDTVRRKGLTLAGNRRARRALVEAAWTYRYPARVSETLRARLEGLPKAVRDIAWKAQVRLCARYRRLSATGKKLPVVVAAIAREMAAFLWAIGREVAPG

SEQ ID NO: 454873 - protein, 316 aa, unidentified
MYLGIDVSKLTIDCCLIADGQNHQKKFQNNKGGFEQLINWLQSHKVTDKLHCVCEATGTYYEALAEYLYLRYTITVENPRKIKGYAIAELQRSKTDKQDAKLIAQYCQDRKHKLKAWKPPAKEQKQLQEIARYLDYLKQQRATEKAKQHEAPDYIKSHIQITISNLTAQIQIVKKQLLQFYKDNPSYNNLRKRLKTITGIGEQATAVLLSTFKRHEFKNAKQFTAYLGLDPRKYQSGTSVNGKSRISKIGSSEIRKSLYMPALVAYRCNAFPEFVDRLKNKGKHIKLILIAIMRKLAVIAFTLLKNGQDFQVERYK

SEQ ID NO: 454874 - protein, 453 aa, unidentified
MAQRNRSLNLNSGRSRQALTITHPNAAGIDIGSASHYVAVPPDRDEQPVREFKSFTADLHHLADWLDACGVDTVAMESTGVYWIPLYELLDARGFTVLLVNARHVKNVSGRKSDVLDCQWLQQLMSYGLLRGAFRPGDEVCVLRALSRQREMLLKSQARHVQHMQKALTQMNIQLANVISDVAGETGQKILRAIVAGERDGKTLAAMKNARIRASVDEIAKSLQGNWRSEHLFALKQALALFDFYATQLTECDCAIEQQLQRLHVHDGEPTTAKKRGRARNAPKFDLRAHLFKMCGVDLTRIDGIDVTTALAVISEVGADMSKFPTVKHFTSWLTLCPGTKITGSKLISGKTRRSANRAAQALRLAAAALRTSQSALGAYFRRLCARMDKPKAVTAAAHKLARLIYTMLTKGEEYTDQGQDYYEERYRERVLRQLSKRAEKLGMRLVASEQPA

SEQ ID NO: 454875 - protein, 337 aa, unidentified
MEVIYPCCCGLDVHKKSITACVLRAEAKGKSRKEKKRFGTFTHDLLQLADWLAERGVTHLAMESTGVYWKPVWNILAEQFEALLVNAQHIKAVPGRKTDQKDSEWIADLLQHGLLRGSFVPPQPIRELRDLTRYRVSLVQEINRIANRIQKVLEDANIKLASVATDALGASGRAMLEAMLAGEEDAARLAEMAQGKLRNKIPELQLALEGRMTEHHRFLLRQLFEHLRFTESKRSEIEQEIDKRMRPFQDKVTRLCTIPGVDRVTAWGMLAEIGMNMNQFPSSEHLASWACLCPGSFESAGKRLSGKMRKGNVSLRRCLAQASRSAVVWRRRPGPSR

SEQ ID NO: 454876 - protein, 375 aa, unidentified
MNNVFNIIESASPEATHSDNSQSHTGKASTIKLGIDVHQHFFVVVMQAGGSTPKPPQRFSPPAFLHWAAKLRAQGHSIHAVYEACGFGFGLYRELTKLGVQCVVCCPQKLDEANKRMKTDGLDAKALCLKLDRYVAGNKDALAIVRVPTEQEEQQRTIHRQREQLLTARKQLEAQGRSLLVNFGFEGTSHWWKPRLFARLQKELPAWIIERLQVSQPVIALLEEQIKALTTQLQVCAPPGVPKGIGALTSVVIEREIGDWNRFKNRRQVASYTGMCPGEYSSGGSRVQGCVTKHGNPRLRSNLVELAWRLVRFQPGYRPVQKWEAVLSKGAQATGAARKKAIVAVARQLAVDLWRLRTGRMSVEQLGFNIQKEAN

SEQ ID NO: 454877 - protein, 369 aa, unidentified
MTDLTLFVGLDVHKKTISVAMVEATAGAEVRFYGTIANTPDAIRGLCKKLTKDGQQLHFCYEAGPCGYGVQRQLSRLGHRCDVVAPALIPRKVGDKVKTDRRDAMMLAQTLRAGQLTAVWVPDEAHEAMRDLVRLRAQAMRDLRKTRQQLLSFLLRHSLVSPYGHWTKMHRRWLGELIFAHPAQHLAHEEMLQRIERAEALCDRLKRAILELVPQWSLAPVVQAIQALRGVSLIVASVIVAEVGCFSRFDSPRQLMAYLGLNPSEHSSGAMIRRGAITKTGNALARTCLVEAAWSYRFPARVTQIIRDRLNGLPEPIRNVAWKAQVRLSARYRKLIAAGKPAPKVVVAIARELVGFIWAIARMVEPKFA

SEQ ID NO: 454878 - protein, 428 aa, unidentified
MNCNTQNAKIASITEKTLIVGIDVGSETHYARAFDWRNYEYTRKPLKFNNTEAGFQTFKAWMEDIAAKHGKTVVIPGMEPTGHYWFALGKFLQDSGMRPVHVNPHHVKKSKELDDNNPNKNDRKDPKTIAALVNEGRFSYPYIPTGIYAEIRSLSNLRFQTQEELTRIKNRIARWFAIYFPEYKDVYGDYKAVSGRMVLKEAPLPEDIQKLGVEGVNKIWRDAKLRGAGMKRAKTLVSAAEHSVGSKEAPGAARMELKNLLNDMDVYTSRMEELLLKIEEKLKEIPYVDKLMGIKGIGMVTVSGFIAEVGDIGRFDNPKQLQKLAGYAIVANDSGKHNGESRISYRGRKRLRYVLYEAAISLIGKNAEFKAIHEYYRTRKENPLKKMQSVVAVACKVLRVFYTILTKGVDYDAGKLMGDIRRPQVQAA

SEQ ID NO: 454879 - protein, 362 aa, unidentified
MKHVIALDVSKGKSTVVIYDRYRQCEFEGELNHTRVDFERLHERIKEITRLDGQAPEIIFEATGVYSKPVEKFFIDFGYTYCRMNPLEANLQMASMRRNKTDISDAHELAKTHFKMEREPTYVQDDYYEQMRALTRYYDEIDEEVTLLKSRMHALLHVSFPELEKLITPRSALFLNIVQLYPHPALLLAHSKTMIKNRLKVNTRKNLSLARAEAKAEVLLEAAQNSYPAIQENDIRCDQIRDYAARIMDLVEKKEFIVRQMVEMSEGRNEYEVLRSIPGIGDTTACRLIGELGDIRRFQNAKQLNAYVGIDIMRYQSGNTQYRDRINKRGNKKLRKILYFMICTLIRFGKRPITISSIITIN

SEQ ID NO: 454880 - protein, 343 aa, unidentified
MSEITAIGIDTAKSVFQVHGVDGDHQTVLRRQLKRRQVLPFFAKLPPCLIGIEACSASHHWSRELSRLGHTVRLIPPRYVKPYVKSQKNDAADAEAICEALTRPHMRFVTTKSREQQAMLMLHRTRHLLVRQRTATINAIRAHLVEFGIVAGIGRNGVEALLQVIANESDKRVPDIARDCLLVLGAQLERLKAQIRALDAQLLAVHRANELSRRLEAIPGIGPRVATALVASIADPTAFRSGRQMAAWIGLVPKQNSSGGKEKLGGVTKAGDRYLRSMLMIGALSVIKRVKQLGYTHRPWLAELIARRPIKVAAIALANKTIRMVWAMMVRGESYREPKALAA

SEQ ID NO: 454881 - protein, 378 aa, unidentified
MELTYGRKEPAVSSIAHREFIHLGMDVSKDSIAVAVLAPDRDAAEVDKIFHDADSVRRLVKRIGRPKGIWACYEAGPTGYDLQRLLASMGVRCDVVAPSLIPKGSGDRVKTDRRDARRLAGLHRAGQLTPIAIPTPAQEGVRDLCRTRGDMVQDLTRARNRLSGFLLRHSVVWRGGSPWTERHRRWLATLSFDDPAIATTYSHYLATVKLRDTALESVEADLLPWCEKDPFGDQVQRLGAYRGVTRIGALCLAAEVFDWRRFPRARPFMSFTGLVPGENSTGLTQRRGSITRAGNAHLRGQLCEAAWAYQHSPNIGVGIKERQQGVPPETVARSWAAQVRLSRRFRQLAEHKNVRSVVAAAIARELAGFLWAEMVAEV

SEQ ID NO: 454882 - protein, 312 aa, unidentified
MPQQQMIVGIDVSSRELEIRSLHEARSWQVANDPRGWARLVRSWTGQPVVVGVEPSGGYEQGLVRALVEAGVMVRWADPARVRALAKALGAPAKTDAIDAQMIARYVADTGGRPVKLDPDRSALREVLAARKAALETARRLTAQARMLSPGVPRDALERLADHADTEAQALMRQLRLILRQTPHLASTWRLLQTAPGVGPLVAAELIAEMPELGHVSGKAIAKLAGLAPFVRQSGAWRGKATCCGGRPRPRCALYLAGMASLRAHHGFRPVYERLVANGKPRMVALVACMRRLLVTLNAMLASHTPWRGLAT

SEQ ID NO: 454883 - protein, 426 aa, unidentified
MQNCLFIGVDVALKGNQFCVMNFDQHIYFNLKFPNNPEGNDMVINKIKDIENKFFFEKIIVVMESTGMYSFHPACYLSSNEYLNKFHTEVYQINACDFDKYKKSFHDLEKEDGIDAYILADYARVGRTKALYPFRGSQYIALQRLTRQRYHICKELIREKAYVLTNLYLSFSGLMSLDKNELPFSDLFGATSSAFLEEFESPDQIAKSSVEELINFITEKSKNHSSNLDEKVTALNKAMRASYRLDQAAYEPINIAIACSLNTIKFYQQQLKNIDKAILNAALGLDSNTYHILLSIRGIGKVYAAGIMAEIGNIDRFSHNSKLAKYSGLYWKRNQSGEYDSQDKKSSKKSNKYLRYYLVEATASCVRQNFPFIKDYYSLKYKEVTKHQHKRALVLSARKLERLIFGLLRKNQYYKPIDPVQNSKIG

SEQ ID NO: 454884 - protein, 408 aa, unidentified
MNPLFVGIDVSSKNNVAYLMKPDGSKHSSFSVQNNLGGAKLLSEKIVSALHSMQLNDVVIGLEATSIYGDSLVYALREDGGLGRFQRKIHVLNPKQVRKFKEAYPDLPKNDWVDAFVIADHLRFGRIAKEVYMDDYRYQALRTLTRARFDIIQNLTREKQRFANYLFLKCSGIAQDKDIQNTSATTIALMEHFETVDDLANADLDELTAFISEAGRGRFVNPDATAKAVQAAARGSYRLPKTVNDTVNQAMSVSIASMRALKEQVKVLDKAIEQQFEIIPNTLTSIPGIGKVYSAGIIAEIGDIHRFNSQASVAKFAGLVWHRNQSGDFEAEHSQMIKSGNRYLRYYLLEAANSVRRCDSEFRRYYDLKLKEVNKYQHKRALALTARKLVRLVFRLLKDNRLYIPPVG

SEQ ID NO: 454885 - protein, 348 aa, unidentified
MQIAVLGIDLGKNSCSAVGLDKAGRVVLRRRLSRHSLIKLATQMPSCVMAMEACCGAHHLGRVLRAHGHHVRLMPPEYVQPYVKAQKNDERDAEAIAEAATRPTMRFVDLKSEDQFDMQTLHRARSRLVSERTALVNQLRAVLLERGITVAQGRRRLARYLTQALDADDTEGTQLSSRIRVLIEDMRAQWHDLDQRIAAFDIEFAAAARSEESARRLSTIPGIGAINATALVAAVGDARGFARALDLSAWLGLVPRQATTGGRPRLLGITKRGNKYLRTLLIHGARAALPLLLTVESPLGNWLRGLSARAHRNTVIVALASKLARIAWAVLRSSTTYNAATGSRLVGA

SEQ ID NO: 454886 - protein, 403 aa, unidentified
MEGPLISLDVSKGKSNYRFFENGTDRKGKKGVIRHDIRGFDSIRDEAEKMEERLRIKPSVIFESTGVYSDVVEKYFTDKGFDVYVISPLLSASMRKEGVRPAKNDSLDTLSIAKVFYSKDDLRKCSEKDKKAERLREMSYELDMMNRRIRPMKCQFLRLLDKVWPCLDEVSDYSSRFMLDFIIAFGHPENIKTVKGVLSVIRKSEMGTAGRKDKIAQDLFDYCHTHLSAVSKDSSYVELLKRMAIELKAMAKKKSELIDRMAEEARNKDEFVRLLTIPAVAKTTALKIMARVGDISRFRNAEALVAYCGLDPRVYQSGKMTGEHRTITKKGDCILRSTLFLAVKLMVMLYPDTKVARFVAAKAKNGLSYKQAVVAGSAKLARIIYSMLTHHENYVEFNADIVA

SEQ ID NO: 454887 - protein, 365 aa, unidentified
MEKLYIGVDFHARQQTLCYLKTETGELVITELKHADKESVRAFYQQFPRPVVVGLEASGYSPWFEALLEQLGCEIWLGHATEIRRRARWRQKNDRRDAQLIWELMVHDEFPRLHRPVLPSREVLRMLRYRQKLTQLRTMAKNSLQAIALQAGLAKGPQLFTGAGQQQFRAVSLSPVLQWQREHWFALLQPLNQQLLETTIWFKAQSKDDPDVTRLRTHPGLGLLTALCLVHTLQPVRRFSNARKVAAYAGFDPVERSSAERQRFLGISKAGSRLLRYLLVEAAHTAVRYDEDLKRFYKRLAQRRGRPKAKVAAARKLLIRAYIMLRDEIDYAEFRRRAVAARLARNRQRPNVPEVLIGQPASSEQ

SEQ ID NO: 454888 - protein, 342 aa, unidentified
MYYIGLDVHKKTISYCVKDVIGRICQEGKVGATRWELGLWIKALPQPWTVAMEATIFTGWIYDHLKPYAGDVKVAHPLMLRAIAAAKKKNDSIDAGKIADCLRCDFLPECYMASTEIRERRRTLRYRHLLVRQMVQMKNRVSGLLMETGVSHNKRRLHKLGYFPELLANADAVSESIRPLLQLSRDSITQLQRTESAMIRSLQRDPLLAERVRRLQTIPAVGKVTALTWALEMGEISRFRSIRQAISYCGLCGDEKRSAEKVMRTPLSKQRNKHIQRVLVEAAKLALRRNPDLALVYENAKKKGNANCATLAVARKLVAYLMAVDREQRDFEPVREFVGIAA

SEQ ID NO: 454889 - protein, 346 aa, unidentified
MEYIALDVHKKYTWARVENREGGRLYESRLAHSHGTIKNFVHRFSEGSPVAVETVGNWYWVVDEIEAGGGKPQLVNARLAKLMMGSVNKSDKLDAKGMNRLQRTGTLPTVWIPCSSVRDARELPRTRMVLSRQRTQLKNRVHATLAKYGYGVEGASDAFGKRGRKIVEELLTKLPPHTQQALQRVLDQLDHVGENLKAIEAEMIEAFAPCPQTNWLKTLPGVGDILAVVIWTEIGTIERFSRAEQLASYCGLVPREHSSGGKIRFGAVRRDVNVYLKWAFVEAANSSILNRERCGYGHISRLYQRIKPRRGHGKAKVAVARHLSEASFWMLKKGEPYREPVSSTQR

SEQ ID NO: 454890 - protein, 409 aa, unidentified
MDQLIERCGGLDVHRDTVVACVRGPGPNGRRQHEVRTFRTTAVELLALRDWLEAHAVTDVAMESTGVYWKPVFYVLEEAFTCLLVNAAHIKQVPGRKTDVKDCMWIAQCLEHGLLRGSFVPPAPIRELRDLTRHRKVLIQERTRAANRVHKLLEDAGIKLASVATNILGVSGRAMLEALVHGTTDPAVLADLARGKLRKKLPALRQALAGRFRPHHAFLVSQLLAHVDYLDEAITTMSEEVEGRLAPFAAQLTQLDTIPGINTRTAEVIIAELGVDMSCFPSDRHLASWAGICPGNNESAGKHHSGKTRKGNRWLRMTLIEAAGAAIRTKDSALGARYRRVMRHRGHKKAVVAVAHAMLRAVYHLLAEGTTYREPGADYYDRHHTHRVTRRAIQLLERQGYRVVLEPAA

SEQ ID NO: 454891 - protein, 401 aa, unidentified
MIYCGIDWAEKTHDVALVDDDGTLLAKRHITDDATGYKILLDLLAEHGDTEDTPIPVAIETSRGLLVAVLRTGKRQVYAINPMAAARYRDRHAVTRKKSDPGDALVLANILRTDMHAHRPLPQDSDLARAQQDAVWNRQQLANQLRSLLREYFPAALDAYLHWQNGLCRPETRVLLELAPTPSRAARLSLAQLRSALKRAGRQRRIDADAERIREVLRAEYAHQPPLVEDALGKQMLALLRQLSAACIAADQLAEAVEEAFPQHPDAEIILSFPGLGTQLGARILAEIGDDHTRFTTARGMKAYAGASPITRASGKKSSITRRWVKNDRLNHTGYLWAFAALTASPGAKSHYDRRREAGDWHAAAQRNLFNKMIGQLYHCLQKHILFDENLAFPTQLLEAA

SEQ ID NO: 454892 - protein, 315 aa, unidentified
MQAGKLIVGADVAKAELVIHHDDRDEIIKVKNTKPEIKKWLKQQPLNTAIAVEATNVYHLDLVELAHSLGFEVYVIDGFQLSNYRKSVGVRVKTDPSDARLLSRFLKNEGEDLRPWTPPPAVYGKLQSLLRRRAALVTARTAMTQSWANEALLKAAFQTFVKSIDRLDLLIQKKIKEVLREAGLHEQVARCQAVEGIGFLTATALVMAFMRGEFKSSDSYIAFLGMDLRVIDSGQKNGRRRLTKRGCSEIRRLLHNAAMSASRTATWKGIYEQHRNAGKATTQALVILARKLARVAFALMKNQDEYVSKGGKPAC

SEQ ID NO: 454893 - protein, 338 aa, unidentified
MKLYGGIDLHSNNSVIALLDEEDKPVYRRRLPNDLSVILGELASYRDKIEGLVVESTYNWYWLVDGLMEAGYQVHLANTTAIVQYTGLKYSDDDSDARWLAKLLRLRLLPEGYIYPKAERAVRDLLRKRSQLVRQRTANVLAIQNLLARNLGHSLSANAIKRLSPEDVDGLLPDPYQALAAKSNLAILRSLDISIEQLEKTVKACSKPRPDFEPLLSVTGIGDILGLTILLETGEIGRFTQVGHYASYCRCVGSERLSNGKRKGRGNTKNGNRYLAWAFVEAANFAVRYSPQIKRYYQRKCARSNGVVAIKTVAHKLARACYYILRDGVPFDVDKAFA

SEQ ID NO: 454894 - protein, 307 aa, unidentified
MNGIGIDVSKAMLDVVVHCGPFARFHNTPAGHRKLLSWLATREACQIVLEASGGYEQRVLDALFDAGHQVVRADARRCHAFAAATGVSAKTDRLDAANLACMAATLELRPHQPMEPWRRKLREFVRARQQLVDLTISAENQLEHVTETILRRALQANINQMKKNCLRLEKHIAEQVRQQPQLEAMRAFKGVGATLQAVIASYLPELGTLDGKAIAKLVGVAPIAHDSGSMRGMRRICGGRIEVRNVLYMACLSAIQHEPRIREFYRSLRARGKPGKVAVVAAMRKMLVILNACARDTLAGVAQAIPT

SEQ ID NO: 454895 - protein, 338 aa, unidentified
MKFKRIAIDTSKHVFTLHGVDEQERPVLRRELTRAQVESFFAKQEATEVVLEACGGSHHWGRLLSRLGHRVRLIPPQYVKPFVKRAKNDRNDAEAISEAASRPTMRSVVVKTVDQQADGIILKHREMLVSQRTQAINALRGHAAEFGMVAAKGVVKVAALLGVLAADDAIPASARAMFQQMGAHIEALDQQVEAMDDELAALHKANPVSQLLAAIPGVGPLGAITMVLTVEPGNFASGRHFAAWLGLTPKEHSTGGKQRMGKISKAGNERLRQLLFVGAMSVIRFARPGSKSASGWLLQLLERKPRKLAAVALANKTARIVWAMMSRGEAYRRQPIAA

SEQ ID NO: 454896 - protein, 360 aa, unidentified
MIVQGTSVGLDVHALSVVAHAVDEETGKIARARLCPDHGEVLGWLHQLRAPVRVTYEAGPTGFGLARAINDAGMECLVAAPSKLQRPAGDRIKTDARDAAHLAKLLRLGEITAVTVPEREIEAVRDLVRAREDARADLMRVRHRLSKLLLRQGIVYSGGTPWTFKHEQWLRRHRFADVHLKAAFDHSFDAVLAGTAARDRLDEQILVVAASPRFADPVDRLGCLRGISALTGLALAVEIGDWSRFTGSSIGAYVGLVPSEFSSGTSRVQGSITKAGNTHVRRLLIESAWHHRKSYSTSGPTLRARWAKVDPALRARGHAGNRRLNNRWRTFTERGKNPLVANVAVARELAGWCWSLATMP

SEQ ID NO: 454897 - protein, 411 aa, unidentified
MQVLHPHCAGLDVHKDSVVACVRHMDERGRASEAVRSFGTTTRQLLELGDWLAAEGVTHVAMESTGVYWKPVWNLLEGRGLELLLANAHHVKQVPGRKTDVKDCQWIAQLLQHGLLRPSFVPDRPQRELRDLTRQRAQLVMDKTRVANRVHKTLEDANIKLASVASDVLGKSGRDMLRALIAGETDAAAMAQLARMRLRTKIPQLAEALRGGVNEHHRFMLKMLLEQVEYLEQQVECFDRRIEQVMTPFEMEAVRRLDTIKGLNVRAAQNVVAEIGHDMGRFPTADHLCSWAGICPGNNQSAGKRRSGRTTQGNRWLKRTLTQCAWAAARCKDSHLAARYKRVAARRGRKRAVLAVAHSQLVAAYEMLKPGEDYHDLGPDYRDRRSGERLTRQLVDRLTHLGYKVTLEPAA

SEQ ID NO: 454898 - protein, 397 aa, unidentified
MIPIDALDQVQKGDRLMKKNSIARLQVTKSQMRRMAAKQRLTVGLDLGDHSSRYCILDEAGEKASEDKLPTTKAGLDSLFGKMAPCRIALEVGTHSPWVSRHLAAMGHEVIVANPRKVRLITQSVKKNDRMDAEQLARLARVDPRLLAPIRHRGPEAQADLAVIRARAELVEGRTKLINAARGLTKPMGERLKSCDADSVRESMADGLSEATQKVIRPLLKSVEVITQQIKKYDEQIQEIEKRYPETKLLKQVHGVGPLVSLAFILTLEDAERFEHSRDVGPYLGLTRKQRESGESAPELGISKAGDEFVRWLLVQAAHCILRQGAPDSDLKAWGLTKMGAGAGKKGSKKGKKKAAVAVARKLGVLLHHLWVTGEVYDPQYNRKAAEASKGSKRAAA

SEQ ID NO: 454899 - protein, 386 aa, unidentified
MHQATTFPAPERTCSRGDRAILFVSLELSRSTWVATALAPGSTKMSKYTLVGGDGHKLLELLARLKTRAEQRIAAPVKVVTIHEVGLDGFWIHRLLEANGVESHVVDPASIAVPRRHRRAKTDAIDGETLLRTLMAWQRGEPRVCAMTVPPNPSEEDRRRISRERAKLLQERVRHTNRIRGLLFGQGITNYNPLHKNRRKNLEQLRTGDGRSVPAHLKSAILREIDRLELVLRQIGEVETERDEMLQLTQPSSPAALLMRLKGIGAEFASVLYLEGLFRRFENRRQLAAYAGLTPSPWKSGSIDQEQGISKTGNPRLRTTMVELAWMWVRYQPASALSCWFRQRVGSKRGRIRRISIVALARKLLIALARYLSHGEIPAGAVMTAG

SEQ ID NO: 454900 - protein, 348 aa, unidentified
MALTIVETRAVTGGVDTHADVHVAAALDPIGGLLGVGEFPATPAGYAGLLGWLRGFGTVCLAGIEGTGSYGAGLARHMATAGVRVVEAGRSDRQDRRRQGKSDPLDAVSAARAAQSGRARGAPKGRDGPVEAIRALMVAKRTARSERTQTINQARALVLTGPDDLRTRFSRHTPAGLVAQLAALRPRPGDVVGYATRISLREPGRRAQFPGGQLERLDELIVPLVTARAPGLLALHGVGPDTAALLLIAAGDHPGRLRSEAAWAHLCAAAPIPASSGKVTRHRLNPGGDRQANHALWRIVITRMGSHPPTRAYVERRSAEGLSKTEIIRCLKRYAAREVYPHLRPGAG

SEQ ID NO: 454901 - protein, 356 aa, unidentified
MHPQCTQLDFTGQRVFVGIDVARRSWKVCILVEELHHRTFTMPPLPVVLASYLQRNFPGAKYSCVYEAGYFGFWIEKALAKLSVDCMVVNPGDVPTTNKEKTSKNDRVDTNKLARSLRNGELRGIYVPSDPALDTRSVVRVRASFVRKQTRCKNQIKAHLEFYGLKVPADLERSHWSRRYIGYVEQLQRERQDHALEALLRELLYLRELIKDLTKKIHQLSLGEVYAHDIQLLLSIPGIGVIAAMTLLTEMVSISRFPKLEHLASFVGLVPGEHSSGETVSVGELTPRRSRELRFIVVEAAWMAVRQDPALLQSYSEFCKRMKKTQAIIRIARKLLNRVRFVLKNQQPYNTSLVTE

SEQ ID NO: 454902 - protein, 362 aa, unidentified
MAKAMTLVGLDVHALQTHAAVLDPATGELDVRKLRIAPEEVVSFLERLGRPVRAVYEAGPTGFGLARAARERGIDVQVAAPGSIPKGADDRVKTDRRDAVRLARLLAAGELRFAFVPSLADERFRDLVRSIEDVRGDLMRARHRLGKFLLRRSERYPGPYRAWTGAHLRWLRALRFDDPCSQATFVDYLAAVELLLGRRASLLEALEQTIPACSHEPVIARLRCFRGIDTLSAAGLAAEVGDFGRFPKPSPLSGFLGIVPSEHTSDLKRRQGSITKAGPPHARRLLVEAAHHYRRPPRIGEPLARRQHGQDARVIAIAWRAQRRLHQRWQHLREQRRKPVGVVAIACARELTGFLWEAATLD

SEQ ID NO: 454903 - protein, 329 aa, unidentified
MSNIIGIDVSKASLDCAYLRDADQDRAKRKTCQNEVRCFAALVDWAEARSGLPVQALAFIIEPTHVYHELLVQFLHNMGATVYLVNPGKVRKFAEGIGILSKNDLVDADLLARYGLLARKLIAWAPVPQELNDLRSLLNRLEVLERNRRRELNRQEKIGKTRVFHRLEKQSIARTIKRLKAEIMTFKNAIGQCIKSTPSLQHNFYLLCTIPGVGAKTAWAMLVILGSRTFRSAPQVASFLGLNPIEKRSGKSQYRRPRLSKSGSGHYRQQLFFPALVATRKNPDVKALYERLLAADKTKMCALGAAMRKLVHICYGVVKNQTPYQAQTV

SEQ ID NO: 454904 - protein, 506 aa, unidentified
MSINGAPVMAATVVAVDVGKTTAALSVTDAARHRLLGPVQFMMTAPAVAAVLQRVCAVLPGTPVKVGVEAAGHYHRPLLGSTVWPAGWEVLELSPARVSEQRRVQGRRRVKTDAIDLEAITELVLAGHGVLVTARSAAVTELTGWAMQRGRRVQTRTATKNQLLAQLDRCFPGLTVVLPDVLGTKIGRLVAAEFADPHRLAALGVTRFVRFAANRGLRVRRSTADRLVAAAHAALPCLEARVARQVLADDLVLLACLDAQIAAAEAKMATLLPDTPFAPSTTVPGWGTVRAANYGATVGDLDRWPGARQLYRASGLSPAQYESAGKRRDGHISREGSVALRRALIDLGIGLWRADPAARRYGQQLRARGKKGGVIGCAMANRPTRSPTPWFGTSPATTQTAGPDRTTGFLDRRPPRRAQQRSTWSARSAARTNEVDRGEQRRTIRRRGSPREELIRPLSQPVLPVRRWTQEGPEIRRFDYGGHLGVTPPLVWRPALRHHGSPNDAN

SEQ ID NO: 454905 - protein, 397 aa, unidentified
MIAVGIDISKAKSTVAVIDSDGTVLASPFTMAHTQPEMEAFVTYLKGLGEPTTILMEYTGHYHYPVLKKLQGEGFPVCIVNPYQMKKYGDVEIHKAKTDKKDALRIAAYALEKSYKLVPYSSMEQKYEDLKFLSRQYSQRITYVAKLKVQLIALLDQTMPGITRILPLNSRNPEKCALLLFIKRFKSFDEIQRIGKARFLASYDVLAKKASERSASSKGLSIYELAVDSITTRGEDPYIWLSQNQCVDLLSTTQNAADEIISQMRNIAETIPEYKVLRAMRGVGDRLGPIILAEIGDIRRFHSGKALNSYAGNDAPPYQSGQFESRNRHISKRGSSALRKACYEVMQALKLTKPQDDPVYLFMLKKEQEGKPFNVAKMAGVNKFLRIYYARAMELYK

SEQ ID NO: 454906 - protein, 359 aa, unidentified
MFVAGIDAHTTYSVVAVVSNTGDLVHQPARIPNAKPDRLLRLLEEFRPLEAVVETCPSWPWLFDLFQGAGIPFVLAHAKRLRAIADSTYKRDDLDAELLARMRLAGLIPEVHPKSVEQREQAVLLRNRAMLVRQRTAAAARIHSQLHQVGLHMARGHLLTRDGRQWIRSKAWPLLGPERRLFIRMQWALTQRLSPMIRSLDKRVERMGREMPAVALLRTIPGIGPYRALLIATETLPIERFPKPAHLVSYAGLAPRTSQSGLRPIRHGSIPAGANRWLRGTFVRAVVTHVAHAPDSWLSHSYEQTRQRLGWQVARVATARRLARVVHAMLRTGEAWHDEPTYREKGELQNGHVATESTS

SEQ ID NO: 454907 - protein, 346 aa, unidentified
MVEYIGLDVSKETTAYCVKSRQGQVLARGKVETDPDALFEAVKKHCLCPERIILETGTLSHWLGRELCKRGLPAEVIDARHAHAVMRMQHNKTDENDATLLAELGRMEFYRTVSIKSEAAQKQRILLKARAHLVGARRSAQNTIRGLMGGLGIRFAKGSGPFVRRVREILPEHPDLAVMIDPLLTHVETAEREIKKLDKAVTARAKADPACRLLMTIPAVGAVTALAYVSTIGEADRFGKSRSTGAYVGLTARRNQSGEMDYSGRISKKGDKMLRSLLYGAANTLLTRLRRAHPLKTWARQLKKRTSHKRACVALARKLAVIMHTMLMTGEAFAWPSLDTKETVTA

SEQ ID NO: 454908 - protein, 423 aa, unidentified
MERYDDSRLSEFRQLRQGIRQSKEHMVVGIDIAKDRHRAFFGTPTGRTLLRKVVFENTREGFEKLLFHTDILMRRHALKKVVFGMEPTADYHKPLGEYLTGMDHTVVLVAGGAVRKNRELLDGRWDKNDTKDAANIADLVCQGKCLFYDHPSPKIRELRMLLSLKRRLKKEEHSLTVRIRNHLIAQYFPELDPYYTCGEGPAVVRWCIDPREVSTLSLQEFSRMVSARNGGEKQRRRLGEIHAIAASSIGCSVTPGVSYEAGLLVDTVRKTKEMVRETDERIASVCSFLPEYPCLMSIPGFGPDVSAKVLGALGDPRRFENHRQVLKLAGLDLSGDRSGKRSDVPVVISKRGKADLRYALYQAAMVASSKNPVFMKYFTDRMAGRQRERGIGTRIRVKMAAKMLVIAWTLMKRKEMFDPGCIN

SEQ ID NO: 454909 - protein, 391 aa, unidentified
MVCVGIDVAKDKHDCCILDSDGMVRADCFTIPNNMDGFKQLLQTIRNCTKKSDKIKVGLEATGHYSYNILGFLLDNGLPTYVINPLHTNLYRKSLSLRKTKTDRVDARTIATMLLSDVDLKSYTDIAYHNEELKSLTRYRFDKVQECAKLKQSVSRLATILFPELEGLVSSIHGTSIYALLSEYPGAKQISEVHLTKLTNLLITASKGRYRKEKAIQIREAARASIGSVMPAKSLELKHTIKLIQELASEIDEIEDSIQKIIDELNPPILSIPGMGVNSAAVILAEIGDFSNFSSPDKILAYAGCSPSTYQSGKLTNCYAHMEKRGSRYLRHALYNATKYVCYWNPVFAEYLAKKRAEGKHYNVALSHAMKKLVRLIYALQKSGKTYLTAA

SEQ ID NO: 454910 - protein, 312 aa, unidentified
MTSEKVVGIDVSKRSLEVQVHGEAEGWKVGNDGDGFTTLIEQMKVLQPELIAFEATGGYEGRAAKALSEAGFAVAVVNPTRVRRFAEGLGILAKTDKIDAQLIAHFASVARPPVNSRQTPLEEQLAAFVERRRQLLTELTAEKNRLSTCPDCVRDDVEEHIAWLEERIDRLEMDIQVCISSKPEWQERAEIIDSVPGVGVVTATTMVAELPELGQLNRQKIAALVGVAPFNKDSGAKKGKRRIFGGRSGVRRTLYMAALSATKFNPVIRAFYENLCQRGKEKKVALTACMRKLLVIINALVRKGEAWRLPSA

SEQ ID NO: 454911 - protein, 355 aa, unidentified
MQIITTIGLDIAKSVFQAHGIDAAGQVVIRRQLKRRFVLSFFEKLPPCLVGIEACASSHYWSRELQALGHTVRLTPPAYVKPYVKRQKNDSTDAEAICEAVTRPNMRFVPTKTVEQQSCLMLHRARHLFIRQQTAVINSIRAYLAEFGIVAPVGRRGVEQLLEVVADTADDRLPGVARACLAALGSQLRALKAQILEFDRRIIAWHRSSATSKRLDAIPGVGPALATALVASIADPKAFRSGRDFSAWVGLVPKQNSSGGKDRLGSIRKQGDRYLRSLFTAGALAVIRYAKIHGTGHRPWLTGLLARRPTKVAAIALANKLARMAWAMNGQERALPRTGSAGGLNEIVPDISGAL

SEQ ID NO: 454912 - protein, 377 aa, unidentified
MKKVRFIGLDVHADTIAVAVAEPGGEVRSLGVIPNRPESVRKLIKKFGPPASLRVCYEAGPTGYVIYWQLTALGVQCEVVAPTLVPTKAGDRVKTDRRDAEKLARSYRAGDLTPVWVPDAAHEALRDLVRAREAAKKDQLRARHRLGKFLLRHGRRPPTAMTAWTQRHLTWIRQVQFEHPAQEATRLDYLHEVDHAVERIERLERAIDEAVTTAPANMRAVIEALQALRGIALVSAVTIVAEVGELSRFERAPQLMGYSGMGAREDSSGPRTRRGGITKTGNAHLRRIAIEAAWAYRHRPAVGGALRKRQATVSEEVKAIGWKAQLRLHARYRKLLGRGKSQQQVVTAVGRELLGFIWAIGVTVERQHRKTSSSIAA

SEQ ID NO: 454913 - protein, 414 aa, unidentified
MEVVHPRCAGIDVSKRDAKVCIRVQGGNGRKSSSTVTTWGSMTNQILALRDHLAAQQVTVVIMESTSDYWRPFYYLLETDFQVLLVNAREVKNVPGRKSDVSDAAWLADLGAHGLLRASFVPPEPIRQLRDLTRTRTHIAAARTREVQRLEKLLESAGIKLSAVATDITGVSGRLMLQALIDSQGTADPAVMADLAKRRMRSKIPVLTEALNGYFTEHHAFMTRLFLDRIDAHTKDIELLSERIDGLMEPFLPARDLLESIPGFSQTVAEVFIAETGGDMTQFPTPEQLASWAGVSPGSNESAGRVKSTKTRPGNRYLKGALGVAALNQARSTSRKTYFSAKFRHLVPTRGPMKAIVAVEHGMLTAAWHMLTNGEFYRDPGADYYTRRDPARTKARAVRQLEALGYTVTIQQAG

SEQ ID NO: 454914 - protein, 324 aa, unidentified
MIFEKSNYRRYIGIDVSKAVLAIDDACGAISKSVANDENTIEEQLLSQIDDPEGTLVVCEATGGYERKLVAAMHAAGVPIVVANPRQVRDFASGQGILEKSDPIDASVLRCFGEDVRNLKLATPKSDEQESHSAMARRRKQLVDMINQEKNRLAQTADADVAELIKEHLQTLKKQLKRVDQEIAKMVARQAKSNRKVQVLQSVPGVGKVTTSTMICDLPELGKLSRGEISKLVGVAPMMRDSGRHKGKRTILGGRGHVRHVLYMAALVATRCNPVIKAFYQRLVAKGKEKKVALVASMRKLLTILNDMVRNEECWRHANLSESK

SEQ ID NO: 454915 - protein, 356 aa, unidentified
MEQLTTIGIDLAKDVIAACVLDVHGAVIERRALKRAAFARWAEQLPASNVAMEACGSAHHWGRWFAARGHTARLIAAEFVVPFRKGGKNDTADAEAIAIAARQPTMRFVPIKTVDQQAILAWHSVREGWKEERTALLNRLRGLLAEYGVVIGRSAERFLVALPELTEDSRLPDAVRALLLEAREQFAALHSRLARCDAQIAAHARNSLAAQRAVELLGVGPVTASALAATVPDARVFKSGRQFGAWLGLTPRQHSSGGRTRLGRISLRGNVYLRTLLIQGARSTLQAAINTEPARASRLQRWIFELYSRKGYYKTLVAIANKHARILWAMLAKGQRYDAAAWQRHPMNQLPLAGNS

SEQ ID NO: 454916 - protein, 426 aa, unidentified
MNLQSLSILHPDAAGIDVGAKQHLVAVPADRDQRPVRTFQAFTPELHELAQWLKHCGIRTVALESTGIYWIALYEVLEQHGFEVRVVNARHVKHVPGRSKTDVLDCQWIQKLHSFGLLNGSFRPDQQIRKLRTYQRLQDSLVVNSAQAIHHMQKALFEMNVQLSNVISDVTGETGLRILEAIIAGERDPEQLAALCSSRIKASRQTVAKSLHGNWDPALLHCLKTALDMYRFTQRQIQECDLCIQRQLTELDSRAPIPGSATSLKAQLHRVCGVDLTKIPGIKEQAAQIIISEVGLDMSKWNTEKQFSSFLGLSPDNRISGGKVLRRSTRKVYNRAADTLRLCAQSLTHSKSALGAKYRRLRARLGAPKAIVAMAHHLARLVYRMLRYGEHYVEKGIEHYERKFRLHRIKWLRKEARALNLQLVAA

SEQ ID NO: 454917 - protein, 416 aa, unidentified
MNAVGIDVSSRKSTVAVLRPLGEVVCLPFDVTHDIAGLASLAEKLKALDGETRVVMEHTGRYYEAVAKALHEAGLFVCAVNPLLIKEYGANSLRRVKTDKADAVKIARYALDNWADLRDFTPMDAIRYDLKTLNRQFQLASKQRTASANNLIALLEQSFPGIRKCFDSPVRSDGTQKWVDFAHSFWHVDCVRKQPFPAFCERYRKWCKRHAYLFKQSNAEEVYALAKRAVVLTPKSKVVKVLVQEAANQLISISRSVEVYRAEMDRLAAMLPEYPVVMAMYGVGKSYGPQLMAEIGDVRRFERKQALVAFAGIDPMPNQSGDKNVRSNKSSKRGSPYLRKTLFNVIRTYLQCAPQDEPVFQFLNRKRAEGKPFYVYMLAAANKFLRRYYAKLRDYFASLDTLQPVAPIPTILKATL

SEQ ID NO: 454918 - protein, 342 aa, unidentified
MSWGPTAFFVNPNSCKGQAPAHKEGTEEMVAQTVQDIGIDVAKRWLDVAVFQTQEQAHFDNDKDGWAKLVRWLRGRRVRAIGMEPSGGYERGVAKALRGVDLPARNVNPHKLRHYARALGRLAKNDRIDALLIARYTAELPTRPVRCDPIAEQLADLVVARRQLSDDKVSLANQLEQLREPMVRRIFTQRLRRIEFDIALLAKRMAELVASQPALAAKDRLIQSFHGAGPVLSHTILALAPEIGQASRREIAALAGLAPYDFDTGTFKGRRIIRGGRHALRRVVYMAALTASRSNPVLKAFHQRLIAKGKEPKVALVAVARKIITILSAMLRNNEPWYPNRS

SEQ ID NO: 454919 - protein, 430 aa, unidentified
MKSNTQNAKIEAITEKTLVLGIDVGSETHYARAFDYRGIEYSKKPFKFSNTEAGFATFKEWVLDLKERHEKDKVVPGMEPTGHYWFNLGKFLQDNEMKPVLVNPHHVKKSKELDDNNPTKNDRKDPKVIAGLVREGRYMIPYLPEGVYADLRTASNIRFQLQAELTRIQNRISRWFNIYFPEYKTVYGKPDAKSGMLILKAAPLPEDILTLGIDGVNQIWRDAKLRAVGKARAKTLIEAAEHSVGSKEGAVSARMEIRMLLEDYESRNTRLQEVMVLIEELVRKIPMAEKLLEIKGVGIRTVSGFLAEVGDISRFNNPKELQKLAGLALVENSSGKHKGETTISRRGRKRLRYLLFEVAMSLVSKNQEFRELHNYYTTRRLNPLKKMQSLMAIAAKLIRVFYAMLTKGVDYDPKKMVSDIKRPAVYLQAA

SEQ ID NO: 454920 - protein, 337 aa, unidentified
MGLYCGIDLHSNNHMLTVIDEADRRVYERRLPNELAITKAALEPYRAELVAVAVESTFNWYWLVDGLMEAGFAVRLVNTAAVRQYEGLKHTDDKHDAFWLAHLMRLGILPTGYIYPKSERGLRDLARQRMRLVQHRSSLITSVQNQVWRSLAVRLRSETIKGRGKQPWPEISDPDLALSVKAGRAAIDTLTVQIERLEKLILKRVDRSPRFRMLKTVTGIGPILAMTIALEVGDIGRFAGVGEFASYCRCVDSQRLSNGKKKGEANRKCGNRYLAWAFMEAAHFAIRNLPAAKRFYERKRRQRHALLAVKALAHKLARACFYVLRDQVPFAPERLFV

SEQ ID NO: 454921 - protein, 409 aa, unidentified
MDVVHSRCAGLDVHQATVVATVRVPAERGGREVVTKTFGTMTADLLTLRDWLQAFGVTHVALESTGVYWKPVYYVLEDAFVLLLINMQELKHVPGRKTDVQDSEWLAQLLECGLLKASFVPPPEIRELRDLTRYRGQQARDRTQEVNRLCKVLEDAGVKLTSVVSDVMGASGRAMLTALVKGTTDATVLADLAQGKLRKKLPELRRALEGRFRPHHAFLIEQIFAKIDFLDETIQRLTAELDRRLGPFEPMLVALDTIPGVDRKTATIIVAETGGDMRRFPSAAHLCSWAAMCPGQNESAGKRRSGKTRKGNRYLRAALIQSALAATRKKNSALQARYHRVKRHGGHKKAVVAVGHQMLEIAYYIMRDGGPYQELGADYLDRRHSDRAVRRHVRQLEALGFQVTITKAA

SEQ ID NO: 454922 - protein, 311 aa, unidentified
MSSQIVYCGVDVSKLTLDAFCLGHCCHQPNDSQGWRKMIAWLKRLAPNAAVVAEATGGYERASIAAFRKAGHSTHVVPPLRVRQFASSMGRFAKTDKIDAQVIADFAQASVPKENAPLDDLHQRLVSLVTFRDQIKLKIVALQNQTKLSADPLVQASAKRLLHAYQKELKTVAKAIDTLLAQSDDLALKLKKLTAFQGVGQTTALALLAYLPELGQASKQQIAALVGVAPYNHDSGQSKGKRSIHGGRANVRKSLYMASLTASTRNPVLSKFYQLKRSQGKPPKVALTAVMRKLLVALNLSLKNPNFSLVS

SEQ ID NO: 454923 - protein, 333 aa, unidentified
MNTIGIDVGCKELVVVVMVNGKARKAKSFDNTPLGHQSIIQSLTKLKEESKVCIEATGVYHFDLAVALSRANDIEVMVINPKAAHNFAKALMTRSKTDAIDAENLAIYAERMPFEAWDRPADECIGLRATARRIAALSKQKTQTKNQLHALKSTVETPTLVIEQTEQLIDILDIQIKTLRDSAISIIHQNEGLKQAYTLITGIKGIAQASAIQILSELMILPEDMTARQWVAHAGLDPRIFDSGSSVSKKPRISKVGNKYIRQALYMPALVASRFEPNIKGYYHHLTDDNGLKKVQAVCAVMRKLLHAIHGMLRTNKEFDGTRFYTLPIATDS

SEQ ID NO: 454924 - protein, 390 aa, unidentified
MHVVAHQPEAPGAIRSDLGAIFVSLELSRSTWLITSLSPCAGVKMSKHGVAAGDIGALLARFSEFKQKAFARTGKSFPIIVIQEAGLDGFWIHRVLQSEGIESHVVDPASIATSRRRRRAKTDRIDGEALLRALLAYKRGEPRVCAMVKAPTPEEEDRRRLSRERKTLIGERVEHVNRIKGLLFCQGVSDYEPLRRNRHQRLDELKTGDGRALPDHLKAQISRELDRLELLLEQIKAVEAGQNTLFAAAKAEAPTPAPVTMLLDIKGIGPEFAAILWMEAFFRSFANRKQIAAYAGLAPTPWQSGAVNREQGVSKSGNPRLRTTLIQLAWLWLRHQPQSALALWFKERVTRNGGRFKKTTIVALARKLLVALWKYVTAGIVIEGAVMKAA

SEQ ID NO: 454925 - protein, 401 aa, unidentified
MAKLWAGIDAGKAHHHCVVIDADGTRLLSQKVPNDEPALLDLIATVLTLGDGDEVIWATDLNHGGPALLIAILVGHGQNLLYIPGRIVHHASKLYRGEGKTDAKDAAVIADQARMRRDLQPLRAGDEISTGLRILTARRADKSADRVRAINRLQAQLLEYFPALERAFDYSRSKAALLLLTKHRTPDGIRRAGQARLQAWLKKHGARSSAAVAAAAVDAAKSQHTTVPAQHIGELIVAALAREIITLNQELADLDALISEKVTEHRHTRILLSMPGFGPVLAAEFLGATGGDLTVFETADRFAGVAGLAPAPRDSGRISGNHHRPRRYDRRLLRVFYLSGLSALKSCPASRTYYDRKRTEGKTHIQAMLSLARRRLNVLWAMLRDGTTYTPVPAQAARMAA

SEQ ID NO: 454926 - protein, 342 aa, unidentified
MTQPAPARITVGVDTHAEVHVAVAKDNFGRRLDAISVPTTPAGYGELLGWARRLGPINAWGIEGTGSFGAGLTRFLHRHGQVVVEVNRPDRQTRRRRGKSDPLDAEAAARAVQAREGVIPKAGDGQVEMIRSLRVARATAMKARTQAINALKGLLVTAPDELREQLRALSAVRLVQTAAELEPGPVTTPAAAARLGLRSLARRYQALSAELTILDTELDRLTVTAAPKLLALFGVGSDSAGALLVAAGDNPDRLRSNAAFSMLCGASPIQASSGKTQRHRLNRGGDRQANAALYRIVIARLRHDQQTKDYLDRRIREGKSKKEAIRCLKRYVAREVFAALQP

SEQ ID NO: 454927 - protein, 416 aa, unidentified
MDTMYERCCGLDIHKKTIEACFRSGKKKTHMSFGTTSAELRKLTMWLVENDCQSVAMESTGSYWKPIFNILELSGTDMKIIVVNARHMKNVPGRKTDVNDAEWIAELLQYGLLRPSFIPDREQRELRELSRYRKSLVEERAREINRLQKMLEGGNIKLTSVVSEVTGYSSRRLLDRLLRNDEPMTEDVISGLVHTSLAGKSKELETALDGLLSELQKELLIKVLDHIDDMSRRIADLDDFCRKQMKKYEDALDKLDEIPGIARRTAETILIETGLDMSRFPTAKHFARWAGLAPGNNESAGKRSSGRTTKGNPTLKSTLRQSAKVAARKKNSFFKARYQKIAAKRGANRASVAVAHSMLIAIYHILKSGERFKDLGEDYYNQFNKEKKKKYYLKKLTKLGVNLKEATLSISIQAAT

SEQ ID NO: 454928 - protein, 318 aa, unidentified
MAEVVAFEQIVRRGCGLDVHKQTVVGTIDGAGLTGETREFRTTTSSLKELKEWLERSEVTHVVMESTGVYWKPVYHVLEPSGMTVWIVNARHVKYVPGHKTDKRDSKWLCKLLLAGLLKPSYIPPREQRELRDLTRYRRKMIEQIACEKNRVIRILEDCNIKLSSVLSDTHGVVGTKLIDKLCKSGKISKEDIEEVYHGKLQASREEIYEACEGFVTAHHVFMLQAIRKDMSSCETIISELNARIRKMLAPYENVMELLKGIPGLSTKSVEDLIAEIGLDMSVFPDDKHLSSWCGVAPGNNESAGKKKVDVHRKATNM

SEQ ID NO: 454929 - protein, 387 aa, unidentified
MAKQNDLSRCLVTLEQDATVIAVIEMGQSSWLVAGIVPGLERNPLKKLSPDPDALLQLLYRWQKEAVQAGRAIKRIVVAYEAGRDGFWLARWLRAREIEAYVIHPSSVPVSREHRRAKTDRLDTELLKRAFLGWLRGEPKHCSMAAIPTVADEDTKRPGRERQSLVGERTRIINRVKANLARLGIRGFRANLAQASNRLEALRTPEGIAVPANTRAELQRDMDRLRFVKQQIKEIETTRAKRLAGAPNEQRHAMVRLLAQVVGVGIETADMLVQEVFSRNIRDRRALARYAGLTGAPDESGKKRRERGLAKAGNARVRRGMIELAWGHLLHQKASALTEWYRKRTSDTRGGTRKTMIVALARKLLIALWRLVTTGETPAGLLLRPAV

SEQ ID NO: 454930 - protein, 404 aa, unidentified
MNASKKRYLRFCGIDVGKDHHVAAVVHAEGHFLVRSQSFPHSRPGFALLLDTLRRLGRPSDTLVGLEATGPYWYSLHEFLTAHGYAVIVLNPIQTAREGATPSLKLATDKRDARSIAVLIKNGTRPATLIPDDLAMTCRQLSRTRYALAQKITRVKLQLWAKLHPVWPEYEPIFADPFGATGRALLGRYPTPADLRQADPAELAGLVRSASRGKYGPDRLEKIRQAAEASIGVTKGLEGFRTAIRSALDELAALRNLRDALDEQIRPYVDRLPGYLLTLPGISPPRAVSLYGELHPVANFKTPESVVAFAGFDTTVFQTGNYLAPHRAISKRGSPYLRRTLWLMAARAVQSEGDLRTFYLRKRKQGLHHLAAVTAAALKLCHVIWRILTDERDYRPQGRPETTS

SEQ ID NO: 454931 - protein, 317 aa, unidentified
MTTPNDTYVGIDVGKTWLDVALWGSNAVWRVSNDDEGVAEIMARVTALGLQLIAVEATGGYEQLVVQTMLLNSLPVAVVNPTRVRALSKATGKLAKTDVIDARLIAEYAFKIQPEALAPKEAQEIRLNALVTRREQLVEMRTAEQNRLGTAHNSMQVDIREHIEWMNARIQELEVEINGLVDSLPEWRKQAERLDSIPGVGKITAVTVLAEMPELGQMNRQKIAALAGLAPFNRDSGQKRGKRRIFGGRKGIRRVLYMACLSATKCNPVIRSLYLRLTKKGKLFKVAITACMRKMLTIMNAMTRDQVNWRPPEPIPN

SEQ ID NO: 454932 - protein, 410 aa, unidentified
MKDSGKRFIGLDVHKHYLIAVGVDDDLNVVLPVRRVEFSYLEAWMKKTLTKQDELALEMTTNTWQLYDELCAYAGSVLVVHPPHVALITRSQVMNDKIAASILARLLAKGLLVGVWVPPQDIRELRGLVAQRKKMTGLATQAKNRLHAVLQRHHLLPPEGNPFHELQQDWWLALALGRLEGLNIQSDLETLRFAQTQQVRLTSLMEEIANQKEEVTRLLQLPGFGVVTAVTVWAAIGDIHRFEDAQHLVGYAGLGTKVHDSGMTTRTGRITKAGRRDLRVVLTEAAQVAANSHPHWKAELARLQPRLGRNKAIVVIARKLLVAVWYILVQHKTDRFAQPEAIAQKFLKFAYQLGKENRPAGQSAAHFVRQHLNVLQLGHELTSIPWGSKKPISLPPSSLKTERSDVPNTK

SEQ ID NO: 454933 - protein, 341 aa, unidentified
MELYMTKQTYVGIDVGASELVVVIIRNGKPGKAKNFSNTSEGRNALIKYLNPKKRKVKICLEATGTYHFDIAVELSNTKNIEVMVMNPKAVKNFAMALIQRNKTDAIDAQLLADIASMLDFKEQFIAWQAPDKEIIDLRSAGRRLNELTRQKAAAKNQLHALQATESTPQFVLDSVKQTITNLEQQIKELQQHVLELVENNDELNQVLELLISIVGVGKTSAIYIMGEILILPKDMTVKQWVAHAGLDPREFTSGTSVNKQPRLTKAGNRHLRCALFMPALSATRHNVNVKAFYNHLLDKGKKKMQGICAVMRKLLHAIYGILKTGQPFDGSKFYVIPQPI

SEQ ID NO: 454934 - protein, 405 aa, unidentified
MKKVIKVCGLDVHKDTIFACVKKGNYQSEVKKFSTMSCGLAELNHYLKGEQVSKVAMESTGIYWMPVWRALENDFELLLVNPYFIKQMPGRKTDVQDAQWIATLLDKQLLRGSVVPCKTIRILRAYLRRYAQLQGQTTRCLQQIEKQLSQCNIKIASLSSTIGSKTVIDIVESISKGNHAPEELLALVHGRIVKKHGEKVKQSLQGIIEEHDVFLLRQIYEDYRHIERQCNELLAQAQKIAETHYKEQLDLLQTLPGIKQLSAVIILSELGGNIKLFETAERLTGWCGLRPKNDESAGKIKSRSITKGNKYLRRILVQTAWAASRTKTCYLKTKFEQLSVRKSSKKALIAIARKQLVIIWNVLTKQEVYQEPKIKLSAQQISRKQKYYQEKLSKLQLLQNIEKAV

SEQ ID NO: 454935 - protein, 413 aa, unidentified
MIAAIDIHKRLLVVVVADAGAPATIVQSRQFGTGRSELAHLASWLAQWQVQEVVMESTAQYWKPVWLELEGGMKLHLAQAQSNRAPQGRKSDLADAKRLLRRFVAGELFLSFVPAAEQRSWRLATRTRLQLIREQVQVQNQTESLLEEGRIKLSAVISDLLGASGRRILRALAKGQDNPQQLAELGDKNLKCGQEALADALNGSLNALHRKVLGQQMDRIELLDKQIAELSQLCADHIQAHQAAVLRLIEVPGIGAEAAQEIVAEIGPTAAAFPSPEQLASWIGVCPGSRESAAENQSGRCAKGNRFMRRVLCQAAQAAARTNNSYLQSVFKRLVVRLGYTKAIWAIAHRICRIVWKILPQGASFLEQGEAINPKAVQRCIHHHLKALRRLGYQIPTPTPARLNPAQTPCPVE

SEQ ID NO: 454936 - protein, 371 aa, unidentified
MKSIVYVGMDVHATNYTLSCYMVENDRCFATVQVEPSYKEILKYLENVQKNVGEPCEFHCGYEAGCLGYSLYHQLVDHGVDCIILAPTTMPNYKKNEIKTDKRDAMKIARCLAFNTYRAVYIPTKEDSNVKEYIRMRDSHKLALKKVKQQILAFCLRYDFRFTIGKSYWTQKHLAWLRSLSMDALMREVLDEYLQTYQNLMDKLERFDKRIEELAGGKTYAEKVKKLSSFIGIRTHTALALIVETGDFTRFAKAKQYAAFLGLVPGEQSSGDKQKRTGITRAGNSHLRKLLTEAAQCYGRGRVGFKSKALKERQYGNTLETIAYADKANERLKRKFYHMVLSNNKKHNVAAAAVARELSCFVWGQMTGHTA

SEQ ID NO: 454937 - protein, 412 aa, unidentified
MPRWVGRAIGLDVHREFCEVAICEDGRTRSAGRVSATPEGIAVLARSLLPSDRVALEVTGSCWEVARILEPRVNRVVVVSPDDTGITSARAKTDKLDARALASLLWKGELEAVWMPDERCRVLRRRLARRQQLVWSRSRAKNEIHAALQRRLQPKPPCSDLFGVKGRAWLSSLELPLEERESVDAGMRHIEFLDAEIAAVEKLIAKQALSWPEIRRLMTVPGVNLICAASFIAAVGNPNRFLTSRKLVAYLGLDQRVKQSGEGPARSGRISKRGSPSARWALVEAAWTAVLQPGPLHAFYVRTRNRRGHGKAIVATARKLAVLFWCMLTRGEDYAHQQPSLTRKKLRRLEITAGAPKYTRRAAGIWSTNDLMREAELELARQAETSYLRLVQDQLAGAPAKKAGASVTLERA

SEQ ID NO: 454938 - protein, 355 aa, unidentified
MDSVKYIGMDVHKESISIAVRNGAGKIVMECVIETKASMILQFINGLRGDLHVTFEEGTWAAWLYDLLKPYVTKLVVCDPRKNASMREGNQSDKIDARRLAELLRLNHLSPVYHGEHGLRSLKELVRSYLTITKDLVRVMTRVKAIYRSWGIACTGKQVYAPRHRVEWLGKISEPGVRRRAEFYYQQLDALRALRQEVRRDLLAESKKHQAWKRLCQIPSIGPIRAAVLLGVLQTPHRFRTKRQLWTYSGFGIETQSSADHRNVHGQLQRVKKPSSIRGLNRTCNHDLKNLFKGAAIVASSKPGPFQEFYTALLTKGIRPEMARLTLARKIATIALIVWKRGASFDAQHLKPQTA

SEQ ID NO: 454939 - protein, 388 aa, unidentified
MEPASIHPTAVRTDLGAIFVSLELSRSTWLITSLSPGSGEKMSKHVVAGGNVAELLDRFEQLQQKARFRTGKLFPIVTIQEAGLDGFWIHRVLEAHGIESYVVDAASIATSRRRRRAKTDKIDGEALTRTLLAFKRGEPRVCAMVRAPDPKDEDRRRICRERKVLIAERVRHVNRVKGLLFAQGVSGYQPLRKDRRQRLEELQTGDGRELPKHLKAQINRELDRLELLLEQIAAVESERNSLLSTYEEPAVEATSPAAVLLSLKGVGAEFAAVLWTEALSRHFDNRRQIAAYAGLTPTPWMSGTIDHEQGVSKAGNPRLRTTMIQLSWLWLRNQPASALSRWFVDRVQSNGGRLKKAAIVALARKLLIALWKFVTAGVVIEGAVMKTA

SEQ ID NO: 454940 - protein, 367 aa, unidentified
MKKNSTVKQSPKRARVLARGPITIGLDLGDKTSRYCVLDENGEVEAEGSVATTKKGMAAKFGCLERCRMAIEVGTHSPWLSRLLSSLGHEVIVANARQVRLISASSRKDDRIDAQTLARLARVDPQLLRPIRHRGEKAQQDLLVIRVRSALVEARTSLVNAARGLAKAMGERLPSCDAGSLGVERLASLPEKLREPLRPLLQEVESLTEKIQELDQKVEQIARREYPETQLLRQVSGVGPLIALTFVLTLEDRDRFEKSRDVGCYVGLRPKRSDSGESQPQLRITKEGDIYLRKLLVQGAHCILSRRGPDTDLKRWGLKLAERGGKNAKKRAVVAVARKLAVLLHRLWVTGEVYEPLRNSAAKKAAA

SEQ ID NO: 454941 - protein, 341 aa, unidentified
MEIDILGIDLAKQVFQLHGADRRGRVLHRAKVSRGSLFESVRTLKPRLVVMEACSSAHHWARRFQSLGTEVRLISPQYVAPFVKTNKNDRNDAEAIVEAASRPTMRFVPVKSVEQQDIQAAHRMRAILLRHRTALINQMRGLLGERGFAISRSPEEFKRAVPELLRANADELTSFCRTLLTELLVHLRAIEERIHFIEISIHSFMKRSALCAKIAQIPGIGPITATAIVAAVGDARQFRNGRHLAAWLGLEPRQYSSGGRSRLYHISRRGDTYLRTLLIHGARAVLRFVKTKTDVRSVWLQQLIARRGYNCTAVALANHNARVIQALLSSDASYVARGITA

SEQ ID NO: 454942 - protein, 370 aa, unidentified
MRDRFIGLDVHKATIAVAIAEDGRAGEIRHYGTIQHRPEHIAKLMKRLAAKGAGLHFCYEAGPCGYGLHRQIIEAGHTCIVVAPSVLPVKPGVRIKTDRLDAMKLARLLRAGELEAIWVPDAAHEAIRDLIRTRADAVDAVKRSKQQLLSFLLRHGRSFTGRGVWTRSHFAWLAEQKFEHTAHQIVCQDYINAIHDGQQRRKQLEKLVFDQLPSWSMKPVVDALCNIRGINVVAATTILSATGDLRRFPTPTKLGSYFGLVPGEHSSGDSVHRLGITKRGNMEVRRVLTQSAWTYRFPARVTADFEKQNFDADKKVRELAWRAQVRLCGRYRKLSARGKRAQVVCMAVARELTCFIWELGQLIEPRRAEP

SEQ ID NO: 454943 - protein, 482 aa, unidentified
MKKRNIYQNRSQELLSLFEEAGNSAKVMCVPMDYAKKDHVVMFCNGYGDILRKPFSVKNSPDGVKYLVDQATRSCRRRGIKKNHVFFGGEDANSYAENFVSTLRSKGWIVAGVNAHDAKKQRANLQASTDQLDLMGIATMLLNCRANCCPAQSGIYRNLRTLVRHRRKLVVMSTEVKNRIHGVVDRLFPGFLNEGKTGIVPFTSSSLYLMEDRFSPKQIRRRKREKLIEILKRFGTSKAEETADRLQQYAAQVLHTPADYIDTLQLSLAQHVKHLRCLQESVNQLEKEIAVNLAQTQGAFLTSVRGIGIVLAAGVTAEIGDSNEQKPLNNLVSYSGIIPRVKQSGGPEGKTYTVSVAKRCNRILKDYVVKSALHLGLHGPQDLMADYKRRDASGQHADFSMGRRYLRMAMSLMRTSQIYLPPRLRKAEAKMEERAGYYLMTWPYLRGKWKKLGALEAAFTKERPLGQWRQIVQELYDIRLKL

SEQ ID NO: 454944 - protein, 315 aa, unidentified
MSQIWVGIDVCKDWLDVHIRPQGVILRLRNNEVGVKYLIKQLPVPTEVGRIILEATGGMELTAALTLHQAGFPVVVINPRQSRNFAKATNQLAKTDKVDAKILAFFGEAILPELRTMAAEETRQLNDLVTRRRQIVEMLTAERNRLSAIRGKAREDIEANIEWLNQRLRGLDEQIAQQVKECLLWSEQQQILTTVPGVGKVVATTLISALPELGSLSSKQISSLVGLAPMNCDSGKMRGKRRITGGRAQVRSVLYMAALVATRHNPVIRNFYNSLIERGKLKKVALTACMHKLLIILNAMVKHKTPWRIAETTTA

SEQ ID NO: 454945 - protein, 355 aa, unidentified
METAYDGRQVVGMDLHRRRSVLVRMAGDGRRLGTAKITNSPQELRREIARAGKHPKVVLEATYGWYWAADTLAAAGAEVHLAHPLGVKAFTYRRVKNDERDAADLADLLRMGRLPEAWIAPHEVRELRELTRYRQKLAGLRTSCKDQVHGVLAKLGVTVTCTDIFGKAGSAWLDGLRLPQPYAGKVTSLRHLAGELTTEITMLSEVIASLLAGDRGYQVIQQLPGIGPVLAAVIIAEIGDVTRFRNPGQLCSWAGLTPRHRESDTKVSRGRVTKQGSRLLRWAVTEAIQRIPRDSVIGGARDAIITRRGKEAKNIAKVAAARRLLTLVFYGMRDGQIRCLARPAGPATAQASRAA

SEQ ID NO: 454946 - protein, 341 aa, unidentified
MKKFIRVGVDLAKNYFQIHALASEGAPAVTRKMTRVKMREFFSQIEPCLVGMEACGTAHYWARELKAMGHEVLLMPPAYTKPYVKRGKNDAVDADAICEAMSRPGMRFVPIKGAEQQATLMLHKTRELLVKQRTMSVNALRGHLSEFGIVAAKGIGRVDELLDLAENDAMLPNAARASVKVLAQVLEGLDKAIDDLEKEISSAHAQNEMSRLLDKVPGIGKLIASVIAASVPDPSVFKSGRDFAAWLGLTPRQNSSGGKQTLGGITKQGNRYIRKMLVLGATSLLNVVGKRKGALRDWIVGLLAKKPARLVTVALANKLARILWAMMKTGECFRTEMFAKA

SEQ ID NO: 454947 - protein, 409 aa, unidentified
MRYYLGVDWADQTHAVWVVDERGTKLTARAVPHTAEGLSEWGRELDEWRAQGIELWAAIERPEGRVVDFLLDHGVVVYPVNPKALDRARDRFRQSGAKDDPFDARVLADFLRTDHAHLHALQPSSEAAQELKLLTEDYHRQVRQQTRLVNQLTITLKAYYPRALEVAELTTALAREFLQAYPTPEAVLALTKRQWQGWARAHHLSETRTRVLWEVLQQPQLPVPAHVVRPKARLMRTLVAELAAVVAAVGEYREAIEDFFASMPTAQWVRTLPIGDHGITAPTLWARLGDAPERWESFRHLQAQAGAVPLTKRSGKQCVVQFRFACDKALRYVVDHVAFLSLRSCEWARAYYDQQRARGHSHRQALRALGAKWLKIIFVMWQHQAPYDDQYHLASMTRHQLRHPQKQIA

SEQ ID NO: 454948 - protein, 397 aa, unidentified
MYIVGIDIAKRKHEAAVIDGEGTVIIKPFSFTNNCSGYNRLLAMLAKAKLPLDEVSFAMEATGHYWLALFTRLQKEGFRVQVINPVQTNSIRNFYIRQAKTDPRDALLIAEVIRFGHFSESTLHPENIYELRELCRGRHAIVSMQADIKRKVVALLDQVFPEYETAFTNLFGDTSMEILQACPTPKELSEMPLEEFCHLIEVPSRKHFRMAKAQELQALARNSFGFAMAGDVFSTMIRLYAKHLDFLQQQVQEMDRKIAEIMDTLDTPITTITGIGPTLGAYILSEIGDINRFSSAAKLATYAGIDPTMRQSGEYNGVRNRMSKRGSPYLRRAIWLATSSAVLHDPALKLYFQKKRDEGKPYMASVGHACRKMVSIIYAVMRDNKAYTPCIPNEISA

SEQ ID NO: 454949 - protein, 406 aa, unidentified
MVNIGIDLHKTQFTICVRGQEGNAFGKYPTTEEGYTAFIQRTAEWRGTGEEVRLGVESTGNTRYFRDKMECAGMKVVVINTLKLKVVTESVKKTDKHDAATIAEFLEKDMLPESKLCSRESEQLRRLLKARGALVRTEVVVKNQIHGLITALGMEDIKGSLQSKRGRKQILDALRQCENGLVAGPLFETIERLEENINSIEEVIRGLVEGDRVVELLLTIPGCGEIGAWTIRAWTDDIGRFISPKKYVSYAGLAPWVQDSNETIHHGKITKRGPKELRTALVQVVMGWRRMKQKTLAWRLMERYEMMKKNKGSGKAIIATARKVAVIVWHMLSNEVAFDVGQMTSVKPSKKSDAVKESVKVVEEAEAVAEEKPAVLEKKPVIIKKNDTNKGKEKTGVARKKMKKVG

SEQ ID NO: 454950 - protein, 443 aa, unidentified
MSRKKRTHLRGERGQAFANKIRGIPLEQILCVSLDIHKYFHVVMIHNALGEIVMPTFEIDIFQTGFDCLCQAIDRAVTRTNAKIVLVGMEPTGHYFENLARHLNNRPQPVTLINSFAVSRNRDQQMMHREKDDEIDTAAIGDLLRRGEGTPFQPVSGIYLEMQHLSRVRHSKVKMRTALKNQIIGHLDRIFPGLVIKGKVARERYEPLFVTDFWSCQTLQHLIRICPDPGKLAAMAPKDLRSAFHEQGFAMGPKTAAKIIIYAQKVLLPDPEVIAIRSELLTHDLALLEEVERHITELEDRLHALLQQTPYWVWTKVRGLSMTQVANLAAAIGAPSHYTYAAQVFRRSGLVSGRNDSGTRRHKGKGKQVVKTGDVYLRRALMTAIISLIRHQPVLNEYFKELNRTKHAGVARVATARRAMGILWAMQRDQHSRTLGLKRGAQM

SEQ ID NO: 454951 - protein, 360 aa, unidentified
MSFQRTSVGLDVHARSVVAAALDGATGEITRARLTPAHEDVERWLRELEGPVAVAYEAGPTGFGLARFLLDRGIECKVAAPSRLQRPVADRVKTDARDALHLARLLHLGEIVEVTVPSVAQEAARDLVRAREDCRGDLMSARHRVSKLLLRQGIVYCGGKAWTGRHGVWLRGQRFEQRALQLAYDAAYETMELTVARRDRLDAAIAEMAADSEFTAVTDRLGCLRGVSTLTAFGLAVEIGDWHRLGGRTIGAYLGLVPTEHSSGTRRVQGGLTKTGNAHARRLLVEAAWHHRKPYRGPGLDLRRRWDRAPAAAAARGHAANRRLAARWAAYDARKKPAVVANAAIARELAGWCWSLAVLE

SEQ ID NO: 454952 - protein, 391 aa, unidentified
MIYIGIDVAKDKHDCFITNSDSEVLFKAFTIANNLDGFNDLYQKIESVMDDVTKVKVGLEATGHYSYNLLGYLIDKGLPTYVINPLHTNLYRKSLSLRQTKTDKVDARTIASMLMSDVNLKSYSDTFYHNEELKSLTRYRFDKVKERAKLKTSVSRLVCILFPELEKLVPTLHIASVYALLSEFPSAKHVATAHLTRLTNLLSESSKGRYGKDTAITFRDAARASIGSNMPAKSLEVKHTIKLIQELDSEIDEIENEIKIIMDEINSPILSIPGINYRMGAMIIAEIGDFNRFDSPDKILAYAGFSPSTYQSGQLDGAYAHMEKRGSRYLRYALYNATKYVCHWDPTFAAYLAKKRAEGKHYNVAISHAVKKLVRVIYHLEKTKQQYIKAA

SEQ ID NO: 454953 - protein, 441 aa, unidentified
MVNRRAYRRVKVNSIEKKSLFSSLQNQKSAILGLDIAKLEIVACLRLENGEFERPWSVLNPTGIGDLVKICQELRDQGLQIRVALESTGTYADGLRMAMDKAKFEVIRVGGKSVSDYREIFDGVPSQHDGKDAAMIAELCAIGKGKLWTYKPQSESMCEIAYQVRRMDAFQKELVQWHGRFEAHLARHWPELSQHIKPGRASIMKLLLKHGGPAEIATGKDTIEQLMRWSKGKISEAMASNIVHSAWITGGIPMTRQDKDWMKEICTRLLEYRNSLKACENAIGKQLTQDMFWSKYVNDVGASTLGVILSKLGDPRDYGSAGAFLKASGLNLKELSSGKRIGEKAITKRGPSAVRRWLYFWAMRAVQREELREWYYRFHHQHFGNADRPSSHRKMKGIVALMRKLMKSLWSSMHKGEAFEYGKVIAAIAKPKRRRRRKTKS

SEQ ID NO: 454954 - protein, 330 aa, unidentified
MNYCGIDVSAQDLIVALRVADHDLGPESFPNNAAGHRRLLAWLRAHRAQVRVTLEATGAYSLDLALFLAAAERIELAVVNPKLIRRFAESLDERSKDDPLDARVLLEYCARMPFRCWQPPSPTLLAVREITRHMLATTEVRTATRNRLHAARSTRSTPACVRQELERSLRQSEASLARLQRQARSLLLQDSSLEAQFQFLLTVPGIGELSALQLLAEVGLLGQRSARQWVKHAGLDVRHYSSGASVRRLPHISKCGNRHLRRALFMPALVAARFDPSLRACYQQLLARGKSKRQALTALMRKLLHAIYGMFRHHQPYRGDLLCPAFALAA

SEQ ID NO: 454955 - protein, 318 aa, unidentified
MLIHYIDIAKRNFVIAVSSLSKTKTETNNPKGIAHTIEYLKKHKVALVVTESTGGLEIPAAKAIRRAGIAVIIANPRQTHQFAQSQPLTKTDAKDAKMPAFFAQMTAQKEDSQTMPYQPPTEAEEVLEALVNRRNQSADMRTAEKNRLHQVHETQVGSVKQLIAHFDRLIDELDKQIDDHTHTHFDGKAQVAEQIKGIGSITTATLMAMLPELGRLSHKRIASLADIAPHPRESGETKFKSRCFGGKSAVRKALYMATVAATRFEPLIRDFYQRLPSEGKPYKVAVTACMRKLLTISNARMRDYFAENDTAENGIRTA

SEQ ID NO: 454956 - protein, 341 aa, unidentified
MKNVSTIGLDLAKHVFQAHGADKSGAVVFRKKLRRQQVLPFFATLPPCTVAMEACAGSHYWGREIGKLGHSIKLIAPAYVKPFVKRQKNDASDAEAISEAAQRPTMRFVSVKSEEAQAAAIVFRTRDLLVRQRTQTINALRGHLAEFGMIIAKGPQHLSKLIAMVGDPTSHLPEAARSILALLVEQLRALEERVTRLDREIAGRAKEDKVARRLMTIPGIGVVTAVALAALAPSPETFKRGRDFAAWLGLTPLQRSTGGKERLGRTSRMGERTLRRLLIIGASSVAAWTARKGALAGSWLDRMLRRKPPMLVRVALANKMARVAWALLANGGVYRTPIVAA

SEQ ID NO: 454957 - protein, 323 aa, unidentified
MTYILGIDVAKATLACALRLPSAKYKNKTFDNTPQGFIKLNSWLTEHGVDTLHGCMEATGIYWEAVAEFLADAGHTVSVVNPAQIKAFGQAQWGRTKTDKVDARLIAEFCLAQRPEPWHAPSASVRDLRALVARREALIGMRTQESNRLEVARERVRENIQQHLGHLDQAIAEVEAAIRQRVDDDPSLKQQHALLESIPGLGRVTIPVILAFYGGTPRFKTSKQAVAFAGLDPRQHESGSSVRGKPRLSKVGHSALRKALYMPAMVATTRTAWGQAFKTRLAAAGKPPMLILGAMMRKLLHVAYGVLKSAQPFNPALHGACVG

SEQ ID NO: 454958 - protein, 473 aa, unidentified
MSKGSGNGTTRGDRRRNARRERLRGLLPRDGAVIGIDLAEDKQALAVVDHDVRVLARKTVKVKAFRLGEALDWAVAQAKVKGFKQVAVACEPTGPRWMQVQRLCAERGLPLVCIQPLVSHIAREQQDYTPHKTDESDCVLIGRLAAELHCYIPEELDETWAQLRHLGRRRAQLITAATASVQRIGDFLSVTWPVVTEVCAQPFKSVTWLAALQVVTSRCGGDPARLAAMGPEEFTAVVRAAVPAWGGKKGWGTICGRVFAATGDTEGVVAWSRRGLLRRVADELGDLARTRAQLRAVAADMVMVLSELGLSRLGDIPGLTAVGAAAILAETGDPRRYDSSSSLVKHAGLSPSENASGAFEGQARISRRGRPGLRLTAWRAVWPMLRLNPVMAAKYAAMTQAADAAVASDAGSQPARAAASAARARRAKARVACAASLLRWIYSMVVHGTSWDAAVASGAAACQHAPRCQPEAA

SEQ ID NO: 454959 - protein, 331 aa, unidentified
MGLYIGIDVGSRSCAMSWRDKGRVAGSWDIIQTPKGRKAAVKKLLSLKPVVVVMEATGVYYLDLAIELAAAGLPVSVINPKSFHNFAKLTLTTSKTDGIDAQLLAEYGERMTPRLWVAPTPIQLELRAIGRHINRLTCHRTRAKNELHALQATETSMALLIEDEEEAIAMFDKRIERFRVAGRELISTCPTLSAQFKHMIAAPGMGEVSVFAALAELTTLPTTLKSSQVSRHAGLDVRLTQSGTSINRPGRMSKAGNAYLRSAMFMPSMTAVRCDPYVKAFFEALVSRGKRKMQAICAVMRKYLTGLWACMRSGEDFDTAKLFSEKHFVKA

SEQ ID NO: 454960 - protein, 430 aa, unidentified
MKSNTQNAKIEAITEKTLVLGIDVGSETHYARAFDYRGIEYSKKPFKFSNTEAGFVTLKEWILDLKERHEKDKVVPGMEPTGHYWFNLGKFLQDNEMKPVLVNPHHVKKSKELDDNNPTKNDRKDPKVIAGLVREGRYMIPYLPDGVYADLRTASNIRFQLQAELTRIQNRISRWFNVYFPEYKTVYGKPDAKSGMLILKAAPLPEDILTLGIDGVNQIWRDAKLRAVGKARAKILIEAAEHSVGSKEGAISARMEIRMLLEDYESRNICLQEVMTLIEGLVKQIPMAEKLLEIKGVGIKTVSGFLAEVGDISRFNTPKELQKLAGLALVESSSGKHKGETTISRRGRKRLRYLLFEVAMSLVAKNPEFRELHNYYTTRRLNPLKKMQSLMAIAAKLIRVFYAMLTKGVDYDPKKMVSDIKRPAVYLQAA

SEQ ID NO: 454961 - protein, 396 aa, unidentified
MPKQNYASGGKQPLEKRISQLQKSGLKYLIMDVHQEATVNLVYDGSGRILDERVLATQPQPLLEYIGGIKGEIRLVFEEGTQANWLYDLLCTKVKQVLVCDPRHNHLLKVGNKSDKLDVRKLGALFRSDMLKPVFKQRLAHRNLRELERNYSTLVKDTTRMMNRIKAIYRGRAIRSSSNLYCVNKRQYWLGLLSDLGIGLRAEHLFKALDYLRQLRQEARAALLKESHRHKISRILETIPQLGPIRVAQIMAIAITPDRFRTKRQFWCYLGLAVVTRTTSDFGIKNGQPYRRQKAVSTRGLNQNHNHDLKNLFKSASAVAAAKAGPFQKFYDAQIGKGLKPEMARLTLARKSQRSPWECPATFVPVEMRQTGTRGAVYGTREEAYGGADRESAATG

SEQ ID NO: 454962 - protein, 346 aa, unidentified
MTIVEATRAVTAGIDTHGEVHVAAALDEVGGLLGTRSFQADPGGYAELLGWLEAFGVVAKVGVEGTGSYGAGIARFLTKAGVHVVEIDRQNRQARRQSGKSDPPDALEAARAALSGRAHGVAKSRDGSVEAIRVLVVAKRSARGARVKALGQMRHLTFSAPDQLQSRLKGLPIAQFVAAAQGLRPTRSPDVVTAATKAALSSLAHRVADLEEEISDLDAMITPLLEETAPELLAVYGVGIDTAAALLVAAGDNSDRLHSEAAWAHLCGVSPLEASSGKVTRHRLNRGGDRQANRALWHIVITRLASDPRTQHYMERRVEDGRSKSEAIRMLKRYVAREVYHYLPRV

SEQ ID NO: 454963 - protein, 339 aa, unidentified
MKHTVVGVDSAKRVFQLYWVERETGEIVNVQLKREKFLEHFANRAPCLIGMEACGGSQHWARQLQGLGHEVKLLPGKRVKPFVGGNKNDVADARAVWTAVQQPGMKSVAVKSEAQQAVLALHRMRSQLVKFRTAQINGLRGLLVEYGEVMPQGKTGIRKGVLKALPRLADRLPAVLIDTLREQFERIGQLDAQVADIERRLRQWHKENPESQRIAAIPGVGLLSATAAVATMGEAKAFKSGREFAAWLGLVPRQSGTGGRVKLLGISKRGDTYLRTLLIHGARSVLAHSKEPPQWATNLAKRRPQNIVVVALANKMARTIWALLAHDRVYQKGFVSQPA

SEQ ID NO: 454964 - protein, 410 aa, unidentified
MRLFVGDDWAEDHHDVELMDAAGRVLARRRLPEGVAGMARLHELIGEQLGDDLGAEVVIGIETDRGPWVAALVAAGYTVFGVNPLLASRFRERHGVSGAKSDAADAHMLADMVRTDSHQLRAVAGDSAGAEALKLLARTHKTMIWERTRQVQRARHLLREYFPAALEAFDDLDAPDALELLGRAPDPARAARLTRAQVSAALRRAGRYRIADRAEAITAALRSEQLGQPPALTAAYAAALRALIAVIITLNEQVMILQEQVEADFGRHPDAEIYRSQPGMGAILGARALGEFGDDPNRCATGKARKNYAATSPLTRASGKKKTVIARFIRNERLTDALRAQAFAALTGSPGARALYDAERARGTDHNAALRKLANRLVGILHGCLKTRTLYDEATAWPNHGKTPQTRFAA

SEQ ID NO: 454965 - protein, 373 aa, unidentified
MTDYSAFVGLDVHKETIAVAVADAGRTGEVRFWGEIANTPDAVARLLRKLGGRHSRIHFVYEAGPCGYGLHRQIMATQHHCEVVSPAQTPRKPGDRIKTDRRDAIILARLSRAGELTSVWVPDQAHEAMRDLIRLRQAMVKDLRAARQRVKSFLLRHGRVFKGTSWKRSHRIWLGNQSFAHPAQQIAFQSYLNAADQAQACRDAVDVQIRQFASEWSMAPVVEALQALRGVAFVTAVTVVCEVGDIRRFAKPRQLMAFLGLVPGERSSGETRRQGGITKAGNVLARAALVEAAWSYRTPAKIGAQMMLRQEGIPQAAKEIGWKAQVRLCGRYRRLMARGKKSPLAITAVARELVGFIWAIAHTTEPAATEGAA

SEQ ID NO: 454966 - protein, 392 aa, unidentified
MIYVGIDVASQKHDCFLLRDTGEVFSKKSFTIKNDFEGYKKLHNSIQSFVESTKDSNVRIGLESTGHYSKNILLYLIKQGYQTTLINPILTNMDRKASTVRKTKTDKIDAEAICKFLDKNRFEFKPYTLLSYHIDALKSLTRQRFSLVKQMTQQKLIFQRLVNVIFPEFLSHFSNDYGESVLNILYSYPTPKKLAKAHKESITKLLHGRCKITSSEILELAKNSIGQSEDYLGFELKHTIDMIRFYQSQVEIYNKQIETELNETEYGKIITSIPGVGIITGAMIISEIGDINNFSNSDQLLAYAGLDPSVYESGQFESIHNKPSKRGSKYLRWALHQASSIIWQHDNTFNEYYQKKIREGKHHYVAIGHIDKKLVRVIFSLLKNKSLFIPQK

SEQ ID NO: 454967 - protein, 364 aa, unidentified
MDPPLKDGVIMRQHRISIFKKKRRSMKDIKILGVDIAKDVFQLCGIDEWGKVIYTRRVKRAQYVSTVASLKVGCVVMEACGGANHWYRTFMGMGISTQLISPQHVKPYVKSNKNDRNDAQAIAEAASRASMRFVRGKTVEQQDVQALLKIRDRLVKSRTALINEIRGLLQEYGLTMARGAKRFYEELPLILASEAVGLTPRMKRVLNCLYTELLNRDEAIGDYEEELKAVAKANEDCQRVQSIPGVGYLTALSVYASVGDIHQFHRSRQLSAFIGLVPRQHSRGNKEVLLGISKRGNVMLRTLLIHGARALLRHVKNRTDKKSLWLKALIERRGMNRACVALANKNARIIWALLTRQETYRCGA

SEQ ID NO: 454968 - protein, 438 aa, unidentified
MTNQHLKVIAGIDTHADTHHVAIIDETGRHITDKEFLAVGAGYRNIAAFITGFGSVIAAGVEGTGSYGAELARVLTGEGIRVLEIMRPNRQGRRLRGKSDPLDAYQAAEAALAGRNVATPKSRDGAVESLRVLRAERATAMRARVAVMTQIKSILTAAPEALRTKYRHLTRAAMMTALEKTRPAGSMAEPVNATAAVLKRLAIRYRALHQELAVIDAELDAIITIHAPMLRDLKGVGTDVASQLLVTVGDNPERVTTEAKFAALVGVAPIPASSGKTRRHRLSRGGDRQANKAIHHVALVRMKTDTRTRNYVARRRAEGKSTKETIRCLKRYIAREIYDQIIHPQPAPDAGALRILRKSKKITLQAAADSLHVWPTSLSRLERGLTRHDEFYQHYEDWLNSPSAETARPPLPCGSDRHTAPQRRGTGLARRLPPSLPS

SEQ ID NO: 454969 - protein, 419 aa, unidentified
MDVLSPRCCGLDIHKKWIVACRIIPGPTGTPEKQVRSFGTTTAAIEQLASWLSDGQVTHVAMEATGVYWKPGFNLLEARFRLILANAQHIRQVPGRKTDVTDCEWIADLLRHGLLRASYVPERVQRELRELTRYRTSLVRERAPEINRLQKVLEGANIKLGEVATDVLGVWGRAILEALADGETASGVLAAHAHGRMRAKRPALDAALQGSMGPHQRFLLRQQLAHIDALDQLIQAVSQEIDQRLEPLAEQTPAGPAAEVLDRLDSVPGVGRRVAEIVVAEMGLTAAAFPSAAQPASWAGLCPGNRASAGTQRSGRTRKGNMWLRAALVEAAYAATRTTSYLAAQYRRLAARRGHHRALVAVAHSILVSVYHLLREGGTYPELGAAYFDQRDRQHLSQRLVARLEQLGYAVQLETAAAP

SEQ ID NO: 454970 - protein, 404 aa, unidentified
MIFNGIDIAQESSKFYIMDAEGKKVRAFSLENNKESFARIQKELDAISPDKNKFLCGMEATGPCWENLYCFFKDAGYRVVLLNPYYVSRFRDSMGKKAKTDTIDAEVIASYLRNGKYIESQVVEEDIQILRELTNLRYKFVKERKDYQRQIFSLLTIVFPEYKNTAISNPFAIASLEILKHWPTAHHIAKAKVRHIENLVRSIQGNNFDLTKIEHLVKTAQSSIYSGRAIESRALVMKTLLSYIEKLSLSITEIEHQIETILSPNSSNMDDNFPGKNLLSIPGVGKKTVAVVISYLGKTGASFPNATCANGYLGFYPKIYESGSKKRENKISKRGVDILRWALYMSAVACLVHNKEMQALYHKKVSQGKGKKQALICVSKKLFALMLSMLKSGENYNPARVFVS

SEQ ID NO: 454971 - protein, 375 aa, unidentified
MMHVAVGQPTQEAYRTPMNSVGLDVHKTRCVACVKTQEGRIVEEFAFQNNPHGHEELVMHLKAYPEAQVAIESTGNLWIPIYDRLEDEQIHTVLTNPKKTRLIAEAKIKTDKLDARILADLLRANLLSASYVPPPEIREQRSIIRERARLTQLRTIIKNRIHTLLDKHAYKSPFTDLFGKHGLEWLSKLELPAGDRILLEVNLEQLNSLNHSIHRLTETIAVSAIDNPEVKLLMGFTGIDYYSAMFLINEIGPIARFASPKKLVSYAGLAPSTRQSGNHTTHGPITKEGNSHIRWILIEAAHQAARHDPRLNQFYLRIMKRRGHNRALVAVARKMLVTIYHVLNHHSQYRGLRPELFENKIRRLERITESSLQTA

SEQ ID NO: 454972 - protein, 424 aa, unidentified
MKNCNKQNEKIELVDEKTLVIGVDIGSYDEYARAFTCRKQELSKKPLRFHNTAEGFKTFKDWAVNIMKANGLEKIIVGMEPTSIYWEALATYCKDNGMILVHVNPAAVHKSKELDDNDPSKNDRKDPKVIAGLVADGRYQFPYMPEEEYAELRELSNLRIRTQESLTQCKNRLSRWYSRYFPEFKGAYKNVVSKTAMMILALYPLPEDIVTLGVEGILQIWRSKKVRGAGERKARKLYEAARNSIGRKEAASIARIEFKSIKEDLDRYQERLDEIEKKADEILPKIKNVDKLFEIKGVGKATVLTFLSEIGEISRFDNPKEIQKLAGYAIVTNESCKHQGEKRISYRGRKRLRWVLYQTALSVIAKNAEFRQIHAYYTTRANNPLKGIQSVVAVACKMIRIFYKILTDGVSYDGTKMTQDIVHA

SEQ ID NO: 454973 - protein, 316 aa, unidentified
MESQRPFVGIDISSQRLDVDTLPASHRFSKPHTEEGIASLVQHLKPLNPQIVLLEATGGYEIPVAYALYEAGLPVVIMNPKVLRHFAKAIGKLAKTDKLDAQVLALYAQRIQPPVRPLQDQEQLELANLMTRRRQLQGMIVMEENRRRTCTPRVRGNIDRSLAHLRQLLKDLDREIHDSIRRTPLWHENSEILQSLTGIGPKVSASLIADMPELGTLTRGKASALAGLAPMNRDSGQFRGRRMIQGGRPAVRQALYMAALVASRHNPVIRAFYQRLRLAGKPAKVALTACMRKLLVILNAMLKNRTHWNPQLPIAA

SEQ ID NO: 454974 - protein, 375 aa, unidentified
MRKKVRFLGLDVHAETIAVAVAEPDGEVHSLGTIPNRVESIRKLVKKLGSVEQLQACYEAGPTGYVLYWQLAELGVKCEVIAPTLVPVKAGNRVKTDRRDAEKLARSYRSDDLTAVWVPDEGSEALRDLVRAREAAKQDQLRARNRLSKFLLRSGQRPAPGVKPWTQIYMAWIRQIHFAQMAQESTQLDYLYEVEHMGERVVRLEQAIAEAVKLASPELQEVIKGLQALRGIAPISAVTLAAELGQISRFEGARQLMGYSGAVPSEDSSGKRTQRGSITKTGNAHLRRIVVEAAWSYRLRPGVGPALRKRQEGVLEEIKEIAWKAQHRLHKRYCKLAAARKDQRKIITAMGRELLGFIWAIGIKAETAARQEIAV

SEQ ID NO: 454975 - protein, 460 aa, unidentified
MRRWPTERKKISARLVEDEEYQLRYERVAGIDVGKGKADVCTRLPPVREGGRRVSRTEEVTSTVAEVAALAERLLADGVELVSMESTSGYWRIWFYVLEAAGLNVQLVNSSHARQLAGRPKTDRLDAQWLARLTEMGLLRPSFVPPAEIRALRDLTRTRLQLVHDRTREWQRLEKLLEGALVKLSSALSSLARVKSARLILEALAGGERDPRTLAGLAAAQVRAGRAGIEQALEGMRYGDHHGRLTRIHLDHITFLDRSVAAVEDDIAAALDAIPAAQGIDAAGARSPDPGPGATVLPAAERLAEIPGMSLDLARAIIAETGLDMTLFPTAAHLVSWAGLTPVARQSGPRSRKPGKGHGDSYLRGYCTQAATGAATTDTFLGERLRRLSRRLGGNRARCAAGRSILVIIWHLLADPEARYTDLGPGWHARKTDTDRRTRSLLNQLRALHPDSEITITPAA

SEQ ID NO: 454976 - protein, 352 aa, unidentified
MIVLGADTHKRSHTIAGVEMATGQVLGDKTVGVGTRGFSALLIWARALDCERVWALEDCRHVSGALERFLIARGERVVRVSTRLMAGTRRCSRERGKSDRIDAISVARAALATGIDTLPTAALAGPELDLRLLVDHRERLVRTRVALNSTLQWNLHDLWPELSLPGGALFSNKWSAKIARRLARAEQTMRVRIARDELRRLRELTATIKALEAEIAELVTALAPQLVAEPGCGPLTAAKLVGEIAGADRFASDAQLARAAGTAPIPASSGRTDRHRLDRGGNRQINAAIHRIAVTRARCDPQTQDYIARKKAEGKTNRDAIRCLKRHLARRVWNLLRTPTPIRGETLTPSIS

SEQ ID NO: 454977 - protein, 341 aa, unidentified
MKYVGVDLHKQSISVCVMVKDGEKRRVDRRISLQCADEEAIRRQFEELGPFQVVVEATSSYEWFLLLIEDLANRWVLAHPKRLRVIAESKNKSDKIDAHVLAEFLLLDMIPEAYRPTPRIRQHRVLVRHRHAVQRRITAVKCKLRHKAAFYNADTPQLFTARGLKHLAGIAMSSADRFECRALEDQLAFLQGQLKAVDQELLNFAKTAPVAEREARAVLVTMPEVGPVTTDVVLSETGDVRRFRGAKRIVAYAGLDPGFRESAGKGKQLSITKEGSRLLRWALIETAWRLVGKTARWRRLFERLRASTGHKKKAIVGVARRVLCVMYAMLRDGKAYQLAAE

SEQ ID NO: 454978 - protein, 338 aa, unidentified
MQTFAAIDLHSNNGVLTIIDETDRVLKQRRIANKLEEFIKELEPFRATLQGVAVESTFNWYWLVDGLQAKKFPVTLVNTSAIQQYEGLKRSDDEYDAWWLAHMMRLGILPKGYIYPRENRAVRDLLRKRATLVRQRTANILSVQNLEARNRGTKISSNEAKRLTGTRVAELYGEGDLALALTTTIAVIDSLTEQTRLIESAVLKKARLRPEWELVTSIWGIGKILGLTIMYEAGEMSRFSSPGDFASYCRCVNAQRFSNGKKKGENNAKNGNRYLAWAFVEAAHFAVRFYPEAKRFHDRKAAKTNGTVAIKALAHKLARAAFHVMRDQQPFDPKRVFV

SEQ ID NO: 454979 - protein, 315 aa, unidentified
MVERVVVGIDVSKAKLDVAILPSGEQFTVSNDQSGIARLVQRLRPLQPDRVVLEATGKLERLAVSELISAELPVAVVNPGRVRHYAKARGKRAKSDPLDARLIAEFTQDLPPELYPLPDADTQALAGLCQRRNQLLEMQQMENNRLERADPATCKSIKAVLRMLQRALEEVEQEIERRIKNSPVWQAKRELLASMKGIGVTSCSALLAWLPELGQFSRQRICALAGVAPYDDDSGERHGRRQIAGGRAVVRRVLYMATLSAVHHNPVLKAYYQRLLERGVKPKSALIAALRKMLTILNAMIRDNTPWRPPCPTPA

SEQ ID NO: 454980 - protein, 399 aa, unidentified
MKTNLSLELRVSVDVGCHSHNVAIGLSTGEIVDEFSIVHGPEGFRHFFSRIEKQEREFGCPVSVAMEGYNGYARPLDTLVRARDYRLFNINNLKLARFKEIFPGAAKTDPIDARKGLELFQLRDHLPMAKDVLQEVRTTPRENEILKRLSRRRRRLVNERVRVLNGLQADLQAVCPGLLEITADAGNLWFLRFITSTDDLRKLARVREATIRKIPGIGVKYAGLILSWQKRSQFSHDAEWVGEMIQEDAARILELHDKIQTLEFRMEEVAQGSEIAQALLTIPGFGDICIAELAGEIGTIERFGSEASLALYLGMTNLDNSSGKQKGSKPPRQVNARAKAAMMIAVDRHRKKVCQSQNFYDKKRSEGKKHNQALRALGRHLCRIIFKMLKENRGYLLPS

SEQ ID NO: 454981 - protein, 323 aa, unidentified
MQGKKLPEPSAESKVYLGIDVCKARLDVYLHPLGRRLHVANSREGLKQLRRELAGCGIVLAVIEATGKYHRLAHRTLHAWGLAVAVVNPLRSRLFAEASGTLAKTDHIDARMLAVFGESLEPAAAPPLPELVEELQELVRARQAATAEATALTNRLGASQAGFLKRELAHPLKALKAHIARLDDEIERRLAEDGALARRYQILMSIPGIGPVAATSLAVGLTELGLASNKSIATLVGVAPVACDSGDKTGQRHIKGGRAHLRTPLYMAALAAARCNPELKAFYRRLRDNGKAAKVALTAVMRKLVVLANTLVREDRLWQPTRP

SEQ ID NO: 454982 - protein, 416 aa, unidentified
MKTYILRDSKTVEPQTPERPGRRSDPAVTVSVNAICGPAPATASGLILFIGLDVHTDSIAVSLAPSESTEVRRYGIIGGTHDDVLRLAKKLQAAHPGVRLKFCYEAGPHGYPLARCLQAHGYDCILVAPSKIPRQPGDRVKTNRRDADQLARLYRAGELTAIYVPDPQDEAVRDLIRARYQVLKQQHRARQQLKMFLLRHNFRYAGTKAWSAAHLRYLATVKLPFAEQQFVFQEMVNVITEAGERLARYEAQIPRVLPGWRWAPVVQALMSLRGVAWLTAATLVAELGDLHRFATARQLMGYLGLVPSEASTGAQRKQGGITKMGNGIARRALIEAAWNYRAPARLSRELLKRQEGLPKEVKDLSWAAQTRLHHRYQHLTKVKHKKATVAAAALGRELSGFVWALGRLVRPHAKKT

SEQ ID NO: 454983 - protein, 412 aa, unidentified
MTATNQFAAHVGLDWADKKHDVCVQFKNGERVFHVIEHTAEALDVWLTELHQKVKGRIAIALELKKGPVVYALQKYPFITVFPVHALSLARYRQAFSPSGAKDDPQDAELALELMLRYSQKIKAIEPDNADIRLLQQLVEQRRQLVEDKRRFVNRLINTLKQYYPQPLEWFSHRGSLLLCELLIRWPSLQQLKRARHDTIRNFLNAKGGRAMALTEQRVVSIDNAIPLTTDPSVIEANALMATALATQIKVVSEIIKTYDERIETLFDTLPDSGLFKSLPGMGPSMGPRMLAALGDNRDRFNSAEEIQNYAGIAPVTERSGQKSWVHWRWLCAKFVRQTFVEWAAKTVNSSYWARLYYQGLREKGKSHQSAIRALAFKWIRIIYRCWKTRTQYDEAKYLLALEARRSPLLKP

SEQ ID NO: 454984 - protein, 311 aa, unidentified
MEPVYAGIDVSKATIDVAITGEKEVQSFSNDEVGVMKLVSYLKIKSPVLTIAEATGGLEKLLAGYLTEAGLQLAIVNPKRVRDFAKAKGKLAKTDNIDARIMAEFALDIKPIVRPLADKDTEEIKAIMTRRHQVREMITAERNRLYLSNTAVKPSIEEHIEWMKNQLKDIDKNLEDQIKKSPIWKEKDALLRSVPGVGKITSITLMGSLPELGKLNRKEIAALVGVAPVNRDSGTMRGRRTILGGCARVRTRLYMAALSATKHNPVIKEYYNHLLKLGKAKKLALTACMRKLLTILNAMVKNNQKWQCKTI

SEQ ID NO: 454985 - protein, 384 aa, unidentified
MNKHNILFIGLDTHKVSTEVAHVEDQLGAKPVHFGKINTTKAAITKLARQYQSKYPHATLHFVYEAGPCGYWIYRLLTSLGHCCYVVAPSLIPKKPGERVKTDKRDALKLAKLLKDEELTPIYVPEPGDEAIRDLSRSRETAMKDLKDAKYQLKALFLRNNITCKVNDNWSLQHLRWLTELILPHPSQQIVLQEMIQIITERIAREKRLANELFHQVKHWRFYPVVKALQAVRGVRLLIATGIIAELGDLRRFDHPRKLMSYLGLVSKEHSSGDKRRLGSITKCGNGRARRLLVQGAHTYKHKANISTELQKRQEGLPKEITDIAWQAQLRLCRRYNRLMSRGKHRNVVVIAIAREMAAYIWAIAREVVISPVNPRLRISRVPA

SEQ ID NO: 454986 - protein, 355 aa, unidentified
MVAVFRGDAREAEVVQQLPNDLRKLRRFFQRWQAHGEVRACYEASGAGYVLHRELTGWGFHCDVVAPSLTPVRPGEQRKHDRRDAIQLGRLYRAGELVTIRIPTPAEERVRDLVRCRQCFQREVLRSRHYILKFLRRRGFIFREGSPWRRKHRRWLESLLHEEKLAPEDRAVFGEYLALLDYKISRRDDLDEQIARIAFSASYRPLVERLCSFRGISTLAAMTLATEIGDWRRFERPGQLMAYLGLVPKEHSSGDRDRKGPITKAGNSRCRHVLVQAAWRYRLRPAVGVDLKKRQKGQPPMVIAHAWKAQHRLYKLYHRIANRKSNQIAVVAVARELVGFLWAVMKDLEEQKAAA

SEQ ID NO: 454987 - protein, 318 aa, unidentified
MGLSDRGNLEARRRHGLTRERSLGLDARMAIRRADRNPSLPEEAMTDKTIVGSDISKDWIDIAVAGARHVKRLDNTAEAIGDWLDRSAPTAVVGFEPTGGYEQPLLACLVARDIVPFRVHPNAVVAFRKSRGIRAKTDRIDARLIADFAADAYARGAVRPAIRGDQTLRELAARRRQLVDSLHAERCRLERAAAPAVRNSLGAAVESLVGNLKEIESAIAAAIAENAETAQSAALLQSVKGVGPVTAATLLADLPELGRLSGKEIAALVGLAPQNRESGKTKARARTGHGRPGVRKVLFNAARCAIRHNPVLKAFIKS

SEQ ID NO: 454988 - protein, 340 aa, unidentified
MKLYGAIDLHSTNNVTVVIDEQDRVVYQKRLPNDLALILKELSVYQSELQGIVVESTYNWYWLVDGLMEQGYRVHLANTAAIQQYEGLKYTDDHSDARWLAHLLRLGVLPEGYIYPRADRPVRDLLRKRSQMVRQRTTNLLSIQNLLTRNTGSSLNAKRVKGLDVQQVDELLTNPDLALAVKANLSVMLSADEQVELLEQSVTQRVKLRPQFCFLKTVPGIGEILALTIMLETGDIGRFPSVGNYASYCRCVGSQKISNGKKKGQGNTKNGNKYLAWAFVEAAHFAIQFNSKIKSYGQRKKAKTKGVVAIKAVAHKLCRACYYIMRDRVAFNITKAFGQK

SEQ ID NO: 454989 - protein, 412 aa, unidentified
MQDILTCAMGLDIHRDVIVACLAKGELGTDPEIEIRSFSTLIPEMRKLRDWVLEAECHHVAMESTGIYWQPIYEMLEPCFDGQISILVVNARHMKNVPGRKTDMRDAQWIATLLRAGLLKGSFIPDKTFRELRHLTRYRKSIVRDITAQKNRIDKFLQSSGFRFTAFLSDAFGASGRNIIRHLMEYGNISREALDRCLKTQTRKRIDEILIALNGSLSEHQRNFLRMIFGHLEALEQHRHTVEDAITKEITKHEEALSLLCSIPGIDVTAAAAIIAEIGTDMSAFPDSQHICSWAGLSPGNNESAGKRKSAHINKGNPYLKSMLCEVGWVISGKRTLHLSGWYWKIKQRKGAKRATIALARKLLALIYTMLKTGSPYSEECFETRRKQSERKRASRMVNELQKLGYFVVAPG

SEQ ID NO: 454990 - protein, 351 aa, unidentified
MESYQNDLVIGIDLGDKYGHVCRLNMSTGELAEDRIAMTPKAIAKFFGPVDARLVAIEVGTHSRWVSHTLEELGVPVVVANPRRVQLISKSDSKNDRTDAELLARLASVDPKLLAPIHHRSDQAQADLAMLKTRDSLVKSRTAMVNQVRGMAKSFGFRLKKCAAVSFPGHVCNDIPAVLMPAVSPLLDAIEAQTKLVKILDRQVKRLCEESYPETRSLLQVHGVGPLTALAFVLVIEDPSRFAKSRSVGAFLGLRPRQSDSGKLQKQLRITKAGDSFLRSLLVQCAQYILGPFGQDCDLRRWGHSLALRGGKNAKRRAVIAVARKLSTVLHRLWISGDEYHPLRSQAEVPA

SEQ ID NO: 454991 - protein, 421 aa, unidentified
MKHPTAEHFAAFIGIDWAHAKHDICLQVEGSKALERSVLIHSPEAIDAWVRGLRERFGRRPIAIALELDKGPLVYALQKYEGFVLFPVNPTMLAKYRQAFTPSGAKDDPTDAELALQILLRHPEALKGLKPQSAPMRSLLQLVHDRRRLVNDKVRITNRLTNALKNYFPQPLQWFRDKDTVLFCDFLSRWPTLKQLKRARRSVLESFFHEHNVRRRAVIEERINAIRSALPLTEDPAILEPQALLVTALIAQLRCVLEAIERFNSAIEATTAQLPDYVIFSSLPGAGPTFAPRLLAAFGEDRERYQRCEELQKYSGIAPVTERSGQKSWVHWRYRAPTFLRQTFVEWAGETIPRSFWAKAFYEQQRAKGLSHQAALRALAFKWIRILFRCWQDRTPYDEATYLLALQRSGSPLLKNLSTST

SEQ ID NO: 454992 - protein, 341 aa, unidentified
MSARTLYIGVDVHEESQVAVYGKEGELLQEKRLPTRRLPSFVSSLQGGEKHVGIESVGFIYPVYDALLKAGCDVAVANPNNIQLIARTKIKHDKVDARVLGELLRTNFFPRSHIPDAETREKRLLTRDRVRYAVKRAELKNSIKWFLKRRGVTVKKPLSIEGRMEIKSLALPELDYRLKGLELVESIVNELDRRISAAASKDRGARLIDTIPGVGAYTALFLSSALDDVNRFPDSKHACAYLGLVPSLHQSGDISYSGHITRQGNKWLRRNLVECARWSVRKDPHMQRFFLRIAHKRGRKKAHVAVARKIVSYAYWMLKRNLTYEELDPWTVDSGSSTSFE

SEQ ID NO: 454993 - protein, 418 aa, unidentified
MNAEGNTRGSRRYVALDIHKHYCVIAAVDREGRVVLHPVRVEHAELEGWLRKNLCSSDHVVIESTTNAWHVYDLLEPLVERVVVANPIQVKQIAQARVKTDIRDTLILARLLAANLVPDVWVPPAHVREMRQLLSQRRQLVETHTQIVNRMHSVAHRHHLKHERGKRFNEKNTLWQKDKRLSKTEQFQLELEMENRAYTEKQIGRIGKAVAKMSHQKPWAESMTYLMQLPGFGVITAMTVLAAIGEIQRFGSAKQLASYSGLTGGVDQSGTHLVQKGITKEGRKELRWALVEVAQRAVKSDPLWKHRFQEMQKRMHRNQAIVAIARRLLELVWYVLTRRQPYRHFSHERIAYKYLTWAWQMDETARDGLTRQQFTRYYMMRLGIGHDLTRIALDPKHPRRISSEAELLVLRPELNHIE

SEQ ID NO: 454994 - protein, 417 aa, unidentified
MIRKVMEVIHQRVGGLDVHKKTVMACRRRLLGDGQVESEVRVFGTSTLQLYGLSKWLSEWGCSHVAMESTGVLWIPVWNVLEADFQLLLTNAQQLKKVPGRKRDVGDAEWIAQLMQCGLLKPSFVPSREVRHWRTLTRQRMKLNDQHTSVVNRLHKVLQQGNIKLSSVATDVLGVSGRAMIWAMIEGESDPETLAGMAKGRLKSKHEQLVESLEGRLNQDDRWVMKELWEQLEYLEEEIARYDDQIKEKMSAYEESLRRLMTIDLIERRSAENILAEIGPDMSFFPSDDNLVSWAGLCPGSDESAKKNRSGKTPKGNQWLRRALVEPAWGAARRKDGYLGAMYRGIAVRRGEKRAVIAVARTILQAAWHVLSKGVEYKERGGDYFDRQNSEQTKNKLIRRLENLGYEVELKPKQAEV

SEQ ID NO: 454995 - protein, 342 aa, unidentified
MTAIGVDTHKATLAACAVDLLGAPIAEATFANDPKGHVAFIAWARSKAPAATIGIEGSSSYGAPLARAAQQAGLCVREVPPHLSRAERGRTRRPGKSDPGDALAIARVTARETNLPPIRLPDQTTELRLLVEAREDLIGEATRVRNRLHAHLIILLPGYGGTVANLVAAHNRTTIGRRLRGNHAVQAELARSLLARLVVLGREVEGLTRRITAGVAGHPLLGLPGAGAITVARLIAEVGDVRRFRTADALAALAGVAPIPASSGQVQRMRLNRGGNRQLNRALHVIAVSQARFHPEAKAYVTRRIEVDGKTWREAIRALKRRLVRPVYRLLLEGANLQLAAA

SEQ ID NO: 454996 - protein, 340 aa, unidentified
MMELYVGMDLHSRNTYFGILNEEFKRIFKKRVKNGLPMILNTLEPFKDEVKGIVVESTYNWYWLVDGLMDAGYVHIHLANPSAIKQYEGLKYTDDPHDAFWLAKLLALGILPEGYIYPKESRPVRDLLRRRSFLVRNRTRYIHSLQSMIERYANLRLSGNDLKKLEMKDIEDILKEEHLVLSGETCLENIKSLTRQINRIQKAVKSKMRIHKPFDLLMTIPGIGEILALTIMLEVGDIGRFPSVGDFTSYCRCVPTDRRSAGKSKGKGNSKNGNRYLAWAFVEASNFARGFNERFRRYYQRKASKKNKIVATKALGSKLARISYYIMRDQVPFREEAAFC

SEQ ID NO: 454997 - protein, 366 aa, unidentified
MDAIYIGVDFHARQQTICYLKTETGELVISELPHQDKEQLGAFYQQFPGRVVIGLEASGYSAWFEALLERLGCEVWLGDATEIRRRARWRYKSDRRDAELIWELLVHNEFPRLHQPAPESREVLRMLRYRQKLIKLRTMSKNSLQAIALQAGLAKGKQLFTAAGQQQLKAAEMSAALHWQQEQWFALLQPLNQQLLATMVWFKAHSKADVGIQRLRTHPGIGLLTSLCLQHTLQPVSRFRNQRKVVAYAGFDPVIRSSAERATYLGISKAGSRMLRYLLVEAVHTSIRYDEDLKRFYKRLAARRGRAKAKVAAARKLLIRAYIMMRDEIDYAEFRRRAVAARLARHGQGPTKVPGVLIGQSASPGA

SEQ ID NO: 454998 - protein, 346 aa, unidentified
MFFAGLDLSRKRLDVHVVDAGGATVLETAAPPDADGLRGLVERLDAFGPVCAAIESMNGARFVHDRLEQLGWDVEIADAQKVKGLAPLACKTDRIDAWVLAELGRRDLVPAIWLPDQAVRAERERARWRLHLVRHRVQLKNRVHATLIAFGTPCPVSDLFGARGRRLLDRLGVPDPWRSDLLAAVALIDELDREIDDCACELRRLGADHRYVPLLTSIPGIAWVLGYTIAAEIGDINRFASAKKLCGYTGLCPRVYQSGATDHRGPLTRNGPKFLRWALIEAAVHAARHPLYHEHYQRTARRLGKQRGKKIARVEIARKLAEAIWHMLTHNQPFAPAGPTRSALAA

SEQ ID NO: 454999 - protein, 402 aa, unidentified
MNKTDNMSIRQQKVRAGGIDIHKDKTVVCFYIAGIKEEVKEYGTFTEDLEKIRDDLLNQNIREVIIESTGIYWIALCTVLTLSKIEVTVVNPKFIKNMPKEKTDRKDARWLCKLLVNGLVRNSFVASEEQRAFRDLCRMRSKYTNHITQAGNRMVKTLERRNIKLKSVASNTKSKSIKEIIAALAHGETDVEKLLKLCRGKLKKKEPEMRKALHGVLTPHDRLMMKDLLNDIAHFEKEIQGLNERIKQHTDKVNEELIKNIRVVSGIGAQSVEVLLAEVGSNVNAFENEDKLAAWVGLAPGNKESAGKAHYAGRRDGNVYLRTIMIQVAWAAVRTKNSYWRAMYYHLSKRINKGKAIIAVARKLIRLIYKIIKGTKTYTEYGADYFVQQLQERYAKRRTQQA

SEQ ID NO: 455000 - protein, 398 aa, unidentified
MDGGHGANAPLPTLVIAQTGIVGVFRKEWPATDLHPAAGRWRSDRVRPEPLWLPRSVIVVSTFIGPGWLPEQLGSLHKAGSRKMTQTNMTTAGIDTSKLKLDIAVHGRTERWKVANALPGWRALAANLAKADVTRVGIEATGGYERGVVEHLRAAGLIVLVLQPVQVKAFGRVHLRRAKNDALDAELIAACAAAIDRLRMVPDARLTELAGHLTFLEQTEEDIARFKTRLEHIDEPGLRRIVNSDIARLKARKAAQIRDIAKRLRAHDDLAERLDLVLSIPGIGERTALALLIRMPELGQVSREEAAALAGLAPFDDDSGQRKGQRRIAGGRGRLRRSLFAAALPAAYRWNRALIALYARLKARGKAHNAALVACARKLLIYANTVVQRGTPWTEKAA

SEQ ID NO: 455001 - protein, 387 aa, unidentified
MSQTVAAPIPAAVDHERTLVLAIEVSNKSWVIAAQVPGLPHTKAKRTIDPEAEALLAAIAAYRARAAATGRSIERVIAVYEAGWSGFWLARWLMRHGVEVYVVQPSSVPVDRRIRRAKSDGIDSELLLRTLLAWLRGEPRVCSMVPVPDEADEDARRCVRERTELISERVGLTNRIGAVLATLGVSDYNPLLRNRCRRLAELRTGLGEPLPANAHAKIKRLLARLELVLMQIAELERERDAVVETKASDKAGKMIQQLISLRGIGVQSATVLVREAFVRRFANGKALGSYAGLASSPYNSGGINREQGIGKGGNRRVRTVMVELAWLWTRYQPSAAQVCWFRERIGPTGRRVRKIMVVALARKLLIALWRFVIDGVVPEGAVLKPAA

SEQ ID NO: 455002 - protein, 342 aa, unidentified
MLLIGVDYHPSFQTIAFFVEETGECGEQELNHSEGQAEKFYRDLKQQGICVRVGMEATGYSRWFERLLAELGFELWIGDPAEIKAKRVKKQKFDREDARLLLRLLRENNFPQIWVPDPENRDLRQLLWHRHRLVQMRTRIMNQLHALAMNEGYRWKKKLFSEQGRTQLEKLALAPWASRRRQELLELLDRMNPTIGELTAAVEQEARKRPEVLRLMTHPGVGPLTALAYVLIIGTPERFHCGKQIGTYVGMIPCEDSSARKQRLGHISKQGNSLLRFLLVEAAQAAARIHPDWKRRYIHLAMRRHKSIAKVAMGRRLAVRLYWMWRNGCEYSPSLEFGSYAG

SEQ ID NO: 455003 - protein, 362 aa, unidentified
MNKHKYVAMDVDSANIVAGVFDSKGKCVMECCIKLNAEAVREFCQMLKGTVHVTFEEGTQAAWLYEVIKPLVTEVIVCNPRENKLMKAGNKSDKIDVAKLAKLLRLGELRPVYQGAADMQGLKELVHGYEALVQDSTRVKNRLKAIYRGRGVSSKGEAVYEQAEREQWLAKLKGCARQQRARRLYEQLDQLQRLRAAAEKEIGRAARRQAAYKWISSVPGFGPIRTAQILATVMTPHRFRGKRAFWPYCGLAVVTRSSSDYEWVAESSRRKRKVIQTLGLNQNHNRTMKAVFKAAALDALKRNRQFREYYQSLCAKGTRPEMAQLTVARKLAAIVLILWKKGERYNPEKLKQAAPGTGQAVQ

SEQ ID NO: 455004 - protein, 406 aa, unidentified
MIFVGIDWSEDHHDVCVLDSEGVVLAKGKVSDDVSGVGRLHAMAAEHAKDPSEVVVGIETDRGLLVGSLIQAGYQVFAINPLAASRYRDRHAVSRAKSDPGDAKVLADLVRTDRQNHRQIAGDSELAEAVKVLARAHQNLIWSRQRQVNALRNTLREFYPGALRAFSTSQLATVEACSVLAMAPTPTWARDKLTLQRVRRSLAASGRKRNLDRRAGQILQALRAPELSAPPLVEQAYGDVVGSLVVVIDGLTHQIAKLEAELAERFEGHPDAEIITSLPGLSSVLGARVLAEFGDDPTRYEDARARRRYAGTAPITRASGTRSVVLARIARNRRLFDACFLWAFSSITTSAGARRYYDAHRARGKTHHQALRVVANRWVGILHGCLTRQELYLEEVAWPAPIDAAA

SEQ ID NO: 455005 - protein, 321 aa, unidentified
MNKYKEIYGIDISKDVFDVYGSQSGHNQFKNDAKGFVSFMKHLQKDVLVVMEATGYYHYRLAQFLYKSGVSVSVVNPLSVKRFIQMKLAKVKTDKSDAKAISEYGAMNEVPLYTALTDVQSECLQLFRLLDSYIKHRTATKNKLKGEEVLDIPSKIVYRSLKRNLKHLNKEVLDLETRLLALVKQDQQHQLTLIQSIPGMGVKTALFLIVVTDGFKKFKTASQLCSYVGITPTIRISGSSVRGRSRISKVGNKKLRNLLFLCSFSACKHNKACRAIYERLVAKGKSKKLALIAVSNKLLKQAFAIAKSGRPYDENYVSRLA

SEQ ID NO: 455006 - protein, 387 aa, unidentified
MPQPNDLSRSLVALDQDSTIIAVVEMSQSSWLVGGVVPGIERQPRKKQEPSPERLLALLHRWRDESVRAGRTITRIAVAFEAGRDGFWLARWLEARGVEAHVIHPSSVAVSREHRRAKTDRLDTELLRRGFLGWLRGERGHCSMARVPTIAEEDAKRPNRERECLVKERTRLVNRIKGTLARLGIRNFKPTLRQATERLATVHTPEGTPVPPNALAEMQRYLARLRFVVGQIKQIEEARRQRLEEEPECGRHAMVRLLARVVGIGIETADMLVNEVLSRPMRDRRAVARYAGLTGAPDESGAKRREQGLAKAGNARVRRGMIQLAWRFLRFQKNSALAQWYQARTADRRGATRKTMIVALARKLLIALWRFGTIGEPMDGVTLRPAS

SEQ ID NO: 455007 - protein, 418 aa, unidentified
MPPTSRQPPRRNAGKGIADMITVGIDIGKEKHAAAILGEDERLLTQPAFFVNTHEGARKLWAAIEKHAGGGPVRVGMEATGNCWKPLHDYLVAKGAAVDVINPIVTSASMSGDVRGRKTDKRDAVSIAETVIRGKHTVRRPEGEDEKELKCLTRQRRCLVDGRSGMKNRLRDQLLETFPEFSALFDDLFAPLPLALLARWPSASALAHARRDSVAKVVRDNSRGKDAAKEAERIIAAAKDSICLAHPPPKSAARCIQSTLEAIKAANANIKAIDGEIQNCKKPEMARLMDGIKGAGKTLPMVIASEFGGFERFEKSGAGAGMAKRLLAFAGCEPRIRESGKWKGRTMVSKRGSGQLRLALYLVANTIRLNDDFFKAVYEEKKKTKHHSVALFYVIRKLLEVLCSLHRSGRTYSTVRPA

SEQ ID NO: 455008 - protein, 321 aa, unidentified
MEQRKTSTKIAGIDIAKAHLDVALHGAEPGSADEARFANDADGMARLGDWLAKRCVRRVGLEASGGYEKSVVRFLQDSGFETVLHQPMEVRLFARLKRKRAKSDRLDARLIAAATAQVEAVKAAADPYLAELAERMTAYEQAADLLAQARTHREHTRLADLRADLADHIRILAARKKSLAADLVRRIRARADLARRFDLVASLPGVGAINAAALVIRMPELGAMDHGQASALLGVAPFDRDSGAWKGQRFIGGGRQRPRRLIYMAALAARRTDPGLKAFADRLTARGKPPKVVLVAVMRKIIEAANLVLKRGTPWTPAICT

SEQ ID NO: 455009 - protein, 424 aa, unidentified
MSSDLEIAAFIGLDWADQQHVIRLRVAGSAPVEAQLLDQKPETLRSWIGQLRQRFGGRPVAIALEQSRGSLLYALMNVDFLLLYPVNPQNLAQFRKAFYPSGAKDDPQDALLLLEMLEKHRDRLRVWVPDDADTRCLRLLAENRRKLVHRRTALTNQLTSLLKESFPQALDWAGPLDSLRACDFLQHWPSLQILQKIPTSRLRKFYRDHTRLDSDAIHQRLDQIRQAQPLTSDSAVLAAAELMIPALVRQLRCLIESIQQFDQQLKDRFQQHDDYTLFHSFPGAGPALGPRLLSAFGSNRNRFECAAEVQMLSGIAPVTERSGKSHWVHWRLACPKFLRQSFHEFAAQSILFSTWARAFYDQLRSRGTSHHAAVRTLAFKWIRILFRCWKNRTPYQEQIYLASLRRHGSPLFAAPSSPTTGANL

SEQ ID NO: 455010 - protein, 314 aa, unidentified
MSQNPSIIYVGLDVAKDSFVVDWLGRRHTFSNDARGHSRLLRLLAKASGPVHVILEATGGYEAAIVAALHQAQILCSVVLPGRVRAYAKAIGLHAKTDPIDAALLSAYGRAVQPLPTPPRSAQEQTFLETVRQREQLVNTRTALQNQAAHLQGAQAQKRHRLVLRTLSAQIANCERQLAQLQAADPHLQQRSKRLQQVTGVGPIIAATLLAEMPELGSLQETEAAALAGVAPYNCESGPRKGTRRIAGGRAPVRRALYLAAMTARRYDGILKRSYDNLVARGKPKLVALTALMRKLIILLNRLLQKPSFQLQPH

SEQ ID NO: 455011 - protein, 331 aa, unidentified
MNTHNEPIDRNNAVYIGIDVHRYQHTAVAANRFEEEMGELTFPNTHDGVAAFVAWSKNIAEANLTRVIGVEGTNGNGRLLRNAVIPVYPDVYEINPIYTKQRRDHGTRGDKSDPVDAKLMIEVLTRKLDELPKVTEQDNSAPMQALSELVAFHDDLTRSQARLKNQLHRLFYEADTEYTLTRSQAFANKRLHKWLAKTKQPKRAVNQEVQRLLLRTKIRQLRDLSKTRTKTDVLISQLLARANSNLVTMPGAGTITAAKIISAVKGIGRFTNIRQFVKYAGIAPVERQSGKTRKHKQAKGGNRQLNTAIYTIALTVIFVNVVCTFHTALNV

SEQ ID NO: 455012 - protein, 346 aa, unidentified
MKITTIGIDLAKAVFQIHCVDERGKVAVRKQLKRAEMSSYFANLEPCLIGMEACGSAHHWARKLQGYGHTVKLMAPQFVKPYVKTNKNDMADAEAICEAVSRPNMRFVAMKTVEQQAILSVHRARQGFVKARTAQGNQIRGLLSEFGIVIPQGIRSIMKQVPEILEDGENGLPGTMRNLIERLTENLKEMDRQAKELEAQIQVWHRENEASRKLAEIPGLGPITASAIVATVGDAREFKNGRQLAAWMGLVPRQHSSGGKQTLLGISKRGDTYLRILMIHGARAVIRFAENKAEPESWLRKLMARRNKNVAAVALANKNARVVWALLANDRTFRPDYTPAAVVAGM

SEQ ID NO: 455013 - protein, 389 aa, unidentified
MLLADRIADTEPTAIRTHLGAIFVSLELSRSTWLITSLSPGNGEKMSKHGVAAGDLGALLAKFAELQRKALARTGKNYPIITIQEAGLDGFSLHRVLQQEGIESHVVDAASVAVPRRRRRAKTDKIDGEALLRVLLAYKRGEPRVCSMVVAPCAEEEDRRRIGREREVLLDERIRHVNRIKGLLLAQGISGYAPLRRDRRARLEALRTADGRELPQQLRAQIGRELDRLELLLVQIKAVEAERDAMLARLSQSVDENTRVHPLAMLLGVKGIGEEFAAALWFECFYRSFANRRQIAAYAGLAATPWQSGSVAHEQGVSKAGNARLRKKLVQLAWLWLRHQPGSALARWFHAQAHRKVAIVALARKLLVALWKYVTAGVVIEGAALKGAA

SEQ ID NO: 455014 - protein, 381 aa, unidentified
MTTPATRNVQESMTEGTLFVAFELSEKTWKLGFTTGHGQKPRERTVTARQQECVLDEIAQAKRRLGLSETAPVVSCYEAGRESFWLHRFLQGHGITNHVVDSSAIEVNRRRRRAKSDGLDVRKLLSMLLRYHHGERHVWQVVKVPSVEAEDHRHLHRDLETLKQERASTMTRIEGLLSSQGLRVPSLTKLPEQLEALRLWDGSPIPPGLCRRVLRVYAQYTFLSAQIAEVEAERRAQLQTSSEARIDKVRQLMQLKGIGINGAWVLVMEFFGWRACKNRREVGGLAGFTPTPYQSGESAREQGITKSGNRHVRWMTTELAWSWLRFQPDSALSVWFRERFGNGGKRLRRIGIVAVARKLLIALWRLLETGVIPAGAVLKEV

SEQ ID NO: 455015 - protein, 465 aa, unidentified
MSKPRKPTLPRQSKGQPAPPPPPKLDALAQINHHAAGLDIGDAEIYAAVPERAADPAVRIFRTFTTDLQALADWLTACHVDTVAMESTGVYWIPIYELLEERGLQVYLVNARQLKNVSGKKTDILDCQWIQQLHTYGLLQPSFRPPEDICALRALIRHRGNLLRSCAAEIQQMQQALQQMNLKLTNVLSDITGLTGLAIIRDIVAGVRDPLKLALHRDPHCRKSAAEIAASLTGNYKPEHLFVLQQALAAHDFYQAQLAACDAETERLYHTLDAQGDAVAQPLPPPRRPHSRRRNEPRFDLRTELYRLAGVDLTTVDGLDALTVQAVLTETGVDMTSWRTSKHFASWLSLCPENAKTGGKIIKRGTKPSANRAALALRLAARSLHHSDSALGAFYRRMCSKLGKPQAVTATAHKLARIIYAMLKSKQPYKDPGADHLEAQVQERKLKQLQRQAKELGYELTPSAA

SEQ ID NO: 455016 - protein, 317 aa, unidentified
MDKPPGADRFVGIDVAKDRVDVHVRPDATAFTCATDPEGLADLVTHLAPLQPLLVAMEASGGYEGVIAAALVEAGLPIAIVNPRQVRKFAGAIGRLAKTDAIDAGVIAHFADAIRPASKPMPDALMLRLRELLARRRQLVVMINAEKQRLSKAADKLAQRSFKTVLRSLEAERARIDRAIDKLIEQSPVFCAKQDLLKSVPGIGDVVARTLIVELPELGTVDRHQIAALAGVAPMNRDSGRYRGKRHIQGGRVEVRAPLYMACLVAIRHNPPLRRFYQRLRDAGKPARLALVAVMRKLLTTLNAIIRDNRAWALAQT

SEQ ID NO: 455017 - protein, 347 aa, unidentified
MNFYNNIHPYYCGIDLHSRSLYVCIIAQDGKTCLHKEIPANPEKLIELLTPYIGQVVIGVECMHCWYWIADFCEKHAIDFILGHALYMKAIHGGKAKNDRIDSFKIATLIRGGNFPIAFVYPKEKRATRDLLRRRMKIVRHGAHLKAHVVNTTSQYNLPPNKVNLKNIGAREILNSTFSDPVVQKNINLDMAILDCYAKELSKIEWFIEQQAKQHNPVQLHILKSISGIGRILALTIIYEIGDINRFSSVQKFASYARLVKCKAESAGKSYGTQGNKIGNAHLKWAFSEAAVLYLRGNKRAQTYLLKLQKRMSKAKALSALAHKLGRCIYFMLKNETVFNENKFLKC

SEQ ID NO: 455018 - protein, 399 aa, unidentified
MNARYTPNELQIGIDVGSINHAIAISNGNGNIIKEFEISHNNRGFDTFFKIVDKLSIQYQAKVSVAMEGYNGWARPLDTLVLNHGYKLYNVNNVKLARFKEIFPAAAKTDTIDARKIVELFSLQEHLPIAKKVLQEIKPANSINAKLKKLTRRRKQLIEEKKAITNRLNSDLQAEAPDLKAITKSVDNLWFLRFITLRDNLVSLSRIHRNSINSIAYISQKNIKKIIQWQKEARFTKSIEYTSAMLYDDALRILELKDKIKELDNQIKALIPSSKIASLIQTIPGFAHVSAGSLAGEIDTLKRFESEKSLALYLGVTNLDNSSGKSKKSKRNLATNKHAKMAIITATMKHAQHVEESKKYIEKKISEGKRYQQAIRSLARHLVRVIWNMIQQDRAYEIR

SEQ ID NO: 455019 - protein, 360 aa, unidentified
MDKYIGFDVSSKSITACVIDGRDDEQYETLPVDLPVLAEWLGRQRDRKDRVHLTFEVSGQSGWLYDGLIERVDTLTVSNPSELTWIFRTRKKTDRIDAYKQARLLKAGLIPAVHMPTADIRRWRKRIQHRRGLITSVVRTKNRIRALVKGQGYPRAPHRGSWWHQLNRAWLWEIAREGGVDWREDLEDLLEQLALYEDQLRRVTKRLDERLKHHEGAALLMSIPGVGPRTAEAVLAHTDEVERFRRGKEYCSYFGMTPKLDQSGTVCRQGHISKQGPSVVRWLLVECAWRAIRTSPSLRAFYERVLGGQKKRKKIAIVAVARKLLSVMRAMLLTGSVFEEHLVLQQEQKRRATERRHQEA

SEQ ID NO: 455020 - protein, 417 aa, unidentified
MEYAPSTLTAVPVNRLACGIDWARDDHAVAIVDGGGRQVHRSIVEHSSAGLRALVTVLARAGVAEVAIERPDGPVVDALLGAGITVVVISPNQLKNLRGRYGSAGNKDDRFDAFVLADTLRTDRARLRPLVPDSESTVALRALCRARKDLVAHRVRVANQLREHLNRVFPGAVGLFTKLDSPISLRFLSRFDCQDRADWLTPRRLQAWLASAGYCGRTDPAVVFGRLGAAPRGLPSTAGAAQIPITQALVATLDNLVKQIAMLSEQIGQQLNAHTDAHIFTNLPHVGTVRAARLLAEIWDCRGRFPTPEALACLAGVAPSTRQSGRMRSVGFRWACDKQLRDAVCDFADGSRRGNPWAADLYSRARARGHDHPHAVRILARAWIYVIWTCWQNNTAYNPAQHRALQTVLHQDQPPGA

SEQ ID NO: 455021 - protein, 459 aa, unidentified
MSPRYKGKKKKRSVSKTPPSLPVLHPHAAGIDIGAREIYVAVPPGSDPRPVRAFATFTDDLHALRDWLKACGVTSVAMESTGVYWIPLFQILEAAGLEVCLVNARHCKNLPGRKTDVQDCQWLQYLHSVGLLRGSFRPPETVCAVRSLLRHRDGLVRAAATCVHRLHKALTQMNVQLQHVIADVTGVTGLAILEAILAGERDPVALAKLKDGRIRASTDTIAKSLRGDWRAEHLFTLRQTLATWKHYQAQITACDEEIARRLQGFAAKVDVAAQPLPARTSTHKSPQKNEPRFEARAELYRTCGVDLTQVPGFQSGTALVLMAELGPDFAERFPTAKHFGSWLGLCPDNRITGGKIMSSSTRDVKSRAATALRLAAQCLNKAQNYFGDLYRRWKARLGTPKAITAMAHKLARILWHLFKYREAFNPEVFRKEAEKMKRKRLARLQNTAAALGLKLVPAQ

SEQ ID NO: 455022 - protein, 370 aa, unidentified
MNDIIFVGMDVHKATVATAVAEGQRGGEVRQLGNMPNRADQIAKLAEKLSKNGQRLSFCYEAGPCGYGLHRQLTALGHECIVVAPSLIPMKAGDRVKTDRRDAAMLAKLHRAGELTAVWVPDDAHEAMRDLVRARATAVRVLGKARQHLQGFLLRHARVYVGKKGWTLAYRRWLTTVRFDHPAQQVVLQDYIHAVTDAEARVDRLTKQIETLAPQWSMVRVVEAVQAMRGVAFIVAVTVVAEVGDFSRFNNPRQLMAYLGLVPSEHSSGATVRRGGITKAGNALARRALIEGAWTYRMQARVSRKLHDRIENLPQSIRDIAWKAQVRLCARYRRLTASGKPKVVVTTAIAREMVGFLWAIARQVEVKPAV

SEQ ID NO: 455023 - protein, 469 aa, unidentified
MTPRGGKAFRTSAQRGDLAVTQRHAAGIDVHAAMHFVSVWAADVPAGFINPDPQLPDGVRKFGTTTPDLEAIVAWLTECGVTTVALESTGVFWIPLYDLLASRGFDVLLVDPRQTTHAPGRPKSDVLDCQWIRRLHSYGLLTASFRPADDIVRWRGFVRQREMLIRYAAQHVQHLQKTLEEMNVKLTEVVSDIVGQTGMKILQDIVRGQRDPLKLAKHRHDNCKRTEAEIARALQGTWRAEHLFALKQALKLYEFYQKQLRECEGQIELCLHRMEDKSRGVALPASVRKRRRQPEKNEVRFGARALLFKLAGVDLTVLEGISETTALVLLSEIGTDMSPFGHEKNFVSWLGLCPQHRGSAGKIFKRRTRRGANRAARALRMAAQGCHHAKHALGAFYRRIQARAGGAKAVVATARKIAERVYRLLKYGQEYVRQSQEAYEAAYQARVTKSLAKKAASLGYKLVPETLPT

SEQ ID NO: 455024 - protein, 415 aa, unidentified
MALKIVYKICCGIDVHNSFVVACIASTNNQGVTTYKSHRFSTYTKGLKELLKWLLESNCKDVCMESTGKYWIPVYNILEKDCSIVLAHPKYVKAIRGKKTDKKDAKWIADLFKHDLVAGSFMPPADIRQLRDLMRYRYKLTCFMSSEKNRLQNCLTVSNIQLGNVVSDTFGKSSIRILDKILENPLDTSFDIKPLIHGSMKAKIPELELAIDGYISPSQAGKLKIIKKHFEDLESRKAELEKLILALASPYQQELDLILTAPSFKNIFSAIGIISEIGVNMEAFPSAKHICSWAGLTPTNNESAGKKKSVRVSKAGCYIKPLLVQCANSVVKSEKHPEIRNRYLLLRKRRGHKKAIIAIARMLLTALYNMLNKKESYNAELYKKSDVIPAEREITVEQAILMAKFQGYRIKSATE

SEQ ID NO: 455025 - protein, 317 aa, unidentified
MYNIILGIDVSKDDFVVARHGFLKTQTFSNNSEGFVLFNQHYHQELSECLVVLEVTGGYEHALTLYLVDHGVRVHKAPGLQIKNFIRSFGKRAKTDVIDALAIAHYGYDRQKDLRLYGKKSEAADTLYHLVMRKEDLTQMLVSEKNRVQAPNNILVKEGIQRHIVYTTDELKDIESQITEIIKNDTLYHKKAKVLTTIPGVGAKTTYSLLARIPELGTLDRRQIASLCGVAPHPKQSGKSKGYSATTGGRRDFRPTLFMAAMAAGKSRSTLGDWYQSLLARGKKKMVALVALMRKIIVIANAKIRDCLNETTGVELC

SEQ ID NO: 455026 - protein, 318 aa, unidentified
MPPAASVFVGIDVAKAELVMAIRPSGERWTATNDEVGIQSLLTRLREDAPALVVLEATGGYERAAVAALATARVPLVVANPRQVRDFARATGQLAKTDRIDADTLALFAERVRPDPRALPDDSAQALDALLTRRRQILGMVGAERNRLEHAVPAVRRGIVQHIRWLERQLHDVDDDLDRTIQASPVWRAKENLLRSVPGVGPVVSRTLIGDLPELGTLPRKQIAALVGVAPLARDSGTLRGKRLVWGGRAPVRAALYMAALVATRRNPVIREFYQRLLTAGKPKKVALTACMRKLLTILNAMLRANTAWRHTDHATIA

SEQ ID NO: 455027 - protein, 341 aa, unidentified
MQAVAVGLDIAKNVFHAYGVGAEGQRVFSRKLRRAQVEVFFSKLEPCLIGIEACATAHHWARTFGAMGHKVRLMPPAYVKPYVKTQKNDEADAEAICEAVTRPNMRFADIKTVDQQSVLVLHRTRTMLIKHRTRLGNTIRAHLAEFGITEAIGRVGLARLIDLVVTGEDTRITDITRRAMKCLVEQYRLLQDQILDLDRQVMACHRSSEASKRLATIPGVGPLAASALVASIGNASSFKNGRSFAAFIGLVPRQSSSGGKERLGKISKRGDHYLRWLLVVGSLAVIRYAQRHGTKRPWLIKLLQRRTTKIAAVAMANKIARIAWVLMTRGDVYREPAAQAA

SEQ ID NO: 455028 - protein, 404 aa, unidentified
MLFVGVDWAEDHHDVCVMAEDGRMLGKRRVPDSVAGIGDLHGLVAQHTGEDEAVVVGIEIDRGLVVYSLLAAGYEVYAINPLAAARYRDRHATSGAKSDPGDAKMLADLVRTDRHNHRPIAGDSDLAEGVKLLARAHQNAIWSRQRQLNTLRSALREYYPGALEAFGTDLASTDALAILTVAPTPELGRGLSRAKIASALRKGGRQRNIERRAEEIQNALRTEQLGAPALIANAHGIIARSAVALITSFNAQIAELEAALSEHFEQHPDAKVVLSLPGLGTVLGARVLGEFGDDRTRFSTPKSRKNYAGTSPVTKASGRSKVVLARFARNKRLGDACDQWAFCALSTSPGARSYYDQLRARGKTHRQALRQLANRLVGVLHICLDRGVLYDELVAWPQESEIAA

SEQ ID NO: 455029 - protein, 414 aa, unidentified
MALKIVYPCCCGMDIHKTFIVACIATTDRNGVTTYKSKRFSTFTRDLRRLADWLAGNNCRDVCMESTGKYWIPVFNILEQSCNVILAHPKYVKSIRGQKTDKKDAQWIADIFKHDLVSPSFIPPFEIRQLRDLSRYFTKLTGFTTGEKNRAQNCLTVSNIQMDQVFSDVFGKSASAITEQLLEKPNGDFDVEPFVDRRVKAPIPKIQEAIEGSICFQQAEKLRLILQHLESLQICKAFLDALIEKCSSQFQSQIELVMTVPGIQRFSAISIISEIGVDMSVFPTAKQLCSWAGLVPQNDQSAGKKKTTRISRAGVYIKPLLVRCSLGAIASKNYPEIKERYTRLKKRRGHKKAIIAICRMLLTAIYAILKKAEPYDSSHYRAFDVPPVNRTLTPEQAVNWMRRLGYTIVETQAS

SEQ ID NO: 455030 - protein, 347 aa, unidentified
MTKLMAGMDLHSNNVMIGIVDLEGQRVVHRKVECDLAKVAAFLKPYKARLEKVAVESTYNWYWLVDGLGGLGYAMVLANPAKIQQYSGLKHGDDKGDAYHLADLLRLGILPEAYIYDKELRPVRDLLRRRMGLVQQRTSLMLSFKSLYTRTTGQAMTLSELKGMAVKKAAELYHHPANRLIAQVQKQHIEQLTESIEKLEKVILKSAKELPYYEKLKTLPGVGVILGQTITLEVGDIGRFAEAGHFASYCRTVDARHLSNGKKKAENNQKCGNKYLAWAFVEAANFARRSDEKCRRWFDRKATKTSNVIATKALACKLAKAAWHVMAKEVSYDETRVFPELAGKKTS

SEQ ID NO: 455031 - protein, 439 aa, unidentified
MRKLRENASGIDIGAKKVFVYVEGQEVKSFYTFTEDFELLCRYLLIHKVKTVAMEATGVYWNILYEILEEAGIDTWLVDGRQTKQVPGRKTDVKDCQWIQELHSLGLLNRCFVVKEDIKELRSYQRLREDHIRSASMHINHMQKALTEMNIRLKEVLSQIHVVSGLKIIQAILKGERNKNVLLGMCDTRIIKNKKNDILKSLNGRYTKSGLFALQQAFNGYNFYKTQISQCDKEIQIIIHKMGNGGLDKDLPARRKPIRHNKPNVNNLGANMIDIFKGTDATVISGITDYTWMQLLSEVGIDLSRWPTEKHFTSWLGVAPGQHWSGKMKRNKRKHGHPKAGQIFRQMAQSLLTSKTIAIGAFGRRLRARKGPAIAIKAMARKLAVLYWRVMVKGVDYTEFGIKKYEAQLLAQKQKSLQRLAKDLNLQLVNIQPFAKSCH

SEQ ID NO: 455032 - protein, 417 aa, unidentified
MKETQRKLYVGIDVHSKEHKAAVMPVALLEQPGNSWKKVKPLGIRNNVADFERLDTAIRSHISNVKEVAIAVDHTGGHYSEPIVYFLQARGYDVYYLETKAVKAARERFLDEESKSDIIDSTSAAYLLYLRDLHGLSFRISALTPELGSRAAALNSLMLQRWQFNKLASQATNRLHQLLLAVFPEGEGQYFKQLVMITSHYPTPRDILTSDGLKSFPNLRRKDKEIILDLAASTVGIPGDIYQWLIRDLSNQRTEALAKREVLTSMLITQVRAHPYGHILLSFPFLVEIAAATIIGVIKDIDRWPDKKKFKKALGVYTSLTQSGSGLGRTKQGKEGSRHSRRVLFQVCFGCIRANAHDNDFRDYYHRHVARGKPRIKALVSTMGKLAEIVYHCLKVGEPYQYQGKYGAITTSADKES

SEQ ID NO: 455033 - protein, 387 aa, unidentified
MPKQFDPHHAATAFDHDSTLVVALELSGKSWEVGAVVPGVARRPRRRLQAGDVADLLRLIERWKTEATGAGREVRRVALTYEAGRDGFWIARYLLGKGLEVHVIHPASIPVDRRSRRAKTDRIDLDMLLRTFLAWLRGEPRVCSMVRVPSEAEEDQRRPGRERERLVCERLQLENRMGNLLCLHGVSAFKPRLKKAGERLEQIRDFAGAPLPPQTMAELRRLMVRHRLASEQLRELEAARDRVIQVAEPDQAERMIQILTRIVSLGEETATLLVRELFCRSFRDRRALGNFVGLTGTPFKSGGLEREQGIGKNGNARVRRIVMQLAWRWLRFQPDSALSRWFDERTGGAKGRTRKVMIVAMARKLLIALWRYVETGEVPAGARILPA

SEQ ID NO: 455034 - protein, 344 aa, unidentified
MTTIDYIGLDVHKKSISFCAKAQDGRILDEGKIAAQHKDLNAWAKARPRPWVGALEATLFTGWIYDDLKPLAQDLKVAHPAMLKAIAASKKKNDRVDARKIADLLRCNLLPECYMAPSGIRELRRVLRYRNLVVRQSTRMKNRIAGLLMETGTIYNKERLHGKGYYHDLLGNLQETPASVRDLLKLSRKQLEFFETIQKRLLKGLREHGELKERVERLQTIRGIGEVGALTWALEIGEVHRFPSIGDACSYCGLTSAQRNSAGKEQRGPISKQRNKHLQTILIEAAKLAPRHNPQLAAVHERELQRGHCNRATLEVARKLVAYLMAVDKSGQPFQVRTGGAEQL

SEQ ID NO: 455035 - protein, 384 aa, unidentified
MQKPNDLNQSRIVLRQDSTLIAVIEMSLSSWLVAGIVPSVERQPLKKLAVDESALLKLLNRWREEAEKAGRRIERITVAFEAGRDGFWLARWLRVRGIEAHVIHASSVAVSREHRRAKTDRLDTELLKRAFLGWLRGERDHCKMVAIPTTKDEDAKRPNRERQSLVGEQTRIVNRMKAALIRLGIRGFNPKLKKAAGRLEDLRTPEGEPIPPNTLAELHRDMERRRLVSDQIRQIEKARLERMEQAPGDGPHAMVRLIARVIGVGIETADMLVHEVLSRKLRDRRAVARYAGLTGAPDESGSKRREKGLAKAGNARVRGGMIQLAWRFLLFQKDSALAQWYRTRTEGGRNRKTIIVALARKLLIALWRLVTTGEVPAGVVLRAA

SEQ ID NO: 455036 - protein, 365 aa, unidentified
MKIMQWVGIDDHADKWTIAHYTGNEEKPTREFELVPDSKGYRSLLSYLKGLKGEVRVVYEAGPCGFEQYRRLKAAGVNCQVAAPTLTPRKPGEKVKTNRRDAAKLGRELRSGGLTMITVPEPEQESLRDLIRARQTIQKDVGRLRKQIIQLLLRYGHRFRDGQSWTKRFWVWLKAIKLTGSYSSFVLADKIVELEHRIEQLARYDEEIERAAQKPEYQTYVAAMRTLRGVETLSAMTILSEMGDLRRFATAPQLMAAVGLVPSEASTGDKTRRYGITKTGNAHMRHIAVQAAWQYQRQATASAKIKARRKDQLPEVVAIAEKCEARLNRRFHRLTGRHKKSTVAVVAVARELIGFIWAIGQIVHP

SEQ ID NO: 455037 - protein, 374 aa, unidentified
MNATHYIGFDVHKKVIVYCAKTADGTVVDEGKLPARREALREWAGARRESWQGAMEATLFSAWIYDTLHPYATKLDIGHPAKMKAIGCAKKKSDKIDARTISDLERCNLLPTCYVLTPEMRDLRRLLRYRNLVVQESVRMQNKMAGLLMEVGTPFDKDKLHGKKYFAQLMKTLQEVPESVKDLLQMSRGALEMFESVQKRLIKRLLAEPALQQRIERLATIPGVGPITALTWALETGDPHRFPSIGDALSYCGLTSAFRSSAGKQQRGPISKQRNSWLQTCLIEAAKVAPCWNPQLAAVHAKELERGHKNRATLQVARKLVAYLLAIDKSGKAFELRMPATAETTTPPKKKSKSAATRTWSKKVTAALRLATAA

SEQ ID NO: 455038 - protein, 330 aa, unidentified
MNSMCLSADRIAGALPVLGLDVAKLSVQAELRTNDKPVRFGFANNATGFAQLERMLKEHNAPKVWAGLEATGPYSHALALWLHGQGHRVSLLNPRRVKQYACSAGNRNKSDLLDAAVIADFICAHQPAAWQPPLQEVAQLQALVRRREELSLMLQAEKNRMEGIAFNVRSSLERIIAALSAEKAHLEKLILGQIRSQPRLLCDHQLLCTIKGIGSLTAAILLAEMARPGQVERARQAAAHAGLAPRREQSGTSVRRNKGLGKEGNRYLRKALYMPALVAIKYNAPLRHFAARLRAAGKPKMSIVCAVMRKLVHIAFGVLKHQKPFNPSLA

SEQ ID NO: 455039 - protein, 500 aa, unidentified
MNRKRTKSKVDRTMPMVHPNAAAIDVGATIHMAAVSADRTPEPVRSFGTFTTDLHRLVNWFKECGVETVVMESTSVYWIPIFELLDARGFTVFLVNARDAKHVPGRKTDVSDAQWLQRLHSYGLLRASFRPKGQIAELRAYVRQRERLLEYAASHIQHMQKALTEMNLQLHHVVADITGTTGLRIMRAILAGERDPKALAHLRDYRCHASAETIEKALTGSYRAEHLFALDQALALFDAYHEKVSACDVRIEAVLKELSISRSRGSGSLPSSRRRTDQTNAMAFDVRAALFALLGKDVTQISGLGPYLSLKLIAECGDDLSAWPSAKHFTSWLCLAPSNKISGGKVLSSRTRRSGSRASALLRLAAVTVGRTDTALGAFYRRLSARIGKAKAVTATARKIAVLFYNAVRHGMEYVDPGASFYETRYRKRVVENLHRRAKAFGFVLHPAEPTPSVAVSSSVSSPIFACSDFTSTVGVVAVVRAAPKTSQAPPSSCAFHVVI

SEQ ID NO: 455040 - protein, 397 aa, unidentified
MYIVGIDIAKRKHEAAVIDGEGTVIIKPFSFTNNCSGYNRLLAMLTKAKLPLDEVSFAMEATGHYWLALFTRLQKEGFRVQVINPVQTNSIRSFYIRQAKTDPRDALLIAEVIRFGHFSESTLHPENIYELRELCRGRHAIVSMQADVKRKVVALLDQVFPEYETAFTNMFGDTSMAILQTCPTPKELSEMRLEELCHLIEVSSHKRFRMAKAQELQELARNSFGFAMAGDVFSTMIRLYAKHLDFLKQQVREMDRKIAEIMDTLDTPITTITGIGPTLGAYILSEIGDISRFSSAAKLAAYAGIDPTMRQSGEYNGVRNRMSKRGSPYLRHAIWLAASSAVLHDPALKLYFQKKRDEGKPYMASVGHACRKMVSIIYAVMRDNKVYTPCIPNEISA

SEQ ID NO: 455041 - protein, 342 aa, unidentified
MAAIGIDTHKATLAACAIDELGRPIGEATFANDPPGHAAFITWARSMAPDATVGIEGSSSFGAPLARSAQLAGLAVREVPPHLSRVERRRTRRPGKSDPGDALAIARVTAREANLPPIRLPDRSTELRLLLEAREDLVGEATRTRNRLHAHLLVLAPGYGGTVANLVAACHRAKVAGLLRGNATVQAELARSLLVRLARLGREIEVLKRRLGARVAGHPLLGLPGAGPITVARLIAEVGDIRRFRSADALAALAGVAPIPASSGQVQRMRLNRGGNRQLNRAFYVIALSQSRFHPPAKAYVHRRMEADGKTWREAIRALKRQLVRTVFRLLVEGSEVQLAAA

SEQ ID NO: 455042 - protein, 372 aa, unidentified
MEDVLRSCCAGLDIHQKVIVACIIRSAEGKKRPEKFFGSFDTTTRGLFDLSDWLTSYEVTHISMESTGVYWKCVWRILQNHFELQLANPRHIKNIPGKKTDMKDAEWIARLTRLGVVPTSFVPPEPIQELRDLTRYRKHLVEDLNREKNRGHMVIQNAGIKLTSVIKDIYGKSGRALLYALVKNRPITETLILECVYTTLRRKVPQLLESLEKQLVEVEETINDYLVPYEEYVERLEEILGINRRTAAVVLAEVGIDMSVFLSSGHLASWAGASPGNNQSAGKTRSKRVGKGNSYLKKVLAQGALAVSQGKPTRIQAFFFRVRRNAGHKKSVVATVHLLLRIIYRMFSDQSRYDELGESYLKNRKNTLIYNC

SEQ ID NO: 455043 - protein, 388 aa, unidentified
MIYVGIDIAKTNHYASIVNYSTGEVLESPFLVTNNKQGFDLLYSKIKDFNKEKVLIGLESTAHYGNNLIFYFHEKQFKLGIINPIQTATLRKTRIRKVKNDKVDSTLICEALSLGYYNLLSDYDIKLLEIKSLCRFHKDLKDKASKAKIQLKTYVDQLFPELNSFFKDNLDIKTAHELLKLYQSPEDISKVNLTKLSNLLIKSSRGKYDKSRAIELKTLASNSVGINNYALSIQIKMTVELIELLESQIKDIEKQVSNFIKKSDNVITSIPGIGDMTAAIIISEIGDINRFNNPSQVLAFAGLDPSVKQSGNFNASSTRMSKRGSSILRYALILAANNVQLNTKTFNDYYNSKRLQGKLHYNALGHCAGKLVRNIFYMLKHNVKFNLD

SEQ ID NO: 455044 - protein, 341 aa, unidentified
MMTLTTIGIDLAKSVFQLHGVDDAGEVVFRKKLRRNGVLDFLRDLPPCLVGLEACATAHFWAREIGALGHEVRMIPPAYVKPYVKRQKNDAADAEAICEAVTRPTMRFVPVKSAQRQGVMMLHRTRDLLMRQRTMMLNAIRAHLAEFGIITAQGPHKLAALLEAMRGDDMPGLPDIARSALISLMAQLDSLAAEIRTLERRLMACHREDETSQRLETIPGVGLITATALSASIPDPSVFKSGRQFAAFLGLVPRQNSSGGKERLGRISKMGDGYLRRLLVVGATSVIRRVGTNTSATGNWVRRLLERKPARVATVAMANKTARIAWAVLARGETYRAPAMV

SEQ ID NO: 455045 - protein, 317 aa, unidentified
MSIANEVFVGIDVSKAELEVCWLPQRERLQVARDEGGLVRLVERLKELGPSLVVLEASGGYEMPVAMALAGASLPCVVVNARQVRDFAKASGKLAKTDRIDAQVIAEFAQAIRPQVRALPDAAAAHLIALVARRRQLVEMLTAEQNRLALSHAAVREDLKQNIAWLKSRLQDLDGELARAVRSSPLWRENDKLMQQVPGVGRVVSAVLLALLPELGRLSPKKIAALVGVCPFNRESGRWNGKRAIFGGRAGVRSVLYMAIVSAIRWNPLIKTFYQRLLAAGKPKKLAMTACMRKLLVILNAMMRDRSDWNPNGALAT

SEQ ID NO: 455046 - protein, 302 aa, unidentified
MSQNEIMKFIQQSGGSMKQDISVLGIDLAKNVFQIHGPNAHGKRVLTKRVGRKELVELMSNFTPCVVGIEACTGAHYWARLFSSMGHTVKMMAPQFVKPYVMSNKNDRNDAKGIAEAVTRPEMKFVPIKTVEQQDVLLLHRARELCVKNRTAQSNQIRGLLAEFGVVINQGLSEVRKLPEILDLNKDKLSVKALHVFERLYAQFKIYEEQVLLYEKDIEAHVKSEPLCKEILKIEGIGPMTASALVATIGDAKVFKNGREVSAWLGLVPKQHSSGNKIRLGGISKRGDRYVRCLLVHGARSA

SEQ ID NO: 455047 - protein, 343 aa, unidentified
MKLMRIGVDLAKNVFQIHCVDCHEQPIWRQCLPRDRWLQTVLEKIEPGCEIGMESCGGAHHWARQLQARGFRVRLIAPQFVKPYVKSNRNDANDAEAICEAMSRPSMRFVAIKTIEQQDIQATHRIRAGLIEQRTAKANQIRGLVAEYGLVAPKELLMLRRAIPCWLEEADNGLTVRFRRLLDGLWGDLRTLDERVGELDSEISAIAVSEPTAVRLQQLRGVGPMIATALVAAIGDARQFANGRQLAASLGLTPRQHSSGGKDRLLGISKRGDAYLRTLMIHGARSALRTAKFKDDRLSQWAVRLAERSHPNVAAIALANKTARMAWAMLRNGTDYQPDRAAA

SEQ ID NO: 455048 - protein, 345 aa, unidentified
MNKVTPAFVRLAVDLAKQVFQVAGEDAYGRVVYEERIKSRPAFSKLLAGLGAKVEVLLETGPGAQAWARQVQEAGGKVRILPAQRVAEHRSGAKNDRNDCLAILRAGRDEAIHGVPVKTVHALEMQAEHRVRTGYIRRQTSISNQVRGILLEHGIAIAKSNSALALWVTRIQQDTSFPIPEMLREIIADLWAEWEHLGQRRKRLDRQLEQIAQNDEVARRLMTIRGFGPIMTTALLAKQTQPERFPNARQFAAYFGLVPDQHSSGSTVRLGRMTRRGDGYIRSLAVTGAQSVLHRVRADATGADDKRLQRWCRQHGKKGAAIRLANRNLRIAWILMTTQAEYQPQ

SEQ ID NO: 455049 - protein, 486 aa, unidentified
MANRKQSTFERLSSGRLNRQQRRELARKLTAENPGLEIVNRNVAGIDVGNESHYVAVAPGCDPQPVREFGSWTADLERMADWLKVCGVEMVVMQSTGVYWMALYDILEARKFKVCLTNARHTKNLPGRKSDVQESQWLLKLHTYGLLRDSFHPPEEIRALRSLWRLRDRHVKEAGRAILHMQKTMTVMNVQLSNAISDISGATGQAIIRAILNGERDPWKLAKLRDRRIKATEEEIARSLEGNWRADMLFELKQAVDGYDFIQNQIAECDQRLQALLAALPQREVKRTEVQAEAPLRESVKRKQKRKKSRPDGNAPRFDLQAELKRVCGVNLTSIDGIDIMTAQTIVAELGTDFSRWKNESHFTSWLGLTPSREISGGKIVKQESRKIKSPVATMLRMAASSLIRSESYLGARYRSLRTRLGAGKAIKAMARYLACLVYRMFTHGQDWVDRGTKEFESKRTQREISSLHRKAAALGYTIVPQPASA

SEQ ID NO: 455050 - protein, 423 aa, unidentified
MKSPNTQTFTAYVGIDWADTKHDICLQESGSDRREFGCIEHQVECIDEWAKSLHQRFGGPIAIALELAKGPIVYALQKYDFLVLFPINPLTLAKYREAFKPSRAKDDPSDAELALDLLVRHPERFAPLKPQSVAMRTLISLTERRRELVNDKTRLTNRLTNTLKQYYPQALEWFDQHDTVLFCDFLTRWPTLLQAKRAHQASLKAFFHAHNAHRPKLIAGRLAAIKGAVPLTQDPGVIVPCRLHAMVLIEQLRVALQAIEQFDRHIAELAPTLPDYRLFAGLPGAGPHLAPRLLVAFGEDRQRFQRAEELQKYAGIAPVTQRSGKKSWVHWRWQCPTFLRQTFVEWAGQTINKSFWAGAYYYQQRAKGSTYQAAVRALAFKWIRILYRCWMARTPYDETKYLNALKKRQSSLLNNLVPNPQNA

SEQ ID NO: 455051 - protein, 330 aa, unidentified
MNSICLSTDQLTTALPVLGLDVAKKSVQAELRTNGKRVRFGFENNAKGFAQLARMLKEQGAPKVWAGLEATGPYSHALALWLHGQGHRVSLLNPRRVKQYARSAGNRNKTDLLDAAIIADFVCAHLPAAWQPPTLEVAQLQALVRRREELSLMLQAEKNRLEGVASHVRCSLERIIDTLSAEKTRLEKLITQQIRSHQQLSRDHQLLCTIKGIGSLTAAILLAEMARPGQVERARQAAAHAGLAPRREQSGTSVRRNRGLGNEGNRYLRKALYMPALVAIKYNAPLRHFASRLRTAGKPKMSIVCAVMRKLIHIAFGVLKHQKPFNPSLA

SEQ ID NO: 455052 - protein, 350 aa, unidentified
MRIIGCDYHPGFQQIAFVDTDTGELQERRLQHPEEAERFYREVATQGVKVRVGMEASGHARWFERLLAELQFELWIGDAAEIRTKRVRKQKTDRQDAQLILRLMLKDDFPQIWVPDWENRDLRQLLWHRHRMVQARTRVMNQLQAVALNEGLRCKKRLWREAGREQLEAFPLAPWASRRRRDLLEMLDRLSPTIAELTQTIEQEAEKCPAARRLRTYPGVGSLTALAFVLIIGRAERFQCGKQIASYLGLVPSEESSGDRRRLGHISKQGNTLLRFLLVEAAQVTVRSLPEWRSKYFHLAMRRGRKIAKVAMARKLAIQLYWMMRKEWDYEQVKRFGPHAGQPEHRRGVQ

SEQ ID NO: 455053 - protein, 404 aa, unidentified
MKGPIVSIDVSKGKSDYQAFKNLNVKYTGSRSIKHTKEGFDEIVNLVREMEKKLETEVCVVYEATGVYHRVLKKVLEDNNIKQFIINPLLSAKTRKNDSLRSPKTDKLDPKSIAKTYYSHSLHNSHKPETIYHELRELSRYYEDILVHIRKDKVAFRAQLDIVFPGYDTLYDDLYGPVALAVIEKYPHPEMLQKKKINTVSKVIQSKTCHRQATSDTMADKAIEYSKTIYSGCDKDDIEVLILQRLIKKLKEDMAEAERTISEMIKLAQELPDFSIIKSIPGIGDNLAARIIAELGDMTRFKKKNELVAFAGLDPRISESGKNDGDHMHITKKGNKRLRCLLYLAVTCSIRLKRDDNSIKDFYIKKKQQSNPMCSKAAKTACASKLVRIIYSMCKTGELYQYNK

SEQ ID NO: 455054 - protein, 383 aa, unidentified
MRHGGILIEANDSEGEPMKKHTTINQSLSADVSTCVNVAVDLAKKVFQVAGENALGQVIFEDRIKSREAFQAFLLKLPASVMVLVETGPGAQAWARLLQAQGNSVRILPAQHVATHRSGPKNDRNDALAILRAGRDCRISAVPVKSAAALAMQALHRARQGYIRRRTAVGNQMRGLLLEQGISMPQGEMAISQRIPRILEDATQPLPDLLRELIAELLVEWVHLGDRVNVLTGRLETAAKNDETAKRLMTVRGVGPIIATALLAKQTEPERFANARQFAAYFGLVPNQHSSGEKVRLGKMSKKGDAYVRSLAVQGAHAVLRQVRPDSEQPDDQRLQRWVSRLGRKEAAVRLANRNLRILWRLLQNDQTYRRQPGNSQETAMSH

SEQ ID NO: 455055 - protein, 368 aa, unidentified
MHLVGRDSIIVGIDVHKYSHQAVAMSCFGEELSKLEFSNDEAQKCINWLSALGKQKDIIVGLEDVNGLGIHLTQYLQTAGFNLRYIPAVYTERARKHSSSQDKNDYLDAKRVGKVILQQAEETLPASDIIPQEIVRNLDLLLQEREALVKEQTALKNQLHGLLHQYYGNGYKQSFKNIFSEIAIEWYLSDLKKCEGTIPIKQSTQAYVTGSSIRRYLRLGLIVKQIKEITKLIETTGMLIKPVTILSKSMPGCGLVTACKVIVEIGNIQRFTNESKLAKYSGIAPRQSQSGKSNRYYTNPFGNRKLNKAIHIIALSQIGNRGSKEGKAYFQKKITEGKSKLWALRCLKRFIIRRIYILLAQSVTSTKN

SEQ ID NO: 455056 - protein, 336 aa, unidentified
MVYVGVDLHRKRSHVAAVDAEGQLLLSRRIDNDPGEFLRIFGELGPEPVDVAFEATYGWGWFADLLADAGISTHMSHPLATKAITAARVKNDAVDARTLAHLLRTNLLPEAWIAPPEAREARRLVRMRTSLVRIRSQLKCQVQALIAEQAVQVPMWDLFGKAGRLLLADLQLPAISQGRVQASLRMIDAISDEVARADREIRELFRSDPRVARLNAIPRIGPVTAAVVVAEIWDVNRFPSPNRLCSWAGLTPSERSSDVHTRRGHISKQGSRWLRWVMVEVAARPDVHPTFRTFHDRIARRRGRKIARVALARRVLTLCYYALRDEGGCRAFPLAG

SEQ ID NO: 455057 - protein, 314 aa, unidentified
MKTSQETNIGIDTGKHQLDIYIRPCGEYFTVENNEKGIKEAIKRIKKHAPTRVIIEATGRLELPFACAASKAKLPLVVANPRHVHDFAKSTGKLAKTDKLDAAMIAHYGEALKPRLTEIKAENTQKISDLLTRRSQLIEMRTMEKNRLGIHPKAIKKSNTRLIESINKEIVWAEKRLDKLIESTPDWNKLLAILLSVKGIGKVLAYTLLSELPELGQLNRKEIAALVGVAPMNRESGIYQGKRVIRGGRAKVRTVMFMAMLSTVQSNPRFKRDYQRLLGKGKPKKVALVACMRKMITILNVMVKTDTVWDENMA

SEQ ID NO: 455058 - protein, 354 aa, unidentified
MQNDRQSSETVILGVDTHLDIHVGAVISQAGKLLGTHIIQTNQAGYLELLDWARSFGSLERAGIEGTGTYGAALTRYLIKNSIYVVEVNRPDRSKRRLEGKSDPLDAENAARTVLSGSSKAIPKMQSGACEALRIISVARRSAVKACTQAINQLRALLVSAPQDVRDKLWKSKPHECVTACINSEVSEHSPLRIALCSTLRSLAKRWMALTEELNELDESLDKLTRKYASNLRSQFGVGPQTAATLLAVAGDNPERLKNEAALASLCGVNPLPASSGKTVRHRLNRGGSREANNALWTIVLVRMRSDPRTRIYVDRRTGEGLSTKEILRCLKRYIVRELYPLILSDLAYANRRS

SEQ ID NO: 455059 - protein, 466 aa, unidentified
MSQQGAKRRGRKKQIAQLPPELSHVNLDAAGIDVAAECHFVAVPQGRDHEGGDVRKFGAFTADLYALAQWLSRCNVTTVVMESTGVYWIPLFEVLEERGFTVRLVNPRHLKSVPGRKTDVLDCQWLQQLHTFGLLQGSFRPDREICVLRSYLRQRTMLIGYASHHVQHMQKALAQMNIKLQHVIGDITGVTGLKIIRAIIDGQRDPCALARMRDYRCKHDEATIGKALQGHWREEHLFALKQAVDLFDFYHRQITECDQRIEATLSTFEDKADGKDLPPPSQRRCRRNAPAFDLRTYLFRMTGVDLTRIDGIDAPTALKVLSETGLDMSRWKTTKHFASWLGLCPGNKTSGGKVLSSKTKPSANRAAAAFRLAAHGLHRSHSALGAFLRRKKAQLGKPQAITATAHKLARLFYFMLKNGTAYVDAGQEYFERCHRERAVATIRRKARALGYNLLEIEPLSLQGAQA

SEQ ID NO: 455060 - protein, 393 aa, unidentified
MHKDTIFCGVFDGKHHQAVKEFSTLTSSITSLGEYLKSEAIEDVAMESTGIYWIPIWNILEAMGFNLTLVNPYLIKQMPGRKSDVKDAQWIAALLHKGLVRGSLIPCKEIRELRTYSRKYIRLQQRLTSILQEMERNLEMCGIRITSFVSNISGKSVMKVIHALVEGENDPEVLAGYIHGRIVNRHKRETIVESLRGHTTPQHLFQLELSLEEYELLCGQRDRCEEEMSRLCHLHYPKELALLQTIPGISLLSAMIVIAETGADMKAFENSGKFAGWTGLRPRNDESAGKFKSTATTKGNRYLRAILVQVAWAASRTKGSFFKEKFSRLCLRKNRKKALIAIARKMAVLIWNVLYYKEEYNPQKLIVYEPGKVQAKMDYHQKEFKRLENLLKN

SEQ ID NO: 455061 - protein, 344 aa, unidentified
MKIAVLGIDLGKNVCSVVGLDPSGAVVLRRRVRRDTLIDLVAKLPSCIVGMEACCGAHHLGRLFAAQGHDIRLMSPEYVRPYVKAQKNDDRDAEGIAEAATRPTMRFVEMKTEDQLDMQTLHRSRERLVGERTALINQLRAILLDRGIVVPQGKRKLEQYLVILMNEHDGERLSARMRLLVADIRAQWQELDRRIGEFDAEFVRWAKENEDARRLVTIPGVGVTISTALIAAVGKAETFEHGRDLAAWLGLVPRQSTTGGRPRLMGISKRGNKYLRKLLIHGARAALPYVAEKDTALGRWAKSLLSRVHQNVAVVAFANKLARICWAVLRSGQRFAAKGAPLVV

SEQ ID NO: 455062 - protein, 357 aa, unidentified
MPSLAELNEQIEDFVLDAAVGGDTHRDTHHLEMVSGTGVVIARIVIDNDAEGYAEVVAWIAEHTPGPRVLIGLEGTRSYGIGLCRALQAAGLEVVEVERPKRSQRRKGKSDPIDAHLAAMAVLRMPVDRKVLPRSDGDREALRILLGARRDMTTQKTRQTNRLRALLLTGDDADRALSKGAMSDARLDKISGRPAGPGETVEQLVRRVEATRLATSIRATELALRANKKELTKLVEKIAPHLLEKVGVGPVSAAQMIVSFSHVGRCRNEAAFAALAGVSPLPASSGRTHRHRLNRGGDRQLNRAMHDVAKSRARYCPRTRDYIAKRQAQGMPDREIRRCLKRYIAREVFRALMAEMG

SEQ ID NO: 455063 - protein, 346 aa, unidentified
MKINRVGVDLAKNVFQLHGADRQGKTLWKRQLSRDKWLTVLFATVGPGTVIGMEACTGAHHWSRLLLDKGYEVKIIPPQFVKPFVKSNKNDANDAQAICEAMARPNMYPVKVKTIEQQDMQAIHRIRNEIKSHRIAKANQIRGLVAEYGLVAPKELTSLRSAIPKWLEDASNGLTMFFRRLLQGLYEDLCSMDKRMAELDKQIAVIAQQDPIAKRLQQLRGVGPLIATALVATMGDGKQYRKGRDMAAAIGLTPRQHSSGGKDRLLGISKRGDAYLRCLLVHGARSAMRTAKDKDDRLSRWITNLQDRRHANVAACAMANKMARMAWAMMTKGVDYDPDFSSVSAS

SEQ ID NO: 455064 - protein, 349 aa, unidentified
MAMTIVESTRPIVGGVDTHADVHVAAAIDAQGGVLGVESFPSTRLGFIELHAWLVGFGALERVGVEGTGAYGAGLARYLRRRDLEVIEVDRANRQLRRKAGKSDTIDAIEAARAVSSGRAAGLAKSADGNVEAIRALLIAKRSGRETRIRCLNQIRHLGFTAPDALRERLRGVPRKRLARCAAALRPTASSDPVLYATKLALRTLGRQVLDLEDAARGLDVMLGELVRTTAPSLLELDGVGVDTAAILLVAAGDNASRVRSEAAWANLCGVAPLPATSGKRTERHRLNRGGNRQANHALWRIVFTRMSSDERTRAYVTRRVAEGRSKPEIMRALKRYVARETYQHLPTT

SEQ ID NO: 455065 - protein, 414 aa, unidentified
MLKIVYRICCGMDIHKSFVVACIASTNEQGVTTYKSKRFSTFTGDLRRCADWLSENNCKDVCMESTGKYWIPIYNILERTCNIVLAHPKYVKAIRGKKTDKRDAKWIADIFKHDLVAGSFIPPADIRQLRDLVRYRWKLTNFTTGEKNRAQNCLTVSNFKLDDVFSDVFGKAASAITTRILENPAEKITDVSSFRTKRMKATDEEILAAVDGEMCEEQAEKLRIIRSHMDSLELCKLNLESLILSTAEKYLPQLNLVMTAPGIQSFAAIGIISEIGVDMSVFPTSKHLCSWAGLTPQNNESAGKKKTTRISRAGAYIKPLLIQCALNAIRAKQFPEVRNRYLALKKRRGHKKAIIAIARMLLTAIYNMLKKNEPYNSELYHKSDRPPAHREVSVEEAIFILQRQGYLVTAPSTS

SEQ ID NO: 455066 - protein, 412 aa, unidentified
MHYFVGIDIAKSFHVAYVVNQDDKTIKSSFKFNNDEDGFSKLLLLLNSIDEVSTFTIGMEATGIFFENLYIYLKEKEFNVILLNPYQTNRFREMDTMKKVKNDNIDALMIASLIKSGRYSKAYVSEDMYQSIKSLYRHKNTLLEEMKKHKRQISTLLAVVFPEMEQVIKDPFNVTGLALLEKYPTAKHYEYASIERILKTFRGIKGNNFNEQKAQKLLELAQHSVYQGNGKDERAYVIKSHIRVIKLLQEELKELENEMLKLFKQSPQLNKNEEQEIIDIIDNLRTIPGVSDKTIFALISECGDLSRFKSNSHFIGYLGLYPTLEQSGNKVSYGPIAKRGAKFAKKALYQASIAAIRHNNELNKLFMDKVSQGRAKKEAVVIVARKLAQIVLAIYKNNVAYNPQRVFMASVS

SEQ ID NO: 455067 - protein, 403 aa, unidentified
MNSVGIDISKGRSTIAVMRPFGEVVISPFEVRHTGSELSKLAKQLKSLDGETRVVMEATGNYHASVAKLLHNAGLYVSVINAKLVHDYGNNELRRVKTDRKDAVKLADYGLDRWLTLPRYIPEEDTRLLLKNCYRQYRQYSKVQTVLKNNLISLLDTVCPNANRLFSSPIRGDGSEKWVDFVAEFWHCRCVSEKSERAFTSKYLRWCRKHGYKFSEEKAHTIYAEASGHIGVMPKSETTKLLVEQAVSQLRATSTALAALKHEMQSLASQLPEYPVVMDMFDVGPTLGPQLIAEIGDVSSFYSKKALVAYAGLDAPPNDSGDVTGRHKSMSKIGASSLRRTLFLVMSVYLQTAPLDEPVYQFMDRKRAEGKPYRVYMMASANKFLRIYYATVKAYLEPLEHTA

SEQ ID NO: 455068 - protein, 342 aa, unidentified
MHYIGTDNHISTLEFKVVNDTGKLIKAKRVTTSADNFLEFVRSVPKPRVIVIEEGPLAAWLLEISTQHGEKLVITDPRRNHWIGSSGEKDDPIDAEKLAQLARGGYIKEIHHPVGQRRRFRELMTAYHDTNRSIVRLKNKIKAKFMQNGIRCSGDTVYAKDHRAKWRQKLPQEPSLLVIVDSLWLQLDQTEQTQEAILSAAKVQAKQYPEIKLLDGIPGLGFISAATISAILETPHRFANKRKVWMYAGLGIQQRSSGGKIYSEKLTTEYNRLLKYTAKQAVHAAIKTNNPFRRAYLEMTLVKGIAQHRAELTIARDILATAWAMWKNGELYNPEIDKQIKN

SEQ ID NO: 455069 - protein, 365 aa, unidentified
MTSVASAAGLIHLGMDTSVNEIVVAVLRPGEEVPVVDRICGDEESVRRLIGRFPDRRLLSACYEAGPGGYELHRLLTSMGVACDVVAPSLIPKGGSDRVKTDKRDSFRMARLHRAGELTAVRVPSPAEEAVRDLARVRSAVLADRKRAQQRLTAMLMRHGRIWRSTYWTGPHRAWIAAQSFGEPALATALAHYRATLDTRETELACIESELAPWARREPLAATVGRLGCYRGIAELSGLTLAAEVVDWRRFPSARAFMGFTGLVPAEYSSGQRTWRGHITKAGPGPVRTALIEAAWAYRYKPAIGATLRRRQQGAAPDTLSRSWKAQRRLHGKYRAMTGRGKAAPEAATAIARELAGFIWAEMTS

SEQ ID NO: 455070 - protein, 393 aa, unidentified
MVVCRVLDAAGRVEKQVRRYSTMTADLLALADWLTATGVTHVAMESTGVFWKPVWNLLEGHFTILLVNPRDVKQVPGRKTDVSDAAWIAQLLQHGLLKGSFVPPAPIRILRDLTRHRTTLVRDKTRVVNRIHKVLEDANIKLTAVASDILGVSGRAMLAAIVAGEIDPHVLADLARRRLRSKVPQLEQALRGRVQPHHRWLLHSLLGQLTFLEAQVVEVERAIDEAARPFAPAVVLLQTIPGVKARATTLLAELGAEMTVFPSAAQCASWSAICPGQDETGGKRGSGKTRHGNRWLKAALTEAAWVAARTKGTYAAAQYRRLAARRGKKRAIVAVAHSLLIAVYHILRDGVPYHDLGPQHFDRLHPTQLAQHLVKRLERLGLRVTLEAAIAPA

SEQ ID NO: 455071 - protein, 340 aa, unidentified
MTHATIIGLDLAKNVFHAHGAIHDGTPIFRKKLSRGQVLAFLSEQPHCIVAMEACATAHDWAREIGKIGHTTKLIPPQYVKPYVKRQKNDSADAEAITEAVSRRNMRFVEVKTEDQQVSAMSYRTRQMFIGQRTQTINALRSHLSEHGVVTPKSKAGVRKLVAMIEDDTVIIPEKVREIARVYVDHIEKLTEQISDANEAMKAAAKTSEVAKRLQTVPGVGIQTAMAIEAFAPDMTCFNRGRDFSAWLGLVPRQHSTGGKSRLGKVSKMGQADIRSQLIRGAMSVITAATRFGIKKGSWLERLLARKPKLVAAVTLANRMARAIWAMLTHNENYRNPEAA

SEQ ID NO: 455072 - protein, 338 aa, unidentified
MKTHVGVDLHQRFCYLTAVNASGKVCKQGQVANEGSALRAWLRPLPGPRQVVVEASGFWPAFARAVAPELERLVMVHPQRVKAIASAKLKNDRVDSATLAHLSRCDLLPAAWMADEATQQLRLLVRLRITLGRQRARAKNQLQAVLHQEGFKKPVADVFGKRGRAWLKGLELSGAARLVVDTWLREVDHLDVELAEQTRELERLARADARARFLETIPGIGPYAAMVIVAEIGDVERFQNKRALASYAGLTPLVRESAGKSKRGGITHQGSNTLRWIMLQVAQVAARYSPGARIYYAGLRQRKPAQVARIALARKLLTVVWALLHHGVCYDEQLFIRG

SEQ ID NO: 455073 - protein, 318 aa, unidentified
MGQSITFEQVIERGCGIDVHKKVIVATIRGTGIKETTRTFNSFTESIEQMRDWLKTEGVTHIAMESTGVYWKPLYNILEEDFEIILVNARHIKNVPGRKTDKKDSKWIAKLLLSGLLKGSFIPPKPIRELRDLTRYRRKVVGQIASEKNRIQKILEDGNIKLSSVVSNMSGVTATKIIDAMIAGEEDVEKLIRFRHGKMQVSREDLKASLKGKLTDHHRFMLTTIKESIEDKEKLIEKLDRKIEEHLKANELVLDAKLLETIPGVGKDAAAGIMAEIGNDMEQFPNEQHLASWAGMSPGNNESAGKKKVVERPTGTFF

SEQ ID NO: 455074 - protein, 353 aa, unidentified
MKKIVVGIDISKEKIDAGAICVGNLQESPVRLDHQVFVNRPAGFRRMLAWARHLMPDITLNDVLFCCETTGGYDRILCDYIYAKGLQIWREGALQIKRSMGVRKGKDDRADSFMIAEYAMRNMDKAVVYVSPDSTIRELKALFLYRHRLVQEKAEKRVRATHLAETAPRSKSMSFILRDAQKGIRALEKSIKECEERIIELTKSDGELMRNYKHIVSIKGVSIVNTTALIAYSNNFQSITTANKMASYYGIAPFRERSGTSVDRKACVRYYSCSLLRATITQAAECTVKEGGIFRKYYMRLKATGKPYGVILNNIKNKLLHLVFSLVRNDADFDMNYETRRNEIHSTMQKVET

SEQ ID NO: 455075 - protein, 344 aa, unidentified
MIYLGMDISSKSFVIHGIDSRKRVVCKEEISPDRDSLLRLLERLGKEPKLVVFEAGNQMKWIAQTLMKVEGVELHVVHPNELKWISQSSGKTDKIDARKMAELARGDLLPRKVHVVEGHVRQLREMLSGRQMLQSKRVAMINSIRGMMLQEGVRLPEKFFTRVDWWERLEKAPISESTKAIIAAFMRGITGLQDAEDELTRQIVAIKDERIKQLESIPGIGSLSSRVLLGALDNAERFDNKKAAAKYGALTPTVYQSGNVTHHGRICRDGRHEIRKVLLQCAHTVARMKRYDAKPLKEFFERIHKRRGKKIAVVALARKLLTIAYGVLKSGTYFDPAKLSLREA

SEQ ID NO: 455076 - protein, 409 aa, unidentified
MNEFHYTGLDVHKKSIQYCTKLADGAIVREGRIQATRAGLAEWITRQSHPWKGAMEATMFSAWIYDVLKPHAAELKVAHPAMLKAIVASKHASDRLDARKIADLVRMDWIPKVWMAPPEIRSLRLLLRYRNLVVRQATQTKNRIASTLMEHGVEYSKDKLHGKRYFDDLLGRLDEVPAAVLSLLRTSRGSLEMFESVQRMLLKRLRTDPVLAKRVQLLDTVPGVGEVTALSWALEIGDPQRFRCAAQAMSYCGLVAALQESAGKQYRQPLSKKRNAHLQTVLIEAAHFAVRYSPEMRAFSEQVEAKRHAGAAVIAVARKLVSYLLAVDKSGQPFQIRTATQAPGSPTGKAACPPAPPIEAVPVARRSSPSRVRKAAAAKPAAPWTAAGRRAESEVAMGGSGGKAARRPN

SEQ ID NO: 455077 - protein, 466 aa, unidentified
MARKSKKVTKKAQRQTPRSLKTIQPNSAGIDLGAKEHWVAGPARDNDKPNVKCFGTTTPELYRLADWLQEQAIETVAMESTGVYWIPLFEILDGRGFQVLLANARQISNVPGRKSDMLDCQWIQLLHACGLLRGSFRPSDDICRLRALIRERSTMVDERSDWIRRMQKYLDQMNIRVHRAVSDITGVTGMAIIRAIVAGERNANALAKLRDPRCRKSEQQIAEELTGNWRSEHLFNLRQALKMYDQLSAVIDDYDGEILSCIADLQLDDDDDTPVPPPSSKTKAQNIVKRGQESLREGFYRMSGFDLTTIDGISVNTAAVVISELGLDYTVFPDENHFVSYLRLAPNLSISGGKKVPKKFKATTCTRVSTALRMAALTLRNSKSALGGYYHRVAYRKGASVAVFAIARKLAQLIYRLVRHGQAYLDTGAQAYEARFNQRRLTYYTNTLKTMGFRVEPIPSFEPTPA

SEQ ID NO: 455078 - protein, 351 aa, unidentified
MMIIGVDYHPGFQEIAFLVEETGECDERSLKHSNGEAEKFYRDLKARGISARVGMETTGYSRWFERLLAELGFEVWIGDAAEIKTRRAKKKKTDREDARLLLKLLLEDLFPRIWVPCPENRDLRQLLWHRHRLVQMRTRIMNQLQALAMNENRCWKGKLWSERGRTELEKLPLAFWASHRRQGLLELLDRMNPAIDELTAAAEREAKKRPEAVRLMTHPGVGPLTALAFVLIIGTPERFGCAKQICNYVGLIPSEDSSGGRQRLGHISKQGSSLLRFLLVEAAQAAVRCNADWRRRYRHLAMRRQRNIAKVAMGRRLGARLYWMWRNGCEYSPSLEFGSHAGKLGTGNGGQ

SEQ ID NO: 455079 - protein, 355 aa, unidentified
MSQKLESTIAVIGIDIGKNSFHVVGHDERGAIVLRQKWSRGQVDARFANMPPCLVGMEACVGAHHLSRKLNSLGHHARLMPAKYVRPYSKGQKNDFRDAEAIAEAVQRPTMKFVATKTAEQLDLQALHRVRERLVSQRTGIINQIRAFLLERGIAVRQGQRFLRAELPCILATPPDVLSPRIVRIIEDLAGDWRRLDERVEGLSNEIETIARQDAGCERLMSVPGIGPIISSAMVAAIGAGDVFSKGRDFAAWLGLVPKQISTGDRTILGKISRRGNRYLRVLFVQAAWVVLVKVKPTRWGYGLKRWIEAAKKRLHHNVLAIALANKLARIAWAVLAKGRAFELTRTDDAGVRPA

SEQ ID NO: 455080 - protein, 338 aa, unidentified
MNIVFLGIDLAKNVFQLCGLNQAGKPVYTKRTGRKELLQTLANIPACLIGIEASTGAFYWQREFEKLGHKVKVISPQYVKPFVRGQKNDGNDAQAIAVALMQPTMQFVPPKSPEQQDIQALHRARQRIVNHRTATVCQIRGLLLDRGIPIGSAVSRARRAIPLILEDAENGLSSRMRRTIAELYDLFNDLGRRIHFFDKEIETVFRQSEACQHIAKVKGIGPKTATAVVAAIGKGTEFKNGRHFAAWLGLVPRQHSSGDRQVLMNMTKKGDKHLRTLFIHGARAVVRVATNNNDGHMNQWVNQLKERRGFNKTTVAVANKNARIIWSMLRNETEYQVV

SEQ ID NO: 455081 - protein, 408 aa, unidentified
MQTLHRRCAGLDVHKKEVVACLRLAARNKVSREVRRFPTTTRGLIELAEWLEAAQCTHVAMEATGVYWKPVWHILEGRFTLILANAAHIKGVPGRKSDVNDATWIADLLAHGLIRASFVPPAPIQELRDLTRTRKQLGREIVQHTQRIQAVLEEANVKLSSAITDILGLSGRRILKAMIAGETDPDKLSALGSPRLAASRNDLADALLGRIREHHRFLIDQHLKTIEQLEATIAAFDARIEAALAPFRDAVDRLTEVPGLSKTSAQILIAEIGTDMKQFPTAGHLLSWAGLVPRLDESAGKRRSTRVKKGAPWLKPVLVQCAWAAARKKNSYFQAQFLRLKARCGPKKAAVAVAASILTTAYHMLADGTCYQDLGPNHFARRDPAREAAKLAKRMRSLGFEVDFRAAA

SEQ ID NO: 455082 - protein, 344 aa, unidentified
MQIAILGIDLGKNSCSVVGLDNSGHVVVRRRMHRTSVIKFAGGLVPCVVAMEACCGAHHLGRLLRTQGHEVRLMSPEYVGPYVKAQKNDERDAEAIAEAATRPTMRFVELKAEEQLDMQTLHRVRDRLVGERTALLNQLRAVLLERGVAIPQGRHKLEQHLDAILGGPEWAGVAPRMRRLLRDLRTEWQALDRRIEALDEEFALKARTDPVACRLATIPGIGVLNATALVAAIGNGETFARGRDLAAWLGLVPRQATTGGKPRLLGISKRGNKYLRKLLIHGARAAMPSLARSGTALGAWLRGPLARAHPNIVVVALANKLARIVWAVLRHGREFERTDVVASA

SEQ ID NO: 455083 - protein, 378 aa, unidentified
MQVIGVDPHKGSHTAVAIGSDESVIASVRIAASRRQVDRLLVFAAPWPERVWAVEGAQGVGRMLAQQLVARGERVVDVPPSLSTRVRVLSGRSGRKTDAHDARAVAVAALRQPNLAVVAAEDSSRGLRLLSDRRAQLTAARTQTVTRLHRLLAELVEGGAPQSLSAEQAATILRRIGPIGEVDVIRRELARDLLDDLRRLDAKLAANATRIAAAVHDSGTTLTEIQGIGPITAARIIGHSGNPARFPTRGHYASYAGTAPIEASSGTVERHRLSRRGNRQLNSALHGVAITQMRHPGPGKDYYERKIAEGKTRGEARRALKRHVSDRVFATLLADAQRSPGRQVGATHESSAAGQSPTANTSERSVPGLRKKATPRVA

SEQ ID NO: 455084 - protein, 344 aa, unidentified
MTIIGIDPHKASITAVAVDQNGKNLGTRRFTMNKGTGPGLVKWSSAFLEPTFAVEGAKGLGHSISQFLVSHGQVVVDVPATLSMRVRVLETGGSRKSDREDEQAVARAALYRDDLRRVEREDQLVILDLLCRERDALRGERNRSLNRLHRLFRELIPGGVPRGLDVAAARLSLRSIHAATGADQCRRDLTKSLIGSLDRVEKQMTSYDAKNEEAVSICGSTLTELQGIGSLLAGKILAEAGDVTRFISADRFASYAGTAPVETSSGENRKQRLNPGGNRRLNSDLHIMAVVQIEHPGPGRTYYLKKIAEGKTLREAKRSLKRRLSNIVYRVLTADARRLKNTSS

SEQ ID NO: 455085 - protein, 343 aa, unidentified
MQSITTIGLDIAKSVFQVHGVDAAGQVVVRRQLRRRHVLAFFEKLPPCLVGIEACASSHHWSRELHALGHTVRLMPPAYVKPYVKRQKNDVTDAEAICEAVTRPSMRFVPTKTSEQQACLMLHRARHLFIRQQTAVINSIRAYLAEFGIIAPVGRRGVERLLEVVADKADHRLPEIARACVAALGDQLRALKAQILKFDRCLIAWHRSNATSRQLDEIPGVGPALATALVASVADPKAFRSGRDFSAWIGLVPRQNSSGGKDKLGSISKQGDRYLRSLFTAGALAVIRYAKIHGTRHRPWLTALLARRPTKVAAIALANKLARMAWAMMARNEHYKEPAALTA

SEQ ID NO: 455086 - protein, 421 aa, unidentified
MNMTSKSAQFAALIGIDWASQRHALCLYDCATAKRESSILEHTPEAIAQWARGLQERFKGKKIALCLEQSKGPLIYALLEYPFFVLYPINPATAARYRMAFKTSRAKDDPSDAQVCLELVLHHREKLNPWLPNDAPTRELSCLLQHRRAAVDLRTLLTNMLRDALKSYYPQALELAGQDLFAPLGCQFLLKWPSLQELQKARKQSVRKFYYAHNCRRMDVIEKRLDAIAQMTPLCRDRALLEPAMVQVRMLARQLLQLGGALKEYDSKIEQLFAQHSDALIWESFPGAGPTLAPRLACAFGTQRSRYQSAVAIQQYSGTAPVTEKSGKNQHWVHRRWARPHFTHQSFFEYASQSVLHCSWAKLYLKEQMARGKAYPTAIRALAFKWQRIMFVCWRDRVPYDETIYRQSLQRRGSHLARKLN

SEQ ID NO: 455087 - protein, 341 aa, unidentified
MDKELYFGVDVSKKTLDLAYYDGETIDWKNAHIKVSNDDAGFKKIGSWVAKVGKDFDTFLFCMEYTGLYNQNFRLWLESKEYIYGMVEPRKMHRFEPDLDDDQRSLDRIKTDELDAFRIAIYCEQNHKKILRNPSKLPSPVYFKLKRLLAERKQNTKQSTLYKQQLHDICAYDTDLSVERKKLLLKNMQENQKAIDKEIDSYMNEDTSIRKNYNLLTSIPGIGRIIALETIVLTENFTAISNPRKYACYIGIAPFKKESGTSVRKKTGVSKKGFSEAKADLSIAVLSAIRNNPSIRDYWIRKRKEKCGGIVLNAVKFKLVLRMFAVIKRGTPYVETDAYMT

SEQ ID NO: 455088 - protein, 370 aa, unidentified
MKKHSTTPKSPKQASACKGGPITIGLDLGDKTSRYCVLGANGEVMSEGSVGTTRKAMAEKFAKMRRCRVAMEVGTHSPWLSRWLSSLGFEVIVANARQVQLISASSRKNDRLDARLLARLARVDPQLLRPIRHRSETAQADLMRIRVRAALVEARTRLVNAARGFAKAMGERLPACDTDSMGVERMESLPEGMRDTLKPLLEQVESLTEKIKESDVKIEQIARTQYPETELLRQVSGVGTLIALTFVLTLEDRERFRKSRDVGCYVGLRPKQSESGQSQPQLRISKEGDVYLRTLLVQAAHCILSRRGPDTDLKRWGLKQASRGGKNAKKRAVVAVARKLAVLLHRLWVCGEVYEPLRNSQASGSSKKAA

SEQ ID NO: 455089 - protein, 409 aa, unidentified
MATIIAGIDVHKRLLVVAVADSRAEKLSFTGRRFGTGAGDLQQLADWLAQQHVDAVVMESTAQYWKPVWLALERQFSLHLAQAFSNRAPKGRKTDFRDSQRLVRRFIAGELILSFVPEPAQRQMRTLTRRRVQLSRDRVRLQSQLECLLEEARVKLSSVLSDLLGASGLRILRALAAGEKDPHALAELGDARLQCSREQLAEAVSIPLDSTHQQLLGLYLEQFALLDAHLERLSVLAAETMRDSQQAIARLAEIPGIQVIAAQQIVAEVGPQAASFPSAEQFSSWVGTCPGHEESAGENHNARCPKGNRYMRRVLCQAAQAAVKTKNSRFQILFYRLVGRLGYAKAIWAVARHLSVVVWKILHEAVRYVEMGQATTPQAAKRRAQRMVRKLRQLGYTVQISALSPEVTM

SEQ ID NO: 455090 - protein, 454 aa, unidentified
MSKRPRVFRSQRKIIGPLEIVNPNAAGIDAGSEQHLVSVPEDRSDEPVRTFGTFTRDLHELAEWLQACRITTVAIEATGVYWMPLYEILEEHGLNPRLIDSRSVGRRNKKTDVLDCQWIRQLHTHGLLDAAFRPPAMMLPLRSLTRQRRMLIEYAADHIRHMQKALDLMNIKIHLIVSDIVGVTGLRIIRAILDGQRNPRELAALRERGCKASEGEFVAALTGNYREEHLFALEQAVDLFSTYQTKIAECDAQIAKHLAAFEKRHNPDRQLPPRKLSRRKNQPHYDARTMLYEIAGVDLTAIPGLESGSLLTILAETGTDMSAWSTGKCFAAWLALAPNNRVTGGKPIRRGGFTIRPNRAAQAFRLAAQTIERADCALGAFFRRIRSRCGRPVAIKATAHKLALIFYAMLKNGTDYREPGADYYEQRYRDNLLRSLSKKAAVLGLTLTPLQEVH

SEQ ID NO: 455091 - protein, 343 aa, unidentified
MQVVTTIGLDIAKSVFQVHGVDAAGQVLIRRQLKRRAVLAFFQKLPVCLVGIEACASSHYWSRELQALGHSVRLMPPAYVKPYVKRQKNDMADAEAICEAVARANMRFVPTKTPEQQSCLMLHRTRHLFIRQQTAVINSIRAHLAEFGIVAPVGRKGVTELLHIVADPSDKRVPEVARACLAALGNQLLSLKEQIVEFDRMIMVWHRSNETSKRLHYIPGVGPMLATALVASVADPRTFRSGRNFSAWIGLVPKQHSSGGKDRLGSISKQGDRYLRSLFVAGALAVIRYAKIHGTKHRPWLTALLTRRPTKVAAIALANKLARMAWAMMARGERYRQPVALAA

SEQ ID NO: 455092 - protein, 368 aa, unidentified
MHELITGFVGLDAHAEATAIAVAEVGREAPRFVGTIGARLAELTKALQRLGEPHSLQVVYEAGPCGYALARHLIRLGYRCEVVAPSKIPRRPGERIKTDRRDALNLAGLARAGELVPVMIPDERDEAMRDLSRARVDAVRARLKARQQLKAMMLRHGRRYSGKTSWSAAHERCLATVSFDHAAQNIAFSEYRQAVSEGQARVQRLSESLACEVEHWRMHPLVSAVMTLRGLDLVAATTVVAELGDLRRFAHPRELMGYLGLVPCEHTSGSHRRLGAITKTGNTHVRRVLIEAAWNYRFPARISRPLQLRQERQPAQIRAIAWRAQLRLNHRYRRLKARGLQHNKICVALARELAAFVWDIGRHVAPSP

SEQ ID NO: 455093 - protein, 410 aa, unidentified
MKMAGIEVHKKVWMVVVVDASVPEEKPVRRRFVTLPSELQRFRIWLQEQGVEEAVMESTAQYWRSVWLELEPHMSLHLAQAFSNRAPRGRKHDFKDAERLVRRLMADELILSFVPKGEQRIWRSLTRMKVQLTRDRVRLQNQMECLLEEMRIKLSIVVSNLLGASGLRMLHALAQGETDPKRLAELGDERLHCTQEQLVDALTGRVQPMHRGMLALQLQRLQLIDQQMTQLNSMIAQAMKSHQDAVIRLAEVPGLGVDSAQQIIAEVGAQASTFSSAAELTAWVGTCPGKEESAEQNHSSRSAKGNKYLRRVLNQAAHAAVAKKGSYFQGVFRRLMPRLGYKSAIWAIAHRLCRVVWKILHEGVRYIEQGREVGPREKKQRAQMLARALRKLGYEVTITPINQLAPKPAI

SEQ ID NO: 455094 - protein, 321 aa, unidentified
MQGKVHDDAMTAVYVGIDVCKERLDVCLHPLGERLAVANDAGGWRHLKRRLAGLAPALVVMEATSKYHRAVHRRLDAARIPVAVVNPLRARLFAEARGRLGKTDAIDARMLALMAEQLSPDPTAPLSPAAEALQELARARAAAVAEKTAIGQRRDIAAIAFLRRELSSRHESLKRHIARLEAEIDRIIAADPDLARRREVLLSIPGIGPVTAITLIAGLGELGRCSDKQVASLAGLAPHPRDSGARQGQRRTGGGRSELRSSLYMAAVAAIRANPDLKAFHQRLTGNGKPFKVAITAVMRKLLILANSLIARNRTWTPTPA

SEQ ID NO: 455095 - protein, 342 aa, unidentified
MDDYIGLDVSMKETAISIRSAGARVWRGKCNSDPARIAQIVRKRAPNVVRVVFETGPLSVWFYHALKEEGLPAICIDARHAKAALDMAANKTDANDADGLAQLAEVGFYREVRVKGYDSMLARSLVAARTRLVRISVELSNQIRGLMKTFGLIVPSGKGRTFEANVRRLLTDQTELSNILLSLLNAWHDMRVRAADLTKLLLAEARKSHACRLLMTIPGVGAITATSYATAIEEPSNFKNSRAVGAWLGLTSRRYQSGEVDYSGRVSRRGDRHLRGLLYEAALVILTRSKIQSDLRTWALKLKERVGTKRAAVGLARKLAVTMHAMLKTGSVFNPASQPISL

SEQ ID NO: 455096 - protein, 349 aa, unidentified
MIYVGLDLHKNFSVITMMDAQGKEMVKQKKLANDSEIVKLLHEFDQPVAVAMEATRSWYWLYDLLEEEGIEVKLSHPLKTKAIASARVKNDKIDSRILAHLLRADLLPLSYVPPKSIRMQRELLRYRASLVKIQTGVKNRVHAMLAKNNITHDFTDLFGKQGKAFLSSLTLPEIYRMALDGYLSVLDELEQQIKVVNKKIVVSARDDEEARLLMTIPGVGYYSALLIKSEIGDVNRFPSAKQLCAYAGLIPSTYSSGDTTFHGHIIKQGSKWLRWITAEAIEHCITKPGHLQAFYWRLERRKGRKIAKVATERKLLEWVYHMLKERRTFEETERIASNRGEPVSVSDSK

SEQ ID NO: 455097 - protein, 380 aa, unidentified
MNHHTEAFVAFDTSKLRNAVAVAEAGRAGEMRFVGEIDNTGVATAKLVKKLAARYERLTFCYEAGPTGYGLYRQIKSLGHECIVVAPSLIPQKPGDRVKTNRRDALSLAKQLRAGDLTAVWVPDERHEAMRDLSRARGAAVEDLRGKRQQVSSFLLRRGLHYPGKKTWTKAHMVWLASVKLAHVEQRVAFEEMLLAVRQAQERIERLEQAIRDAVADWSLAEVVTALMAMRGLDLISATTLLAEIGDLSRFQTPRELMAYLGLVPSEASTGDTVRRGPITKTGNHRARRILVECSWSYQHAPRVGKKKLEKVAAAPSVVREIAWKAQCRLCARYRALIRKGKPKNVAVTAIAREFAGYIWAVSREVAPAGLRPHSGNSMK

SEQ ID NO: 455098 - protein, 343 aa, unidentified
MKDTIFNHYIAIDWSIENMAIARMTKKTNKITLIDVPSDIAEMKVYLKRLKGSKILVVEETTTSQWLYTELNDYVDRMVVCDPYRNKLLSDGPKTDKIDATKLVHLLKAGLIKEVYHSTDKFLYLRRFVSGYEDMVKAGVRLKNQRYSFLRACGKRGFERAGMKLDAEDDQFVLDCMDRQIETQKQEKEAYEKEFGRLSRDYPEIRHQKSLPGIGPIHAVKIVARIVTPYRFGDKGNFLSYLGLIKLEKISGGRSYGRKNSRYCRQLKSVYKTSTWAAIGGNNPINDYYEYLIREKGYPEHNARHKACRRLAILSLGVFKSGKKYQPYRRNHVEGKKEVTSGL

SEQ ID NO: 455099 - protein, 423 aa, unidentified
MIPAVIERCAGIDVGKKFLAVCMMTGPASEPAKSETRRFGTVRSELELLRRWLQSEGCTHVVMESTGIYWKPVLNILEEDPQFSVKILLANPRQVKAVTGHKTDPQDARWLAHLLRHGMIRPSFIPPRAIRELRDFTRRRKQMIRIAAEERNRVQKVLEDANVKIGDVLSDVFGLSGQLMLEALVNGLEGGQQPGAPDIAQLARGQARKKIAELTAALEGHQMRTSHRILIRHAMRHLAFLAMEIENLDEDIATMIRDAGLATAHELLQTIPGIGAQAAATILAETGPDMKQFPAVTNFSSWTGLAPGNNESAGKKKRAPALRGNPHIKTALVEAAWSATRTRQSEFEDRYHRLKPKIGPKRAIVATAHALAIRVYELLDSGQPYQQRGPSLSPRAVRRLIRHHTRRLNCFHRWLHNDVSVPK

SEQ ID NO: 455100 - protein, 358 aa, unidentified
MNSKAFIPRDYDVFAGLDVDKKSISVTFTNHQGFIRSLRVPYSAEHLVNHVRKHFPDQKVAFAYEAGPTGYGLYDGIVAQDYPCLIASPSMIPKAPGQRVKTNRLDSRGISENLGGGQLKSIHVPAVLYRELRHLTQLRDTFVSAMVAMKQRIKSLLLMEGLEFPPAPAGSQWSFMVKAKLRKLPCSSTVRFELDQLLDSLEFNEKQIVKTTQQIRRLCQNDAELSQCIKYVMSVSGIGQIVASQLLARIGDWRELRNVRQLGAFLGLVPTENSTGERTDRGSITHSGDPRLRSKLIQAAWSAIRKDGELREFFRAVCQSHARPVASRVAIVAVARKLTVLISVVLMEQRPYGVRKKV

SEQ ID NO: 455101 - protein, 457 aa, unidentified
MSRARKAPKTIKSVAEVDTLTILNRNAAGIDIGLDEMWVSVRADRDAEPVRRFGMNTPDLIAVAEWLKACGVETVAMESTGVYWIPLYEVLEERGFQVYLVNARHAKNLPGRKKDETDAQWLRRLHTFGLLNNSFRPAGEMCAVRAYWRHRADLIEHRAAHIQHMQKALHQMNVRLSPTVKDITGVTGMAIIRAILAGERDPLTLAQLRDPRCAQPEAEFVKALTGNYRDEHVFALKQAVALYDAYTQQILECDQELERKFSALKPVHDDDLPPLDTTDKRNTHSKNAPAYDGRSLLYQLLGVDLVAVDGLNEVTAQTIISEIGTDMSRWQDEKHFCSWLGLAPHNDISGGKLLRSRTLKTHNRAGQAFRLAAQAVSKTDTAYGAFFRRMRTMHGPMKAIVATAHKIARAVYFMLRDHKPFHDTNAEEYHQREREREIARLKKKATKLGFTLAPASA

SEQ ID NO: 455102 - protein, 401 aa, unidentified
MNAVGIDISKDKSMVAIMRPFGEVVASPFEVLHTDSELGKLANLLQNLNGETKVVMEYTGTYYKPVAHTLHETGLFVSAIHAQIIHNYGNNTIRRAKNDKKDAVKIANYGLSEWLNLTQFFPEEDIRLSLKVFCRQYNKYSKLKTMLKNNLISLTDSVFPGVNELFKTPPRKSDGHEKWIDFAAEFWHAECVCGFSEKRFIQKYRKWCKTHGYNFSATKAEDIYTSSLGHVSIMPMTETTKLLITQAVLQLNAISETLNTISHEMKRLAGLLPEYPVVISFFGVGELLASQIMGEIGDVINFRKKSSLVSFAGLDPVENKSGKYQGKETISKQGSSHLRKSLFQVMDCLIKRKPVDNPIYQFLDRKRNEGKHYYCYMTAGSAKFLRIYYARVLEYLLSLDD

SEQ ID NO: 455103 - protein, 343 aa, unidentified
MHEYIAFDSHKHYTLAEREEVASGRVTQCRIEHHRGALREYLSRCEPGTPVAVEATANWYWIVQEIEEAHQQPRLVHPRKAKLMMGMINKTDKLDVHGLNRLQRNGTLPTVWIPPAALRDLRELTRVRMLLAAQRTRLKNRITATLSKYGLIVEGCSDPYGKRAREALHRQMEQLPPQTRYATGMLLEQLDFIEGQIAGQERRLQELLEVTPDMALVDSLPGVGTILAAVIVLESGDVQRFASAERLASYAGTTPRVHASGDKVRYGRLRPDVNRYLRWALVEAGNSVALNHRRCPERHVSQLYRRLRDRRGHSKAIGAVARHLAEACFHVLNRKEPYRDPNV

SEQ ID NO: 455104 - protein, 408 aa, unidentified
MEVLYARCAGLDVHQQTVVACARTASGAAVQQDVRTFGTTTGELLALADWLAAHGCTHVVMESTGVYWKPVWHVLEGQFELVLANAMQTRAVPGRKTDVNDAMWLADLLAHGLIRASFVPPTPIHELRDLTRTRKQLVREIAQHTLRVQKVLEDANLKLTSVLSDVLGLSGRAILEALIRGERDPERLADLLRGNLRARRSAVVAALHGRITAHHCFLLQLHLGQIDALEAAVRGVEARVGDALVPFQHAVDRLLTIPGVGPTVARVLVAEIGVDMTRFPTSGHLISWAGLCPRSDESAGKRRSTRTRPGTPWLKTALVQAAWAAVRTKNTYLHAQFLRLKTRRGPKKAILAVAASMLTAAYYMLRDGTTYVDLGATYFDRRSQAQITRRLIRRLENFGLVVEVRPAA

SEQ ID NO: 455105 - protein, 449 aa, unidentified
MSDIPTSSIQPEFVALIGIDWGDKKHAWALQAGDSTKIEKGEIEHTPEAIQQWAAELRRRFPSGRLAVALEQSRGPLVFALSKYEHLTLFPIHPSSAAEYRKVFRPSGAKSDGPDAVLHWDMLARHRDKLRPLNPDTPETRALQLLTEDRRQLVNERTRYSNRLTANLKSSYPQLLQWFDDLYAPVTLDFLEQWPTLEELQKAKPGVWSKFFQEHRCRDAKNQQLLAAIPTAVTATTDFAVVTAGRAGVCAAVRLLSNLNQAIQEYDRQIDQLAKGHPDFALFQSMPGAGKVLVPRLIAAFGTQRDRYQRAAEIQQYSGIAPVTEASGQQRWVHWRWSCPKFLRQTFHEWAAQSIAQCDWAAAYYRVQREDKNKSHHAAVRSLAYKWIRIAFRCWKDRQLYDGSKYELALKTRAKATPEPKQPSSFPLPLRWISCAGFQKLAEKNEENT

SEQ ID NO: 455106 - protein, 343 aa, unidentified
MKITTIGIDLAKNVIQVHGVDEQGKTVLKKQLRRHQVVPFFANLTACQVGMEACSSAHHWARQLEKLGHRVKLMAPQFVKPYVKTNKHDAADAEAVCEAVNRPNMRFVPIKNGEQQAVLSLHRARQGFVKARTAQANQIRGLLAEYGIVVPQGITHIAKRLPAILEDGENELPGTFRHLLARLGDHLKELDRQVGELEQQIQRWHRENEASRKLEQIPGIGPLTASALVATIGDARQFENARQLAAWLGLVPRQHSSGSKPMLLGISKRGDSYLRTLLIHGARSVVRVAERKGDEGQNWLTQLIDRRHKNVAAVALANKNARIVWALLAHDRYYQAEYITSAA

SEQ ID NO: 455107 - protein, 438 aa, unidentified
MRAKCNDDLSTVNFSTIGLDVHKNRLVACAVHVQHDAKGREVHEKEYFESTGTYSGRQRLTEWCSSQNADLILMESTGIFWKAPFRDLEKADLHPVLINPRIFNRGSDKRKTDKSDATWLANLARLGLYRASFIPAEPYRSLRLVQSQIKSLVAERQRLKNRLVKVLDDSGFRFTVAFTDIGGASSQSLIAGILEDAPREELALMIDPLCKKSIEEILDAVSGELSQINKDIVQSILRLIETHTKEIETLEQTVIRELKKCEKVKQNIRLMTTIPGVSEKSAQLLMSMIGPDFVENFSSPHAFARWLGVCPGNNESAGQIKSGRTPHGQRLIKKVLTECAQAACHTKGSHLAVLFGGWKHKGFCKAVMAVAHKLALLIHWVVVNQKPYIDKEFDYAGVFKQDGQRRPRWIRALRRYGLMTLADVEKEKAARGWIIAKA

SEQ ID NO: 455108 - protein, 407 aa, unidentified
MDVLHPKCAGLDVHQQTVVACARTGAGKAVTYDVRTFGTTTAELLALSDWLTAHGCTHVAMESSGVYWKPVWHVLEGHFELVLANARHIRNIPGRKSDVNDAPWIADLLAHGLIRGSFVPPEPIQELRDLTRTRQQLVREIAQHTLRIQKTLENANINLTAVLADVLGSSGRAILRALARGERDPERLAELASDRVKASRAELVAALHGRVPPHHRFMLTLHLTQIEALEAAVREVEARLGDALAPFRAALDRLITMPGVSETVARVIVAEIGFDMTRFPSAGHLVSWAGLCPRLHESAGKRLSNRTRSSNPWLTTTLVQAAWAAARKKDSYCRAQFLRIKSRRGPKKAVLAVAASMLTAAYYMLKHGVDYRDLGADHFDRRDKAKLAKRLIARLHDLGLTVEVRAA

SEQ ID NO: 455109 - protein, 399 aa, unidentified
MIYVGIDVAKTTHYAAAADSDGVVLVEPFAFDNDAPGFAKFISKIASFPKEQLIIGLESTGIYSENLICFLFDSGYKLAVINPIQTATLRKTNIRKTKTDKVDTLLIIKSLMVNSYRLYTEQDTQSLKLKSLCRFRQSLKKSKARLKIQLSGYVNLLFPELLSFFKSGIHISTCYTLLKRCSSPAEIAALRLDSLSRLLSNASRGRFSRSTAEALKSLAKSSVGVKNPYISIQIAQTIQQIELLEQQIDEIENVIKDTICELDSVIMSIPGIGAIDGAMILGEIGNIDRFASPAKLLAYAGLDPTVCQSGKFKARSTKMSKRGSKILRFALINSAWQLTLKNDTFFNYYQLKLSQGLSHYGALGHVAHKLVRVIFTLLKHNVLFDPTRLVKSYFSLDFS

SEQ ID NO: 455110 - protein, 319 aa, unidentified
MDEPRSASICVGIDVSKDRLDVHLRPSDEAFAVARDGKGLESLVERLKPLDVSLIVLEATGGFEVAVAAALAGAGLPLAVVNPRQIRDFARALGRLAKTDALDAKVIALFAERIGPQARPVPSPEAQRLGELVARRRQIVEMIGMEQNRRRRAGDKRVVKRIDRHVAFLEKELADVDADLDAGVRASPAWREAEELLVSVPGVGPVTARTLIAELPELGQIDRRKLAALVGVAPFNRDSGTWRGHRMIAGGRASVRTVLYMPALAASRHNPLLKATYQRLVARGRPKKVALIACARQLLTILNAIVRDGRPWTPEPAHA

SEQ ID NO: 455111 - protein, 369 aa, unidentified
MSEKDYNRQVLKRESIGRDTLIMGVDVGNAWNAVGFMNKEGNVLGSCAKLYNSREGFEEFIRMTEGFKAKHGMNSVLIGMEPTGHYWRKLAYFAKEKGYEVRFVRTTALKHHRELDESSSAKSDKRDALTIANITREGKYIDTVIENGVVRQLRTLSKVRERLLRYSVGAKNALHAALDDYFPELHEIFWSMNSRSLWAVLDQCPFPEDVVSMKRSVLKELIARSSRKKAGAAQKAKALYELAKKSIGVKLIGSADCYRVKICLEEVKRIVLMLKDIDRQMKSVLKEIPASEYLLSIPGIGPLSAAIFLGELGDPAYFQNARQIVKYAGYDPQESDSGYRISRKFISKKGALALKEVSFLYEHEGGSPH

SEQ ID NO: 455112 - protein, 341 aa, unidentified
MQELYVGMDLHSVNTYVGILEKGSNKRVYQKRHNNDLQEILSVLEPFREEICGIVIESTYNWYWLVDGLMDAGYTCVHLANPAAFKQYEGLKYTDDRHDAFWLAHMLSLRILPEGYIYPKEYRPVRDLLRKRLFLVRQRTSNILSLESMIERQTGRKINGSEIKKLRSEDIEALFKDKHLVLLAEASINNIEHLSCLIDKIEKEVRDVVKMHPAFKYLLTVPGIGDILGLTIMLEVGDIKRFPKVGNFSSYCRCVSSIHKSNGKNKGKGNTKNGNRYLAWAFIEAANYGRRYNKMLNKFYNRKLAMKNKIVATKALSNKIARACYYIMRDQIPFKEELLNS

SEQ ID NO: 455113 - protein, 344 aa, unidentified
MEHYAGIDVSLEASSVCVVDASGKISREAKVASEPDALALFFRELDCEVTRIGIEACPLSQWLHAGLSAAGFAVVLLEVRHVKAAISAMAVKTDRNDARGIAQLLRMGWYRPVHCKSQPSQDVRALLTARKQLLVKAIDVELCLRGLLRGYGLKMGVTTAPRFAGRVRELTAGHPVLEPLGETMLRARDVLRREIAVLHRQLLTIARTDGVCRHLMTVPGVGALTALTFKTAVDDPTRFTSSKRLGAHFGLTPRKYQSGTVDVTGRITKAGDAMVRSALYEAAHSMLTRVKSFSSLKRWAMAIAKRRGMGRATVALARKLAIVLHRMWINGTDFRFGKEQAATA

SEQ ID NO: 455114 - protein, 353 aa, unidentified
MKVYIGVDLHVRTQTVCWCDTTTGEQQERLLDHERDDVRSFYAQFVAPAVVGVEGSGYSLWFHRLMEETGHQLVVGDAQAIRQFARRRQKNDRRDAQLLLELLLRGDFPVVHVPSPASRDVLALLRYRHRLVRMRTMLRNGLQAVALSHQLRLGPRLFTARGRQQLAVLPLQGAYAAQRQHSLALLESLEERVQAIEEELEMRAQQDARVMRLRTHPGVGLLTGLAVVHALDPVQRFDRARRVAAYCGLDPKEHSSGDSQRFGHISKQGNRLLRFLLVEAAHTAIGKDEPLRRFYFRIESRKNSAVALVAVARKLVLRLYCMLREEIDYDEFRRRGRDARRARVSHSSVARRD

SEQ ID NO: 455115 - protein, 343 aa, unidentified
MKIQALGIDLGKTVFHLVGLDEKGQVVIRKRCSRTQLLAFTANLQVQLIGMEACSGAHFLGRALRAQGHEVRLMPAQYVKPYVQTNKSDYIDAEAIAESVQRPRMRFVPIKTEEQLDLQALHRVRERWVMRRTAVVNQIRSLLLERGLTVPKGRKHLEQALPRILEDAELNLSGAFRVLLAQLQLELGQLAGRIEQMDTVIQQTARENEACQRLTTIPGVGPVTATALIGAIGNGSAFRKGRDLSTWMGIVPGEYTTGGKQKLLGISKRGNKYLRRRFVQGARSVLQQRDKQAPGLSQWLAQLLACKHQNVVVVALANKLVRIAWAVLCKNERYRAPVLAVAT

SEQ ID NO: 455116 - protein, 360 aa, unidentified
MTYGSTEPRKAAGLTVGLDVSDTYTSLCVVDEEGNMIEEGRVRTTTPALERRFSALPPCRMVLEVGTHSPWMSRLLAGFGHQVIVANPRQVRLIAESDRKRDRTDAELLARLGRVDPALLRPIRHRSAEAQQDLALLRARDTLVRVRTQLISHVRGAVKATGGRLPACSATSFHRKAGPHLPAPLHPALQPLLATIADLTARIRDHDRLVEQALGERYPAARLLRQVPGVGPLTAMTFLLVIEDPGRFRKSREVGPYLGLVPRQRQSGEREPQLPITKAGDPLLRRLLVQSAHYTLGPFGPESELRRWGLGLAGAGSSRAKRRAVIAVARKLAVLLHRLWVTGEVYEPLLGERAMQARAG

SEQ ID NO: 455117 - protein, 348 aa, unidentified
MDQVSRIGMDTSKHIFQLHGVSADEVPVLRKKLRRKDMVTFFAKLAPTVIAIEACGASHHWARLLQSLGHSVKLIAPQLVKPYVKRGKNDAADAEALCEAMSRPTMRFVPVKTAEQQAGLMMVGVRDRLIRNRTQLANAIRGHAAEFGLTAAKGMAHLVPLLDRIEADESLPALARELFAIQAKEYTQLQTQIDEIDTKFMAWHRADECSQRLVKIPGVGPIGAALLRMKTPEPELFRSGRQFAAWIGLTPKDHSTAGKVRLGVITRAGDEALRSVMVVGATAVIQHVRRGGRAPHWLAELLKRKSPKLAAVALANKTARVAWKMMVTGETYTAKSVAGTSAGAASQA

SEQ ID NO: 455118 - protein, 325 aa, unidentified
MFDSAGKIVRESKVASEPEALIGWFRKLGLSLTRIGLEAGPLSQWLYAALRQAGLAVELLETRHVRNALKTMPVKTDRNDARGIAQLMRLGWFRPVHCKSMEAQETRALLTARRLVKSKLHDVEMSLRGILRGFGLKVGRTGKTQFEARIRELVAGHPTLQAIAEPLLAVRGVLRRELAGFERRVRATARSDLRARLLMTTPGVGAVISLTYASAIDDPARFKSSKIVGAFFGMTPTRYQSGETDVSGRISRIGDAAVRAVLYEGAHVILTKPVKGCTALKSWAMRIAARAGMKKAKVALARKLAVIMHRMLVDGTPFIDAAKAA

SEQ ID NO: 455119 - protein, 343 aa, unidentified
MYYIGLDVHKRTISYCVKDAAGQVHQEGKIGSTRRELDAWIKTLPQPRTIAMEATIFTGWIYDHLLPHAEKVKVAHPLMLRAIAAAKKKNDKIDAGKIADCLRCDFLPECHMTSTEIRDRRRTLRYRNLVLKQVVQMKNRVSGLLMETGVSYNKQRLHKLGYFTELISSNDEVSEAIRPLLKLSRETIVRSQKLDYALVSSLERDPLLAERLKRLKTIPGVGPITALTWALEIGDVSRFQSIKQAISYCGLCSAERSSADKLVRMPISKQRNKHIQQVLVEAAKLAPRYSHELALVYEREQQRGNKNRATLAVARKMVSYMLAVERRKQDFVLTGKFSGTAAA

SEQ ID NO: 455120 - protein, 449 aa, unidentified
MSRPQVIDDREHERIYDKVAAVDVAKDSGMVCTRTPHPSRPGARRSTIWTVQARKNAIAVLGRKLARDGIEIVTLESTSDYWRIWFFVLEACGLAVQLVSASQARNLPGRPKTDKLDAQWLARLTEMGLLRASFVPPRAIRDLRDYTRARTRLVQERTRCWQRLEKLLEGALIKLSAVASTLATVSAQDMIRAMIAGQRDPRVLAGLARTRMKARHDDLVEALDGMFDDHHGQLAGLLLDRIAFLDAQISQLTTLIGQAAAAIPAAWGISADGSTGPDAGAGPDAAALPAAARLAEIPGMSEDLARSVIAETGLDMTRFPTAAHLVSWAGLCPAARQSGARIRAGSKGHGNGYLRGYLGQAATGAARTPTFLGERYARIGRRRGKAKAQVAVARSILVIIWHLLADPTARYHDLGPGYHAARLDQDRKIRNHVRQLQALGFDVTITRAA

SEQ ID NO: 455121 - protein, 411 aa, unidentified
MTQPNATIIGGVDTHKEFHVAAVIDDVGRLLGTSSFRATACGYDELVCWMRSFGDLAMVGVEGTGCYGAGLARHLATESVEVREVNRPSRQTRRRKGKSDPVDAEAAARAALNGEATGLVKRKDGAVESIRVLHLAYYSARQSRSKVACQIRDLIVTAPEEIRCLLGDLTTEHRVERCSRLRPVGDPADPVVGTKLALRFLARRYQSFDTEMDDLEQLLDQLTTAVNPSLKGAKGVGTDTAAILLVAAGENPERFKNDSAFAALCGVSPVQASSGKTQRHRLNRSGNRQANHALWRIVRIRMIWDPTTKAYVARRVAEGKSEREIVRCLKRYVAREIFRLLVDPKEVTNGADLRRLRHEHGITLTQVASALGTTTSKVSNIERSIYHDTNFTERYLAWLNEAGFSGAEKAA

SEQ ID NO: 455122 - protein, 443 aa, unidentified
MKEKKNGLPVIQADAAGIDISSKEHYVAVNPERDDKPIRCFGAYTEDLHALRDWLKECKVQTVAMEATGIYWVSLFLVLEEAGFEVLLVNARHVKNVRGKKTDMSDAEWIRQLHSCGLLKASFQPDEFTRTLRTYIRHRKNLLEMAATHIRMMHKAMEHMNIKLQHVIADITGKSGMAIIQSILQGERDPENLVQLLDGRIKANKEDVKRSLQGVWKEENIFELEQSFEMYHLYRCKITDCDKRIENIILQKTGPQPNVNESKKQYVKNNKNNLNFDATAMLQQITGTDVTEIFGINDSNALEILCETGFDMNKWPTEKHFTAWLNLAPNTKISGGKILSSRIAKKKNHAGQVFRLAAYAIQRSKNWLALFYHRIKSRSGTKTAITATARKIAVIFYKMLKDKVMFNPVSIDAYADSFKQRQLKKLDRQARSFGLKLTPRLTS

SEQ ID NO: 455123 - protein, 341 aa, unidentified
METDIIIGVDLAKNVFQVHGANRSGAVLFRKKLSRPQFMKFMTAQPGCLVAMEACSTSYYWARTLSDAGHDVRLIPPIYVKPFVKRHKNDAADAEAIVEAALRPNMSFVEPKSADKQALSMMMRTRDQLIDHRTATVNALRGHMAEFGLIVPVGIKNIERLQELVAADDALPSLVSEMASIHFEQIIELTRQVDRLTEKIKTYSTSNATVRRLQTMPGIGPIGAMIIETFAPDMATFKRGRDFAAWLGLIPLQKSTGGKSRLGQITKMGQKDIRRALVIGAMSRIAGYARQKSRAEPWLQDKLDRKPKMVAAIALANKMARQIWAMVTKEATYKPRVVAAA

SEQ ID NO: 455124 - protein, 349 aa, unidentified
MEIDTIGIDLGKTVFHVVGLSRAGEVVVRRKFSRTQLLRFTANLRVRLMGMEACGGSHFLGGRLREQGHEVRLMPAQYVKPCVKTNKNDYVDAEAIAEAVGRANMRFVPIKSNEQLDMQSLHRVRDRWVARRTSVVNQMRGLLLERGITFRKGRRHAEASLPGVLEDSENGLSGPLRMLLSQLQSELRQLQIQIDEADTLIGKAAGDHEPCRRLMGIPGIGPLTATAVAASIGNGTEFRKGSSFAAWLGLVPKQESTGGKQKLLSISKRGNHYLRRLFVSGARAVLQCRNKQSPGLSVWLGQLASRVHTNVAAVALANKMARVAWAVLAKSEAYRPPQLATSTEALVCN

SEQ ID NO: 455125 - protein, 418 aa, unidentified
MTKKLDTTFIQIVHPVCCGLDVHKKKISACLITLDKQGKEHYDIKEFGTFTNDLLEMKTWLTDNNCPVLAMESTGVYWRPVHNVIEGFMEVILVNARHIKNVPGRKTDISDCKWLAGLLRHGLLKGSFIPPKEIRQWRELTRLRRTYTESRADYKRRVHKLFETANIKIDSVVSDLFGVTGRNLIFLLCNESELSLSKVKENAKRGLKAKSKELHQSIHGFFEDHHRFQLIGMMEMITTFEKRISEITKRMDTLTAGHQNLLNRLDEIPGIDKKSAQSIVSEIGVTLDEFTCMAALASWAGLCPGNNESAGKRKSGRTSVRSHPFKTILVEVSWAAVKKKGSYYRAKYYKLKARRGAKKAIVAIAHRISKAIYNIIKQGDTFMDLGEDYLTVQTRQRTINNMKKRARQLGYNLVPCEN

SEQ ID NO: 455126 - protein, 458 aa, unidentified
MMEQALAQRNCSLSRKADKSRQALTITHPNSAGIDIGSASHYVAVPPDRDDEPVREFASFTADLHRLADWLAACGVDTVAMESTGVYWIPLYELLDARGFTVLLVNARHVKNVSGRKSDVLDCQWLQQLMNYGLLRGAFRPADEVCALRALARQREMLLKSQARHVQHMQKALTQMNLQLANVISDVAGETGQKILRAIIAGERDGHVLAALKDTRIRASNEQIAKSLQGNWRAEHLFALKQALASFDFYATQLAECDHEIEQQLQRLHVHRGECAKGRKRGRTRNAPKFDLRAHLFKLCGVDLTRIDGIDVTTALAVISEVGADMSKFPSVKHFTSWLGLCPGTKITGGKLLSGKTMRVANRAAQALRLAAAALRSSHSALGAYFRRLCSRMDKPKAVTAAAHKLARLIYTMLTKGEEYTDQGQDYYEERYRERVLRQLSKRAQKLGMKLVVSEQPA

SEQ ID NO: 455127 - protein, 317 aa, unidentified
MNVIGLDISKDTIDVCLDPTKGDKSYLKIENSINGCRVLQDWIKTKKVRKFLVAMEATGIYYEQAADYLSRHAPVYVINPLKIKEYAKSVFCHTKTDRADSALIADYAKRHSDRLNTYTIPHDRQLQRLINLQLQLKEQIKQAKNRLHASQDDFIADTHKAIICFLDAKLDQTASELDSLIKQQNALTRHFENIKTIPAIGKETALMLLHHLMAKPFQTANKFISFAGLSPKIEQSGTSVDRKRKNKYGHKKLKQSLFMPALVAFRMGAFPQFVKNLQESGKPKMVIIVAIMRKLAKLAYYIFKTGQPYDKSRHQAA

SEQ ID NO: 455128 - protein, 342 aa, unidentified
MEITTIGIDLAKNVFQIHGVNARGKVTLRKTVKRPALAKLIANLPTCVIGMEACGSAHYWARKFIEFGHTVKLMAPQFVKPYVKTNKNDANDAEAICEAVSRPSMRFVPVKNVEQQSVLALHRARQGFVTARTAQVNQIRGLLYELGIVIPKGVRQLKQQLPLILEDAENDIPGTSRALFARLFEHFHALDEHVHDLENQIKAWHRDSEASRRLERVPGIGPLTASALVASIGDAKCFKNARQLAAWLGLVPRQFSSGGKDRLLGISKRGDTYLRTLLIHGARAVLFHRMRRPTDSDGWLMKLLARRNSNVAAVALANKNARVVWALLAQHRNYCSGYRAAA

SEQ ID NO: 455129 - protein, 400 aa, unidentified
MRAVFGIDVSKASSEVAILVNGEKVHGYTISNDALGFARLLGDLKTVHKPEIIFEATGVYSRRLQAFLEDNGHAYTRLNPLEAKKQLDSLRVRKTDQIDAEKLAQSQFVLNRKPTYVQEEVYQELRDLSRFYQNLTEDIVRAKNRLHKVLQVTFPELETILSTPTGEQYGNLVVAFPCKDFVLDLSKDELSESIRQSTSKRISDKRVAYLVEKLTALANQSYCAVKKTSPIMEEVRYYAKELLRLSEQRQTVLDQMVELAQPLPEYDILLSIPGIAETTATSIIGELGDIRRFQSANQINAFIGIDLRHYESGNFLAKEHITKRGNPYARKILFKCIHNIASASHTNPCHIADFYEKRKRQSQTTSTKPHTIASIHRLIRTMYYLITHNKLYDYRSTRNQ

SEQ ID NO: 455130 - protein, 338 aa, unidentified
MTLYCGIDLHSTNNFISVLNESDKPLFEKRLPNDLERVVLALAPYRDELQGVVVESTYNWYWLVDGLIDAGFSVHLANTIAMRQYDGIKYTDDLSDARYLAHLLRLGILPEGYIYPKEERAIRDLLRKRLHLVQQRVTQHLSLQSHIARHTGERLSAVKIKQLTREGLKELLADPNVLLAAEANLSVMQSLTETIEQIEKSVLGQCRIQPAFHSLKSIPGVGPILGMTIMLETGTIRRFPDAGHFASYCRCVKSEKISNGKRKGVGNRKNGNKYLSWAFIEAAVKAARFEPRIKAYYQRKMAKSHRFVALKAVANKLAKASYYILRDQVPFDVKRSFG

SEQ ID NO: 455131 - protein, 316 aa, unidentified
MQAFPLCIGVDVSKAELVVAAAGQRPHSVPNEPASIRQWLCTVPAHALIAMESTGRYHVLLAGLASQMGLKVYVLNARDVFFYARGLGTRAKTDGVDATVIERYLSEHHGQLHPWRPADSTQQHLQELLTRRAQVAKHRSALCQVFKATELQDIDTSALLGAFDALLRSIDAQVKRLIASDTQLSPGYQRLCTITGIGAQTGALLTTLLSRIPFANSDALVAYSGLDPRPNDSGTKRGRRRLSKKGPALLRRQMYLAGLAASHSKALGPLYRAIRAKGFTSTEAIVILGRKLLRVAFALWKGGEKFDAAKLVPQLA

SEQ ID NO: 455132 - protein, 429 aa, unidentified
MPTKKGKRMKSWQQITHYAGFDWARDHHDVVILDQHAHIVADFQFEHTQAGWQLFGEKTAPFPHLAVAIETSRGPAVDQLLQADYTVYPVNPLAAKSYRQRRAPSGTKTDHLDAWSLAEALRTEGQAWRALVRTHELSLQLRLLCQDEVVLIAQRTQLVNQLQQALVDYFPVALESYEDWTSPACWDFILEFPTPQALVGAGKRRWEKFLHTHRLWRPDTVAKRLELFARADQFQGSPAAIRAKSQLATSLCKLLRTLQQQLDEYRQKIEKLFADHPDHDLFGSLPGAKKVLAPRLLAAIGGDPNRYGGSVTVLQAFAGTAPISYQSGKRQCVRIRWACDKFMRHTIHLWADCFRRAVPWAKVYYQNKRQSGMNHACAIRCLGQRLLKILFRMLTDKKPYNANLHARNQLKHGSWVLKLVPEASAKAGE

SEQ ID NO: 455133 - protein, 411 aa, unidentified
MYYVGIDIAKSFHVVSVIDDNETKVINKPFRINNDNKGFEKLLTILDSVTLDKDGFLIGIEATGIYGENLLEFLKSKGYSVKLLNPFQTSRYREQITMKKVKNDNIDSLVIALFLKDGKYSSGYVTDDEYQSLRTLYRNRASIQSDMKEVKKRILTQITVTFPEFESFTNPFTISGLALLDKYPTAHHYKHSSVDRIMKIFAHIQGNNFNQDKALRLLELSRESIYSGKAKDARAIAIRSTIRLLKMYLSEIDIIEAEILLLLDKKGINNSTLDELPTKDSLIDNLKTIPGVSDKTIAAVISECGDLTRFPSIPKFIGYLGLFPTENSSGNSKSIGHLSKRGSSLVKHALYLSAVSCLIHNKQMKQLYDTKRSQGKSKKEGLIAVSRKLATIIYSIFKYNTAYNPNRVFTN

SEQ ID NO: 455134 - protein, 332 aa, unidentified
MTRLYGSIDLHSNNNLSMISDDKDRVIDKKKLTNELTEVDAFFRHYRRQLSAIVVESTYNGYWLVDGLKELGYEVKLANPAAMQQYEGLKYSDDENDALWLNRMNRLGILPEGYIYPKEQRTVRDLLRKRMFLVQTRTNLVNSLKHQYQSWKGMTMSRRKLERLEPKDVGEVFQEEYLHQSAVSLGSVIAFLSRKIDLIQASVFKALKEDSLVRRLQLLPGIGNILGWMIRLEIGELNRFNAPGHYLSYCGLVDSRRMSNAKLKGRGNAKNRNKYLRWAYGEAAVLALKHPRIRQYHDRLVGKKGPIKAKAIIASKLGPGLLQAHERSDVDL

SEQ ID NO: 455135 - protein, 345 aa, unidentified
MNYTQNEKIEQVTESTLVLGVDIGSSEHYVRAFDYRGRELTRKVFRFSTDINGFNSFYDWVTQICIKHGKNEAMIGCEPTGHYWYTFYQFVKDHGMKLAFVNPASVKKAKELDDNSPKKTDLKDPKTIAKLVIDGRYSFPYVPEGIYAEIREVVSSRDRIMKELNAASNRIQRWLKIYFPEYLTVYKKFDTTTGMMILEKAPLPDMVKALGADHIVKIWRQQKVRGKGASLNRAKTLVDAAHDSVGKPGGQGAVMEIQMLLEDYKVKKQQLEMVTSVMEELTMQIPNADKMLSVDGIGLVTVAGFISEVGDISRFKNPKQIQKYAGFELVENSSGKHKGRTTISK

SEQ ID NO: 455136 - protein, 351 aa, unidentified
MNATTVAVDLAKNVFELALADARWKVLERARLTRAQFERWFDNRKMDLVVMEACGSAHHWARTLRARGIEVRLLPAQYVRAYVKRNKTDAADCLALLEAARAQDIKPVAVKSIEQQGLQALHRTRSGWMSTRTRRINTLRGFCREFGLVVPEGAATGLAQIARYLADDRSGLPAMLRPSMRLVLEEIRLMEARIGQLEQQLAALAKQSPACQVLLSVPGIGLLTSTAMVAAVADPRSFDSGRRYSSFFGLTPREYSSGNTRYLGRISKRGDRYIRMLLTHGARSILRAATVARRAGRQIDRLKTWALQVQARTNHNKAACALANKLARIAWAVWVKHEKYRAEPAPATPSL

SEQ ID NO: 455137 - protein, 453 aa, unidentified
MTKSKRRHPERDFTPTHPNAAAIDIGSRMHVAAVPPDRDPEPVRAFGTCTGDLQQLADWFERCGVRTVAMESTGVYWIPAYEQLEQRGFEVVLVNARDAKHVPGRKTDVSDAQWLRRLHEYGLLRASFRPKGELAALRAYLRQRERLLDYSASHIQHMQKAMMQMNVQLHHVVTDMTGETGMRIIRAVVAGERDPAVLAAHRDRRCHASEEEITAALAGNWREEHVFALGQALELYDAYHTKVVECDLRIEIVLRRLRDAAAKPAGRLPPARHRDKTANAPAFDARAALHAVLGVDLTQIHGLGPSLALKLIGECGTDLSAWPNAKHFTSWLCLAPANKISGGKVLSTRTRRSGSRAAALLRLAAVTVGRTQTALGAFYRRLSARVGKAKAVTATARKIATLFYNTLRHGLDYADPGASYYEDRYRARVLTNLRRRAKSLGYMLHEMPAPAPA

SEQ ID NO: 455138 - protein, 429 aa, unidentified
MKIIYPRVCGIDVHKKFIVAVICISESVEPVYLKKRFSTFHNDLIRFRDWLIQNDCQNVCMESTGKYYIPVYNILESHISNIVVANPKWVRAVKGEKDDDKDAKWIADLFKLGIVKSSFIPQKDFRILRELTRYKYKLVNMRSSEKNRYQNALTSGNCKLDMVFTDVFGKSASNIIDLILSDNPYADEDILSKVHKNCKASPDMILNSINGTDLTPVQKSRIELVNDHIKQLSSNIQRLDKLIDLMIEPYEDYISFLCQIPGVSRNSAITILSEIGVDMNQFTSTRRLTSWAGLTPSSNQSAGKKKSVRISRAGVYLKPCLVEVAHAAVKDTNHPYYANKFNKISKRRGKKRAYIAIARKILVAAYHMLLTGEIWNPADLAEVETPVEQRIKYVKNNLKSDIKQLLDIGLTVEELTLMIQQNANNIATQ

SEQ ID NO: 455139 - protein, 379 aa, unidentified
MLNKTSIRTIGIDVHKDSFSLCTYCPETNSFVGEITTTSSSKMVANYIKRLQKDVGPNVSVISGYEAGPTGFGLHRDLSKAGLDCKVMAPTTIYEKKGGNRVKTDRGDARKLSKALYWEAFKEVVPLSVQDEATRDYIRMRDDRKDALKRAKQQIQSFLLRKSKHYPEKGTSWTQKYRAWLKSFTFELPADQLTFDEYYAEVCRLEEAVERFDQQIEEYSQDDRYRGKIAVLRCFGGIDTHIAMAIVCEIGDFSRFATAKEFSSYIGLCPGQQSSGGKTQMTGITKAGNGHIRKLLTESANSMARTTMFQKSKRLKARQAGNPASVIAYADRGTSRIRYKYKKMVQEGKSSNLAKAACAREIACFVWGMMTGNICGEVA

SEQ ID NO: 455140 - protein, 370 aa, unidentified
MLDTTTFVGLDVHARSIKAVSLDVMTGEVRCATFGYDAGAVAEWVRSVDPKARCVYESGVTGFDLQKRLSGLGVDCVVGAVSKMIKPSADRRRKNDRNDAEFLARMLSVGNVVEVWVPDDECEAARDLTRALEDARDDLSRSKQRLSKFLLRHGLVFDERTPTGRRKGNWTRAHWSWIESIRFAEGADNDVLAYYVDAVRRAAEEKARLEGLVDAEARKPRWRRRVDSLRCLKGVDTATAADLVFEAGEFSRFRNARSFAAWVGLTPSEHSSGESDRRGAITKAGNKHLRKALVEAAWHYLTCSGRPKDLAKGQAPDRVARRHAAKGVRRLVERREALLARGVHNNKANVATARELACWVWAVGLMAEEA

SEQ ID NO: 455141 - protein, 346 aa, unidentified
MDKFDPCGIEVSAQELVVALCRGGRAEPLRSFPNTAEGHAAVVRFLTGGPQRVRVVLESTGLYGLDLAWALHRAPQIEVMVANPRAVRHFASALMQRSKNDQLDADVLREFAARMPFQPWTAPSPAAFALCALARRLETLTEQGTAEKNRLHAAHVSVAMPAAVRRDLQRSVRSIQRAIGRLTREAQRLLEGDPLLGSSYRLLLTAKGIGPTSALRLLAETALLSEDLDVRQWVAYAGLDPREYQSGSSVHRKARISKTGNRHLRRALYMPAVVAARHEPHLRAFYQHLLAQGKCKMQALVAVMRKLLHAVYGMLKHRQPYDGAKLYRLVVDLPAPSSGHCPAEAA

SEQ ID NO: 455142 - protein, 313 aa, unidentified
MQIKKYTHVIGIDVSKNWLDISLNGKVTRIDQTKSAITRFIKKITLSDESTLVVMESTGGYERLATDNFKDAGLTVHIAHPNRIRAYAKARGCLAKTDKLDAKIIESYGRFVDPSRIHGLPSKKERLMCSWSRHLSHLKASLHQQKCRIELVDDIHIKRSINKLIRIMTKEIEQIEKRLLHLVQSDETLKRKYKILCSMKGVGPTLAMILLAELPELGRATKKEIAALVGVAPMTSESGMRARKAQTHYGRQSVRRVLYMGALVGAHHNKRLKVFYQRLLAKGKEKKVALVAVMRKMIVILNAMLQKNTLFNA

SEQ ID NO: 455143 - protein, 375 aa, unidentified
MNNNNTLYVGLDVHKESITVAYAINSESVELMGKIGTSPTDIQNLCKRLRSKSSQVSIVYEAGPCGYGLYRRLVKSGFDCMVCAPSLIPKKPGERVKTDRRDAIRLVRSLRAGDLSAVYVPGIEDEAFRDLARAWASARDDLRHARQRLKSFLLVHGVHYVGRADWGPAHRRWLSKYSFESPWRQLAFDEHRRTIEDRQAQCERLESALKEAVTEWRLYPVVEALQAMRGIQFITAVGLISELGDLTRFEHPRQLMSWFGITPSEYSSGGSRHQGSITKAGNSYARKLLVEAAWSYRHPARISPAIQKRQENLPRPVIDRAWDAQLRLCKRYRKLQAKGKNVNITIVAVARELAGFIWDMGRIAMSVAQQPQCHK

SEQ ID NO: 455144 - protein, 343 aa, unidentified
MDYFAGLDVSVKDTNVCIVDDTGKIIREVKVASEPDALLQVLRNATYRFKRIGLEAGPLSQWLFSALGEANLPVICVETRHMRAVLQAQINKTDRNDARGIAQMMRVGLYRPVHVKTLRSQKLRMLLTHRKLLQSKAIAMENDLRGTLRNFGLKVGMAGATKFEGRIKELIENLPDLAVLVEPLLVVRRVLREQIGVLHRRLLAVVRDDDVCRRLMTTPGVGPVVALTYRATVDVPARFRKSKSVGAVFGLTCSKYQSGEIDRNGRISRCGDEMMRVMLYEAAQSMLRSKKWSWLKAWAMQIARRRGMKKAIVALARRLAVIMHRIWVDGTEFRWTREATAAA

SEQ ID NO: 455145 - protein, 358 aa, unidentified
MVDKVTEAAVVGGVDTHKDLHVAAVVDQNNKVLGTQYFSTTRQGYRQMLAWMTSFGTLKRIGVECTGTYGSGLLRYFQNAGLEVLEVTAPDRMERRKRGKSDTIDAECAAHAAFSGIRTVTPKTRDGMIESLRVLKTCRKTAISARRVALQIIHSNIISAPDELREQLRNMTRMQLIRTLGSWRPDASEYRNVTNVYRISLKSLARRYLELHDEIADLDVMIAAIVDELAPEQIKRNAIGYESASQLLITAGDNPQRLRSESGFAALCGVSPVPVSSGKTNRYRLNRGGDRAANSALHIIAIGRLRTDAKTKEYVARRVAEGHTKMEAIRCLKRYISREVYTLLRNQNRRINSIPITA

SEQ ID NO: 455146 - protein, 385 aa, unidentified
MAKPYDLSKPLVALDHDSTLVCVIEMSGTSWLVAATVPGVDRRPLQKLPVDPARLLAQVERWRQEAARAGRTITRTVVAYESGRDGFWLARLLRGHGIEVYVIHASSVAVSREQRRAKTDRLDTEMLMRALLGWLRGEPGHCRMVAIPTVAQEDARRPGREREGLVAERTRLTNTIKAELALWGIQGFKPGLKKAAEHLEALRTVEGEPLPPNTLARLHRLLKRRTLISDQIKAIELAAAQAIERDPTGPNAMVLLLAQIKGIGLETAQMLVQEVLSRNLRDRRAVARYAGLTGTPDESGSKRREKGIGKAGNPRVRRGLIQLAWRLLMFQPDAALVRWYRERTAGGKGAIKKTMIVALARKLLIALWSYATAGVMPEGVVLKAI

SEQ ID NO: 455147 - protein, 404 aa, unidentified
MAVVCAGIDWASEEHAVCVLTDEGELLHEGTARHDEAGLLGLCELLCALRANRVAIERPDGVLVERLLAAGLRVYAMHPNQVKAARARFRACGGKSDRFDAFVLAELARTDHHRFRMLEGDGDETRALRALTRAREDLVTTRVGLANQLRAELERSWPGAGRIFADVDSPIALAFLERYPSPADARGLGERRLAAFLARNGYCGRRAVADLLARLKEAPAVVLGELEAEACRGVVLALVAALRVLVERIRLLSSEIAGAVRQHPDGALFLSLFRDPKSTVTAARLLAEIGDQRGRYPSAEALAADAGMCPVAVESGKRKVATFRWACDKRLRDAVVTLCDATRHWHPWAHGVYERARGRGCDHPHAIRVLGRAWLRVLWRMWQDGVPYNPACHGAMQAMLCAEG

SEQ ID NO: 455148 - protein, 355 aa, unidentified
MNQEKYIGLDVHQATISAAVMDCGGKLLMECLLETKAATILEFIQGLRGTLSLTFEEGTSAAWLHDLVKPHVSRLVVCDPRKAALLKEGNKSDRIDARKLAELLRTNQLKPVYHGEHGLRTLKELGRSYLSVSKDVTRTMNRIKSLYRSWAIPCSGSSVYAPRHRAEWLAKLLEPGVRMRAEHLYQQLDSLQPLRLEARCQLLRESQKHAAVRRLRQIPSIGPIRAALLVALLQTPHRFRTKRQLWAYSGFAIETHDSGEYRIVRGKVQRNRERITVRGLNDNHNKDLKNLFKSAAISASTRPGPLRDFYLARVEKGMRPTMARLTLARKIATIALTMWKKGVSFDPKQLQPQAA

SEQ ID NO: 455149 - protein, 419 aa, unidentified
MSFKILKFKCCGLDVHKTWIYACIGITDSNNRTEYKQARFSSFTKGLNELCNWLAKYNCTDVCMESTGKYWIPVFNILEQHNLWVTLSHPKYTKPMKGNKTDRKDAKWICDLYMCGMVKPSFIPPADIRELRDLVRYRYKLTCMITGEKNRAQNCLTVSNLKLDDVFSDVFGKSSRSITEQILQHPGEKFDVAPFVHGRCKTPIEEIQAAVDGAISKEQAVKLRQCLDHIDELNKHISELEQEILRLSDKYEAALNLIRTVPGFDKNPMTAVQMLSEIGGDMSVFPTAKHLVSWAGCCPRNDQSNQKIKSTRISRAGSYFKPVLVQVANALIKSKKHLEFTNRYKRIKARRGHKKAIIAICRMILTAIWHILSDLKPYTPEGFLESHPVKEGKVLSSSQALNFFKQRGYIIKDEPLSVS

SEQ ID NO: 455150 - protein, 473 aa, unidentified
MPRRKSPSSPPDPSAVALLQTLNPHAAGIDVGATDLWVCVPPGAVSSPHASVPGAPAVLPPNVRRFGTFTADLHAIAAWLRQCQVMTVAMESTGVYWIPLYDLLESDGFQVLLVDPRQVQRAPNRPKTDVHDCQWIQRLHSLGLLTAAFRPEEPIRVWRSYQRHRASLIEDAGRHLQRMEKALEQMNVKLPEVVSDLTGLTGMSILRAIVQGERDPHALARLRDHRCKESVETIARALQGTWQPEHVFALQQSLALYDYYHEQIRDCDRVIEAHLTGMALPEVPPLEPKRRVRRRKDNEVTFDARQRLHQVAGVDLTAIEGIEESTALVVLSEVGTDMSRWPSEKHFGSWLGLAPNPKKSGGRVKSSATRPGSNRAAQALRLAAKNLQRSQSALGAFFRRIAARRGVAKAITATAYKLARIIYAMLKHGMAYVAQGMAAYEAAYRERSVRQLKRKAAQLGLIVTEREAVAPLS

SEQ ID NO: 455151 - protein, 326 aa, unidentified
MEHELHYIGIDTAKEKLDVDVLRPDGRHRTKKFANTTKGHDELVSWLKGHKIDHAHICIEATGTYMEPVAECLYDAGYIVSVINPALGKAFAQSEGLRNKTDTVDARMLAEFCRQKRPAAWEAPHPLERALRALVVRHQALTDMHTQELNRTETAREVQRPSIDAHLLWLEAELKRLEKQIKDLTDDDPDMKHRRKLLESIPGIGEKTSAVLLAYIGLKDRFAHAREFAAFAGLTPRRYESGSSVRGASRMSKAGHVSLRRALYMPAMVATSKTEWGRAFRDRLAANGKKGKVILGAMMRKLAQVAYGVLKSGVPFDASRHNPVAA

SEQ ID NO: 455152 - protein, 395 aa, unidentified
MHKSTVTARRPGGEVVLLPFDVEHTAEGLKKLVAKLRQLDGEIRIIMEHTGMYWRPIAMTLKEAGFYVSVVNAILIHNFSDNSIRKVKTDRADAMKIANYGLTFWIDLQEYTGEDENRQLLKIQSRLYERTATTAGMLRNGLISLLDQTFPGANKLFRDESRNSKGHVKWIDFVLRFWHKECVAALSLAAFTDTFQKCCKRTGYKFSASDAERIHAIARNAVATLPKNDSTKLLITQATNSLNAIYDSLQAIRTEMDRLASMLPEYELVMGMEGIGKVTGPQLMAEVGDVRRFSHKGALVAYAGVDASPYQSGSFDSKSRHVPKRGSPHLRRVLFVIMSMTLIRANTANPVFCFMDKKRAEGKHFYVYTVAGSAKFLRIYYAKVKEYLNALEETA

SEQ ID NO: 455153 - protein, 406 aa, unidentified
MKQNSNSHSPRVIGLDIHPDSFTAAIVAGPTPVAAYVVKVFNKVPIKQLSSWAKKHSLSKDILTLEASGNSFHAVRQLAQIQRQALVLESQFIGKLKEAHANNDKISAVRIAKAYLAGTAKTVWVPDTLTQERRDTYHAHQKAVKRSTQLSNRLKSYLSDQGLRLSSRRSLLNQSEEILKAKDWSPKQRLIIEGLLMEFEHAQKQRAHWRRLIAQEVLCDPKLLSLTKLTGIRDVVAYALGALVGDIKRFASPKKLVSYVGLYPAFDESGEGGWKGGIRGHGRRDLRSLLIESAQSILRSNHPLAAWGKRLLARKGSKNIAVAAVARKLVVAVWYVMAGKQSPVEELSPLMGQKLGKIITQLGPEGIQSLAPTRKELRKQVIQGLLDGKCYLLDSSKVFAQEKRTG

SEQ ID NO: 455154 - protein, 398 aa, unidentified
MNPLSIRVAVDVGSTRHRVAIGLPDGKLLDEFDIDHDAVGFSEFFNHIETVENRHHLPVAVAMEGFNGWARPLDGQILRHGYSLYSVNNLKLARYKEIFPAPAKTDAIDARRILELFRLSEHLPLARDALHEVAPTPVANDQLKRLTRRRKQLVWERVRVINRLQSDLQAVCPGLLAITGEAGNLWFLNFLTCRDKLPKLAKLRQSCLLAIRSVGKLYASRIQAWQLQAQFAPEVEWVGEMIQQDARRILALGKEIKAIEQQIAGIAVQSELAQIIGSIPGFGKTTMAEIAGEIGTLERFETEAGLAIYTGMAPLDKSSGKKNSTKAPRQVNTRAKAAMMVAVARHIECVPASRAYYDRKRAEGKKHNQAIRALGRQLVRVIWSLVKQGRKYEIREEK

SEQ ID NO: 455155 - protein, 456 aa, unidentified
MKKKTTMEIIHPHAAGIDVGSRSHFVAIGQGKEDVQEFGVYNEDLMALTQWLLDNDITHVAMESTGTYWQSLFSTLQEAGIIVTLCNGKFTKNIKGKKTDVIDCQWIQKLHTLGLLSGSFLPDTITEQLRTYCRHRLNLIDAAADGTRKMQKYLRLLNIRLDIVVRDITGLTGLAIMEAICNGETNPEKLAALRNSNCKKSEAEIARALQSNKRPDYLFALKQELDLYKQYQQKITACDIEIEKAIRQSIHTDETKKNLKTTAKPHKRINKNAPKNFDLNQLSYQYFNGIDLMAIEGVSHSTVIALMSEIGYEGVKKFDTAKQFASWLRLSPNTKKTGGKVISSHLPKGSNRLKIALRNAANAIGNLKDTHLSDFFRRISFRRGRAAAVSATARKLAVVIWNMIVKNIPYKPSTDYLFLDQKRKLKLVARIRKSITKFELKPDDLGFANASVSATS

SEQ ID NO: 455156 - protein, 339 aa, unidentified
MKLYTGFDLHSSNNYLAIVDGKGKIVYKRKLRNDPESILTALMPHKDNIAGIVVESTFNWYWLVDLLMEEGYKVHLANPAGIQQYKGMKYRDDKDDAVWLAEMLRLGILPEGYIYPKEERPIRDLLRKRGHLVKLRTSLILSLQNIISRNNGFKMKVNDVKALKEDRVAPFLNDNKDLALVGKVSKESIDFFTRKIKVIEAAVQKRVTLEDPYTSLLTVYGIGKILGLTIKLESGPIERFKKAGNYVSYCRKVSSKWISNEKKKGKGNVKSGNKYLAWAFSEAAEIARRSYPEARAYYNRKMQKTNFMVAHNALSHKLAKAAYYIMKDGVSFMPEKIFV

SEQ ID NO: 455157 - protein, 442 aa, unidentified
MPKSEVSQQAQEPEFAAFVGIDWADQKHAWCLQAVGSTQRESGELEHKVETVEAWVTQLCQRFGGDRPIAVALEQTKGALLYMLAKYECLHLFPVPSTMAASMRKALYPSGAKDDPTDSDLLLDLLLLHRDKLHRLTPDTEATRRVQNLVEERRKLVDEKTAQLNRLTSNLKIYFPQMLEWFEALDTELVCDLLEHWPTLEELQKVSSEDLRRFFHQHHCRNRELMERRLQGIGQARPAIQDRPVIEAQRVVVRVTVQLIRSLRAAIAELDGKIAEATATHPDFFLFASLPGAGEVMAPRLLAAFGSQRDRYSSADEMQIYSGIAPVLERSGKTKWVHFRRACPKFLRQSFHEWAGHSMVKSAWAQAYYRQRRKQGQGHHAAVRALAFKWIRILFRCWKDRVAYDEKKYLAALAKRGSPLRELLVASAVRPCEIPSEIVVNP

SEQ ID NO: 455158 - protein, 429 aa, unidentified
MNLRPIAGIDVSKYFSEMAILSPSNEVVARMKINHDSYADIERAVELLKKAEKDFASRPFVVMESTGHYHKILFHSLCKNGFEVSIINPIQTDSIKNIGIRKVKNDKVDAKRIALLYRFQELKATNIPDEGIDCLRNLCREYYKLSDELTAYKNRLTGIIDQVMINFKDVFSDTCSKTAIAVLEKYPTPTLIIKADKNKLTSLIQKESHRSLEWAAAKYELLVLKAKEFGQLSIDNSANVTMLGIYISMIKSLQQNLRKVLKAIQQLVANNLSKDIPTLSSTLKLLQSITGIGLLSAATIIAEIGDFSAFSKPGKLVAYFGIDPSVRQSGEFTGTRNKMSKRGSRLLRRVLFTIALANIRTKRNKEACNPVLLKFYKQKCQSKPKKVALGAVMHKLICIIFAVLRDRKPYQLRTPEEHARMLAAKYAAA

SEQ ID NO: 455159 - protein, 402 aa, unidentified
MDIHRVAAEVVSLLDGEIVKLGRVQMLRDKLVEFARKELTHDDHVVVEATGNAAAVAEVLSPYVDRIVIANPKQVHMIAHAKVKTDMIDATVLAKLYASGFLPEVWVPDPETLALRRQVTRRTQLVRQRSRLKNLIQSILHAHLIPPCPHGNLVGISGRKWLARQILPADERAAIERHLGLINQVNEALTVVEADIAVHALQDPTIRRLMTLPGLDVTVAASVAAAIGDIRRFSDPQRLVAYLGLNPSVRQSGEGPAYHGRITKQGRGHARGMLVEAAWAAARSPGPLRAFYKRIASRRGKHIAAVATARKLAKIIWHMLSKNADYIWARPALLARKFRSVELRAGLPMNHARRGTAFDYNIPAKRAEERSRVEKAEAAYAAETSRWRTRPERQKAVEKAAE

SEQ ID NO: 455160 - protein, 386 aa, unidentified
MQKLNDLSRSLTALEPNGTLIAVIEMSLSSWRVAGIVPGVERQPLKKLAVDESALLKLLHRWREEAEKAGRRIERIAVAFEAGRDGFWLARWLKARGIEAYVIHASSVAVSREHRRAKTDRLDTELLKRSFLGWLRGERDHCKMVEIPTMQDEDAKRPNREHDSLIGERSRIVNRMKAALVRLGIRGFNPKLKRATTRLDGLHTPEGEPIPPNALAELRRDMERRRLVNNQIRQIEEERLERIEQAPCDGAHVMVRLLARVMGVGIETADMLVHEVLSRNMRDRRAVARYAGLTGSPDESGRKRREKGLARSGNARVRLGMIQLAWRFLLHQKNSALTKWFRSRTENARGTRKPMIVALARKLLIALWRLVREGVVPDGVVLRPAQ

SEQ ID NO: 455161 - protein, 461 aa, unidentified
MSKKSVPAEQKRSGGKKVDWKALEVMHRDAAGIDVGGSEHWVAISPERDPEPVRRFGCFTADLHAMARWLVEKGVRSVAMQSTGVYWMPVFEILEQHGLKVILVNARDTRNLPGRKSDIQECQWLLKLHAFGLLNNSFQPTDEIRTARTLWRHRGNLMADASSTIQRMQKALIEMNIQLSTVLSDLSGVSGMAIVGAILKGERDPWKLATLTQPGVKATAQEIALSLEGNWRKELLFVLGQEVELYRFYQKKIAECDQQLRKHLQSFGSKVDPKSQPIGPKPKRKGSSKNAPQFDLRTELYRITGIDWTQIDGLDVLTAQTVMAEAGIDLSEFPTERRFTSWMGLCPTNERSGGKILNRRTRKVVNRATVAFRIAASTLIRSQSYLGAQYRRLRTRLGAPKAITAMARKLACLYYRLIKHGQQYVDKGTEYYESKYREQQIRSLAKKAQKLGIQLVIPNVG

SEQ ID NO: 455162 - protein, 405 aa, unidentified
MPETSYLYVGLDTHKRSTRSAVLIEAPSSTHADLGPGSYDERTLPWQPDRVATHLLKLQEKYGRPVHACYEAGNIGYGLCRAIQSAGLKCEVVAPSRTPREGSDRKKTDARDARKLARYLASGHLVTVYVPTEEEEADRALVRTRSWTLVHLQRSKILVDALLTQHSRLYEKTADWKTGHWKWLMSQRFAQTTLQQAYDHLLETVTLNAQQLTQVETSIEELAATQRHRQAVLNQKAFLGIQTTAAMVLNTELPAIERFDKASDATAFVGLTPSESSSGDTVRRGRITKQGNARIRKVLIQAAWNYMRAPRVSADLKRRRDQVPPWVAQCATRAAHRLHKKFHRVAACHPRQVAVVAVARELLGFLWCVRHPDGEAMHNKRCRRTTTRPTFMGKTKKQSDLAQQI

SEQ ID NO: 455163 - protein, 379 aa, unidentified
MKVVYPICCGVDVHKTFFVATLITSQGIIPHYKKERFSTFNNSIRKFKQWLIDNNCFDVCMESTGKYWIPVYNLLEDTIRVTVANPKWVKAVKGNKDDTKDSKWIGDLFRLGLVPGSFIPDKPIRILREYTRYRYKLVSCKSSEKNRFQNAFTVCNVALDSVVSDMFGKSASSITDYLISSDSFDPEHCSSLLKGSLKKKADDVVESIEGYQMTQEQKERMIMVRSHLEFVEQSISILDGKLDKMVAPYESAISLLCTIPGVERASAITIISEIGTDISQFANSKRLCCWAGLTPGNNESAGKKKSVRISRAGIYLKPALVQVAHAAVKSNKSPYYKNKYERLCKRRGKKRAIIAIARMILTAIYHMFVTGEEWNPSDL

SEQ ID NO: 455164 - protein, 402 aa, unidentified
MQDTNHAVCPGTAAREHDTSLFVALELSRSVWLIAVNMPGSDKISKFKIAAADTAALRTLLARLKAQSERRCGSPVKTICIHEAGLDGFWVDRLLQANGVDSHVVDAASIAVDRRSRRAKTDRIDVEKLLRTLMGWARGERRICSMVRPPSAEQEDERRLTRERGTLITERTRHVNRIKGLLATQGIFDFDVIRHDRRKHFEELRRWDGQPLPPRLKTELLREFDRLELVISQIAVVEAERDRALDMKRSVAPAATANGAAVGVPASTDGAGALLLRLRSIGPEFASVLSLEAFYRSFANRREVAAYAGLVPSPWKSGSIDVEQGVSKAGNPRLRKTMIQLAWLWLRHQPGSALSRWFHERVGEKRGKIRRITIVAVARKLLVALWRYVTQGLVPDGAALKA

SEQ ID NO: 455165 - protein, 334 aa, unidentified
MQYQYVIGMDISKHSFDMAILSTNNPEEIFHTALSNDAKGFEEMMSSVNEMMPGFDCNKALFCMEATGLYCNALLHFFQSRQSNVWVENAIQIKRSLGIKRGKTDKVDSISIAKYAFKNAELVRLWKPSGVVLEKIKNLATLRERMVVTQKRLITPIEELRDAGQEKMAEYLHKSIKRSINAIDADLKKIEEKIMECLKEDASLNHLFTLITSVVGIGFVTAINLIIHTQGFNVMCDSRKLACYCGVAPFPYQSGISIKGRTKVSHMANKKLKTNLHLAALTAIKFDPQLKAYYDRKVLDGKPKMSVINAVRFKLLARVVSVVKNDREYVKRTA

SEQ ID NO: 455166 - protein, 387 aa, unidentified
MIYVGIDIAKLHHFASVLSSDGEVFVEPFEFTNDYDGFQKLFSALSPFEKDSLIIGLESTAHYGDNLVTYLFSYGFKVSVINPIQTATLRKNNIRKTKTDKVDTYLIAKELMLNQHRFVSDYDIQVMKLKQLSRFRQKLIKARTRVKIQMTSYVDQLFPELQYFFKSGIHHKSCYALLKECAAPDDIASMHLTHLTNLLNKASHGHFKKDTAQKLRVLAQKSVGTGNKSISIQITQSLEQIELYDRQEKEVVAEIESIMISLGSVIMTVPGIGYLNGAMILGEIGDISRFSHSSKVLAFAGLDPTVYQSGNFKANHTRMSKRGSKILRYALINAAHNVVLNNKTFKAYYDSKVAEGRSHYNALGHCAGKLVRVIYKMLRCNVEFDLD

SEQ ID NO: 455167 - protein, 394 aa, unidentified
MRFSIGIDVAKEVHWVSVMNDLGEIVLDRALRNEPREVAKLVAELKELGGERCVGIDILGGIASLLSTTLLTAGETVVHVSGIAVNRARQGTRGGETKSDPRDARAIADLVRVRRDLRAVQLESENLARMRILVGQRRALVADQTARLSRIHDLLAAFHPELEHALDLTLRGPLVLLSRLCTAAELRTAGTTRVTRLLRAEKVRTAEKLATIAVEVSQHHTLSIPGEVIAADVVRELAADALVAKERLARIESQLSALLEVHADAAIVMSMPGMGVVLASEFFVEVGAIERFASSDALAAAAGIAPVLRQSGKSCFRRRPSGGNKGLKRVFYQSAFVALRDPRSRAYYARKRKEGKRHHQAILALARRRVDVLWAMLRDRSPYRSEPPTVSMAA

SEQ ID NO: 455168 - protein, 393 aa, unidentified
MKKNSIARLQVSKSQIRQLAAKQRLTVGLDLGDGDSRYCMLDQTGEKASEGKVATTKVGLNAVFGKMAASRIALEVGTHSPWVSRQLAELGHEVIVANPRKVKLITQSVKKNDRLDAEQLARLARVDPKLLSPIRHRGAEAQADLAVIRARDGLVACRTEAINMARGLAKPMGERLKKCDADSVKESLAEGLSGATRNVIGPLLKCVEEITRQILAYDKQIQEIEKRYPETTVLKQVYGVGTLVSLTLILTIEDADRFAHSREVGPYLGLTRKLRDSGASQPELGISKAGDELLRRLLVQSAHCVLRRGAPDSDLRAWGLKLQAGGGKRGRKKKAAVAVARKLAVLLHRLWVTGEVYDPHYNRKAVAAAHRNEVTAAQRGKCTAGRGKKKSAA

SEQ ID NO: 455169 - protein, 315 aa, unidentified
MNAQGVVVGIDVSKDWLDVAMSNEWLRFANETEGIAELTRRLSAGAVQLVVMEATGGYETPAATAIAGAGLRLAVVNPRQVRDFAKATGRLAKNDRIDAQVIAAFGVAVAPQVVSLPDEQMRELQGLVARRSQLVGMRVQESNRLAMAQGALHKQIKAHIAWLDKAIGKANTNLTARLRSSAAWREKDELYRSMKGVGPITSSTLMAALPELGTLDRRSIAALVGVAPFNRDSGSFRGRRVIWGGRASVRHMLYMAAVTAIRTNPAIKDFYERLIARGKPHKVAMVACMRKMITILNAMARHNTPWTPTPQGAGN

SEQ ID NO: 455170 - protein, 347 aa, unidentified
MVSWEQNPQARLGELHCQTGLVFYTAMSKTYIGIDIAKNTFDACFIVDDIWQHHTFTNTHKGFIELLRWVQSCYYNTSLHLIIEATGIYWEKLAHWAVSHQHKVSVVNPLYIHAYAKSLGIRTKTDKQDAILLARYGTKENPPSWQPKSNNEIKLTALLKQRDHHKRQLIKERTRQESQSIYVKSYTDDNIRHWRESMIQIDDQIWLLIDKTPELKHRASLLATIPGIGKKTLPYLLATIGDGSSFQSAKHLASYAGLSPRHHQSGISIHKQSAIGFSGQKELRSALFMPAVVVSFGRYPTFEKFVKRMEKKGKTKKQIIIAIMRKLLTISHAVIRQNRPFDKHIHE

SEQ ID NO: 455171 - protein, 305 aa, unidentified
MNGIGIDVSKATLDVAVHQGGHRSFANTAAGHRKLILWLKTLPVRQVVLEPTGGYEQDVLDTLHAAGLPVVRANARQVRDFARATGQLAKTDRLDAAVLAHIAQVLDLPAYQPPAPWQRRLAEHVQSRRQVVQLLVRAEQQLRAVKDRALRRMLQGNLTQLRKSKDFLDQQIAQQVSEQPQLHALQTLKGVGPVLLAVLASQLPELGKLDGKAIAKLVGVAPLAHDSGTMRGTRRIWGGRADIRQALYMSALSALRHEPRLRDFYQCLRARGKAAKVAIVAVMRKMLVILNARARDAGIPRQAGA

SEQ ID NO: 455172 - protein, 357 aa, unidentified
MPQATTQTIGMDVSDKKSRICVLSPSGEGVEEGWIDTTRSGVRRYFAQQPRSRVVFEAGTHALWMGWLLEELGHEVVVANPRNLGLIYASRKKSDPQDARRLAQLGRVDPALLSPVTLRGRDTQFHLAQIRSRAMLVETRTKLVNHVRGLVKTLGHRVRSCDADQFAAVATTSLPPELVTVVTPVLKAITQLTEQLDALDRAIEAIAATGYPEEVRRLTQVHGVGALTALTFVLTLDDPSRFPKRRRVGAYLGLVPRLDQSGEVNRQLGITHAGETYLRTLLVGCAHTIVRAGSPDTDLKRHGLRVMERGGKNAKKRAVWRWHASWRCCSIACGSAARRTCRWATAKCRPRPPEMPA

SEQ ID NO: 455173 - protein, 368 aa, unidentified
MKDDITGYVGLDVHKDSTALAVAAPGRAAPRFVGTTGPHLRELLKALAGLGRPDQLLLAYEAGPCGYTLARELIARGYRCEVIAVSKTPRKPGERIKTDRRDALSLAGYLRAGELTPIAIPDARDEAIRDLSRAREDAVRARLKARQQLKAMLLRHGHRYQGKTSWTAAHERYLAALTFAHSAQDIAYAEYRGAVRDADDRVERITAALRDQVGTWRFAPVVGALMTLRGIEFVAAVTLLAELGDISRFAHPKELMSYLGLVPSEYSSGESRVQGAITKAGNSHVRRVMIESAWSYRYPARIGHALIARQQGQAKSVRDIAWRAQLRLCGRYRRLSARGLHQNKICVAIARELAAFVWDIARHTQPAH

SEQ ID NO: 455174 - protein, 415 aa, unidentified
MASEPTKVIAGIDTHADTHHVAVINEHGKPLADKEFLAVGSGYRKIVEFIASYGTVTAVGIEGTGSYGAELARTLRGEGLTVLEVNRPNRAARRLKGKSDPLDAYQAAKSVLEGRTRAIPKAKDGPVECLRIVRSGRASAIKARTAAINQIKALLVSAPDKIRAKYRAMATPALITALQRTGPTGHLADPEYVTLLTLKALAVRCQALGTEIEAADAALKEILDSYAPLLCDLPGVGTEVASQLLITFGDNPDRLGNEAQFASLVGVAPVPASSGKTTRHRLSRGGDRSANNALHQVVLVRMGSCQRTKDYVLKRTSEGKSKREIMRCLKRYAAREIYRQVTNPRPAPDNSDLRQTRTAIGMTITTVAGELGQWVSIISRLERGHIRNDKLAATYRRWLTEQSDKRAELAQCRRG

SEQ ID NO: 455175 - protein, 447 aa, unidentified
MGSCVGSDKAERQYRGDTLTARPALLEVSMEPNRYRHYIGIDWATEAHRICLLDHNGQLCAKVSIPHSGAGWEQLLEWLASHGVEPACAAVAIETPRGALVETLVERHYAVFAINPKQLAHFRDRYTSAGAKDDDRDAWVGAAALRTDEAAFQRVAVDAPELIQLRELYRTADELREEVQRLTSRLREQLNRYYPQMLALYPSADQPVLWDLLELAPLPATAQQLTVPQVEAVLRGRRIRRFTAAQVWEQLRAKPLTVAEGAATAASQHALVLVAQLRVIYELRQQTLKRLARILKKMRETPGNSGAPSDAALIASLPGAGILTTAALLSESSRAVAERDAPALRAYAGVAPVTQQSGKTLKVSMRYACNNRLRNALYHFAMGSLRDPVARRHYDRPRAEGRTHARALRGVADRWITVLMAMLRSGTRYDAARRKAWQAADAAGAAA

SEQ ID NO: 455176 - protein, 426 aa, unidentified
MDVIHECCAGLDVHKKTVAACVRRIGKGGKVISVVREFDTMTQGILQLGDWLAEQEVTHVAMESTGVYWKPIWNLLEERFTLLLCNARHVRNVPGRKTDVRDCQWLAQLLQYGLLTGSFIPPRPHREFRDLTRHRAQLTAEKTRVANRLQKILEDANIKLSSVASDILGVSGRAMIEALIAGEEDPRALAELARRKMRGKIPELRQALRGHMSDHHRYMLRTLYDHLQYLERLIAEMEERIDTLTRSQELNEVPKDNDRPPFDEAVCLLDTVPGIDRCTAQAILAEIGTDMTQFPTAAHLASWAGVCPGSNESAGKRKNGRTTKGNRWLMRVLTQVAWAASHTKDTYLSAQYRRLAPRRGKKRAIIALAHSILVSIYHILDQNVTYCDLGPEHFQNIAPAKRAKYLQKQLEKLGYTVTIEPKPLAA

SEQ ID NO: 455177 - protein, 388 aa, unidentified
MQMQTPNDLSQSRIVLKQDSTLIAVIEMSLSSWLVAGIVPGVERQPLKKLAVDESALLKLLNRWREEAEKAGRKIERIAVAFEAGRDGFWLARWLRARGIEAHVIHASSVAVSREHRRAKTDRLDTELLKRAFLGWLRGEREHCKMVAIPTIEDEDAKRPNRERESLAGERTRIVNRMKAALSRLGIRGFNPKLKKAAERLKDLRTPEDQPIPPNTLAELRRDMERRRLVSDQIRQIEHARLERIEHAPSDRPHAMVRLLARVIGIGIETADMLVQEVLSRNMRDRRAVARYAGLTGSPDESGRKRREKGLARSGNGRVRRGMIQLAWRFLMHQKNSALAQWFRARTENARGTRKPMIVALARKLLIALWRLVRQGVVPDGVVLRPAQ

SEQ ID NO: 455178 - protein, 344 aa, unidentified
MGEVSTIGLDIGKSVFQVHGVDDAGAVVIRKRVSRARVLEYFGELPPCLIGIEACPSAHHWGRELQLLGHMVRLVPPSYVKAYLKRSKNDANDAAAICEAVTRPSMRFVPIKTKEQQTALMLHRTRQLLVRQRTMLSNALRGHLAELGIVSAKGRNGTAELLRIITNGADSRVSPAVRGILDVLARQYSAIGIEIASIDRSIMALHRGCEASRRLAEIPGIGPIAATALVAEIGDWKTFSSGRSLAAWIGLVPKQHTTGGKDRLGSITKQGNRYLRWLLIVGAMAVIRYARKHGTEKRPWLGRLMERRPTKVAAVALANKIARMAWAIMVRGERYKEPKLLLAA

SEQ ID NO: 455179 - protein, 350 aa, unidentified
MGMTMRMRISVLGVDLGKNVCSLVGFDASGAVVLRRRAKREPLIALAAKLPPCVVAMEACCGAHHLGRVFAAHGHDVRLMSPEYVRPYVKAQKNDDRDAEGVAEAATRPTMRFVELKSQEQLDMQTLHRSRDRLVGERTALINQLRAILLERGIVAPQGKRKLEQFLFNLMDEQGGPGLSPRMITLVTDARAQWAELDRRIAAFDAEFVRWTKENEDARRLATIPGVGATIASALIAAIGKGETFERGRDLAAWLGLVPRQFTTGGKPKLLGISKRGNSYLRKLLIHGARAALPYVAERDVPLGRWAKSLLSRAHPNVVVVAFANKLARIAWAVLRRGEPFAAKGLPVAA

SEQ ID NO: 455180 - protein, 344 aa, unidentified
MLMVRSVVGGVDTHADVHVAAAVDSNGGVLGIESFPADAAGYEALLGWLVGFGAVSLVGVEGTGSWGVGLSRFLHDQEVEVVEVDRPNRQNRRKRGKSDPIDAVAAARAVVSGAAAVTPKTRNGPVEQMRVLLVARRSARTQRIQTLNQLRHLVFTGPEPIRVRFKDRYKTGLVSEAAAMRPRKGSDPVTFTTNTVIPDLARRIQGLNAEMASIDAALIELVAATAPSLLELHGVGLDSAATLLVTAGDNPDRLNSEGSWAHLCGVAPLPAGSGKTSGRNRLNRGGDRQANAALYRIVLTRMSNHPETRRYVTRRRTEGLNTPEIMRSLKRYVSRQVFKHLQTA

SEQ ID NO: 455181 - protein, 343 aa, unidentified
MEQHVGLDVSLQLTAVCVVDQSGKIIREAMIPSDPEAIAAFISANTTKVARIGLESGPTSTWLWTELDCMGLPVVCIDARHAKAALKMQINKSDRNDAAGIARIMQTGWYREVRVKALDSHAIKALLVSRALLVKIKRDLENQIRGLLKNLGLVIGRAKMNTFASRAKELIEDKPALVAVVEPLLKAREVIEQQVADLDRKVMRLARSDDQVRRFMTTPGIGPITALCYLATIDDPTRFSKSRNVGAYVGLTTRRYASGEIDWTGRISKCGDKLLRSYLFEAANVLLTRVAKWSTLKAWGMRIAKRSGIRKAKVAVARKLAVILHRMWIDGTEFQWSSKEAAA

SEQ ID NO: 455182 - protein, 363 aa, unidentified
MINLKYSVGIDGSKKDFKACISIINTLQEVKVKSSATFTNTPAGFDAFFKWVFKHKKEQLPVFYLMEATGIYNERLAWFLYNKGQKCTVILPNKAKKYLQSTGLKTKNDKIDAQGLARMGAEQNLPLWQPLSKNIYTLRSLTRLHESLTKQRTTLNNQLHAIEFSMYELKEVFKGLTTTLKAIDKQLVLVEKQIQTLIDKDSLIKSKYDKISRIKGIGVLSFAVIVAETNGFEAFANQKQLVSYAGYDVIENQSGSKISKTRISKKGNNRIRRILHMPALTTVTHNEPIFKSLFDRVYNRTGVKMKAYVAVQKKLLCLFYALWKRDEAYNPNFSNETITSGNEEPKPLFSLGSEGSIKIIAPA

SEQ ID NO: 455183 - protein, 380 aa, unidentified
MNTRIIAIGMDVHSTNYTLCAIEKRWFEKDRYIGTVNVEPDVKYILKFIKDIEEYYQGDEIKVTCGYEAGGLGYTIQRALKEKGINCVIMAPTTMKRTTNQTVKKNDRRDAKNIAELLISGGYKEVYVITENDEDVKGYLRMRSDLVDQRKVTRQEISAFCLKYGEKYNGNATWTGKHMEWLKKLKLRTIARETLNEYMLHLDQLNEQIKRIEERIEEISTKTEYVREVKKLKCLLGIKTLTALSCIVEIGDFTRFIKPTDFAAFLGLVPGMHESGESGKRMSITKAGNSHLRKMLVESSGGICKGQIGYKSKELKERQKGNDPKIIAYADKGNIRLRKRYYHLIKNGKNKNVAKTAVARELACFIWGMMTNNIERLPQV

SEQ ID NO: 455184 - protein, 377 aa, unidentified
MLRIIKIGMDVHSKNYALCAIEPILGEEGEVLAATNVSADYKNIILFIERLKQKLGLNYKYEIECGYEAGCLGYSLYHQLTRAGIKCVILAPTTMKTTRGKRIKTDARDALLIAQCLGSGGYRKVHIPDDDDNAVKEFIRMRDDQKNHLKKTKQHINAFCLRYGLFYEGTKWTTTHLNWIRKLDLSPLLKETLNEYMATYDVLSAKIDRLDQRIEELANMDRYQEKVKRLICFIGIQTHTALSLIVETCDFERFDKGCTYGAFLGLVPGEHTSSDNVKRLSITKKGNCHLRSLLIESAHGICKGAVGRKSRALKARQEGNPADVIAYADMANARMRNKYYRLIRRGKKRNVAVAAIARELACYVWGMMTDNITRTAN

SEQ ID NO: 455185 - protein, 357 aa, unidentified
MKEYIAFDSHKHYTLMERENRQTGRAVQLRVSHQPGAIRYCLRNCEAGSEVAVEATGNWYWIVSEIEQAGLKPQLVHPRKAKLMMGLINKTDKLDVHGLNRLQRNGTLPTVWIPSAELRDQRELTRTRLVLVAQRTRLKNRLQSTLAKYGLVVQGCSDAFGTLARSQWSELLAQLPEQTRWVSQQLLEQLDGLEQQIKQCEKRLADLLRVTPEMQRLQSLPGVGLILGASIALEIGTVSRFGSAERLASYAGTTPRVHSSGDKLRFGRLRPDINRYLRWAFVEAANVVALHHLRRPERHVSELYRRLKQRKGHAKAIGAVARHLAEASFHILSRREEYVDPALGKGRSKAGVSASPS

SEQ ID NO: 455186 - protein, 352 aa, unidentified
MSALIIGVDLAATQFEFALANDGFERQERRRLDRAQFARFCRELSPSLILMEACGSAHYWARALQASGHQVRLLPAQYVRPYVRRNKTDAADAAALLEAVRCSELRPVPVKTIDQQCLLQLHRLREQYKLTRNARLNFLRAALQELGVLIPKGVRKSLSALRVVIDSPPTEWPVALVKMYAHVLEEIEGLRKGMIAVEKALRSVTRRDRVVRDLQTICGVGPLTATALRAAVGDIARFPSGRHFACWLGLTAREYSSGELRRMGRISRRGDRHLRTLLVNGARSALMAANRFPTPGGRPLDALRAWALRVQQRSGLNKATVALANKLARVIWATWHHQRAFDGNWGQRINTG

SEQ ID NO: 455187 - protein, 421 aa, unidentified
MQVLYQRCAAIDIGKDVIAVAVRLPGDGPDHRQTIKQTFKTFYGVLKHAARWLTEQQVTHVAMEATGIYSMPVYHALIEHGEFEKVLVCNAGHVKNVPGRKTDLSDAEWLVHLLECGLLRGSFIPPAQIKAARDVIRYRTKLTESRTSELQRLGNVLQDAGIKVDSVASTITTQSVRAMVEALIDGERRPLVLADLAKGKMRAKIPDLQRALEGRFDDHHALMCQLHLDHLDHLEEMIARLEAQIEDMMAPFCAQRDLLITIPGIGPLTATAIISEAGTDIAETFPSAEHFASWIGVCPGNHESAGKRHSGKPRKGNQHLQHVLVECGWAASRTPGYLQSLYRWHVRKFGGSRNPTAKNKAAVAVAHKLSVIIWHVLATGQPYTDLGADYLARRINPETETRRLIAKLQALGHNVIIQPAA

SEQ ID NO: 455188 - protein, 312 aa, unidentified
MKKPSQHLIIAEVPRSITKVGMTIGIDLGDVWSHYCTLNEDGEVVDRGRFRTTPSGVEKWFTDLPRARVAMETGTHSIWISEQLRELGHEVIVANVRELRAISHSDRKSDKVDAEKIARYARLDPKILRPISHRTVAQQETLTLIRARNLIVRLRTAAVNSVRGLAKPCGYRLPTSSTLCFAKRCMAVLPPGLALALGPVLEQIATMTVKIKHYDRLIQQLTETEYPETQALIKVYGVGQLTALTYVLTLGSKERFERSRDVGCYLGLRPRRSQSNPQLGITKAGNIYLRSLLVECANHVLGPHGRDSTLRQ

SEQ ID NO: 455189 - protein, 346 aa, unidentified
MLHAGLDLSRRRLDVCVVDEAGHPVVVTAVSPDADGLRGLARRFLQRGEPVQAAIESMNGARFVHDQLELTGWDVLIADAAKVRGIAPLACKTDRIDAQVLAELSRRALVPEIWLPDPAVRAERERARWRLHLVRHRVALKNRIHATLIAFGKPCPVSDLFGLAGRDALGRLDIPDPWAADMGMALEVIDELDGRIAGCEAELRRLGADHPYVSLLTSIPGVAWVLGYTIASEIGDIGRFASPTKLVGYTGLCPRVYQSGGSDRRGQLAKNGPTYLRWALVEAATHACRHPAFAERYERTKTRLGRQRGAKIARVEVARRIAEASWHMLTRNQSFAPAGVVERLAA

SEQ ID NO: 455190 - protein, 484 aa, unidentified
MKENHRRCCGIDVHKSSVTVCVLPPVGQTHLEVKKRKFRTFTRDLRQLRAWLKNCRVTEIAMESTGQYWRPLWNLLEGQFTKVILVNPQHIKGLNGYKTDPKDAQWIADLLESGKLKGSWVPPRPIRELRDLTRQRVHILEDLNRAKNRIEQLCQTGNIKVSSVASDLFGVSGRKMLKAIVEGKRDPGWMADYAKGRLRDKRRELELALEGTFTDEQRWLLEKELRQVEWLEGQVQTLEEEIERRVEIFEEPIQRLLTIPGIDRKTAWTIAAEVGADMNAFTDARHLASWAGLCPGNRESGGKRFSGRTRKANRYVKRAMCQAAWAASHTKNTYLSAFYRRMSVRKGAPKAVMALAHHMLVVIYQVLSRNEEYVEFGGDYYDQRNKPKVVARLVTRLMKLGYKVDIQPAEGIGEPAAVAAEPETGAESVPKSSDSSTEASEGAVKPKRRGRPCKCAARGIICKHRTSPETNSMIFRTLPAGKFS

SEQ ID NO: 455191 - protein, 388 aa, unidentified
MSKPFDLSKSLTALDQDSTLIVVIELSQSSWLVAARAPGLARDPLKKLPPDPEQLFKLIERWREESRRAGRVVRRVCVAFEAGRDGFWLARLLRQHDIEAYVIHPTSIPVKRDHRRAKTDRLDTELLMRAFLGWLRGEADHCSMAAIPTLAEEDAKRPTRERESRVNARSRLVNRMKGALARLGIRGFNPKLRKAAEKLEELRTGAGEPLPPNTLAELRRDMAQLRFVADQIKQIEKAREARLEKAPREGAHPMVLMLASIKGVGLETAEMLVAEVLSRKLRDRRAVARYGGLTGSPDESGSRSREKGLARSGNARVRRGMIQLAWRFLMFQKESALAKWFEARTANGPRGVRKTMIVALARKLLIDLWRFVEDGTVLAGVELFDSRA

SEQ ID NO: 455192 - protein, 522 aa, unidentified
MSSTSSSTGRKGRRSKRKPDVLHKPRGTFSPRVQNVGPEHFGIVSVDCAKARSKWMLADFYGKVLVPPTVVGHTRAELDAALEQVRKAQVLHDLRDMLVSIERTGRYHHPVREAFRSAGYDTRIIHPFTVKQYRLPADPGTKTDDTDLAANFRATVNGFALGEQARDLFWGGFQLLIRHRRDLVQKTSTLCCQIKEHLQTAMPGYAEAFSDLWENKVAMKLALHFGSSQAILQAGLAGLEQAMRQPNLRFQKRSLEQALQWAHRAAPAEVAAAWHVRLAGAYEEDRAGKARQILLLEGQVAQQLAATPYVLLLSIPGLNVVSVGEFAGEAGPIENYASSRCITGRAGIYPSRYQSDEVDHRNGVMVKCANRRLRYAILQAADCLINNNNHFGGLASEWRSQGKDARLIHTRVACRFARIAFQMVAGRQVFHHPAARDRHYILEKLLRFHTEHGTPSDQVQADLQAARQWLAPAEQPLEAIPLQRQLDELRQRRRGAQAVGQVLSLVLAELGAMVVQSVPSGH

SEQ ID NO: 455193 - protein, 403 aa, unidentified
MNSVCIDISKGRSTVAVMRPFGEVVISPFEVRHTDSELSELARQLKSLDGETRVVMEATGNYHAPVAKLLHDAGLYVSVINAKLVHGYGNNDLRRVKTDKKDAVKLANYGLDRWLTLPRYVPEEDTRLLLKNCYRQYRQYSKVQTILKNNLISLLDTVFPNANRLFSSPIRVDGSEKWVDFVAEFWHCRCVSEKSQKAFTNKYQRWCRKHGYNFSEAKAHTIHAEACGHIDVIPKSETTKLLVEQAVAQLRATSAALAALKHEMQALASMLPEYPVVMDMFGVGPTLGPQLIAEIGDVRRFYSKKALVAYAGLDAPPNDSGDVTGRHKSMSKVGASSLRRTLFLVMSVYLQTAPLDEPVYQFMDRKRAEGKPYRIYMMASANKFLRIYYATVKAYLESLEHTA

SEQ ID NO: 455194 - protein, 324 aa, unidentified
MSRTVKSSVKVNVALDVSKSNLDVHVGDISLRTFPNNTRGLSTLKRILSRYNVSLVLLESTGGYESLAVSYLQACGYDVCVINPRHARDFARAMGRMAKTDKIDAEILCRFADIIDSRPDRARFVKPLTDKRREYLNALVRRRRQLIELKITEMQHKSAPAISSFCVSDINEVINYLNSRISDIDREIDNHVKSCFSDVSDILISFKGIGPSAVSAIVGELPELGKVNRRQISALVGVAPYNRDSGNMRGRRSVSGGRSGVRNILFMSALSAIRFNPVIKSFYTRLINAGKPKKVAIVACMRRIICILNAMLRDGSEFNAARFC

SEQ ID NO: 455195 - protein, 400 aa, unidentified
MNITHSIGLDVHKSSARYHIFDSAAHRVARGPLKAAKAAVQQLLEKLHADDPATVLVVAEATGMLHLDFCEAFEKAGCQVVAINPLYGRNRSISNPIRDNKKDKLDAESLAELGLRDREELLKRFAFHCPVERFELQRYVSSSKILRKSLTNIIKHTATTVHTLFPELDELRLSINQVRVRRILRDHPSPARIAALEVAELSRYLGNKAAALKQAAAQSFAIQAIGATCEEGLLGTLLDTIEHLQEHLKQMDRKIDQLLIPCAGTETIRLARSIPGFGANTTPAILAFIPPERLQQGSKKQITRKLQALFGTDPRVKESGKWKGTTKISKRGIEIARTALFQTAFCGMTHDPQLRQCYGSLKARGKNHKQTTVDLMRKQLARLVSVLVNQKTFTPIPSQL

SEQ ID NO: 455196 - protein, 415 aa, unidentified
MKNHQRKLYVGIDIHSREHKVALLPIALLDCADAPWRKLTPLRVRNNIVDFESLDAAIRSYISSTDEVVIAVDHTGGHYSEPVVHFLQARGYPVYHLETKAVKGARERFLDQESKSDVIDATSAAYLLYLRDVHGLSFRISAMTPELGSKAAALNSLVLQRWQFNKLATQATNRLHQFLLAVFPEGEAQYFNQLLKIIPYYPTPKDILASNGLETVEGLRQKDKENILKLADSTVGIPDQIYNWLIRDLSLQRIESLAKRDALTAIIRKEVAVHPYGDILLSFPYIGEIAAATIIGIIKEIERWPDKKKFKKALGVYSSLTQSGGDPGRTRQGKEGSSHGRRVLFQICLGCIRTNALDNDSKDYYLRQVARGKPRIKALVSTMGKLAEIIYHCLKVGEPYRYQGKCRTTEISGDK

SEQ ID NO: 455197 - protein, 420 aa, unidentified
MEEVTEEQAELVERVAALDIGKASLVCCVRVPHESRPGGRRQEVRTYDTVTPALLELRDWLICQGVTRVVMEATSAYWKPPFYLLEDDIDCWVVNARDVKNVPGRPKTDKIDSIWLCKLAERGMLRPSFIPARPQRQLRDLTRYRRTLTQERSREKQRAEKLLEDAQVKLSSVISDIFGVSGRDMLAALIAGQRDPHALAGLARKQMRAKTGVLRQALTGHFTDHHAFLLAMMLGRVDALTAQIDTLTARIEEAIAPLAAQVAQLDEIPGIGVTTAQEIIAEIGTDMTRFPTPGHLVSWAKFAPKARQSAGRSKAATTGKGNPWLGGTIGEAAAAAARTSTFLAGRYKRIVKRRGKKRALVAVGNSILTICWHLLSDPGAHFTDLGPDWHDRLAPQRRKHQLIAELERLSGKKVTLNDAA

SEQ ID NO: 455198 - protein, 422 aa, unidentified
MLEATQDEQEIIARVAALDIGKAELVCCVRVPDPKGGSRRVQEVTTYSTMTRSLQTMADRLLDLGVTRVVMEATSSYWKPAFYLLEAHGFQTWLVNAKDVKHLPGRPKTDRLDAVWLCKVAERQMLRPSFVPPVPIRRLRDLTRYRIALVSDQGREKNRVEKLLEDAQIKLSVVASDIFGVSGRDMMAALIRGERNPQVLAQMARSRMRTKIPQLEEAFVGYFTEHHRFLLAKMLARIDALDGDIADVEAEIETQIAPFAPAVARLDEIPGVGATAAAVIIAEVGVDMTRFPTPAHLSSWARFAPGVKESAGRKKGTGSTGHGDRYLARVLGEAAVGASRTDTFLGERYRRIARRRGKKKAVVAVGRSILVIVWYLLQNDTAQFHDLGPGYYDSRTNPERKKRNHIRELEALGYRVILQPAA

SEQ ID NO: 455199 - protein, 339 aa, unidentified
MELYAAIDLHSNNNVLVILDERDRVVYERRLPNDLPAILTELKPHRKRIQGIAVESTYNWYWLVDGLMDVGYSVKLVNTAAVKIYDGMKYTGDEHDARHLAHLLRLGILPTGYIYPREERAVRDLLRKRAQLVRCRTAQFLSIQNLVSRNSGHGIAANDIRQLDEEGISELCGGDQTRALAMQSNLTVLRCLDEQIRGLELAVLKQAKLKPQFEKLLSVDGIGNILGMTIMYEAGDMERFAKVGQFASYARCVSSSRWSNGKKKGEGNRKNGNKYLSWAFMEAANFAIRYNQRIRAFYQRKQAKTNRIVALKTVAHKLARACYHVLADQVEFDLTRAFA

SEQ ID NO: 455200 - protein, 334 aa, unidentified
MDFVNFIGIDISKGSFDLALIKESNEETLLTNAFANDPKGLVRLEEFLKKQSIDLDKTLFCMEHTGIYCRLLSQYLTERKYHVWIEMPVQIIRSLGIQRGKNDRVDAKRIAQYALLKKDKAVLWEPPREVVIQINDLLTLRDRLVASRKSLRQPIKEFKDAGFMDTAKMIENNCKITLNALEKEIKQIEKELDKLINKDSNLKRLYGLARSVPGIGKITALSLLYFTNEFKQYQNSKQLACYCGVAPFERTSGTSVKGRSRVSPFANKTLKKLLHMVALSSIQNNRELNQYYLRKLAEGKNKMLVINAVRNKILQRLCAVIKRGTPYTLEYNLA

SEQ ID NO: 455201 - protein, 319 aa, unidentified
MTSTKYIGMDVHKESISIAVRNDAGKIVMECVVETKASMILQFIDGLRGDVHVTLEEGTWAAWLYDLLKPHVTKVVVCDPRRNALLQEGNQNDRVDARKLAELLHNNQLRSVYHGDHGLRTLKELVRSYLTITQDLSRVMTRVKAIYRSWAIPCTGKQVYAPRHRAEWLAKINEPGVRRRAEFYYQQLDALRCLRQEVRRDLLAESKKHQAWKRLCGIPSIGPIRAAVLLGILQTPHRFRTKRQLWTYGGTYGGVGIETSSSADHHVVKGQLERKKKQVEIRGLNRNYNHDLEKSFQGSGDRRRDQARSLRGVLCGIVG

SEQ ID NO: 455202 - protein, 400 aa, unidentified
MISVGIDVSKGKSTICLLKPYGEIVCKPFEVQHTEEDLEELANLLQKLDGEIKIVMEAPGIYHLPILTFLLEKGFFISVINPFMMKKFSRDNSLRGAKNDRLDSVMIASYGIEKWHKLKKYEVNDGIYPELRFLGRQYHRFMQTHVKHVQELTHLLDHTAPGLKAMFNSWNEHSNRDKLSDFVERFWHFDLITSLSREEFVEQYLLWAKEKKYHQSRSKAEKIYDLASNGIPTLSSRTPSTQMIIQEAINVLRIVNNSLYRILSRMKELAKSLPEYATVRSMGGVGDALAPQLIAEIGDVRRLHNGHTLVALAGIDPPPYESGQFVGTHRKISKRGSPILRKIGFEVMRMLKSHKEPEDNAVYNYILKKEAEGKNKKLAKIAGLNKFLRIYYARVMEVYR

SEQ ID NO: 455203 - protein, 312 aa, unidentified
MTHACAAGVDVGRDWLDVGLAPSSKTFRIANAPAGIATLVARLKREGASKVVLESIGSYGARLVRGLADAGFEVGVVDPKRIAALRTAEGRRAKTDRLDAGLIARFALLMQDAARPVPSAKAFEIRALSTRRRQLVEMAAMEKTRLKQTLDEAVADSCRQMIALLSQERDRIEAQLQAMLLEAQDGPARAALLQTIPGVGPAVSMTLLADLPELGILDRKAVASLAGLAPHANQSGTRAGPAHIGGGRPCVRAALYMAALSAARNDKGFKREYLALRQAGKPAKVALVAIARKIVVAANGMLKSGQPWQKPA

SEQ ID NO: 455204 - protein, 355 aa, unidentified
MEGTTVGIDLAKNVFHLCATDRHGRILWRKRTTRQGLGELLATLPPSTVAMESCAGSHYWARRCRENGHVARLINGKFVKPFVKSNKNDVIDAEAITEAAGRPTMRFVPVKTTEQQDIQALHRVRERLVRHRTSLVNQCRGLLLENGIVVRQGRHHLQQRLPEIVENASDQLSELFLALVRGLYEELLGLNERISAVERSLEEISRSLEPCVRLQSIPGVGPLTATAIFAAVGNGSEFKNGRHMAAWLGLVPRQLTTGGKPKLLGISKRGDTYLRKLLIHGARSVLISGKDLGHPQRWARKVAFRSCSNKAAVGLANKNARIAWKLLRSGQSFHSSDPAPEGQRLRVIPHTNGLH

SEQ ID NO: 455205 - protein, 371 aa, unidentified
MSEGIKFFVGLDVHKDKIAVAVAEPGLASARYVGNIAHDLNAVSKVLAKYGSPAPVQVVYEAGPTGFGLYRALRENGYDAQVIAPSLIPRRAADRIKNDRRDCLRLAELARAGELKAIWVPDSEHEALRNLWRAREDAVEMRHKARQQLKAFLLRHGRRYLGKTSWNKSHSHWIAEQKFAASADQIALGEYQLAADSAEQRVTRVTHALAQAMVGWRFEPVVAALRALRGIDTVSAIGLVAEIGDIARFATARQLMGYLGLVPSEHSSADRIRRGSITKTGNAHARRLLTEAAWNYRFPARLSTTLRQRNKDQAELIQQHAWKAQQRLCARFARLSNRGVQVNKVCVAVARELVGFVWAIARMASPTTMSA

SEQ ID NO: 455206 - protein, 316 aa, unidentified
MNETIVEKFVGIDVSKSTLDVCIEPDEKTLHVAYDEAGIKQIVDRLKEVSPTLIVIEATGGLEIRIATELASKGLQVAVINPRQARDFAKATGRLAKTDQVDAAMLAAFAKAIRPQARPLRDEDTCALNDMVSRRRQLIDMRVQETLRLGTAASKPLQKNLSKHIAWLDKRIAEIDTDLTKRLRNSDVWRIKDDLLRGIPGVGAVTTLTVLAKCPELGTLNRREIAALTGVAPLANDSGKHRGKRFIWGGRADVRAVLYMAAVSAIRCNEPIKAFAERLKKAGKPPKVVIVACMRKLLTIMNSMLKNNEPWSPNFA

SEQ ID NO: 455207 - protein, 402 aa, unidentified
MNCVGIDVSKGKSMIAVMRPFGEVVISPFEVQHTASELSELAKLLKSLDGETRVVMESTGNYHTPVAWLLHDAGFYVSVVNAMLVHDYGNNSLRRAKTDKKDAVKLANYGLDHWLTLPRYVPEEDTRLLLKNCYRQYQQYSKVQTMLKNNLISLLDAVFPEVNRLFNSSHRADGSEKWVDFVSTFWHCRCVSTLSLKSFSARYLKWCRKHGYYFSQEKAFEIHSKAQSCISVMPRNETTKLLVQQAIAQLKATSAALAALKQEMQSLAASLPEYPVVMEMFGVGSTLGPQLMAEIGDVRRFHSKKALVAFAGIDAPPCQSGQMDIHSRRISKRGSAALRRTLFLVMGIYLQSAPLDEPVYQFMDKKRSEGKPYKVYMMASANKFLRIYYASVTAYLNTLARI

SEQ ID NO: 455208 - protein, 408 aa, unidentified
MQVLYPRCAGLDVHKDVIVACVRCVSTPVHQEVRSFPTTTSGLQSLDEWLSSHACTHVAMEATGVYWKPVWHILEADFELVLANAQHIRNVPGRKTDVNDATWIADLLAHGLIRSSFVPPAPIQELRDLTRTRKQLVREISQHSSRIQKILEDANLKLGSVLSNVLGKSGRAILHALIAGETNPETLAELAEGTARKKRAELIEALRGRIRDHHRGLLKVHLELIAALEQALSDIDATVGKTLAPIRSSARLLTTLPGVSDLTAQVMVAEIGVDMSRFPTAAHLISWTGLCPRSDESAGKRRSSRVRKGAPWLKTALVTAAWAAVRVKDSYLQAQFHRLRSRRGAKKAILAVAASMLTAAYHMLKNGLPYRDLGADHFSSRDRSKAILRLVRRLNDLGCDVQLTPQVA

SEQ ID NO: 455209 - protein, 338 aa, unidentified
MSLYAAIDLHSTNSVLAIINDAGQPVLQCRRPNDLPRLLDDLHPYQSELTAIAVESTYNWYWLVDGLMDHGYPVQLVNTLAVPQYQGLKHGDDDSDALHLAQLMRLGILPQGYIYPREQRSTRDLLRRRFLLVRQSTQLMLAIESSFSRETGHPLTSNHVRHLTAKQVESAFPDPVTRYGLLVQLKLWSALQAQITALEHWVQHNLAHPELLVRLRGVPGIGVILGMTILLETGAIDRFASVGDYASYCRMVPSVYLSNGKPKGHGNRKCGNRYLCWAYMEAANYAIRFDPAIRRWYDRKRARRHRVVALKAVAHKLARACYFLWLEGTAFDTTRAFG

SEQ ID NO: 455210 - protein, 398 aa, unidentified
MTESSDYESVQVFIGVDVGKDTHHAVAINRSGKRLFDKALPNDENKLRSLISDLKQHGQILLVVDQPATIGALPVAVARSEGVLVGYLPGLAMRRIADLHAGEAKTDARDAAIIAEAARTLPHALRTLKLADEQIAELSMLCGFDDDLAAQTTQASNRIRGLLTQIHPALERVLGPRLEHPAVLDLLQRYPSPEKLASLGEKKLAAQLCKLAPRLGKRLAADIAQALAEQTVVVPGTNAAAVVLPRLALQLITLRKQRDEVALEVEQRVLAHPLYPVLTSMPGVGVRTAARLLTEVACRAFASAAHLAAYAGLAPVTRRSGSSIRGEHPSRRGNKALKRALFLSAFTALRDPLSRAYYTRKMSQGKRHNQALIALARRRCDVLFAMMRDGTFYTPQGS

SEQ ID NO: 455211 - protein, 341 aa, unidentified
MRKTLYCGVDLHSNNAMYVITDGRDKQLLAKRLPNQLPTILETLKPFRPRLKVVAIESTYNWYWLVDGLMDHGYPVVLANPSEMEQYDGIKEADDLTDAAFLAKLSRLEVLPTGYIYPQQDRPVRDLLRRRTLLVQQRTGIVLSLQNLAMRQSGHSLPWRDLRKLDATERAELLGSHECLTFVAEEQIDLIEQLNEKIRRFEKKILEHAQLKPEYERLQTMPGVGVILALTILLETGDIGRFATVGDYTSYCRCVRATHRSNGKKKADNNSRNGNGYLAWAFVEAVHHAIRVCPKAKSFYDKKRAKRNGALATKALAAKWSKAAYYVMKRQEPFDLTRVFG

SEQ ID NO: 455212 - protein, 350 aa, unidentified
MQKIYIGVDFHARQQTICYLTTDSGEIRLHQLLHHDKAAVRAFYAQFSGSVVVGLEASGYSPWFERLLEELGCEVWLGHATEIRRRARWRHKNDRRDAQLILDLMLHDEFPRLYLPPLPSREVLRMLRYRQKLIKMRTIGKNSLQALALQSGLAKGPHLFTKAGLQELRTTPMSPAMQWQREQWLQLLEPLNQRLLETMFWLKQQSQADPRISRLRTHPGVGLLTALCLVHSLEPVSRFSNRRKVTAYAGLDPLERSSAERQRFLGISKAGSRVLRFLLVEAAHTAIRKDAQLGQFYQRLAARHGRPKAKVAVSRKLLIRTYIMLRDEIDYAEFQRRAVAVRPVLLAPGL

SEQ ID NO: 455213 - protein, 407 aa, unidentified
MIEPIVKRCAGLDVHKMQVTVTVLIEQEDGSVEEETREFKTFRKHRKQLCRWFNRLGIDLAIMESTGNYWRSIHDSLEAADIPVWVVNARHLKQVPGRKTDVLDSKWLAMVGRMGLVRPSFIPSKDFRELRLITRQRQKLMASFSAEKNRLHKVLDDAGIRLGGVVSDINGVSSQDMISGLIEGRPPSELVTYAKGRLKEKTSELREALDEPIGERHRLLLSKIQEHIRYLEGQIQELDDYLFTQLVPYQNHWELLQTMPGMDKVSAAIVLVELGTDMRRFGGSANLASWAGLCPGNNESAGKRKSGRTRRGNKAVRRALCEAANAASKTTSQFKGKYQSLVIRRGHKRTIIAIAHKMLRVIYSMLKNDHPYYDPEVDYEALMVQRNAPRWIKALKKYGYMPQSAVA

SEQ ID NO: 455214 - protein, 311 aa, unidentified
MERTFVGIDVAKDQLDVHVRPSDERFQLGRDDAGLAELVARLQPLGPRLVVLEATGGYEVPVAAALASAGVPVAVVNPRQIRDFARATGQLAKTDALDARLMALFAEAVQPEARPLPTAAAQALGELVARRRQLIEMLGAERNRHHQVRDPRLQRRIATHIGWLTKALAELESDLDDTIRSSPLWRAKDNLLQSVPGIGDVTAYTLLADLPELGQLDRRKIAALVGVAPLNRESGQWRGRRMIAGGRPAVRSVPYMATLTAIRFNPVLVHFYQRLTAAGRPKKVALIAAMRKLLTILNAMLRDQRPWQQLA

SEQ ID NO: 455215 - protein, 323 aa, unidentified
MPGDSVFVGIDVSKAHLDIAISDSDATWRVANTEAGIEELIDRLTGTEPALVVMEATGGFEIPSAAALTAAGLAVVIANPRQVRDFAKATGQLAKTDRIDAQVLAQFAARVRPRVRPLPDEETRALDAIIARRRQLIGMITAEKNRLGFALEPVRKRISKHIRWLERELASVDSDLDQMIRNSPVWRAKSDLLRDVPGVGPNLARTLIAELPELGRLSNKEIAALVGVAPLARDSGVLRGKRMVWGGRAPVRSALYMSIWSASKHNPVIRVFYNRLRARGKPPKVAQVACMRKLLTILNAMLRDGRKWDPSIPLEQLRLQHSC

SEQ ID NO: 455216 - protein, 344 aa, unidentified
MNTTTIAVDVAKSVFEVAVSEQPGLVRERHRLSRAQFRRFLAEQPAGTVVMEACGSAHHWARQAQSQGHRVVLVPPHAARPYVLRNKTDRTDAKGLLEAFRNDDLRPVPVKSETQQALAALHRLRSTWVATRTARLNTVRGILREFGVVIPTGAHHVVPHVRALLEDLDAGVPGLFRVALGEVIREIGELEERILAIERQLARAAEPALLIRRLRTIPGIGVLTATALVAAVGDVQRFPSARHFASYLGLTPREHSTGQRRHLGAISKQGDTYLRMLFIHGARSVLHHAKSKTSPATDRLRTWALQVERLRGHNKAAVALANKLARIAWAVWRSGNDFTAAPAV

SEQ ID NO: 455217 - protein, 323 aa, unidentified
MEHAILGIDISKDSFDTALLINGAYKFNTFTNDPDGFHRMTKWLNKLKCGQLHCCMEATGRYADQVAEYLYVSGHAVSVVNPARIKFYANSKLKRNKTDKADAQLIAEYCLREKPSLWSPPPANFKNLQALIRHLDGLMKSRQQEKNRLKSGVSTPGVITSLEECISFYDQQIKIIQTQIQNLINNDPELLRRQTLLVTIPGIGKLTAAKLLGEVRDISAFQSARQLAAYAGLTPKNMLSGSSVRKKTVISKTGNAHLRKLLFMPGITARNWNPIIRTFCDRLSQNGLSPMEVVCASMRKLLHLVYGILKSGKPFDPNYLENA

SEQ ID NO: 455218 - protein, 400 aa, unidentified
MTAIGIDISKGKSMMAAVTNSKEILIPPQEFLHTEIGLRQLISAIANIGDNIKVVMEATGHYHEPVAIAVYEAEMFVSVVNPLLVYAYSDNSVRRIKTDKKDAVKIARYGIDNWNQLREYIPQESVRKKLKLFSRQYNLCIKTVHALENNLTSLLDKTFPGVTKFFTSQKKKNGRQKWVDFATTFWHANIVSAMDKDAFATKYQEWCGENNYKFCKSKAHEIHEKSKEPFTTLANNTDTFLLITSATTQVTALAANLAQLRAQLIRLASLLPEYQIAVSLYGVGNLTAAQLMAEIGDVRRFHSGRALIAYAGVDPLPKQSGTYDKKSTQTSKRGSASLRKTLYQITVTYLRHSPENEALYQFLDRKRTEGKPFFVYMTAVANKFLRIYYARVMEYYRQDK

SEQ ID NO: 455219 - protein, 516 aa, unidentified
MVPEECANISGDTRGGRVIPFGRMQRAHLRARRVPMNPCYQRRSPMSTTPTRAKRRRQVRTASKPKVPLPPQLQRVNLNAAGIDIGSEEHWAAVPPSRDREGQDVRRFGAFSGDLCALADWLKRCEIETVAMESTGVYWIALYELLVERGFEVLLVDARRVKNVPGRKTDVLDCQWLQELHTYGLLRGAFRPADQVCVLRSYLRQRSMLVAYVSHHIQHMQKALELMNVKLAHVVSDITGLTGMGIIKAILSGERDPIKLAKLRDPRCKSSEATVARALEGHYREEHLFALKQAVELVEFYQHQITACDRQIEACLQQFEEKSTETPVTSRRRKRRHGAIAFDAHSYLYRMTGVDLTQIDSIEANTALTVIGEIGLDMSRWPTEKHFGSWLGLAPGSKVSGGKRLSGRTKPSANRAAAALRLAAQSLNQSQSALGAYFRRLKARLGAPKALTAAAYKLARILYRMLKYGAGYVDQGEATYEERYRDRLLRNLKRRAAELGFQLTAINSSTGQPALT

SEQ ID NO: 455220 - protein, 373 aa, unidentified
MERRLTMRGENWSSEVLVGGKGVFIGIDVHKENWHVTVRVKEEEVFHGSIPSQYHALRRLLDHFKDCKIKVAYEAGPCGFWLYDRLTEDGIETIVVPPSLIPIESGNKVKTDKRDSRKLAKLLESDMLKRVYVLTEGDRADRELLRTRRQVLEHRNDVARQIRSKLLFYGIRSPFSAKQGWSKQYLRWVKGLVFEREVLKASFQSLMELYEYLSAQLVKMNKKVIGLSRSEKYLDRVRLLWSVPGIGILIGMELLIELPEMERFKSGDELASYIGLTPSEYSTGQYVRQGRITRCGNKRVRMFAVEGSWVLITKDPLMWDRYRRLKALKGAKRAIIAIARMFMIRVRRILLSREPYRVGTPGVIRQRLVDSTA

SEQ ID NO: 455221 - protein, 402 aa, unidentified
MNCVGIDVSKGKSMIAVMRPFGEVVISPFEIRHTTSELSELAKRLKSLDGETRVVMESTGNYHVPVAWLLQDAGLYVSVVNALLVHDYGNNSLRRAKTDKKDAVKLANYGLDHWLTLTRYVPEANTRLLLKNCYRQYQQYSKVHTMLKNNLISLLDAVFPEVNRLFSSPPRADGSEKWVDFVSAFWHCQCISRLTLKSFSAKYLKWCKKYGYKFSQEKALELHTKACSYIGVMPSNDTTKLLVQQTIVQLQATSAALASLKQEMQSLAASLPEYPVVMGMFGIGPILGPQLMAEIGDVRRFHSKKALVAFAGIDAPPYQSGQMDIRSRSISKRGSAALRRTLFLVMGVYLQNAPQDEPVYKFMDKKRSEGKPYRVYMMASANKFLRIYYASVTTYLNTLAQT

SEQ ID NO: 455222 - protein, 354 aa, unidentified
MAVAEPGRSGEVRFHGEIANQADAVRRLIERLADKHGQLRVCYEAGPCGYGLQRQIAALGHDCTVVAPSLVPRRPGDRVKTNRRDAVALARLHRAGELTAVWIPDPVHEAMRDLVRARTAAMEAVRRARQQLQGFLLRHERVFTGRKTWSPAHRRWLAGLRFAHPAQQIVLQEQIDTIEEAERRRDRLGQQIRELVPDWSMAPVVTALQAMRGVAFLSAVVLVAEVGDFRRFATPRQLMAWLGLVPSEHSSGSKVERGGITKAGNGRARRVLIEGAWSYRFPARVTSPIQARLDGVSDAVRAIGWKAQVRLCARFRRLVAAGKNVNVVTTAVAREMAAFAWAIACQVQPREAAA

SEQ ID NO: 455223 - protein, 479 aa, unidentified
MAQHSRKDLSPVEAKPPSHSLSPRRVPAPRFVAHYPKEDLQVIHRNAAGIDLAGRGAHYIALEISETELEVIEVGGMTPDLTEWVSYLKSHAVTTVAMEATGVYWIPVYAALEKAGIEVFLVNPSHAKNVPGRPKDDKLDARWLQKLHKFGLLAASFRPSEDIRPLQEFWRQRSKQVNYCADSVRRQQRALDMMNLRPHQVISDLDGVTGQRIVDAIVDGERDPVKLAAYRDKRCHCTDEEMYAALTGYYQEHLVFALKIARADYVFHQAQITQIDSMIQHHLTAMMPGSDEEITEAVSLETHPVNQGKHPPPFNAGAMVTLFLGVDPTQLPGIAGLTALGLLSELGYDMDRWKTDRHFGSYLGLAPVQKISGGKRLSSRSRPGIHPAAVLFLQSAIATIRSDNAYGAFYRRLAARINKPKALYATAYKIARMYYHLLKDGQEYVDLGVQDYEARYQSHQVAVMRKKAKKLGFDLIEAV

SEQ ID NO: 455224 - protein, 509 aa, unidentified
MSKNRHAKMNAAGHIRGEQGLSFLRLTEGLAPEEILIVPLEVAKKVHWMLICDGSGRILQPDLDFNALREGLDACVAVLRHHMAARYPRLTLIGMEPSGVYHEPILYHLRTVFATELARQPGEAGPIIRLCYVGSDAVASNRTEKRLRLFKTDHVDLACIADLLLRGEGFPAHLPDPTTLQLRVESTLVRHRERQMLHLRPLMTRLLDSIWPGLILHSDPKGKPHDAGSDLQPLFADFWGSQKARALIQVCPNPYEVLRLDAPTLRDRIRREADIERFGLKLAHEVIAYARRAPLPPEPVIVAQIPALQSHLALFNRYQDDIEAAITRLTYCLADTPAQHIVNIPSGATPRLVGRFMAYLGDVSYYAHAGQVWSRAGFPPIVYQSGGKFYHGEIAKDGSPGLRAATSILTRSLASHCAYFGTTFMDACQRGKSTPEAYVITGHQVVRVCFALLRDNAPFNPPTIDDYQAFEATWRARQPAFRHWLRQRRPPPKRQIPKAGQRKKKRRRR

SEQ ID NO: 455225 - protein, 369 aa, unidentified
MKDFITFVGLDVHKNSIDVALADGGREGEVRYYGSIGGDRESLDRLIRKLVSTGSELHFVYEAGPCGYDIYRYLQAKGFDCAVVAPSGTPKKGNQRVKNDHRDAITLARLHRARELTYVFVPREDDEAMRDLVRARQDAVKAQRVARQQLGGMLLRLGFRYSGKRHWTQQYFRWLSKIKMPTPPQQVVYQEYIHAIKETTDRVERLTRQIEELVPTWRMVPVIRAYQALRGVSLIIATTMVAELGDITRFTNPRQLMAFLGLIPSEHSSGEKTRKGGITKTGNGHARRMLVEAAHTYGYPARVSRRLLLRQEGLGQTIWDIAWKCQVRLCGRFRRLVARGKNHNNAVTAIARELAAFMWAIAKEVPVPG

SEQ ID NO: 455226 - protein, 415 aa, unidentified
MSDQKQWYAGVDWASENHHVVLTDHDGRKIGERAFKHGGAGLAEMAAWLMTTSGATEAAQIHVAIEVPHGPVVETLLERGFKVHAINPKQMDRFRDRFTPSGAKDDSRDAEVMASAVRTDPHCFRRLAGTDPVIVELREWSRIAEELGTERNRLTNRMREQLWRYFPALLELDSDLGAEWLLDLWQSVPTPDKAARVRESTIAKLLKRHRIRRFDAAHVLAVLSQRPVQVAAGTTEAATAHIATLAARIRLLNRQIKEAHQRLDTLTARLTPAEEAEPGQRKQRDVEILASSPGVGRIVLTTLLAEAFDALQRRDYVALRSLTGVAPVTKQSGKSRIVLRRHACNDRLANAMYHWARTAVQCDPRSRAKYAALRTRGHSHGRALRSVADRLLNVACAMLKAGTTFNPDLADQKAS

SEQ ID NO: 455227 - protein, 349 aa, unidentified
MRKITQEYKEVYCRIDVHKRSYSFSIWAGGQEVGRHRMDADIGGLIGHLKKRFPKARIRSVYEAGFSGYGLHRSLVAAGIENRVINPASVEMAANDRKKNDRLDARKLGEQLSLGRLKGIYIPSEAEEQRREITRVREQVVKSRTRVGAQIKMKMHYFGLIGAQEDVLVGPRFLKNLEARLKGMAEEVKFAFKLLIEQWSLLHKQLGELKIRMQEQSLEDNYKEEIYRSVPGIGPVGARVLANELGDLSKRFRNQRALYQYTGLTPSEHSSGEKIRSGSIDRQGSARIRALLVEASWRAIGGDPYLAKVFWRIANRRGKTRAIVAIARKLIGRIRSCFRTQSLYQINMA

SEQ ID NO: 455228 - protein, 408 aa, unidentified
MKALHRRCAGLDVHQQEIVACRRIVAVRKVRTEIGRFSTTTQGLIALADWLEEGKVTHVAMEATGVYWKPVWHVLHDRFTLILANAAHIRNVPGRKSDVNDATWIAELLAHGLIRASFVPPQPIQELRDLTRTRKELTREIVRHTQRIHAVLEEANIKLASVITDILGFSGRRMLKAIVAGETDAGCLADLGSSRLAAPRKALLAALDGRIRDHHRFLIGQHLKTIEQVETTIGEFDARIEAALAPFRDAIERLTGVPGISWTVAQIVIAEIGVDMSQFPTADHLISWAGLCPRLDESAGKRRSTRLRKGATWLKPVLVQSALAAGRKKNSSFKTRYYALKGRLGPKKAVVAVAANLLRVIYHMLKDGTCYKDLGESYRRPRNPARAAANLAKRIRALGYQVDIRRAA

SEQ ID NO: 455229 - protein, 386 aa, unidentified
MNHSTNIEPRTVDYDQTLVLAIELSNKSWVLAAQVPGFSQTRAKRTIKPDKNDLLAAINGYLTRATAAGLPVKRVIASYEAGWCGFWLARWLMAHDIEVHVIQPSSVPVDRRMRRAKSDGIDAELLLRTLLAWLRGEPRVCSMVPIPDEAHEDARRCVRERSELVSERVGLVNRIGAILATLGTDDYNPLLQSRRRRLTELRTALGNPIPPNALAKIARLLTRLELVLAQIAELEVERDAVAKTDAPDQAGKMIQQLIRLRGIGVQSATVLVREAFVRRFANGKALGSYAGLTSTPYSSGGIDRERGIGKAGNRRLRTVMVELAWLWQRYQPGATQVVWFRERVGSTGRRVRKVMVVALARKLLIALWRFVIDGVMLEGAIMKPSI

SEQ ID NO: 455230 - protein, 413 aa, unidentified
MDKIYDICCGIDVHKKLIVACLNHKRKKELREFGATTRELMELAEWLQKNECEIVAMESTGSYWKPLYNIMESYGLHAIVVNPAHMKAVPGRKTDVKDAEWIAELLQHGLLQPSYIPSKDQRELRELVQYRKSLVGERTRELNRLQKMLEGANIKLSGTVTNINGKNARKILEYILSGNEIDEKKYDEMYEEKLIAHNLKASKEEILDDLKGFMSPLQRRMLKELLQHLDELNVHIENLNDEIDNFMKPEEKQASQVIQDVTGIGNTSAQTIIAVIGTDMERFPSDRHISSWAGLCPGDNVSAKKRKSGKIRKGNALLKSTLVLCAHAAVRHKSSYFHAQFKRISTHRGKKRAYVAVAHSILIAIYHILKDGVKYQDLGAEYYNQFNAERKIHAYLKKLKALGWEPPKEAVPA

SEQ ID NO: 455231 - protein, 425 aa, unidentified
MPYRIAGIDVHKKMLAVVVADVEVDGDFHFTRQKVGTTPTDLRALADWLVEQEVEEVVMESTAQYWRPVWEALEQHWRPRRRAREGASRLSGTLHLAQAQSNRGPGGRKKDFPDAERLVKRLVAQELTLSFVPDAEQRLWRTVMRRKYQVTRNRVQLQNRLEALLEEAHIKVSSLVSDLLGISARRMLQALADGETDPAALAALAAPRLRATAEQLCDAFTAAPTLHPVYRRLLKLTLEDLRLIEDHLGQLDQQMAHLLAAHHEAVQRLAEVPGLGVDSAQQIIAEVGATAVTFPSPKHLASWMGACPGNEESAGVNYSHRCPKGNRQMRRVLNQAANAAVKARGSIFAVAYRRLVPRLGHAQTIGAITHRLCRWIWKILHERVRYEERGPAVSAEAKKVRARKMIRELRSLGYRVDLISPAPSV

SEQ ID NO: 455232 - protein, 416 aa, unidentified
MVFALPEALLFTGIDWAAESHAVCVLDAAGKIAAQFTIGHSADGIAALIRRLARYGEAGGLPVAIERPDGRLVDLLLEAGHPVVAVKPNAIKAWRDGEVLSGAKSDAGDAAVIAEYLRLRAHKLRIVAPYSDQTRALRTVVRTRGDLVEMRVAATNQLAALLEAHWPGAVAIFADVESPVSLEFLTRYPTPAAAAHLGEKRMAAFCVKHGYCGRRTAAELLARLRSAPAGTTLESLTEALRDAVLAAVGVLTALNASVKTLDRSIAAHLGEHPDGAIFTSLPRSGQVNAAQVLAEWGDARQAYEHPDSVAALAGVTPVTKASGKRRSVEFRWACNKRFRAAVTTFADNSRHASPWAAKIYNNARASGKDHPHAVRILARAWIRVIWRCWLDGIPYDPARHGAAAALARQATEQIAA

SEQ ID NO: 455233 - protein, 363 aa, unidentified
MIGVNLAEMEKIVRVGVDLAKNVIQVHAVAADGRVILSRPLARAKFVPWCNQLSKGTVVAMEACSGAHHWARELTAMGLVAKLISAAFVAPYRMQGRGGKNDANDAAAVCEAASRPTMRFVPVKTVEQQSLMTLHRLREGVKKDRTACINRIRGLLAEFGLVFPKSPQALREGLLKVLVGDTGQLSSTATLGLRNAALHLSQLDDHLKSCDRSIGSHCKDDPKARAAAALQGVGPIGASALIASVGDVSVFRSGAQFGAWLGLTPRQNSSGGIVSLGRITKRGDEYLRTLLIQGAKAAVMTAHKRRDAISRWAVQLRERVGWQKAAVAMANKNARILWAILSKGKCFDPNHANALPHLQRSLF

SEQ ID NO: 455234 - protein, 514 aa, unidentified
MSEGTAVSPFSRLSPRLLRKHSAWHIRHIPLTQKFHPQPLAPARMADWVHAHYARVRSPYAAQDKPFASGFTNPYRNGGDIMLKINYMSTLFVGIDVSSKSNAVYAMDFEENKYLSTSFGNNQPGADELVNRIVACMQKHKHLDTLLIVLESTSVYSVHISNFLSTSEVLMPYKPYVFCVNPKATSNYRKSYIGMEKTDPTDAYLIADFGRVGRTKKLEPWRGGLFIALKRLTRHRMHLSECITREKTYMVSNLYLKFSELQLLEGDDKPFGNLYGATSSAILTEFLSPQEIINMPEEDLLAFLAQKSRNRISDLSKTSELLRKAARDSYRLDKCMYEPLSISLASSFNCIQAYQKEIRLIEQAIDKCIKGMNTNALLILQSIPGIGPVWASGILSEIGDITAFHSSDALAKYAGLYWPKGDSGDFISEDNQMSKAGNPYLRYYLGEAANSVRKHIPEYADFYARKYAEVCKHQHKRALALTSRKLVRLVFGLLAKNQLYTGEKLDTEYNTWSN

SEQ ID NO: 455235 - protein, 343 aa, unidentified
MEGSQGSVVGVDTHKDSHSAALVDELGGLVASTDVGANPRGYIQLLEWARCQSPRRTWVVEGTGSYGAGLASFLVECGEVVYEGDRPQRRKRGAGGKSDQLDAIKVAREALAREHHAIPRRRGNREAIRVLLSTREGAVSASRQALNQLYALVVTAPEPIHEHLIRLKGEQLVTACLRLRSTAGDIETSVTTRALRQVARRIRSLQAEAADHEAQLESLVAEAVPALLSEPGVGAITAAQLLVSWSHAGRIRNENAFAAMAGVAPVPASSGRFVRHRLNRQGDRRLNRALHVVAVCRSSFHRPTKDYIARRTAEGKSTREIRRCLKRYLARHFFRLLQGLDNP

SEQ ID NO: 455236 - protein, 418 aa, unidentified
MKHSKTEKIGTINKKTLIAALDIGKKVHYGYFRAPSGKDFQPFAFHNTRNGFDKFWERLCNFKEKQMLEEIIIGFESTGPYAEPICHYLRHKSVKLVQVNPMHTKRIKELTGNSPNKTDKKDPRVIADVMSLGHSLTVIVPEGAAAHLRRLTQARERAIERRTAMSNQLQHLVFLIFPELVHIIKPSTKTGMYLIKHYSDPKKLLFAGIDKLNAIIKKVSRGRLGTDRAEQLHNAAKKSVGITEGKESILFEITHLVSKIESENHYVEDLEKQMGDYLEKIPYSHSILSITGIGYVTAAGLIGEVGDFRKFKTISEVLKLAGLDLYEISSGAHQGCRRISKRGRALMRKLLYFAAINTTRKNGILHGPYQRHLAKGMPRIKALMAIARKLIGIIFALVRDHSNYIADYSSQLMFKKAA

SEQ ID NO: 455237 - protein, 387 aa, unidentified
MTYYIGIDISKYKHDFCIISNTGEVIVENASFDNNKKGFQYLLDYLKSYNKSQVHIAFEATGHYSLNLELFLIDQGFSFMKMNPLVIHQFLKTRSLRRTKTDKADSLTIATYLMSVPFKPNSDLLYHIYTLKSLCRARELLIKERSKFLVLLTNELDKSFPELKQFFNNRISTTLLYILEKYKNTEHIALMRDFDSLRSISHGKFSYAKFAKLKEIAKNSVGHHDNNSDLLISTYVSIINNFNDKIDPIDKQISTIIKELNPRMLSIPGLGEISAATILSEYGDISNFSSSNKMLAFAGLEPSIIQSGTIVHNGKMVKHGSGHLRYSLMNISLTILKFSPTFYDYYLKKRSEGKCHRVALSHVCKKLIRVIYSLEKYNMDFNPSLLK

SEQ ID NO: 455238 - protein, 487 aa, unidentified
MRPRTTNSSTQTFDVYRFSFESAGALAFVNEYSGFAVPPAHYIAFAERKLARPGSSIYHCRRCSVKPLSERPFTAHVGIDWADAKHDVCLQAADSEQREFDRFAHQVGSIDQWAKSLHQRFGGPIAVALELAKGPIVYALQKYDFFVLFPINPATLAKYREAFKPSGAKDDPTDAELALDLLLRHPERFAPLKPQSVAMRTLLSLIEQRRELVDDKTRVTNRLGNALKQYYPQALDWFEQRDTILFCDFLSRWPTLSAVKRARKAGLQAFFYAHNGRRPKLIDDRIDSIRAATPLTDDMGVIAPYRLQVQVLVEQLRVTLQAIDRFDRQIAVVAATLPDYALFSPLPGAGPHLAPRLLAAFGEQRERFMSADELQKYSGIAPVTERSGKKRWVHWRWQCPTFVRQTFVEWAGQTINKSFWAGVYYRQQRDKGSSHQAAVRALAFKWIRILYRCWQAGTPYNESTYLNALRQRGSPLLKRFHPTVQNA

SEQ ID NO: 455239 - protein, 335 aa, unidentified
MGFEFFIGIDVSKNELDFAVVQGSRLLFHREAANTPEAVKAFVGELGKLPGFKLGKAVFCMEHTGIYNNHLLNCLYKKKAHVCLEAATQIKNPLGNVRGKNDKVDAIRIAGYAYDKREKLRFWEPKREVVQQLAHFTAVRSRLVEAKKMLKTPLLETGVFLSKTIAKKNSGLCNSTLKSIGSDLKKAEKAIAGLIDADDELRRLFGLVTSVSGIGKVTAAQIIMATNEFKDISEPKKFACYAGVAPFTKESGLFKGKARVSHMANKKVKTLLHLSAMVAIQHSPDLKLFYERKVNQEKKNKMSVINAVRNKLILRVFACVNQNRLYENNYNKLVA

SEQ ID NO: 455240 - protein, 317 aa, unidentified
MNTLNNQNEINVGVDTGKTQLDIYIRPLDIYFTVENNQSGIKHAIQILKKHPVTRVTIEATGRLEQPFIIACAEANIPFVVANPVNIKRFAGAIGQKAKTDKLDAQLIAHFGEAIKPPLSSLKPDQMRLMSDLLSRRRQLMDMQTMEKNRSQIMPKTISSLIKPILTALKNQIEKVDLKLQKLIKECDEYEAKNNIIQSVPGVGNVVAFNLLSDMPELGYVNNKEAASLVGVAPFNRESGVYQGKRMIRGGRPKIRTAMYMAMMSAIQCNPKFKEIYQRMVAAGKPKKVAIIACIRKLVVIINSMVRDGVMWDPEMV

SEQ ID NO: 455241 - protein, 406 aa, unidentified
MADIFALDVSMGKSYCVWYRGKHCLKEFSLVHTRAGFNALRDMIKKAQKPIIYFEATGIYSRVIEHFCETNGLRFCRLNPLELHLKPESLRRVKTDQKDAHRIALTVQENTFRLTVPWKKDYLQLHELSRFYNQLNADWNYRLNHLHTALEQFFPELKQLFVNRTSKLALNIVELFPHPALVRPYSRVKLKNILMASTDKRISKMKAYKYADRLIDLAQKSYPAIEGDAIQVDEVRYYARQLIALTRKKEEVIKRMESIAQRLPEYILYCSFPGIGKQTAAQLMGELGDISRFDNANQLNAFVGIDIRRYQSGTYLGQDHINKRGNPIARKLLYFTVGNMIRQQHANSNHIVDYYYRLKEKRPHPKLNKVAMVACMNKTLKCLLSMIKHHEKYHYRYTDSMVPVKA

SEQ ID NO: 455242 - protein, 410 aa, unidentified
MKVAGIDVHKKVLMVVVVDATAPEEKPTRRRFVTMPSELHRLLTWLREQAVEEAVMESTAQYWRSVWLELEPHMRLHLAQAFSNRAPRGRKHDFKDAERLVRRLIADELILSFVPSGEQRIWRSLTRMKLQLTRDRVRLQNQIECLLEEMRIKLSIVVSNLLGASGLRILHALANGETDPKRLAQLGGERLQCTEEQLVDALTGRAQPVHEAMLALQLERLQLIDQQMERLNSMIAAAMKPQQDAVMRLAEVPGLGVDSAQQIIAEVGAQAGTFASAAELTSWVGTCPGKEESAEQNHSSRSAKGNKYMRRVLNQAAHAAAAKKGSHFQIVFRRLLPRLGYQSAIWAVAHRLCRLVWKILHEGARFIEKGVEVHPREKKKRAQMLARALRKLGYEVTITPLNQLVPKPAV

SEQ ID NO: 455243 - protein, 260 aa, unidentified
MLYVGIDLHKEKVYGIVMNENGELIKKEKFENEPEEFHKFLKNMEKAIVAIESTGFATPIYDFLEENGYETKVAHPLKTRAIAEAKIKSDKIDAKILADLLRSDLLPSSYIPSKEIRKIRDMARHRAYMVRFRTRLKNKIHAELAKRWIKTKGNIFTKKGIEWLRGLEIKSVNRYLDVMELLNEKIKEISLEIKEKAKENEDAMLLMTIPGINYYSAMFILAEIGDVKRFPDSHKLCAYAGLVPSTYQSGNKTYHGHIIK

SEQ ID NO: 455244 - protein, 358 aa, unidentified
MQYVAIDLHKRYSVVSALNEQGQRTREARIEGNSAAGFAQYFKGLGEPSKVVIEATWNWGRVHDLLEEIEEVEEVVLAHPYKTRIIAEAQVKTDKLDARALAKLLRADLVARAYIPSVETRRRKEVLRQRVFWVRVRTMVRNRVHQLLDRQPRVDLPQVSDLFGARGMKAMQQLQLPEPDATQLRQDLDLLEQLQVHIKELEEMIAAQNSGDEPTQTLATLPGLGKILAAVVAAEIDRIERFACPKKLLAYAGLVPTTHSSGGKTYNGPLKPMCNKWLRWAFVEAAWVAVGHENYFGGLYRQHRARGKRANTAIVIVARRMAEIAWQMLRHDRPYEDRPLTQNTFPDRSERALVEVTA

SEQ ID NO: 455245 - protein, 392 aa, unidentified
MLFVGIDIAKRNHEASVIAQDGRVVRKAMRFANSQAGYNKFMDMVRGLSEPVVFGMEATGHYWLTLYTHLRNDGFTVHVINPIQSDALRGMYIRKTKTDSVDSVIIADVIRFGRYCETSVEPGDLQAMRELCRQRFYIIDMASDLKRKVIALLDQVFPEYEKLFSDSFGVSSMELLSQYTTPEEMLSVSSQQLAEVLEKASRGRLGAEKAAEIQDAARNSFGIVMASSSFSLIIRQYIEQIRSLESSVDIFDTEIARLLSGFDTQLTTITGIGPTLAAVILSEIGGDIRRFSSPAKLAAYAGVDPTVKQSGDFSGTRMKMSKRGSPYLRRAIWLASTVAAFKDPAIHALYERKRAEGKDHMTVIGHICRKMISIIFAVLRDNTPYVPAVISD

SEQ ID NO: 455246 - protein, 407 aa, unidentified
MHGLLERVAFDRVIVAIDPGKAVNRVWVTVADGLVGEPLSVPSTREGIDRLGGLVAGVQAPVFAIEATGSLHRAWAAELERRWPGSLRMFAPSETQAARAQLGIRRFKTDDRDCAALVWLARQGAGRPVRATGVEAMLGAVAHRRQLIRALTPLRQRLHDQLNALAPGLSAPAGHGRALGLKTPTGRAVLACAVAFAGRPPTPRSLQARADGRLSDRTARFWALRWKQCLAPPPDAELRAARLRRDVDRFQALQADIAFVDSQIEQLLADSAGQILTSLPGVSTVRAAAFAAHALPIERFPTPERLYSATGLAPASYESASVRKRGAISRTGLPEHRDALMGIAWGLGQFAPAFQQRLVELNARGLTGIQARVALARHACRLCWRMLLSQQPYDDRRYDRARRDRGR

SEQ ID NO: 455247 - protein, 438 aa, unidentified
MSNNVIFNFDELFISVGIDVGADFSWMSIVLPNQQFVGKPYKILHNSMDSLASAVSKIKEAEEMYSLESRIFLESTGIYHYPLFCYLRDKGFNCSVINPIITKNSTNINIRKVHNDRFDSKKAALVGLKPDLKVSLMPSDLALNCRNLCREYYDLMDSRNAYVNKLIDELRMVFPQYLGIFSKVTIDTSLILLETYTSPSAFINADKQEIIDLIRSTARFGLTYACNKYNAIIQAANDADEFGYILDSNIKRIRLYIGFIRKYDEEINSILESMHELAAANEDTDFVKQIRLIETFKGAGFLSAMSLMGEIGDFSAFSKPKQLFAYFGLDPAVKQSGKFEGTKIQMSKRGSAIARRVIHTLTLQSISASRTGESKNPVLLDYYLKKCESKPKLVAMGAVSHKVCNMIFAILRDSKPFEIITPQEHIKKYNAAKCDVAA

SEQ ID NO: 455248 - protein, 366 aa, unidentified
MHQTGTTGPYERVGGSSRMLADELDYVVGVDTHRDEHVLAVLAAAAGAVVAGQAVRANARGYRETLRFAERHAAGRRAWAIEGTGSYGAGLARFLAGRGETVLEVSRTPRAERRLRGKDDALDAARTARAALGSDTLALPRIGERREALRLLLVARRSAVDVRREALAQLRGVIVTAPDRLREELRGLPTGKLLQRCSRLRRTSAATVDELATRLVLRSLAHRIEAATLEADELERELLGHVRALAPALLEEPGVGPIVAAQLIVAWSHRGRLRSEACFARLAGVAPIPASSGQTTRHRLSRGGDRQLNRALHTIALHRRQHDQATQDYIAKRVAEGKSRRDATRLLKRYLARHLYRLLQQEPLMT

SEQ ID NO: 455249 - protein, 408 aa, unidentified
MNQDSGFDIWCGLDVGKTGHHACPLDAAGRKVFDKPLPQDQKRLEELFDKLQTHGRVLVIVDQPNTIGALPIAVARSMGIQVAYLPGLAMRRAADLYPGNAKTDARDAFVIADTARTMPHTLRRVDAGEETLSELKVLVGFDEDLAAEATRLSNRIRGLLTQIHPALERVVGPRLTTKQGLAVIEQLGGPQTMAAASKSKLLRVISKAYPRGAQEFADAITTALAEQTVIVAGTAAAEQVLPQLAASLRQTLDQRHALAAQIEQVVDAHPLAEVLTSMPGVGVRTAARILLDVGDASQFPTAGHLAAYAGLAPVTRRSGTSIRGEFPARAGNKHLKRALFLSAFAALRSDPTSKAYYDRKRAQGKKHNAALICLSRRRCDVLFAMLKNREPYRAPTPTREPSPLPLAA

SEQ ID NO: 455250 - protein, 354 aa, unidentified
MLIIGCDFHTRYQQIAMAREETGELLVERRLDHASGEAHAFYRSLQSSQEPVRVGIEATGPIHWFERLLADLGYELWIGDSAKIRASEVRKQKTDERDAALILDLLLAKRFPRIWVPTPAQRDLRQLLWHRHKLVSMRTMLGNQLHALAMSQGLCRKKKLFTKKGRVELVSLGLAPWASRRREELLKLLDQLEPPIAELDRAVLEEAKHHADAVRLMTHPGIGPVTALAFVLAIGPITRFRRSKKIASYLGLNPSEESSGGRRRLGAISKQGNTMVRWLLIETVHHAVRQDPELRQDYQRLKFRRGHAVAKVAIARKLAVRMYWMLRSGADYARLVRRQGSPGGTLVGASPSLA

SEQ ID NO: 455251 - protein, 352 aa, unidentified
MERYIGLDAHAASCTLGIVGPSGRRLREQVVETDGEALVGVVRSVGGRRHLCIEEGELSGWLYELLKPHVAQIVVARAERKAGPKSDKIDAFEWAEKLRTNAIRTAVFKAPERYAALRELARAYRHVSKDLVRGKNRLKSLYRRRAIAVSGDEIYAEAHRESWLEQLPASALVAGKALHAQVDGLTALKKQVRGELLAEASRHAEMRLLQAIPGLGPIRVAQILPIVVTPHRFRNVRKFWAYCGLAVVMRTTSDWVQLADGRWGRAKVNKTRGLNHNRNPVLKSIFKGAAQTVIDSPRGSTVLRDKYQRLIDEGTKPNLAALTIARKIAAIVLRSWKEGTSYDEQAHRERMK

SEQ ID NO: 455252 - protein, 352 aa, unidentified
MIQTQTKTDRKLWIGIDFHKKTWRVHFRSDLFSGNPFSMEPSPENLLNKVNKEFPDHEIHVVYECGCFGFWAHREFESFGWNSVVVNPSDIPKRAKHNFQKTDPIDARNLSEQLKFGSLRSVSIPDLQREQFRGHFRRRNDLVKSSRMIKSRIKSILLYYGIKIPDSMDNASWSKNFKQWLADLKWEFKTGESMMQSRLRELEFNHKEILQVSNEIRKYSRLNHKEDYELLQSVPGVGPLTAICFLVEVGDIRRFKNFKQLASMVGLVPTIYQSADTIQTTGLTPRCLRLMRSYIVEASWQAVRIDPVMQEYYRKHVGKKPNDIIIKVARKLLSRMHGVLRTRQPYEIGLVQ

SEQ ID NO: 455253 - protein, 350 aa, unidentified
MAETITDVVGGVDTHSDVHVAAVVDDCGRILDTASFAATGPGYRRLLAWMRAKGVVVRVGVEGTGSWGAGLARYLADQGVEVVEVDRPNRQARRSKGKSDTVDAEAAARAALNGQASGTPKARTGPVEAIRALRVARRSAMKARTQVLSQLRALVSTAPEELRARLRPLPTAEVVRLAARYRVADPVTALAATKFALRELAVRVNQLDEHLDRLDAAMAPLVKATCPALVAKPGVGPVTASALLVAAGDNPERLHHEAAFAALCGSSPIEASSGRTVRHRLNRGGDRQANNALWQIVFVRMRCDARTRAYVERRTKEGMSRKEIMRCLKRYVAREVYHCLLDIPALKAAS

SEQ ID NO: 455254 - protein, 398 aa, unidentified
MEVLYPHCAGLDVHKETVVACVRHMSDGVVRREVRTFKTLTTDLLALSEWLASEGCTHVVMEATGVYWKPVWHILSDGDVALTLANAAHVKNVPGRKTDVNDATWLADLLAHGLIRASSDAATQEQRGLLRTRKQLVRERAGHVQRLQRTLEDANIKLDSAISDVTGVSGRAMIQALIDGQTDPARLAELAHRRIRTAPEILREALRGRVTRHHRFLLALHLKQIDALDEAIAGIDQEVDAHVEPFRAAIAQLKTIPGISDLSACVILAEIGHDMSRFPTQGHLISWAGLCPKNDESAGKRRSSRMRKGAPWLKTTLIQCAWAAARKKGSYLQAQFQRLRARRGAKKAIGAVAASMLTAAYHMLNDGTLYHDLGADHFDRRAKRVATKRLIARLESLG

SEQ ID NO: 455255 - protein, 373 aa, unidentified
MFHFTTLFIGMDVHKESFSLCYYDMMANQFKHSTKVGPNVSYIVNYVNELRRLYGQDAEVLCGYEAGCLGFTLYHQLQAHGIPCIVMAPTTVMKEGSKRVKTDKKDAAQLAKALAFRSYRPVHIPTVEDEQVKEYIRMRTDHKVALKKIKQQILAFCLRHDFRYTEGSSNWTQKHVRWLRSLNPDGLYAEILTEYLLTYEKLVDQIERYDARIEQLGQSDSYQEKFSRLSCFIGIKTLTALSIVTEIGDFNRFATAQHFASYLGLTPSENSSGDKERRGAITKAGNSHVRRLLIEAAQSLAKGTIGYKSKELKRRQSGNRVEVIAYADKANERLRRRYRTLVLGKNKKQNVAKTAIARELSGFIWGMMTGRIA

SEQ ID NO: 455256 - protein, 434 aa, unidentified
MEEAHDEPLFCERAAGIDIGKQMIMVTIRVPSDRRMGGRQQETREFGTTRRQLLALADWLRCWGVERAGMESTSDYWKPVFFLLEREGFDCVLYQASQVKAQPGRPKTDKLDSVWLAKVTERGSLRGSFVPPEDIRRLRTHTRYRRRLTQARTAEKQRVEKLLEDAHLKLSSVISDIHGVSGRAMLEALIAGERSPRVLAELARGRMRVKIALLEEALDCSFLTPEHVFVLQMMLANIDHHTAQIAVLDERIAALCEPYERQVAQLDTIPGFGVTTAQDLIAETGTAMSAFPTAGHLCSWARLTPRVTESAGKRKGKNATGRGNPYIGGALGEASAGAARTQTFLAAKYRRLCRHMPKKKAQVAVMRTQLSAAHALLSDPGASNQDLGPSYYEQQADARRSTRGHVRSLERLGWKVTLEPVDPDTGEVTAPASS

SEQ ID NO: 455257 - protein, 385 aa, unidentified
MLQLKDDLSWSLVALDQDRTLIAVVELSLATWLVGGVLPGIQREPLKKLPPDPEGLLKVLHRWREEAAKAGHKVTRIVVAFEAGRDGFWLARWLQARGIEAYVIHPTSVAVSREQRRAKTDRLDIALLKRSFLGWLRGEKKHCTMVAIPTLHEEDAKRPTREREQLVGKRTGIINRMKAALVRLGIRGFNVKLRKAQEQLATLLTPEGHPIPTNTLAELRREMAHLRFIDEQIKQIEDDRLQQLKQAPQRPLNARVLQLQRIVGVGTETADMLTHEVLSRDLRDHRAVARYAGLTGSPDESGSRRREKGLAKAGNARVRRGMIQLAWRFLLHQKDSAMTQWYQASVAAGKKRKTMVVALARKLLIALWRFVTMGDIPQGVVLRPA

SEQ ID NO: 455258 - protein, 324 aa, unidentified
MDAWIGIDVSKDTLDACFLRPTGKTISKQFVNNLAGCQKLLNWVGTLSVPERHFCMEATGAYSHAPASFLVEKGERVSVENPARIKYFGMGEGILNKTDKVDARVIALYAQQKAPEPWRMSKPEVLHLLALMRRLQAVETHLRQERNRLGEPDLDPAVACSINTIIQALQQEINRLEAQVREHIDQHPNLRADKELLTSIKGVGEKLSHWILAEMPDPKQFQSAKSASAYAGLSPMEYSSGRTVRKRTRISKAGNANLRRALYMPAMAAIRYNPIVADLYHRLITRGKCRMVALGAAMRKLLMLAYGVLKTRIPFDPEFAFSKT

SEQ ID NO: 455259 - protein, 409 aa, unidentified
METIVQRCCGLDVHQATVVACLLAGPADCRPRKTIRTFGTTTRELEELRGWLLEEGCTHVGMESSGIYWVPVYAVLEDHFELVVGNATHIKNVPGRKTDVKDAEWIADLLRHGLIRKSFVPPKWQRTLRDLVRYRRKIVESESAERNRLHRLLETCNIKLSSVASDVFGVSGRAMLRALIAGEATPDEMTKLARGRLRKKSARLALALHGRLEDHHRFMLRLQLERVERIERDLDVIDVRIDEALAPHLEDVERLMQIPGVDRVVAATIVAELGTDMTVFPTARHAAAWAGVCPGNNESAGKRTGHAKRRGNVHLTTALVQAAFAASRKKGSYLKERFWRLKARRGPKRAAMAVAHSILIAAYEMLRQRVSYRDLGAAYLDSINRVAIERRLIRRLEALGYRVTLEAAA

SEQ ID NO: 455260 - protein, 344 aa, unidentified
MIYIGIDVSSKSFVIHAIDDRKKVVFKGEILPEKRSLLKMLKDLGDEPKYVVFEAGNQMKWIAQTLKKVEGVNLHVVHPNELKWISQSSGKTDKVDARKMAELARGDLLPRKVHVVEGKVRELREMLSARQVLQSKRIALLNGIRAMMLQEGVKLPEKFFARADWHARLEKAPISEATKTIIAAYMHGIEGLSSAEDGLTAKIVAIRDERLQRLESIPGIGQLSSRVLLGALDEASRFDNKKAAAKYGALTPSIYQSGNVTHMGRICRDGRHEIRRVLLQCAHTVARMKNFESKPLREFFERIHKRRGKKIAVVALARKLLTIAYGVLKTEAYFDPAKLSPHAV

SEQ ID NO: 455261 - protein, 407 aa, unidentified
MEVLYPRCAGLDVHAGSVTACARIAAGPQVTYEHLTVATTTRGLLALAEWLTAHGCTHVGMEATGVYWKPVWHVLEEHFTLVLGNAMHIRNVPGRKSDMNDATWIADLLAHGLIRSSFVPPAPIQELRDLTRTRRQLVHEVSRHVLRIQKTLEDANLKLTHVMSDIVGVSGRAILKALIDGETDPGRLADLTRGRLKATRAELLDALHGRVTDHHRFMIKLHLDQIDAVERAVAAIEARIGDALGPFRAAVSLLTTMPGLSETTARVLIAEIGTDMTRFPSVGHLISWAGFCPRLDESAGKRRSTRTRQSAPWLKPTLVNAAWAATHKKDSYLRAQFLRIKSRRGAKKAILAVASSMLTAAYFMLRDGVEYHDLGHHYFDQRDKEQLAKRLLQRLRDLGVNVEVKAA

SEQ ID NO: 455262 - protein, 355 aa, unidentified
MPSIVGGLDIHRKQITFDYLDLATGEVGCGQVAPADRAHLRAWLARFEHPGEVAFAVEACTGWRYVTGELQRAGMEAHLAEPADTAAARGRKRRAKTDRADARLQRDLLIQDRLPECWIPPEHVLECRALLELYHDLRAEHTAWVQRVHAVLFHQGAPVFHDLSRAGAPAELAELAREHLSLAGQCQIGACLRMCDALEAELTAVRRRVIAAARHLRGAKVLAESIYGVGPVTALALTCWLGGAGRFSSARKAVRFAGLDITVYSSDGKRSPGTCPGRDRRCCAGRCMRRVRPMPARSRPITATTPRSRTARTASALLCPRPARSSAGPATSCPSSATTRSPWCERCPGLKSRRR

SEQ ID NO: 455263 - protein, 371 aa, unidentified
MIVVGVDPHKKTHTAVAASSQLGELRGELTVQARAKGHAKLIHWARALDSERVFALEDWRHVSGALERFLIGRGERVVRVPPKLMGEARRGARSFGKSDAIDALAVARAALRERDLPAAHLEGPAREIALLLDHREDLVAERTRIQNRLRWHLHDIDPELDEQAQRLERSKRRLEQLRRRLERNEQTAQVRVCRDLLRRLKALSRDVEALDAELEQLIGRHAEPLLELPGCGTLTAAKLVAEVAGVERFSSDAKLAKLAGVAPLDASSGKQQRHRLNRKGNRQLNCALHRIAVAQGRVHAPARAFLARKQAEGKSRREALRCLKRHLARVVFRILLIARPSHPEIERLPLPNRETEMQPLRLAAASLPVSS

SEQ ID NO: 455264 - protein, 356 aa, unidentified
MQTQVTKKIDFSGKELFIGLDVHKKSWSVTILVDGTEHRTFTQPPDPESLSNYLHRMFPGGQYNSAYEAGFCGYAIHRRLNQLGIKNIVINAADIPTSQKDKLQKRDPVDSRKIARSLEKGSIHGIHIFNRELEELRSLNRTRFYLMRDLRRSKTRIKSFLQYYGEPIPVEFDNNQWTLKFVSWLKQVKMQTMSGQDAFSNLISSYEYHRSQLLTLSRQIRERIREYDRELYTLLKSVSGIGPLTASALITELGDINRFTNIDQLGSYVGLIPRIRESGETTHTGGITFRCNTFLRTLLIESSWQAIRMDPALMQYYHKHLVNNKGHKVVIKVARKLLNRIRYVMKNRQPYVTGVV

SEQ ID NO: 455265 - protein, 415 aa, unidentified
MVERCAGLDVHRDNVVATTRVPGQGRRRFEQQTQTFKATLPGLADLAGWLAEAGVTLVGMEATGVYWKTVFQALEDRFECWLLNAHHLRNVPGRKTDVKDSEWICQLVQHGLVRPSFVPPPEIRRLRDLTRLRTAQNNERTRTIQRLEKVLQDAGIKLSSVASKSYSKSARAMLEALLSGVTDPEQLAELSRGKMRAKIPQLREALASRFTIEHHGVMVAQLLAHIDTLDTELEHLTERIELVLAPHAHLLELLSTIPGVQALAAQVLIAECGLDMSVFPTVGHFASWAGACPGHHQSAGHRKSGRTRPGPGWLTSQLTECARAAVRTKETYLASHYAQLRGRRGEQKAIGAIRHDLLVAYYHIVRDQVPYRDLGPNWQRKRYSVEHRARRLQRQLEALGYSVTLEPTEPTQQAA

SEQ ID NO: 455266 - protein, 366 aa, unidentified
MKKQTSEVISGEGLVKYVRRVLNLGLDVHYWQVTVAMQEDGGRIKSAGKMGHPEFLNWVLKKLEEGWEIYSCYEAGASGYWLHRKLVELGVKNLVVVPKAMGRGGKKQKTDKRDAGELCDSLDRYLRGQKKALSVVAVPTEEQEEKRALIRYHRQIMKDRGRCEARGKGLLCAQGIEVRGRWWQGDTWLALTSDPRLKDWMKEQLVGWRSKILSTDEEQRALRQRIAALAPAILPKGVGAYSAAVLHYELRGFEHFKNRRQVGSITGLCPGVHLSDGRGKEGSINRCGIGIVRWTLVEMVWRLMIWQPQYPPVRRLAAGFVKSKRAKKRLVVQAARRLAIDLWRLSTGQTTPEKLGLVMQSNPPAN

SEQ ID NO: 455267 - protein, 338 aa, unidentified
MDHYVGIDLHSTNSYIAIIDNDNRRVFKKKTKNDLILVAQALKPYQEQIKGIVIESTYNWYWLVDGLIEEEYKLHLANPSAIKQYAGLKHSDDVTDAFHLANLLRLGILPTGYIYPKEERPVRDLLRKRLQLVQQRTVQILSFQNLIARNLGKSMNVNAVKKLSEDDVAQLFQEEHLVVAGKASIATILFLSGRIQQLEKKIHKVAKLKSEYKLLMTVPGIGKILALTIMYETGPIERFAKVGNYASYCRCVGSKRISNDKVKGKGNRKNGNKHLSRAYVEAAHNALWHYEYVKRYYQRKMSKTKTVVARKAIAHKLARACYYIIRDQKRFDPTRVFV

SEQ ID NO: 455268 - protein, 356 aa, unidentified
MLNDKKYIGMDVHKESISIAVRDGAGKIVMECVIETKASMILQVIDGLRGDLHVTFEEGTWAAWLYDLLKPHVTRLVVCDPRKNASMKQGNKSDKIDARRLAELLRMNHLNPVYHGEHGLRTLKELVRSYLTLTKDTGRVMSRVKAIYRSWAIPCTGKQVYAPQHRAEWLAKLSEPGVHRRAEFYYQQLDALRTLRREVRRELLEESKKHPVWKQLCQIPSIGPIRAAVLLGILQTPHRFRTKRQLWTFGGLGIETYSSADHRYVEGQLERSKKPVSIRGLNENCNHDLKNLLKGAAIVASSKPGPFQEFYAALVAKGIRPEMARLTLARKIATIVLIVWKRGVSFDAQHLQPQTA

SEQ ID NO: 455269 - protein, 340 aa, unidentified
MEHIAAVDLHSDNGYYGIVEPDGKRIYQRRLPNDLPRVLRELEPFRQTLRCIVVESTYNWYWLVDGLIENGYKVRLANPGKFEKYNDLKYSDDKTDTFFLTEMERLNILPTGYIYPPQERELRDLLRRRMLLVHQRTCHLLSFQTLLSRQTGGSLNSNAIKALDVEDIERVLPEQSSHVRLSGQTNLAIIEFLSQRIRLLEKAVLKSAKLRPEYEKLQTISGVGIILALTIMYETGDVGRFAGAGNYVSYCRCAKSSHVSNGKKKGEGNRKNGNKYLSWAYVEAANHARRHCEEAKKYYQRKLAKTKNVVATKALAAKLCRGAYFIMRDQVAFDVKKMFG

SEQ ID NO: 455270 - protein, 474 aa, unidentified
MKKHKQAEAKTKSEAIKSIGEHEPDSAGIDLGANEIWVAVPADRDQKPVRQFGAFTRDLMAIVQWLIQSGVRSVAMESTGVYWIALYQLLEEAGLKVCLVNARHVKNVPGRKSDVRDCQWLQYLHSVGLLLGSFRPAQAICASRSIYRYRQNLLSMAAQHVQHMQAALDQMNIKLHHVIDDLTGVTGQAIVAAILNGQRDPVQLAQLRDKRIQASEATIAKALEGDWRKEHLFVLARAWAQYQEVQKQIQDCDQELWNYTRELEACTKVIKPAKVMRLKPQLMGAELVNNPPTKKRARRKASKNQPEGPWQQELERFFGVDLTAIPGINVLTALTLMTELGNDLSAFKTEHHFASWLCLCPDNETSAGKVLRRRTRRSQNRVRQALRMAASSLHHDKSYFGDKYRRLRARLGAPKAITAMAHQLARLIWALITRQLPFDANVFAYHEKLHQQRRLKHLAASARQMGYQLSPLAA

SEQ ID NO: 455271 - protein, 366 aa, unidentified
MKKISTVQVLGNEISQEQKLTIGVDLGDRWSFYCVLDEAGKIILEQKLATTPEATKQTFGKIPRSLIALETGTHSPWLSRLLTELGHEVIVAHAQKVELITKSNRKDDRHDARTLARLARIDPELLGPVRQRSAKAQIHLTVIRARAELVSARTALVNAARGLVKSYGERLPKCGTYQVNEKLAEGVSAELRDVLAPLLREVESLNERIKEYDERMEKIAKELYPEVFLLKQVKGVGTQIALTYVLTIEDPYRFQKSREVGCFLGLRPGRRNYGQSEPQKHISKEGDRYLRTMMVQGAHYILGPFGADSDLRRWGLKLAERGGKNAKRRAVVAVARKLAVLLHRLWVGGEAYEPLRNSQKAMRAVA

SEQ ID NO: 455272 - protein, 546 aa, unidentified
MSLSQNASLNPHPLCAPFASDTVSKVIPHRRGGPSEGPLAADVNNFAAVKKVSGEKVLRPSHHGTGRIAPGGTRSFAPHPKRISQSLPVHSAAPVETSERTKAFEAPGIRPTHDGAEMHQRKETSMKPWNEITHYAGFDWARAHHVVVVLDSKGQMVEDFEFDHSLEGWKRFQEKTAAWPNLAVAIETNQGIVVDQLLQRGYAVFPVNPVAAESYRKRKAPSGTKTDHVDGWGLADALRVDGHGWKQLQPVDPVTQQLRLLCKDEVALIQQRTLLVNQLQQALVEYFPAALEAFDDWTHPATWDFVLAFPTPQRLVHAGKRRWEKFLHSHKLWRPETTEKRLTIFAAADQFTASDPILNAKSQLALSLCKLLCTLEQQLEAYREKILALFNEHPDHDLFGSLPGAKQKLAPRLLAAVGVDPARYGSHNVLQCLAGTAPVRFQSGQINKVKIRWACDAFLRHTVHLWANCFRKVSSWGQVYYDKKRQTGMSHACALRCLGQRLLKILFKMITDKKPYDAEFHARNQQKHGSWVLKLISADPTPNPGQ

SEQ ID NO: 455273 - protein, 407 aa, unidentified
MRLLVGDDWAEDHHDIEVMDAAGQVLARARLPEGVAGMARLHELIGLHLGEDAEGAQVVIGIETDRGPWVAALVAAGYLVFPVNPRQASRYRERHGVSGAKSDGADAHMLADMVRTDSHQLRPAAGDSPQAEGIKVLARAHKTLIWDRTRQIQRLRHQLREYYPAALAAFEDLAAPDALQLLARAPDPARAARLTRAQVSAALKRARRRDITGKADAILATLRSSQLGQPPALTAAYAASARSLIALITALNEQVKTLQGQVEAHFGQHPDAEIYLSQPGMGAILGARVLGEFGDDPHRYADGNARKNYAATSPITRASGKKKVVAARFIRNDRLIDALMSQAFSALTASPGARAFYDELRTRGIEHNDALRRLANRLVGILHGCLKTRTVYDEATAWSHRASERAA

SEQ ID NO: 455274 - protein, 337 aa, unidentified
MKYSGIDLHSDNSVVSVLDEEDRVVVERRLPNDLTKIVELLMPWREEMAGVVVESTFNWYWLVDGLQAAGFKVHLANTTAIKKYEGLKHSGDQTDARYLAHLLRLGILPTGTILAPEQRALRDLARKRMQLVRSRTTHILAIENIIARQHGARISSNQVKQLTPEAVDRMALPEDVALAIKSNVAVIGTLCAQIGLLEKHLQQKVGMRTEYGLLTSVPGIGQVLATTILLETGSIDRFASAGNFASYARCVGSVHTSNGKKKGEGNTKNGNKYLSWAFVEAANFALRYCVEAKRFYERKKAKTNNVVAIKALAHKLARACFHILKEHQAFDVTRCFT

SEQ ID NO: 455275 - protein, 312 aa, unidentified
MTEIICGVDVSKRRLDAHLAPAGTFASFSNDAAGIAELAAFCRQHSVELVAMEATGGYERTAFLLLWEAGIACALTNPRSVRRFAEAMGILEKTDRLDAGVIARFAIAKGLKPTSPPTPGQQRLNALVARLRQVTDDLTVHKQRRSIAMNDEMRSSINEVIVVLKRQARTLEGEIASLIDDDPLWSHLDAALRTTKGVANRTVARLLAELPEIGIYSNKAVVKLAGLAPLAHDSGAKAGKRHIRGGRAGIRSIMFLIAGIVCRFDESLAAFHRKLTAAGKPKMVARIAIARKLLVRLNAKARDARERYALAT

SEQ ID NO: 455276 - protein, 368 aa, unidentified
MGIVVALDVHRKQITYKTLERETGEVKRGRIAPAARADVRAWLARFAGCEAEFALEGTTGWRFVVEEIERAGHRAHLVDPAETAAKRGRKRRAKTDSADCDLQLRLLCAGELPESWIPPAHLLELRTRVRMRKTLIDQRTAWQQRLQAQLFHQGVPAGLRPRTRAGREALVRAELSPAGRELVSLALRMIDAIDRELAPLDRQLCSFARRQPGCRALIARLYGVGPVSATAILAELGDARRFARSDDAVRHSGLDVTVYQSDEKRARGHLSHEGPELLRWALFEAALSGRPRRLARPRLLLAGCRADRSQPGLPLGCAQALPARAPHPARARRRRARPRRGRPARRGGDRSCRLTTPAHARACPSSRR

SEQ ID NO: 455277 - protein, 341 aa, unidentified
MQITTIGLDIAKNVFQVHGIDGDEKVVVRKQLRRNQVIGFFRDLPPCLVGLEACATSHYWARELARLGHEVRLMPAKDVKAYIKRNKNDAADAAAICEAVRRPTMRFVQVKSADQQAHLMQHRARDLLMHQRTQLINALRSHLAELGIIAPQGREGVKELLAIIANEADTQLPNDARASLIVLAAQLQALQTTIGAIEKRIVVQHRANKESKRIQTVPGIGVIGASAIVATVPNPKIFRSGRDFAAWIGLVPRQMSTGGKPKLGSISKQGDRYLRRILVVGAVSVLRRAKLNPEKFPWITRLLARRPFKVVAVALANKMARVAWALMMSGKTCRAAWFAAA

SEQ ID NO: 455278 - protein, 411 aa, unidentified
MELLCDRVAGLDVHRDSVAACVRLPGPRGGAVTDKERFKTTTAGLGRLAGWLAERQVALVAMEATGVYWKGAYYALERDFEVWLCNAHHVKNVPGRKTDMSDAEWLADVAAHGMVRPSFVPPPPIRELRELTRYRKTQIDARVAEIQRLEKVLQDAGIKLTSVASKVLTQSGRAMVEALIAGERDPGRLAELAKGKLRPRIAELTEALAGHFGSHHAVAARRILDHLDFLEATVTALTEQIDARTRPYAAVFELLLPVPGLDRLTIDVVIAETGADMDRFPSPAQLASWAGLCPGNHESAGKRRRVGTPPGNQWLRRALVEAARAAARTKDTYFAAQYRQIARRRGPNKAAVAVAHSLLDLIWHLLRTGECFQDLGDDFFVRRRDPARETRRLVHQLEQLGYTVTLATAAS

SEQ ID NO: 455279 - protein, 519 aa, unidentified
MTCSALCGEHLTIRSSAVSSALPSGAGDFFGGAMLFVGDDWAEDHHDVEVVDEDGRVLARRRLPNGLDGIAVLHALIGEHLPEGWADWEPAQVAGMVKVGIETDRGPWVAALVAAGYEVFAINPMSVARYRERHSTSGAKSDSADAHVLAEIVRLDRAHHRPLAGDSDQGEAIKLTARSHQSLIWDRTRHVLRLRSALREFFPAALQAFPDLDAPDALELLRRAPDPDQAAQLSRSTISAALRRANRRDIDDKTTRLQAVLHAEPLRQPTVIQAAYAAIVTSEVAIIETLNTQISQLGEVVGAHFGRHRDAEIYASQPRLGAILASRVLGEFGDDPHRFVDAKARKNYAGTAPITRASGKKKIVLARYARNRRLGDALQQWALCSMRGSPGAKAYYQQLRDRNIGHQAALRRLANRLVGILHGCLKTGTTYDEHTAWDHHTKCPASRSWQGFGGWKCRGGGVGQAHVHVLGPVPGDGLVRPDLVVLDPVFLGVLGEHDGVVDLVDVEPLVLQGAEAAFA

SEQ ID NO: 455280 - protein, 411 aa, unidentified
MDVTYERCCGIDVHKRSIVACLRCGKKQEIRTFGTTSKEIRALAKWLWDEKCQMAAMESTGSYWKPVYNLFETSHLGVMIVNARNMKNVPGRKTDVKDAEWIADLLQHGLLSASYIPKREQRELRELSRYRKSLIAERARELNRLQKMLEGGNVKLSSVVSNINGKSSRSLLQKLLKKDAPLQKDEVEESLHGALRHKVEDVMQALDGFLTPLQKQLILQVVDHIDDMTKRIGQMDKLVKQYSSGYEDAIEKLDEIPGIGRQSAETILAETGLDMSRFATEKHLSNWAGLSPGNNESAGKRQSGRTTKGNATLKTTLIQCAKAAIKKKDSFLSAQYDRLVVRRGAKRATVAVAHTMLIAIYHILKLGEPFIDLGADYYNKFNKERKINSYLTKLKKLGWQPETATFSAAST

SEQ ID NO: 455281 - protein, 414 aa, unidentified
MFAVGVDVSNGRSTVAVLQTKTSTLMKPFEIPHTAEGFASLAGKLAGLDGEVRIVMEHTGRYYESFARAMHSAGFFVSAINPLAIKNYQDGINIRKVKTDKADAMKIARFALDKWEILPQYTPMDTIRYDLKTMHRQFQLSSKTKTALSNNLVALLEQSYPGANRYFDSPARPDGSQKWVDYVDTFWHVDCVARVSQNAFVERYRKWCKRHGYNFSQQTAIDLHTDARQKFALVPKSDTCKLLVREAVSQLNAVSRTVETYRTEMDRLASQLPEYETVMAMTGVGKSMGPQLMAEIGDIRRFPHQKSIVGFAGTDPIKDDSGDKVSDSKPSSKRGSPYLRKTLFVIMSILLQLHPQDDPVYQFLDKKRSEGKPYYVYMTAGMTKFLRIYYGKVRDCLKEQGLWEQTSDAPGMAD

SEQ ID NO: 455282 - protein, 359 aa, unidentified
MFKDSTTYIGVDLGDKQSHVVILDSNGEMIEEARLPTTRSAFQRKFSRLPGCRVAMEVGAHSRWASHLLEDLGHDVLVANARKLRAIYSNPRKGDRADAETLARLGRLDPELLSPIHHRSPQAQADLAVLRSRDAVVRSRSLLINHARSVVKSCGARLPSCSADSFAHKVAPDIPESLRPALAPILDTIACLTQQIRAYDRTIETLCSERYPETKQLRGINGVGPLTALAFVLTLENPDRFRKSREVGPALGLVPRRDQSGDKDPQLRITKTGDSYLRRLLVGSAQYILGPFGPDCDLRRWGLKLAERGGKNAKKRAVIAVARKLAVLLHHLWKTGEIYDPSCQSLKLANEPVVALAAA

SEQ ID NO: 455283 - protein, 485 aa, unidentified
MAKRKMSTFERLQRGKWSREQRKELAQKLEAADLTIVHPDAAGIDVGNESHFVAVPAGRDAQPVQEFGSWTADLQRMAAWLKACGIRTVAMQSTGVYWIAVQEVLEQAGLKVFLVNARGTKNLPGRKSDVQECQWLMKLHTYGLLANSFRPPEEIRAVRTIWRQRDRLVQDAGRAIQQIQKALTTMNIRLANAISDVSGVTGLAIIRAILKGERDPRELAKLRHPCIQASEEEVVRSLEGHWRDDVLFELKQVVEGYDFYQRQMGACDEELQKYLAVLPDRRRESAAVGADPGPTKGTKQRHRSKAERKGKTRRKNQPGFDLQAELHRTFGVDLTRIDGIDVMTGQVILSEVGPDLSDFPDEDHFASWLELAPRRNITGGKVISQKSRESRNRVANALRLAAESLSRSDSYLGARYRRLRGRKEGKKAVKAMARHLACLVYRLLTKGQDYVDRGAAYFEKKRTEREMIGLQRKAAEYGMRLVPVA

SEQ ID NO: 455284 - protein, 383 aa, unidentified
MRKIQETLQAQSATTQDIMYIAFELSNSTWRLAFSDGNKKRHVTIKARDLKQLEREIEKAKRRFGLKDNVQIKSCYEAGRDGFWIHRYLLSKGIDNLVVDSSSIEVNRRKRRAKSDRLDAENLLRLLMRYHGNERQVWKVVTAPTVKEEDARHLHREIETLLRERTRYRNRIRALLVQHGLDVKNPSRKNFLKVLNTLRSWDGQALPESMKARVVREHERLKMIEDHIKLLKKEREQRVKSKETASLRQVAQLRELCGIGVNSSWIFVMEFFGWREFRNRREVAALAGLTPTPYDSGGSQREQGISKAGNKRIRTMAVEIAWCWLRFQPHSKLSRWFNERFASGGSRMRRIGIVALARKLLISLWRYLEHGVIPEGAIIKSAS

SEQ ID NO: 455285 - protein, 347 aa, unidentified
MKFYNQQHKHYCGIDLHARKMYICILNQNGKTIVHRNIKTDGEKLFEIIFPYLEDIVIGVECMFSWYWIADFCSEHHIPFILGHALYMKAIHGGKTKNDKIDSYKIARLIRGGNFPVAYPYPAEKRATRDLLRRRMYLSRQCGQLVAHIQNTNTQYNLEPFAKKISRKYNRDGVSERFQDPAVRKSVEVDLEVIDHLNIVLSKLEWHIEKTARQHDHRTLYLLRSIPGVGQILAMVILYEIDTIGRFPAAQNFSSYARLIRPEKESDGKWAGKGNRKIGNHHLKWAIKEAAILFLRSSDEAKNYVARLTKKNNKGKALGIFTHKLGRAMYFMLKNKEAFKMQRFFGA

SEQ ID NO: 455286 - protein, 324 aa, unidentified
MKVQHIIGADLSKTTIDLFLQSRLQIENTKIGFQQMMNWFKQQNINASEVMIVMEHTGLYSYCFENFLHEHHIAFCKVNAYAVKRSMGLVRGKSDSIDARRLANYGSKEKLSIEPQLSKELQRLQMLYSTRERLVRHKAALLNAVSEYRNIGLAASDLIRTTHTRVIKSFEKQIEKLQNQMDDIVKNNPSIKGNQNLLQSIKGVGKVLSIATIIKTRNFTRFQSARKFACFCGTAPFENTSGSSIRGKTKVSQLADKTMKTLLDLSAKSAIQYDKELREYYLRRIKSGKSKMSTINIVRNKILYRMFAVIKRQTPFVENYLQTA

SEQ ID NO: 455287 - protein, 347 aa, unidentified
MKKPRYFVGIDVASATFTSAVGSMGEKWQIVMKPVQFANEYDSFSKYLKWLQEHDVKPENCVICMEATGVYNEVLAHFLKANQYAVAIEPPLKVKRAFRPEGHKSDPVDSCQISEYACRFWDELSLWAPRQEVLEQIKTLLATREQFVVEKAGHQNSLLALKRKAIRTPLAEKMHEKAISELKEHIHQLEEEIQRLIDHDPDYRNTVTLLISIPGVGLLLAAHMLVTIQSAPMPLSPKSLAAFIGICPYEDSSGTSIKHKPTSRHYGPPGLRKLLFLASLSISMHNLQFRTYFLRKVQEGKPKKLVINNIANKLLKIMVAVMRTNTAFIANYRSVNPGLLKMALTKS

SEQ ID NO: 455288 - protein, 428 aa, unidentified
MDELNRNRLEEFRQLRQEVRHSEEYLIVGIDIAKDQHHAFFGTAMGKTLLRRLVFSNDHEGFRKLLDHAEALRVRHGLKKVVYGMEPTANYHKPLGEYLIILGRTVVLVSGVTVKRNRESLDGRWDKHDAKDSANVADLISQGKCLYYEHPSAELRGLRGLLSLKRRLKKQEHGYRVRIRNHLIAQYFPEMDRDYERLGAEGISIVRWCLPASEIAQLDVDPFIERVTSRRIRMEKRRRLEALWEKAAESIGCDGVPGVEHEAKVMVEGLRQIREMIKETEQKIEELCKQFPEYQYLLTIPGFGPDVSAKVLGAIGDPDRFENGKQVLKLAGLDLSADRSGKNSDKAIPEISKRGKADLRYALYQAALVASTKNQDFMLYYARKLEGRQKEKGIQTKMWVKLSAKMLLIAWTLMKKKEAFDPTYLNME

SEQ ID NO: 455289 - protein, 370 aa, unidentified
MKKIAQFVGLDVHKDTVCMAVAPGGPGLLVHELGVVPHDVPKVVQRILELGPPECLQVAYEAGPTGYGLCRALEAAGVRCIVAAPSKTPVRSGDRIKTDRRDAAKLARFLRSGELVAVAPPDRETEALRDVVRAREDVVFAQRRARQQLSAFLLRHDRKWTEKSSWTEAHLAWIRSQIFESEAQMQVLEDYVAEVRRLTARLDEATERVEHFAEAFEACRPLYGALQTLRGVGPIVAATVVAEVGDLRRFPSASKFMSYLGLVPSERSSGPRTSRGSITKAGNPHVRWKLIESAWHSRHRPAHSIALERRSKTAPQEVRDIAWKAQKRLHKRYWAMTGRGKRAQTVVVAMARELAGFVWAIGQVVPRPAR

SEQ ID NO: 455290 - protein, 347 aa, unidentified
MKHSAGLDVSVKDTAICIVDEVGKVVRETKVVTEPEAIIALLTSAGLEYARVGLEAGPLSQWLVNELAEAGLPVICVETRHMKAVLTAQQVNKSDRNDARGIAQMMRVGLYKPVHVKTLASQQERMLLTTRKLLRDKLQDMENELRGTLRNFGLKVGVVSPGCFEARIRELVAGRLRLEMIVAPLLAVRRVLREQLAKLHKMVLDQVRRDPLCRRLMTVPGVGPIVALTFRATVDQAQRFARSKTVGAHFGLTPRRFQSGEMDYDGRVSKCGDAMMRTALYEAAQVLLTRTQRWSWLKAWAMQIARRRGAKKAIVALARRLAVVMHRMWIDGTEFHWRKETDAAAAA

SEQ ID NO: 455291 - protein, 396 aa, unidentified
MTTIGIDIGGRSHAVARCRDGLARADREVLRVSQSRAGFAALDAWLEGQPERVALVTMESSGHYWMPLASHLRRQDVPVAVVNPLAAKYFAKSRLARTKSDPADARSLAEMGMRDQPVVRDPLAGVELRQAARFAMTLVEEQAKVCQRLIRLVELGFPELGELFDDPTCRTAREVLRIAPTARAAVRRRTSTLADANAGPGHRRLGQARAERLQAAAAESIAVPELDAEVAFEVRLLLDQYDLLEGQIEAADARVAELLDGETARRLRTIPGVGPAIAATLIAEIGDIDRFTDFDQLLAFAGVHPAERSSGRKGANPETAWRMSKAGNSHLRAAAYRMAVVGVVHNPVIAAHYARKRAAGKSKMNALGHCMRKALSLVWGVWRNGADFDPDWGAAT

SEQ ID NO: 455292 - protein, 410 aa, unidentified
MFNIGIDWSDKSHSFCILDDAGAKLDAFEIPHGLDGFETAHKRISKRAASPEDARIAIETKDSLIVDFFLELGYSLYFLNPKQTDRFRDRHRMSSAKSDGFDAYVLADAVRTDSHLFNTLSPLDERSLTLRVLTRTREGIVRRKVAISNELTAALKRYFPVALELFGSLDKPEAIGFLLAYPTYAQARTLSESRIHSILAKQGLSDKIAANHAKVIYDKLRQPQPTPAASVTRAYPIAVKSLLRQMLDTLRELDAIERDIRDNYSNHPNKELLESLPGIASTLGPVLAAELGTDIARFVDVKMLKAFAGSSPVTERSGKYCEIKYRRACNWRVRQALHLASQSAITCCPWARELYDRLRSQGKSYGRALRAVANQLIEILYMVLTRRTPYSEEYHLLMKSLHSKTTPVLT

SEQ ID NO: 455293 - protein, 394 aa, unidentified
MKLVGIDVGKNSHHFCVMDKETGEFNVTPSSFSNSKEGFDFLINSLKPYSKKSVLIGMEDTGHYHVALLKFLLNNGYTVALINPKTTDLTRKMEGGITKNDKLDTITICDVLDTPERKKQYRITKVDRFDLYEQRQLTRHHHNLKEELNLYCNRLQKSIDLVFPEFNTLFSSKYGIVYMNLLKTFGSAEAIASTDIRTIRKCFEIKGRGGRISLTAEKLKECAKNSIGISSEVETIQIKHLVSQITLIKEQIAEIDKKIEEFSITNNSPILSIPGISHFSGTSILAELGDIGNYSKPSQIIKFAGVAPYHYESSQYNAQHTAITKKGSKYLRKTLYQIILPVINNNPVFKKYYRLKISQGKGHRCAQGHCIRKLLRIIYHLLETGQSFDPALLR

SEQ ID NO: 455294 - protein, 387 aa, unidentified
MAQVNDLSRSLTAFDPISTLVVVVEMSKASWLVSGVVPGIERQPLKKLEPDATALLRLIERWRNEAMRAGRPISRIALAYEAGRDGFWLARWLITRGIEAHVIHSASVAVSRERKRAKTDRLDAAMLMRVFLGWLRGERGHCGMVVIPTMEEEAARRPSRERESLVNERSRITNRMKSALARLGIRGFKPHLRKAPERLAGLQTAEGTGLPANVIEEFRRDMARLALVREQISSIEKTRAERLEGAPDTGPHAMVRLLARVIGIGIETADMLVREILSRKLRDRRAVARYAGLTGSPDESGLKRREKGLAKAGNARVRRGLIQLAWRFLMFQKDSALARWYRTRTEGPSGARKTTMIVALARKLLIALWRLVTTGEVPDGVELRPAA

SEQ ID NO: 455295 - protein, 389 aa, unidentified
MKIFVGIDIAKLNHFAAAISSDGEILIEPFKFTNDADGFQLLVSKLESFDKNSIIIGLESTAHYGDNLVRYLVAEFYQVCVLNPIKTCQMRKNNVRKTKTDKVDTFVIAKTLMMQDDLRFITFFDLDMMDLKALGRFRQKTIKQRTRLKIQLTTYVDQVFPEIQYFFKSGLHQNAVYALLKEAPSPKEIASMHMTHLANLLKVNSHGHFTKEQAKELRILAQKSVGANDSAISIQITQTIQQIELLDSQLEKIEAEMTDIMKFNDSVIMTIPGIGYINGGMILGEIGDIHRFSNPNKLLAFAGLDPSVYQSGNFQAKTTRMSKRGSRVLRYALVNAAWNVVRNNATFKAYYDAKRAEGRSHYNALGHCAGKLVRVIWKMLTDEVEFNLE

SEQ ID NO: 455296 - protein, 345 aa, unidentified
MEIRAIGIDLGKSMFHLAAVDARGQVLERRKLSRVKLLQYTGTLRSCLIGMEAGAGGHYLGRRLLAQGHDVRLMPAQYVRPYVKSSHKNDILDAEGIDEAVQRPTMRFVPLKTPEQLDLQALHRVRDRLVARRTSVINQLRAFLFERGITIRQGRRHLEEQLPQILEDADNDLSARMRALLRGLQEEWKTLEADIARVEEEIERLAAHDDACQRLAEIPGVGPLVATALVAAVGNATSFAKGRDLAAWLGLVPRQSSTGGRTRLLGISKRGNPYVRRLLILGAHSVLISPRRERHGFGRWLLALQPRAHPNVVVVALANKLARIASAVLTRQERYRTTLLAGVSA

SEQ ID NO: 455297 - protein, 387 aa, unidentified
MPQPNDLSRSLVALDQDSTIIAVVEMSQSSWLVAGMLPGIERQPRKKLEPSAERLLGLLHRWRDEAVKAGRKITRIALAFEAGRDGFWLARWLRARGVEAHVIHASSIAVSREHRRAKTDRLDTELLKRGFLGWLRGERGHCTMARVPTIAEEDAKRPNRERDCLVGERTRIVNRIKSTLARLGIRNFKPTLRKSAERLASVHTPEGVPLPPNTLAELQRDMARLGFVVGQIRKIEDARQKRLEQQHETGPHAMVRRLARIVGIGVETADLLVHELLSRPMRDRRAVARYAGLTGSPDESGARRREQGLARAGNARVRRAMIQLAWRFLMFQKESALALWYHARTTDSRSGTRKAMIVALARKLIIALWRFVTTGELLEGVVLRPAS

SEQ ID NO: 455298 - protein, 427 aa, unidentified
MKHNNVNRYAEFCQFRREIRGSVEYVIVGIDVAKERHHAFFGTATGQALLKRLLFDNSAGGFSELLERVSQLKTRHGLSKAVFALEPTGNYHKPLANWLLEQGQLLVLVSNHAIAENRQTLDGRWDKNDTKDSANVADLVSQGKCQFFEEPDADLLELRALLSLRKRLKKQGHSIRMQIRNGLVARHFPEFDRHWGSCLTENLAIVRWCLDPRKISAMSFSDFLSLVTTRDRGQRQERRLRAIHKVAASSVGCPVNEATVFEAQTLVERFHDVHRRIEQTEAQIETVCRRFPTYRRIRTIPGFGPYVCSQVLAKIGDPHRFKVRKQVVRLAGFDLNAKRSGKRSQTAVPVISKRGNTDLRYALYQAALIASYHHAGFRALFTRYLKGREKERGIRTKMRVKLAAKMLVIAWTMMRTETDFDPNLLAV

SEQ ID NO: 455299 - protein, 414 aa, unidentified
MKRPLFLGVDVHRKTNTFCMMEASGAQVVPRFTLENNRPGTERLIRKVCEIMQADGFSELRVAAEATGWYWFHFFETLRNDPTLQNWPVELFAFNPRLTANFKKSYEDLDKSDPIDAYVIADRLRWGRDLPRSFAYDEKLLALRFLTRYRYHLVHQLASEKAYCTAILYLKASEYTRPDKQAFGNLFSAASRAVLQEFASIEEVARLPFEELVEFLDQAGKRRFADPANNAKRLQQIANDSYHLPDALQPSINQVLRLSLQHIRHLENLIQRLETAITEQMQTIPNTLHTIPGFGLVFSAGILAEIGGVERFENNEAKVAKFAGFKWRQTGSADFQAEETRLTRTGNAYLRYYFCEAAFVVQMWDHEYAAYFQRKLKEVRLHRHKRAIVLTARKLVRLVVRLLATNQPYQPRRL

SEQ ID NO: 455300 - protein, 336 aa, unidentified
MEITAIGLDLAKHVFQVHGVDVDGTVVEKRRLSRGQVLNYFAKLPPCRVGLEACATAHFWARELCRLGHDVRLIPPQYVKAYLKRGKNDAADAAAICEAVTRPSMRFVPIKSEEQQAVLVMHRSRDLLVRQRTQLINALRGHLAEFGLIEAQGPSHIRRLLESMRADRTVPDLAREILDLMAATLDAVDAQIGSIEVRITAWHKANPTSQRLATIPGIGPLIASAITATVADPASFRSGREFVAWLGLTPRQKSTGGKQRLGRITRKGDQYLRRLLIIGAQTVLLRSKAAKANPWIQALLARCARLKVAVALANKTARIVWAVMMRGDRYRQVAVA

SEQ ID NO: 455301 - protein, 386 aa, unidentified
MRQPNDLSRSLAPFDQDTTLIAVIEMSQSSWLVAGIVPGLERHPLKKLAVDEGSLLRLLQRWRDEAIQAGRRIERIAVAFEAGRDGFWLARWLRGHNIEGYVIHPTSVAVPREHRRAKTDRLDTELLKRAFLGWLRGEPDHCNMAAIPTTEEEDGRRPHRERESLVAERTRIVNRMKGCLARLGIRGFKPTLQRAPKLLSTLRTPEGTPLPPNALAEMGRDLARLHFVEGQIREIETARLERLEQAPTEKSHAMVRLLARVIGIGIETADMLVREVMSRNLRDRRAVARYAGLTGAPDESGSKRREKGLARAGNARVRRGMIQLAWRFLMFQKESALAQWYRSRTADARQGTRKSLIVAMARKLLIELWRFVTTGETLVGVEMRPA

SEQ ID NO: 455302 - protein, 342 aa, unidentified
MATTIGIDPHKGSHTAVAIDSNENVLDEIRVRSCSTQTVRLREWADRFEERTWAVESAHGLGYLLAQQLVAAGENVIDVPPVRASRVRVLGSGRSQKNDPNDARSIAIAALRADDLAAVRVDDHSRVLKLLSKRHRDLGRLKNKACCRLHALLLEMVPGGAGFRIASVTRVNATIDSFEPVDAMGRQRQEIAYELAADIGRYDELLDASKHRISTALAASATSLTTIYGVGPITAAVIIGQSGNIERFKSKDHYASYNATAPVEASSGPKVRHRLNQRGNRQLNWAIHVIAITQLRHDTVGRVYYDRKVAEGKTSKEAVRALKRQLSDVVYRHLVADARQQN

SEQ ID NO: 455303 - protein, 402 aa, unidentified
MKQDIAKAISQQKAAALDGAGGWSRYGGFIGLDVHKETIAVAIAMPGRDEPVYRGEIAHEPKALKKWLDRLNDEFGGAVLLFCYEAGPCGYGLYRQLLAAGHDCQVVAPSLIPKKPGERIKTDRRDALKLARLLRAGDLTAVWVPDAEQEAMRDLTRARDDMKSQERKARQQLNAFLLRQGHHWPSGKKRWTKIHFNWLESISFEQPWLQIVLQEYVDAVKAATQRVDDLTDQLMRALPSWSLAPVVDALVALRGIDKLAATVLLAELGDISRFDSPKQLMAYLGLVPSEHSSGGRRRQGAITLTGNRHARRMLVECAWSYRFPARQTMHLKRKAQHASEQAKAIAWRAQKRLCGRYRQLSQAGKNIKLVCVAIARELVGFIWDIVRHEMPRLEVQVAPAGR

SEQ ID NO: 455304 - protein, 412 aa, unidentified
MDIVHERAAGMDISKRDAKVCLRVPGARAGTYTSTVTTWGSTTGQILELRDFLEREHVTTVVMEATSDYWKPFFYLFEETLPVMLVNAKAARNIPGRKTDVSDAAWLAQLAAHGLLRASFIPPEPIRDLRDLTRARSTATRDRTREIQRLEKFLEGSGIKLSSVVSDLTGVSSRAMLEALIQGERHPEVLAGLAKGTLRSRIPALVDALTGRFKEHHAFMARLHLDQIDAQTRIIDALTDRIEEAMAPFRAARDFLATIPGVSLKVADVIIAETGADMTVFETPGRLASWAGVCPGSNESAGRIKSAHILPGNKYLKAALGTAALSVSRSKNTYLAAKYQRIKFRRSPMIAIVALQHSILTAVWHLLADGECYKDPGADYFTRLDPVKARTNAINKLNSLGYNVTLSPATAA

SEQ ID NO: 455305 - protein, 418 aa, unidentified
MLKIVYPICCGIDVHKKFVVATVGTTNKSGVTEYQTKQFSTFTENLHQLLDWLKSKNCINVCMESTGKYWHPVFNILEEYCDVVVANPKYVKGIRGKKTDKKDSVWLCDLHKHGLVPSSFIPPLLTRQIRDLMRYRFKLINFKSSEKNRIQNSLTVSNIMISSVVSDTFGVSSMKIINHILENPDVKDFDVSPMLHKSMQDKAETITKSINGNLTKPQADKMRVCLDHFDNIEKHIADIEKVVLALAQPYLPQIELILSMPSINDIFTAIAIIGEIGIDMSVFHSSKHLCSWAGLTPQNNESAGKKKSVRVSRAGVYIKPLLVQCANAAIKSKKFTYFKVRYDQIKKRRGHKKAIIAIAHMLLNCIYHMLDRNETFNYDLYKIDSKPKQTYAPQITEEMAVRYLQTLGYQIPDMRNTV

SEQ ID NO: 455306 - protein, 362 aa, unidentified
MRIIGCDLHARQQVLAMLDTTTGEVVNMILKHEGNNVREFYSSLPRPVLVGIEATGSMQWFINLMEELGIECLVGHPAQIRAAEPRKQKHDRRDADLILKLLAENRFPAIWLPSKELQDLRALLRHRHQWVRMRTRIQNALQSIALANGLRRGTALWSHDGQTQIASLPLAPHTAYRRSELQAMYEKFEAEIEKLNQRVEEQACQRSGARLLMTHPGVGPITALATEVFLGNPARFADSKALASYVGMIPREYSSGGRQRLGGLSKQGNPLLRFLWGEAGAHAARKDPELQRFYRRKLVQKGLGKASVAVARKLGIRLWIMLRDQIEYNEFCRRGQKQQKSSEACAGMPETPYGAKSHRSVD

SEQ ID NO: 455307 - protein, 346 aa, unidentified
MEHHVGIDVSLELSSLCVLDATGKVIREAKVASEPEALVAFLRGLNLPIARVGLEAGPLSQWLYDGLQEAGLEPVLLETRHVKAALSAMAVKTDRRDARGIAQLLRMGWYRSVHRKSVPSQEIRALLGARKQLQIKVIDLEQTVRGLLRGFGLKVGDVSRGKLPARIRELAAGHAMLEKIVEPLLTAREAMWREFAKLHREVLIIVEEDQVCRRLMTVPGVGALVSLTYRAAVDDPGRFAKSKSVGAFFGLTPRRYQSGETDVTGGITRVGDASVRTALHDAANALLTRAARFSTLERWALDVAKRRGMRRAKVALARKLATVLHRIWADGTEFVWGKDPAAAAAA

SEQ ID NO: 455308 - protein, 340 aa, unidentified
MDKLYGAIDLHSNNSVVVVIDEKDRVVYERRLPNELSVILGHLASYREKIQAVAVESTYNWYWLVDGLMEAGYEVRLMNTVAVKIYDGMKYTGDEHDARHLAHLLRLGILPTGYIYPKAERSVRDLLRKRGQLVRCRTAQLLSIENLVARNCGKRISSEEIRQLDDEQFLRLCNGDVSRSLAIQSNRTVLRCLDEQIALLEKTVLAQAKMKPAFEKILTITGIGKILGMTIMYETGTPERFKKVGCFASYARCVDSQRFSNGKKKGSGNSKNGNKYLAWAFVEAAHHATRHSEQIRQFYQRKKAKRNTMVAIKAVAHKLARACFHVLKDQVAFDVERAFA

SEQ ID NO: 455309 - protein, 426 aa, unidentified
MQYALPLVLPGVPAGGVCAGIDWATADHVACVVDMTGRVTDRFSAAHDKAGIAALITRLRRSKVTEVAIERGDGPLVDALLTAGLTVVVITSRQVKNLRSRFGAAGAKDDRFDAFVLADTLRTDRARLRPLVPDTPATISLRMAVRARRDLVRHRVAACNQLRAHLAVAFPAGITLFHDLDSPISLAFLARFGSQDAAAELDEQAIGAWLATIAVRGRPAPASVLHARLHAAPPGATGTDGAAQAGVTAALTATLTALSAQIKALETQIAGQLAAHPDRHIFTSLPRPGTVRAARLLAEIGDCRSRLPDAESLAGLAGVAPVTRRSGTRIAHGFRWAVNRQLRDAICDFAADSRHASPWAAAIYDDARARGKDHPLAVRITARAWTYVIWRCWHDGTAYDPAKHNALQAVLARHAAQTAGTRQQDQ

SEQ ID NO: 455310 - protein, 338 aa, unidentified
MEFKRIAIDTSKHVFTLHGVDTNERPVLRQELRRGRVEAFMAKLPPTEIVLEACAGSHHWGRVLGRLGHRVRLIPPQYVKPFVKRSKNDRNDAEAISEAASRPTMRWVPVKTADEQAAAIIVKHREMLVAQRTQTINALRGHATEFGIVVAKGDQNVPHLLELLSADAAIPAVARDMFVEMGRHIAELEGKIATLNRQLLEQHKAHPLSRMLAEVPGVGPITAVTMALMVNPTNFESGRHFAAWLGLTPKEHSTGGKHRLGKISKAGDERLRQLLVVGATAVVRVARAGSKSASTWLLRLLERRPRKVAAVALANKMARIIWAMMAHGEAYRRPPKTA

SEQ ID NO: 455311 - protein, 439 aa, unidentified
MPRSVGLDVHKQFIEACFIDEEGKQLHRCRVAVTRESIQAFVAKCLQPSDQVVMEATTNTWEVAELIRSRVARVAIANPLKVKAIAEAKTKTDKVDAGVLAQLLRCNFLPEVWIPDKTTRLLREMCAHRAGLVADQTRIKNRIQSLLAQRLIPIPLRVLFNGCGRNWLSHLELSTEDRAVIDGYLKVLDQIESEEISLRKALTQLSYGNEQIRLLMTLPGVGPAGAQALYAALGDWKRFKDGAHAASYLGLTPSTRQSADHCYHGSITKAGNSLARWLLTQAARQVAQHPGPLGVFFRRIRTRKNYNVAVVATARKLVTIAFLMLKNNEPYRYSLPGPTQRKLSAFRVEATGSRRPKSKLRLPMQRREPGTRVQSIPSLDEVYWSENLPPITKADALASGERRVLQQMRIADLPERLQVVQTRSYQSRKTPPVPKKKLL

SEQ ID NO: 455312 - protein, 389 aa, unidentified
MIYVGIDVAAEKHACCILAESGKVHKQFTFSNDISGFEKLHKALLAPSETKIGLESTGVYGNNLAEFLRRNGYETHIFNPLLVKKSIQATTLRKTKTDKSDAKHIAQYTKEHSQPNLEPSYHISELKSLSRGRFSLVRERSKVKTQAKSLLVQLFPEFSQAFSDVFGAAASAVLRQLPSARMIAQCPVDVLTDLLRTVSHGRLGKVKAELLIDLAEHSVGIQSMALELQMQMFLQQIDLFTLQINRYEVEIKSEMEKIQSPITTIPGIGSVLGAVILSEIGDIRRFATPAKLQAYAGVDPSVGESGTSVSTPGRMVKHGSHYLRWALCQAARCVSLYDPIFATYMKTKRDEGKHYGVACSHVAKKLTRVIYSILKNNTAYSLTYSQIGS

SEQ ID NO: 455313 - protein, 339 aa, unidentified
MTVKTVGLDLAKDVFQVHGISENGRVIFNKSIKRAKLLSFFETLPPCRVGMEACGSSHHWGRELHKLGHDVKLMPAGYVKPYVKRGKNDAVDAEAICEAVRRPTMRFVEIKTEEQQAILSIHRTRDLAVRQRTQMANMIRSLLREFGHILPIGIEAVTAFAKRHLDGDQPEVPKIANGMLGIQCYQFIGLNARIDGYSKMIEQHVLLNADARRLVRMPGIGPITASAIVATIGDAKQFRTGRDLAAWLGLTPLNKSSGGKERLGKITKQGDRYIRKLLVVGMTSRAVMAKRSPEKVDLWTAKIIADKPFRLATTAMANKAARAIWAMLTKKQEYRQPAF

SEQ ID NO: 455314 - protein, 366 aa, unidentified
MKKASTVRVNGNKIFKGHKLTIGLDLGDRWSNCCVLDEGGEVLLEQKLATTPEAMKQTFERIPRSLIALETGTHSPWVSRLLRELGHEVLVAHAQKVGLISKSNRKDDRHDARTLARLARIDPELLGPVRHRSAKAQIHLTVIRARAELVSARTALVNGARGLVKSYGERLPKCGTEQVSRELAAELRAELREVLEPLLKEIESLNERIKEYDARMEKIANESYPQVALLKQVKGVGTQIALTYVLTLDDPHRFAKSREVGCFLGLKPGRRDSGESQPQMHISKEGDRYLRTMLVQGAHYILGPFGEDSDLRRWGLRLAERGGKNAKKRAVVAVARKLAVLLHRLWVSGEVYEPLRNSHKAMRAVA

SEQ ID NO: 455315 - protein, 387 aa, unidentified
MPQPNDLSRSLVALDQNSTIIAVVELSQSSWLVGGVLPGIERQPCKKLEPSAERLLGLLHRWRDEAVRAGSNITRIALAFEAGRDGFWLARWLQAHGVEAHVIHPSSVAVSREHRRAKTDRLDTELLKRSFLGWLRGERGHCSMARVPTMLEEDAKRPNRERECLVGERTRIVNRMKGTLARLGIRTFKPTLRKAAERLATLHTPEGSPLPPNVSAELQHDMARLSLLISQIKEIENTRQERLEQEPETGPHAMVRLLARIVGVGIETADMLVNEVLSRPMRDRKAVARYAGLTGSPDESGTKRREQGLARAGNARVRRGMIQLAWRFLLFQKESALALWYRARTADSRLGTRKTMIVALARKLLIALWRLVTTGETLEGVVLRPAG

SEQ ID NO: 455316 - protein, 338 aa, unidentified
MDHYVGIDLHSTNSYVAIIDNDNRRVFKRKTKNGLEYVLQALEPYREQVKGVVVESTYNWYWLVDGLMEEGYRVHLANPSAIKQYEGLKHADDVTDAFHLANLLRLGILPEGYIYPKEERPIRDLLRKRLQLVEQRTAQILSFQNLVARNLGKSMNVNAVKKLNEDDVVQLFQQEHLVLSGKASIAAILFLSERIQQLEKIIHKVAKLKDEYKLLMTVPGIWRILALTIMYETGPIERFAKVGNYASYCRCVGSKRISNEKLKGKGNRRNGNKHLSRAYVEAAHNALWHYEYVKRYYQRKMARTNVVVARKAIAHKLARACYYLNSTANGTKWLGNRC

SEQ ID NO: 455317 - protein, 421 aa, unidentified
MKGLRTKRVNAVREGTLIATVDIGLASNTGYCTTVDGRSTKTFRFGNTKEGFEKFWCMTIASKNRFGCDEVLVGYESTGPYAEPLVHYLANKPVKMVQVNPMHTKKMKEVNDNSPLKTDDKDPRGIADIIRLGRALTIIIPEGDAAYLRRLNNARERHVGERTALLNQLQQLVFLIFPEFKTVLKDMKGKTAQYILKRYTTPEKIGTLSKEALGEEIWKRSRGKFGIQDAESLIALAQGTVGIQEGLAGMVMDIRHILLQLEAEERFMAEIEAEMEATLERIPCSARLLSIKGLGTVSVAGLIGEVGDFSKFRTQSEIMKLAGLDLYEISSGKRKGQRRISKRGRSLLRKILFYAAIQTIRKNGIMSEYYTRLTGRGMERMRALIAVSRKLLRIIHAIVRDNNDYMGQYQAPERRVFKKAA

SEQ ID NO: 455318 - protein, 338 aa, unidentified
MTCIGFDHHKKWTQAAAVDDQGKIIREMRVLNDNSSLKGFLKGLPQPLKGVVEAGPTWGWIYDTLTELGVKMIVANPSAVRAIAEAKIKTDKIDARMLASLLRVGLIPEVYVPTEEVRSQKMLWRERIWLVRMHVRLKNRIHRLLNHYHLEVPEFSDLFGAAGRRFLEELKLPEPGNRILNAQLKLLQSYRLQIEEVQRWAVKATQGHPNRAYLESLPGFGKVFAPIVALEIDDPKRFASPGKLASYCGLVPSLYSSGGKSWQGGIGKEGNHWLKWAFVEAAWAAIRSSAYFRVVYQRLRQRKTAQVSIIACARRLCEIAYHLLKERRCYEERPFRCA

SEQ ID NO: 455319 - protein, 353 aa, unidentified
MKRIVKQAVGIDVAQDELVVCMGRMHEDLTLELYSHKTFSNTAKGFELLTTWVSKLSNADVELNYVMEATGVYHESLAYYLSDRGDHLSIVLPNKISNYSRTLDVKTVTDKTASEAITRFGLERKLDNWEPPKGVYRSLRQLTRERDQVVVTRTIAKNQLHAEEAEAYPNKRSIARTKKHIAFLDKQEQEIKEELAQMIKEDEEVKRIVVLLCSLPGIGLLTAATILGETNGFDLIRNKRQLASYAGLDVKEKQSGTSVKGKPRISKKGNRYLRKAMHLPALTAIRHDERFKAIFARIVSKHGIKMKAAVAIQRKLLEMAYTLYKKQEKYNHEYLTKSEGKIAIEMQDLSIKN

SEQ ID NO: 455320 - protein, 345 aa, unidentified
MSISRVGVDIAKSVFHVHGVDRHDQVAWCGKYKRDKWLDAIVKRVPAGAEIGMEACSSSHHWARALQARGYRVKLIAAQFVKPYVKSNKNDRADAEAICEAMARPHMRFVTIKTVAQQDVQAAHRIRSELVQQRTAKANQIRGLVSEYGLVAPTGMGQLRATLPCWLEDAENGLTDDFRILLAGLADDLRYLNERIAAMTERIEQHALTDPVAKRLMTLRGVGTITASALAGALGDAKTFKCGRDFAASLGLTPRQHSTGGRERLLGISKRGDSYLRTLLVHGARAVVRYTGTKDDNLSNWLRHLTERKHVNVAIVALANKTARMAWAITHHDTSYDPDMAAQAA

SEQ ID NO: 455321 - protein, 422 aa, unidentified
MVLKGVPMALKIVYQICCGIDVHKTFVVACIASTNKQGVTTYKRHRFSTFTQGLKELLQWLLDNHCKDVCMESTGKYWIPIYNVLEKDCNIVLAHPKYVKAIRGKKTDKKDAKWIADLFKHDLVAGSFMPPADIRQLRDLMRYRFKLTCFKSSEKNRLQNCLTISNIQLGNVVSDTFGKSAQAILDKLLENPADTSFDLEPLVFRSLKKKLPELRDAIDGYITPEQAGKLKIIKAHYENLESRKAELEKLILALAAPYQQELTILQTAPGISSEFTAIGIISEIGTNMEAFPSAKHLCSWAGLTPTNNESAGKKKSVRVSKAGCYIKPLLVQCANAVVTSKKHPEMRNRYLRLRKRRGHKKAIIAIARMLLTALYHMLKNGENYNAELYQKSDLPPVDREITVEQALIITRNQGYKIKSATI

SEQ ID NO: 455322 - protein, 391 aa, unidentified
MISIGIDVAKDKHDCFIISAEGEVLADVFTIPNSMDGFQSLLQKIRSCSSPQDKIKVGLEATGHYSYNILGFLLDNGLATYVLNPLHTSLYRKSLSLRKTKTDRVDARTIAAMLLSDVGLKPYTDTAYHNEELKSLTRYRFDKVKERGRLKQSIARLVCILFPELEKLVPTLHTVSVYALLEEFPGAEQIADAHLTRLKTLLHDASRGRYGRDMAVDIRETARKSIGSVMPAKSLELRHTIHLIRELDAEIDEIETAIQNIMNELHSPITTIPGIGTRMGAMILAEVGDFSRFESPDKLLAYAGLSPSTYQSGQLKNCYAHMEKRGSRYLRYAIYNATKYVCLWDPTFAAYLAKKRAEGKHYNVAISHAAKKLIRLIYALEKSRDSYRLAA

SEQ ID NO: 455323 - protein, 343 aa, unidentified
MEHFAGLDVSVKETSLCVVDGTGRIVREVKVASEPEALLAVLKGPAYRFKRIGLEAGPLSQWLYSVLAEAELPVVCVETRHMQAVLKAQINKTDRNDARGIAQMMRAGLYRPVHVKTLRSQKLRMLLTHRQLLLSKAIAIENDLRGTLRNFGLKVGMVGTVKFETRIRELVENLPDLAVLVEPLLVVRRVLRQQIGLLHRHLLTIVRDDDVCRRLMTVPGVGPVVALTYRATVDVPARFKNSKAVGASFGLTPSKYQSGEIDRGGRISRCGDEMTRVMLYEAAQVMLTRTNKWSWLKAWAMQIARHRGMKKAIVALARRLAVILHRIWVDGTVFRWTREVVAA

SEQ ID NO: 455324 - protein, 409 aa, unidentified
MGKTLFVGIDIGSDTNVVRILDDTGKDVCGFNVSNDLPGAERLVERIVNEAELIDADKVKIGMEATNLYWWHLSQALHEAPELAAFAAEIAVINPKVIDGFKNIYTDIVKTDAVDAWVIADCLRFGRVRPTPPPDMTYAPLQRLTRFRYHMVSNLAREKNRALNLIFLKFSTYQKECPFSDLFGQASRAVVGNLTPDEIANMPVEELADLMLQHGNNRLKDVPEMAKVIKQAARNSYRLNPKMRDAVDVTLAMSLETIRFFESQQKKIDQVIAKELKAIPQTLDTVPGIGPVYSAGIVAEIGDISRFKNHNALAKFAGLTWRQHQSSKFTAEDIPLTRSGNYYLRYYLIEAANSVRVREPEYAAFYRKKFTEAKHHHHKRALVLTARKLVRMVFTLLSEGQIYKQRRLG

SEQ ID NO: 455325 - protein, 350 aa, unidentified
MRRPKDKLIAGIDLHGNNLVIGVMNQDGKRMVHRKLDCQLEQVLDLLKPHKAQLQSMAVESTFNWYWLVDGLQARGYPIDLANPAQIEQYSGIKHADDKHDAFHLAELQRLNILPKAHIYDAELRPVRDLLRRRTNLVHQRTALFLSFKSLYTRTTGQSMPLSQLKSMEPKAGKDLYEHPANQLIAQVQLEHIEALDRSISRIEKAVLGCAREIPFYPKLLTLPGVGKILGMTITMEVGDIARFRTDGDFASYCRTVDSRRLSNGKQKGQNNPKCGNKYLSWAFVEAANFAKRSDENCRRWYDRKKAKTSTVLATKALACKLAKAAWHVMAQETDYDAHRMFPELALKKH

SEQ ID NO: 455326 - protein, 405 aa, unidentified
MGRVFVGHDWAEAHHDVFVEDDTGRKLAATRLPEGLEGVRRFHELVATHVEEPGEVLVATETDRGLFVGALVAAGYEVIAVNPLSTSRYRERLSTSGAKSDPGDARVLAELARLDGHNHRRITGDSDLAEAVKVLARAHQTMIWTRTRHTNQIRSALREYYPGALDAFDDLASSDALSVLAIAATPALGRTLSRSKIASALRRGGRQRRIGERAAEIQAALRAEQLEAPPVVAEALGASVAALVAVTVELVAQIDRLEAELADRFDQHPDAKIIRSLPGLGMILGARALGEFGDDPNRFCDAKSRKNYASTSPITRASGKHRVVLARYARNRRLADVCYLWAFAALTASPGARAFYDERRARGDTHNRALRALANRLVGILHGYLTHGTPYDERIAWGHRTKAAA

SEQ ID NO: 455327 - protein, 406 aa, unidentified
MYRIAGIDVHKKMLAVVVGDVEELGEYRFERRKFATGEAELRALAEWFSSEGIQEAVMESTAQYWKPVWQMLEGVCKLHLAQAQSNRAPKGRKTDFADAERLVRRYVAGELILSFVPDPEQRLWRMMTRSKHQLSRDRARLRNQLEGFLEDCRIKLSSHLSDLLGRSGRKMLWALAEGANDSASVAALASGGLRASQAELTDALAAADTLDPLRRQILKLFLERVNLLDSQMDTLTKTAAEALREHQDAVQRLAHVPGLGADSAQQIIAEVGPKAATFGSAQSLASWVGCCPGREESAEISKSNHSPKGNRAMRRVLCQAANAAVKTKGSVFQDKYRRLLPRIGHAKAIWAIAHKLCRVVWKILHEVVSYRELGQFRDPKTNQQRANRLIRILRTLGYQVQITGAA

SEQ ID NO: 455328 - protein, 433 aa, unidentified
MLNPAAAAIDIGSEQLHVSIVGGSPKVFGATTGQLHALRDWLKENGVRTVAMEATGIYWLCPYEVLEEAGLEVVVVNGKYVKNLPGRKTDMKDCQWQATLHAHGLLKPGFVPPEHIRRLQDYLRVRADHVVMGGSHEQHMQKALERMNLKIHDVISDLTGTSGLKMIEAILRGERRAGELLALCDPQIQKKKAVALRAALEGSWKKEHLFALRQAYAAWQFYQQQIVECDQEIAQILKELAGPEDPQASQPPTAPKRGGVNTPQIAGLHSLLYRLCGGKDPTTLPGVADHVLLQLIGELGTDLQKNWTTEKHFTAYLGLAPGSRQSGKRRGSQKRSRNRAGRLFCVIARTVGRSVDKALGGFYRRLKGRRGGLVANLALARKLAELYWRLMVHGRAYVENGLKKYEEKVAMTEKWLLEKLARKYRLRLQPATA

SEQ ID NO: 455329 - protein, 378 aa, unidentified
MDVVHPRCAGIDISKRDAKVCVRIQGRGNTPTTSTVTTWGAMSNQILALREHLLTDRVSCVVMEATGDYWKPYFYLLEDTLTVMLVNAHDARNMPGRKTDVSDAAWLADLGAHGLLRGSLVPPAAIRELRDLTRARTALTRDRSRQVQRIEKVLEDAGIKLSSVATDIMGVSGRAMLAALIAGTATPAAMADLAQRRMRSKIPALTEALTGRFTPHHGYLIRMHLDLIDQYGQALADLDVRIGEAMAPLAAARELLISIPGVSRIVAEVLLAETGGDMSVFPTAAHLASWAGTAPGCNESAGRVKSTKTPPRKPVCENRPRDRGAGRVPYEGNLSLGQVQADRRPPRPDESACCSGAFHTRGDLEHAHQRRVLPRSRR

SEQ ID NO: 455330 - protein, 391 aa, unidentified
MNDVNGSVAYGGMDVHYKFSNVTWRDGVGEVVRRERLDHRDRAKLRAQLGRWPSGTPVVLEASFGWGWISDELEWAGLEPHLSNCYKVEQMRKARGLAKTNEKDADLLSLLPAEATRWWEVWRAPPSVRDRREWMRHRAGLVAVQTETKNRIHALFHRHGVFYEETTDLFGGRGRRFLQTLARDGRHAGGVLPPGALETLRGLMRLLVHLRAELATVAWHLHRRLVRDPLVRRLGGIPGFGPILSHTLEAEIGDIGRFRHHRRLASYACLAPWSKDTGEADPTRAPLGRHLGDRGNRTLKWAFIEAAHGAVRHGGRWRVMFDRATQGGKKNRGRGYIQVARELVKVVHLVWSRGVDYCETPPPRPGSGRPRRRRRTSRPGTGQPSRAMVPA

SEQ ID NO: 455331 - protein, 339 aa, unidentified
MKCTPVGIDIAKSVFQVHYVDEQTGEVVNRAVRRSVFLQHFVNRAPCLIGIEACSGAQHWARELIKLGHQVRLLPGRFVKAFNIGNKNDAADARAIWLAVQQPGKAVSVKTEAQQAVLALHRMRQQLVKFRTMQSNSLRGLLTEYGEVMGRSRAALDKAVPEVLARLSERLPAMLIESLREQYARLAELDAQIAQIERRLQQWMREDEAVQAIAQIPGVGLLTATAAVAGMGDPQAFRSGREFAAWAGLVPRQTGSGGKVQLHGISKRGDTYLRTLLIHGARSVLRHAKDPGPWVEQLGQRRPPNVVVVALANKMARTIWTMLAHGRAYQPGHISVRPA

SEQ ID NO: 455332 - protein, 355 aa, unidentified
MTSSKYIGMDVHKESISIAVRNTAGKIVMESVIQTKASVILEFIDGLRGEVQVTFEEGTWSAWLYDLLKPHVTKLVVCDPRRNALLQEGNKNDRVDARKLAELLQNNQLRPVYHGDHGLRALKELVRSYLTINKDLSRVMTRVKAIYRSWGIPCSGTRVYSSSHRAEWLEKIREPGVRRRAEHYYQQLDALRLLRLEVRKDLLTESKKHQVWKRLRGVPSIGPIRAAVLLGIMQTAHRFRTKRQLWTYSGFGIEGRGSANHQVVNGQLQRKKKPIEVRGLNKNFNHHLKNLFNGAAVTASTKPGPLQEFYAALLAKGMRPEMARLTLARKIATIVLIVWKRGVCFDANHLKSQTA

SEQ ID NO: 455333 - protein, 480 aa, unidentified
MALQWLCGVDCGGQEHSACFSDLSGKPLLRKTLRHATGELYHFAQELSKRGPGVVVIEGRRGLSAALERALEEAGVSCVQADPARLRRFRDEVLAQANKTDLDDAQAALEYGRMLADRLRLLPCQAEDEVVLRALSRQRDQLEAQRITALQHLRECLRQYAPEALSERVFFHLDCQSALALWERYPLPGQWRRLGEKRLRAFLARYAAKGAGARAHKLVGLARQHRPGLADEALAASVSLWAAQVSLLQRQVAEIEIRMEQAEANHSPAQLLGQIPGLSTITIAALLGEMGEVVAHGERAVAAYSGLGGKVHQTGTTLNTQRRRRRVNRRLKRAFMDLAWHLVQNQAEGAAFYARRRAKGRTHWQALRSLARQMIRIVVRMLNQGESFRRPERGPYLPEELKHLRGKQERERFMVSGAEPYLAEEKSSPQPLTRSGRVHRDPGGNFIPGLCQSSRKSKSCALSEQPQADWSGLADVCQRL

SEQ ID NO: 455334 - protein, 345 aa, unidentified
MEQISRIGMDTSKHIFQLHGVNAAEEPVLRKKLRRKEMFAFLEKLAPTVIAIEACGASHHCARLLQSFGHSVKLIAPQLVKPYLKRGKNDAADAEALCEAMSRPTMRFVPVKTAEQQAALMLVGVRDRLIRNRTQLSNAIRGYAGEFGLTAAKGKAHLDPLLERIQADESLPALARELFAAQAEEYAQLQAQIDQVDARLIAWHRADECSRRLIKIPGVGPIGAVLLKMKTPEPELFRSGRQFAAWIGLTPKDHSTAGKVRPGAITRAGDEALRSVLVVGATTVIQHAQRGGRPSPWLTELLKRKPPKLAAVALANKIARIAWKLMVTGENYAAKAAPATLPGAA

SEQ ID NO: 455335 - protein, 355 aa, unidentified
MKDDKYIALDVHMETTVACVLDGAGREVSAAVMATKADSILSFLQGLRGGLHVTFEEGTYSAWLYDLLEGRVAELLVCDPRRNALLQAGNKSDRGDAHQLAELLRAGLLRAVYHGSRSMRPLPELAHSYQALVEDRTRAMNRVKALYRSRGIDCAGRGVYRQAQRATWLGRLPEGPARLRAELLYDQLDHVGSLRRKARRALRAESRKHSACRRLREIPGLGAVRVALLMARVQTPHRFRNKRCFWTYLGLGLVTRDSAEFGLVGGRIVRRAKPVAVRGLNPNHQPQLKAIFKSAALAVIHRPGSFKDYYDQRVQQGHKPELLRLNVARKLAALTLSLWKKGGRYRAEAVKQRQA

SEQ ID NO: 455336 - protein, 400 aa, unidentified
MNSVGIDISKGRSMVAVMRPFGEVVVSPFEVRHTDSELSELAKLLKSLDGETRVVMEATGNYHTPVAWLLHGAGLYVSVVNAKLVHGYGNNDLRRVKTDRKDAVKLANYGLDRWLTLPRYIPEEDTRLLLKNCYRQYQQYSKVQTMLKNNLISLLDTTFPGMNRLFNTPARADGSEKWVDFAADFWHCGCVCECSEKVFMNKYQRWCRKHGYNFSERKALDIYTEASGHIGVMPMSDTTKLLVAQAVSQLRATSAALAVLKQEMQTLASQLPEYPIVMEMFGVGPALGPQLMAEIGDVRRFHSKKALVAYAGIDAPPNDSGDVTGRHKGMSKVGAPSLRRTLFLVMSVYLQNAPLDEPVYQFMERAEGKPYRVYMMASANKFLRIYYASVKAYLETLERF

SEQ ID NO: 455337 - protein, 344 aa, unidentified
MKITTIGIDLAKNVFQVHGVDERGHLVLRKQIRRDQLAAFMVNLPPCLVGMEACGSAHHWARKFQDFGHTVRLMSPQFVKPYVKSNKNDAADAEAICEAVTRPNMRFVPIKSIEQQAVLSMHRVRQGFVTARTAQANQIRGLLAEFGIVLPKGISAVRNQLMGRIDQAADRLPGVFLELMRRLHEHFAALDRQVSELEGQIKQWHRNCELSQRLEKIPGVGPITATALVTSIADARSFKNGRQLAAWLGLVPRQHSSGGKPTLLGISKRGDVYLRTLLIHGARAAILAATRHAKSNPWLSNLLGRRNPNIAAVALANKNARTIWALLAHDREFRADYVPRLAIA

SEQ ID NO: 455338 - protein, 416 aa, unidentified
MANLLCSPLMRPHIRRLWWLVPCHAGRGLDRLAVQSLKHGGRAVVEHTTTYVAFDNSKETLAVAIADGDARGEVRFWGTIANRAEAVRKLVARLAAKHPALSFCYEAGPCGYGLYRQILSLGHPCTVVAPSLVPTKPGGHIKTDRRDAITLASLFRAGELQAVWVPDADHEAMRELIRARLTAMQEVRRSRQLLLSFLLRHDRATPTRHHWTRAHRSWLARQSFAHPAEQIVFEELIQRIEVACARQDRHEDAIRSLLSAWSMAPVVTAIQALRGVALMSAVTLAAEVGDFGRFATPRQLMAWLGLVPKEHSSGSKVARGNITKAGNTRARRVLVEGAWTYRLPARMGEDITRRNDGLPEAIRAAAWKAQVRLCTRYRRMQNTGKPQKIIVVAIARELAAFVWAISRMVRPAATQA

SEQ ID NO: 455339 - protein, 339 aa, unidentified
MNLYAGLDLHSSNTFIGVLDPQFNRIFKKRVSNDLDLILKSLEPFRDRLKGIVVESTYNWYWLVDGLMDSGYACVHLANPCAIKQYEGLKHSDDQHDAFFLAQLLILDILPQGYIYPKEARPVRDLARKRLFLVQQKTAHILSLQSLLARCCGQRVSSNQLRKVTGHDLRQWLKEEHLVLSAQANLDNIVFLKQQIGRLETAIQKQVKLSEAFNCLLTVPGIGKILAMTIMLEVGDIRRFSHVGNFASYCRCVSTQRLSDGKSKGSGNRKNGNRYLSWAFTEAAQMARRFNSRFRSYYDRKAAQTNSILATRALSNKLARVCYYIMRDQVEFREELAAH

SEQ ID NO: 455340 - protein, 344 aa, unidentified
MKALKSHVAGIDVHKEMLAITVLIGELDGEPKEYQFESSTFTDDLMALGLKLKEMGVTDVAMESSGIYWKPVFNVFNPLGLKVVVANAAHIKNVPGRKTDMNDSRWIAELHRFGLIRASFIPDGEFQRMRLLSRHRTNLTEDLARVKNRIQKVLEDGNIKLSIVVSDIFGVSGLKVLKQIAGGYTHPNILITEVTTKIKRMEEMKKALTNCLTTEHCFVINVLMKQYEELKNRIEEGENELCKKVEPYAHLVEELDKIPGIDAILAMGIIAEASANMSSFKDERAFAAWSAVTSGNNESAGKKKRAKCRKGNPALRKMLIQAAQKATTARNPFIDLNTTNSAFA

SEQ ID NO: 455341 - protein, 410 aa, unidentified
MVKENFIYVGIDLHKETHTAVMIDCYNQKLGEITFPNRPADFPKLVTKVKKCNTDAKEVVYGLENAYGYGRPLAVWLIDKGYFVKDVNTAISHRQAKHRGAMYRKSDSDDAEAIALATLNMLDKLPDACPNDAYWSLGQLVHRRDNIMKQRTRLVNQLHEQLCIAYPSYKSFFNDISRPTALYFWEHYPSRKYLRGKSVEDLRKELVPVSHNRCSTKNCEKILDAAASDKVKNNAYQDARDMVTLSIVSDLQHYDSQLAEVDKMLEQMYKMLGCTLTTIPGVNVITAVKILAEIGDIKRFGNANKLAQFAGIAPLHLSSSGKGKDVATKQGNRRLQATIYFLAIQMVQVSSKGTPRNSVVRAYYEKRKAEGKTSQQALICISRRLISIIYGMLKNGTEYRMPVVESAGEK

SEQ ID NO: 455342 - protein, 404 aa, unidentified
MKVLYERCAGCDIHKKTVTVHVVVPEGGETRTYDTTTTALLELVEWLVGGRVTHVAMESTGVYWKPLYNLLEATGLTVFVVNAAHMKAVPGRKTDVQDAVWICDLMQHGLLKPSFIPLRPQRELRELVRYRISLIEERADEANRIQKVLEGGNVKLASVVSNVLGKSGRRILAAIAAGTNTPEELAAMADCRLRATREELVAALQGRLTDHQRMMLHLQLDHVRYLDRQIEALDAEVAKRLTPFDAQLGQLDTIPGVNLRVSEAIVAVTGTDMSRFPNADHLVSWGGMCPGSHESAGKRRNARTRKGNPILRSALTQAGQAAGHTKNTYLGAVYHRIAARRGRKRAAIAVGRRILEIAYYVLRDGVAYQELGANYYDEHKKDAVLRNAVKRLERLGYKVTVEAA

SEQ ID NO: 455343 - protein, 433 aa, unidentified
MSNFFYSPVIGIDVSADFSYTAILAPNGDIYKKSFKIKHDLNGFNHLVNEIKKVEEEFNMKTAIFMESTGVYHLSLFHYLNKYFDNTFVINPLVTKSNKNGDIRKVKNDKKDALSIATIGKFQNIKLSQQLSLDIFLLKNLVREYYKLTDTSSTFKKKLSADLRVIFPGYNTIFSDSTSKSSIELLSQYPTPQSILEAPKENIIKIFLNSSKKGIIWSENTYSKLFKVANEAKIIGLPLDGLTVKIASSITLIKTIQSEIDTLLQKINNFIQSETFPESIRANIELIDSIPGIGQLTAITIIAEIGDIDGFLKPKHLVAFFGIDSSVNQSGNFKGDDNKISKRGTRIGRRALYSVALASIRNNRNGVPINKVLLDYYQINLKGKKPKIALVAIMHKIINYIFAVLRNQTPFEQRDPKIHKQMFLENNSLNKVA

SEQ ID NO: 455344 - protein, 392 aa, unidentified
MRFAGIDIASEKHVVAVVDERSEVVVKPKAFSEDAEGYQKLVELLGAPGELLIALEATGHYWKNLFAALVAGGYTVSLVNPLRTHRFAGEDLARTKTDAIDALGIARFAAQKRPVATKMPDSATEELRELVRLRDRLVQDFGDRVRQLHRLVDLGFPEFTRYVRSLDSELATSILKDYPTAEAFVGVRPRALSNLKYDRVHFVGLELATQLIEAAKTSVGRHHGYAYRIQVKFYCEDLDVLRRRLKELDRDIETKLGEHEVGTLLTTIDGIGTQTAAKLVAVLGNPADFRNERALAAYIGAVPGLKLSGKATSMRASLTPIGNAALRTALYMPTLTAVKRSPWLRAFYQRLISAGKPPKVALLASMRKLITAIYSVAKNRKPFVPRPVEGTA

SEQ ID NO: 455345 - protein, 340 aa, unidentified
MMMIGIDPHKGSHTAVVIDSDEVVIDEIRVKTSADQIGELREWASAYPERVWAVESARGMGYLVSQQLVAAGERVIDVPAMMASRVRLLGSGKSQKTDPDARSVAVTALRQSGLAIVQVDDHVRVLGLLAKRHRDVARMKNKVACRLHALLMELAPGGLASEMIVNKAVSLLESVDATDRVTHQRVVIATELVDDIARLESQMKASKKRIRTAVAASGTTLGDIRGIGPIGAAIILGSVGDIGRFPTAGHFASYNATAPIEASSGDKKRHRLNPGGNRKLNHVLHIAAVTQLRYPSEGRDYFQKKSAEGKTTKEAIGALKRRISDVVYRRLLADARRHNS

SEQ ID NO: 455346 - protein, 332 aa, unidentified
MDKFYFIGIDVSKKKLDICVMYGSKVLIEEQVSNSTKVIAQAIKHIKKELDITNDMLIICAEHTGQYTYPLICATKSIDCKLWLENPTQIKYSCGMTRGKNDKVDARRIATYAFRFFDKMKCYVRPSEAIIQLNQLQAERSMYVTDLAKYKAILTDQSDFIPKDIYIQKAKRIKVLMASLQQAISVLEKKMNEVISASAMLSRQMSLLTSIDGIGRVIAMNMIVATEAFTRFENARQFCCYAGVAPFSYTSGSSQRSQNRVSLRADKSIKSLLHLAAVAIAHRKDGELKEYFLRKVEEGKNKMTVINAIRAKLVSRMFSVVKNDRYYLPVLA

SEQ ID NO: 455347 - protein, 400 aa, unidentified
MVNLGIDLHKTQFTVCVRVKGENEFEKYPTTPEGYATFLKKVAAWRKSGVRVQAGVESTGNTRYFRALLEGAGVEVTVINTLKLKVVTESVKKTDKHDAATIAEFLEKDMLPEARLCSRESEKYRRLLKVRTTLVRAKVVIKNQIHGLLTAEGLEDVRGSLQSKKGRQQALDTLDKCVNGLEAQPLVETIDQLDKSVKGIERQLRSLAEGDRVVELLMSIPGCGEISAWTIRAYTDDIRRFASSKKYASYAGLAPWVQNSNEVVHHGRITKRGPEELRTALVQVVMGIRRMKSKTSSWRMMHRYEAMKKNKGSGQAIIATARKLATIIWQMLTDDVEFEMGLMVDQKLAKKSETIKPSTKLAVDALAMANEKSVVTRIMKKNMKNPGVAREKKERSANLG

SEQ ID NO: 455348 - protein, 545 aa, unidentified
MKVLLINHFPLEGSGSGTYTKNIALHLQKRGHEVCVVFPENQPFSLLPGIRMYPVILSNRDTSQQNTFKTGINALKSDDIISSCGQRISCFYLCSQVYCAQTGTSALWDVTYEPDVEAMDRFLLISQQVVTFSSTRNVRNLNTRGAYTMYIVGIDIAKRKHEAAVIDGEGAVIIKPFSFTNNCSGYNRLLAMLTKAKLPLDEVSFAMEATGHYWLALFTRLQKEGFRVQVINPVQTNSIRSFYIRQAKTDPRDALLIAEVIRFGHFSESTLHPENIYELRELCRGRHAIVSMQADVKRKVVALLDQVFPEYETAFTNLFSDTSMAILQTCPTPKELSEMPLEELCHLIEVSSHKRFRMAKARELQELAHNSFGFAMAGDVFSTMIRLYAKHLVFLKQQVQEMDRKIAEIMDTLDTPITTITGIGPTLGAYILSEIGDISRFSSAAKLAAYAGIDPTMRQSGEYNGVRNRMSKRGSPYLRHAIWLAASSAVLHDPALKLYFQKKRDEGKPYMASVGHACRKMVSIIYAVMRDNKAYTPCIPNEISA

SEQ ID NO: 455349 - protein, 348 aa, unidentified
MLADQLDYIVGVDPHRDSHAIAVVHVQSGAVVFETTVVANSDGYGQALRLVDQHAPGRRAFAVEGTGSFGAGLTRFLTVRGERVLEVGRLRRERRSGGKTDALDAVRAARSVLTSERPATPRAGGERQALQALVAAREGAVNARRAGLCQLRDLLITTPEPLRSELRPLTRARLLQRLAATRPQSRHDAELRGSMLALRSIARRVLQLTAEERELAAEIETITRKLAPQLLDQPGVGPHAAAQLVLSWSHRGRIESEAAFARLAGAAPIPASSGQTTRYRLDRSGDRKLNRALHMILVTRKRSHPATIAYIQRRIQEGKTRREANRCLKRYLARSLYRLLEHGAPLAT

SEQ ID NO: 455350 - protein, 343 aa, unidentified
MEAYAGKQYVGIDLHRRRSVIVRTTESGEVLEAVRIVNDVQRLASVMARAGQCPEVVLEATYGWYWAVDALQAGGANVHLAHPLGVKAFEYRRVKNDFRDAQDLADLLRMGRLPEAWISPPAVRELRELVRHRAKLVRLRSGCKAEVHAVLAKCGVHVLMSDLFGVWGTELLDGLDLPAPYAARIASLRRVMDGLDFEIDVFAGLARGHMAHEPGYTAVQKIPGIGPILAAVFVAEIGDISRFASASQLTCWAGLTPKHHESDTHVRRGRITKQGSRLVRWAAIESVKTVPKGSVVGLLRERVADHRGRNIGSVAAARRQLELVFYALRDGHVRALEQPREAA

SEQ ID NO: 455351 - protein, 328 aa, unidentified
MYFIGADISKLTIDTAYLNEATKRWSKPCKVRNIKRGWNELIRMVEKQTQARCDSICVVMEATGVYHLKVAAYLFRAGLKVIVVNPGRAAQYAKSQNQDNKTDPLDAKSLQCYGSNLEKFHLFTPDSPEISELKTLLSRMRQLDKDLQRERNRLEKCGFLEASALLCASLKRSISIIIKEQKWVQAHIDKLIVSNAKLKHDQQLMCSIKGIGKITSQWLLPLLSDQRFNSAREVGAFLGLAPCHKTSGTTLKTRGKLTGRGNADLRARLFMPAMSAATNDPEMKAFYQGLIAKGKPKKVALTAVMRKLAHLCYGVVKNQTPYKANYAT

SEQ ID NO: 455352 - protein, 341 aa, unidentified
MHISILGIDLGKNSCSIVGLDLAGKVSIRRRMRRETVIAFCSKLPACVVAMEACCGAHHMGRALAAQGHTVRLMSPEYVRPYVKAQKNDNRDAEAIAEAATRPTMRFVALKSEEQLDMQTLHRVRDQLVGERTSLMNQIRSLLLERGHIVPQGRAKLAARLAELLDGQARVLSPRIHALLLDMQNRWMALDQRIADFDKEFAAHAYSDAHARRLLTIPGIGALNATALVAAIGDACSFARGRDLAAWLGLVPRQATTGGKPRLLGITKRGSKYLRKMLIQGARAAMPALTRVDTRLGAWLRGLLARAHSNIAVVALAAKMARIVWALLRHECTYDAAAVPA

SEQ ID NO: 455353 - protein, 344 aa, unidentified
MDYFAGLDVSVKNTSVCIVDDTGRIVREVKVASEPDALLAVLKNGAYRFKRIGLEAGPLSQWLFSALAETGLPVICVETRHMRAALQSQINKTDRNDARGIARMMRAGLYKPVHVKTLRSQKLRTLLTHRKLLQSKAIAVENDLRGTLRNFGLKVGVVGTVKFEARIRGLVADIPDLAGLVEPMLIVRRVLREQIAVLYRRLLAIVKDDEVCRRLMTIPGVGPVVALTYRATVDVPARFRNSRAVGAAFGLTPSKYQSGEINRSGAISRCGDDMMRMMLYEAAQILLVRSTRWSWLKAWAMQIVRRCGLKKAIVALARRLAVIMHRIWVDGTEFRWSRQEAAAA

SEQ ID NO: 455354 - protein, 345 aa, unidentified
MKKVIAGMDLHSNNVVIGVMDLDGQRLASRKLPCELKEVVKFLTPFKKRLERVAVESTYNWYWLVDGLQALKYPVVLANPAGMEQYSGIKHADDTNDAFFVAELLRLAILPTGHIYDAQLRPVRDLLRRRLMLVHQRTALMLSFKSLYTRTTGQELTLSKLKELEIKEAQELYEHPANQLIAGMQIKHIEQLTESVEKIEKAVLGSARELPYYEKLATLPGVGRILGMTITMEVGDIKRFADPGHFASYCRTVEAKRMSNNKKKGENNSKCGNKYLAWAFVEAANFARRYDEQCRKWFERKVARTSNVIAIKALACKLAKAAWYLMAEGTDYDPKRMFGQPAKAK

SEQ ID NO: 455355 - protein, 356 aa, unidentified
MAVYVGIDVHKHYCQAALMSEQGQVTHELKFENTTKGASDLLTLAKSVDPQIKAVLEPSANFWIRIYDKLEREGVEVKLSNPLRTKAIAEARMKTDRIDAKTLAYLLRGDLVAESYVPTRKNRERRALIRHRASLIQMRVDIKNRIHALLDKHELTHAYTDLFGKESMEWLRSLQLPSPDREILQSSLRVTETLTEQIREMDIQVAKDATSEEKAKLLMTMPGVDYYAAMVLLSEIGDVHRFSSDEKLVSWVGLAPQVHQSGETNWTGHITRKGSKRARWILGQCAQSARQHDPRMREFYERIEQKHGSQKAVVAVARKMLAIMYVMLIRNEPYHGENPELTERKHKRLDALANSA

SEQ ID NO: 455356 - protein, 362 aa, unidentified
MNDATTTKETNVTVGLDLGDRFCQMCVLDEVGEVTEEGRVATKPEALRRRFSGTDRLRIVLEAGTHSPWVSRLLTECGHEVIVANPRKLRLIYQNDSKSDRVDAEYLARVGRLDPALLSPLTHRRAETQADLALVRSRTALVRARTGLINHARGTAKSLGFRLPACASDAFARKVEPCVPEELLPALAPALSCIARLSEEIRTLDERIEEMARERYPETSLLSQVPGVGTLTATVYVLTVEDPGRFPRSRSVGSYLGLRPRQADSGMLSPQLRITKAGDEHLRWLLVGAAHYILGPFGADSDLRRWGLKLAEQGGRRAKKRAVVAVARKLSVLLLRLWQTGEVYEPLRNARLRGEVLDPMGA

SEQ ID NO: 455357 - protein, 351 aa, unidentified
MNEITTVGVDLAKEVIVVCAGDAAGRAVFFRQFSFAGFAEWAVNLPPCLIGLEACSSAHHWARFLTQHGHTPRLMAAELVEPYRLSRRAKNDRNDAQAILCAVRQPNMRFVTVKSIDQQAMLAWHRARAGYLEERKALLNRTRGLLAEFGLWLGRSAAVLRRQLPSLAEDERLPARFRPILTHVIEHLRQIDARIDECDVPIREHTRHSEHAKRLQAVLGIGNITASALLATIANPRDFRNGRQLSAWCGLVPRQHSSGGKARLGVITKRGDAYLRGLLTQGARSTLQAARKREPLRRSRLEHWIVALHDRVGYHKTLVAIANKHLRTVWAILAHDEHYDPNAWRRHPRAA

SEQ ID NO: 455358 - protein, 388 aa, unidentified
MYYVGIDIAKYKHDCFIFTSEGEIVLESFTFENTREGFSKLKLILDALDHSQKIKIGLEATGIYGKNLKLFLSSIGYDFDELNPLQVKRFTNALSNRKTKTDKIDASQIARFVSTGASRTYVYSSYHTEALKQLTRARNSLIDERSKHQTVITGILDVEFPEFKGFFNNKFTDTALYLLNKYKTVKRISRLSHNDCVLLHNKSRVISTSRFEELRESAKNTCGHHFDYNDSLIFANLQIIKCLNNEIDKIEKEINSIMSTINSPVVSIPGISAISAASIIGEFGDFARFDNAKQLCAFCGVEPSIYQSGTSYHEGKMVKHGSSNLRRTLFNAVPYIIMHNETFKTFYNKKRSEGKAYRVAQSHVVKKLLRVIFTLEMTGSTFDPSKLY

SEQ ID NO: 455359 - protein, 324 aa, unidentified
MSTLFLGVDIAKDTFDVHFLDIHKPKRSKTFKNTIAGFKAMRSSLPEHEQLILGLESTSIYHLELAHWAHEQGWTVFVLNPANARKHHDVISNGHKTDALDAWALAEYVRQCHHLLRPFVPEAPIWRQARELNHRRKALIRQRVRETNRFETVSKDNKFLKSSLKRTVRMLEKEIVRVEKALESLMREDEAMSQQLDLSQTIPGVGEVLSKTLTVELGDLSQYANAKAMTAIVGLVPFEKSSGTSVRGKKKKRRRGKERVRAVLYMAALSAFRHPDWADWIEKRQSNGKTGMKLVVAVMDKLLRICFGVVKSGLPYDKNIAFAT

SEQ ID NO: 455360 - protein, 402 aa, unidentified
MNAVGIDVSKGKSMVAIMRPFGEIVSSPFEIKHTTSDINSLVELINSIEGESRIVMEHTGRYYEVLAHQLSEANLFVSAINPKLIKDFDNNSLRKVKSDKADAVKIARYALDKWQNLKQYSVMDELRNQLKTMNRQFGFYMKHKTAMKNNFIGILDQTYPGVNTYFDSPARSDGSQKWVDFASTYWHVDCVRKMSQNAFIDHYQNWCKRKKYNFSQSKAEEIYGKAKELVPVLPKDDITKLIIKQAVDQLNSASATVESLRTLMNETASKLPEYPIVMAMKGVGASLGPQLMAEIGDVSRFTHKGAITAFAGVDPGVNESKKYEQKSVPTSKRGSSDLRKTLFQIMDVLIKTHPKDDPVYQFLDKKRAQGKPYYVYMTAGANKFLRIYYGRVKEYLASLPES

SEQ ID NO: 455361 - protein, 398 aa, unidentified
MLVVGIDVSKNKSTVSILEQSGKCLKKPFEVEHCKSSLNALSDLLFSFNQEVKIVMEATSVYHLHILYFLQSRNFFVSVVNPLMLKRWRTQNLRPVKTDKHDSIAIAKYGCEKWFSLQNFYPENETYSELKILGRQYAHYMELHISALQELNHIVDQTMPGIKTFFPIINNPSGKNKFADFVEKYQHFDKITSFSENEFIADYNSWAKQSGYFPNSKKAKTVYEKATDSITLIPFNKTTQFLIFEAVRVLREIDSTLHKILSRMVELAKTLPEYPIVKSMRGVGDKLAVKLIAEIGDIRRFRSGKSLIAYAGIDVIPYQSGKFNAENRKISKRGSSLLRKIGYEVMLCIKAHKPKISDIVYDFIVKKESEGKSKRAAKIAGLNKFLRIYYARIKELYS

SEQ ID NO: 455362 - protein, 357 aa, unidentified
MTQSNRISFKGQNIYIGIDVHLKSWSVTILSETSVLKRMSQGVDPDALHRFLISHYPEAEYYSVYEAGFCGFWIHDRLMELGIHNIVVNPADVPTMSSEKLRKTDAVDSRKLAVSLRAKQLKGIYVPDSETLEIRSLIRLKNSITKDMTRQKNRIKSQLRYLGIDIPAEYLEPHSNWSKRFLNWLKQVAMRTLSGRQALDILIMQFETLRKQKAEMTRRLRALSHTERFEETLELLMTVPGIGQTTGLALMAEIVDITRFANAEQLAAYIGMIPMCHSSGEHKGVGDITLRKHAILRSNIIEAAWVAIRKDEAMQLCYLNNCKRMVASKAIVKVARKLVNRIYYVLKRHQPYVNAVA

SEQ ID NO: 455363 - protein, 355 aa, unidentified
MTTVPHDEVRVTVGVDTHEDVHVAVAVDQLGRWLAETWIATNTGGFARLVGWASEFGVIDRFGVEGTGSWGAGLARWLRAEGLVVVEVDRPKRKHRRHGKSDAIDAEAAARAVLSGEATAVPKTGDGPVEMIRVLRLTRRSAVKNRTMTANQINALVITAPDALSQDLRPMSTRRRVAVATKFRTGDEPTTVLDATRYALRELARRYQHLTEQITRLDTQLDRLVAETAPELVAKVGVGTHTAAALLVTAGDNPERLAREGSFAHLTGTAPLDASSGKQQRHRLNRGGDRDANCALYQIALTRSSVDEDTKLYLKRRIAAGKTKKEAFRCLKRYIAREVHQILVRTPALQVALDT

SEQ ID NO: 455364 - protein, 347 aa, unidentified
MATTKVKRYTYFIGIDISRNKLDYAIMQGKSFLFHREAENNIQSINAIIEDLKILPRFIMTKAVFAMEQTGIYANHLLTVLKKTKANVVIENALHIRNSLGVLRGKYDKIDAIRIANYAYINRDNLKLWTAKRPAIEQLAYLSSLRLRLLETQLKLKTPLGEQKLFVKTKLHKIGTLLCSKSIQAIQFDLAEIETAMNDIVTSDEDLNWLMNIITSIPSIGPVTALQIIITTNEFKDIKSPKQFACYAGVAPFVRDSGTVKVKAKVSHIANKRMKSLLHICALGALRCDQELKRYYQRKVIDEGKAKMSAINALRYKLILRIFACVAQQRLYQKDYGRPFHNMLSIS

SEQ ID NO: 455365 - protein, 406 aa, unidentified
MNMNAVGIDISKRKSTVAILRPGGQVVVKPFDVPHLSTDFQSLEKLIRELDGETRIAMECTGRYYEPAARELSQAGFFVSAVNPQIIRNFQGQDNPLRKVKTDKADSIKIARYALDSWANLKQYSLMDELRSQLKTMNRQFDFYMKHKTAMKNNLIGLIDQTYPGANTCFDSPAREDGRQKWVDFIDTYWHVDCVRKISLNAFTDHYQKWYSRRKYNFSKSKAEEIYGKAKELIPVLPKDSFTKRIIKQAVDQLNAASQTVEQLRTLMNETASKLPEYPVVMAMKGVGTSLGPQLMAEIGDVTRFTHKGAITAFAGVDPGVNDSGDYSQKSVHASKHGSPVLRKTLFQIMDILIKTKPDDPVYRFMDKKRSEGKPYYVYMTAGANKFLRIYYGRVKEYLSSLPESE

SEQ ID NO: 455366 - protein, 465 aa, unidentified
MDVLYSHVAGIDVHKKQVTVTVRTPDPRRPVVRREKTRTFRTFYADLLAMGAWLAGHGVTRVAMESTGPYWWPVYVALREAGGPGLSIDVVNAAHVKAVPGRKTDVKDSQWLARLLEVGLLRGSFLPPDDVREIRDLTRYQSKLTEERSREKQRLLKVLEAAGIKLDVVASDTFGVSGRSMLDALVAGQRDPVVLAELARGRLRSKTDDLRLALSGRFTAHHGQMIGLHLARLDHLDQMIAQVQEKIGHCGMAGTGRPVPGAPAGLVAPFAEQIRLLCSVPGIGERVATVVISEIGVDMSRFQSAKHLAAWAGLAPGNNESAGRRRRAGHRKGNTHVQSILIEAALAASRTRTRVGARFHRLHRRFGGKANKTAAKKAAFAVAHTLIKVIWTVLCTGQPYTDLGHDYYTRRVNPEDHTRRLIAQLEAVSGKKIVLVDHDDGPSNGPGDSSGRDSPDTGHNSDAAA

SEQ ID NO: 455367 - protein, 352 aa, unidentified
MTLVGCDLHSRKQQVAVLVTDTGEVLEQELLHEGDAVERFYRALPRPVTVGIEATGYTLWFHAVMQKLGHTLLVGEAAKIRAMVVRKTKTDRRDAQHLLDLLKHERFPTVWMSDPTTRDLRALIAHRVRLVRMRTMVKNGLHAIALNQRVALGPSLWTKRGLAQLRALSLPPHTANRRADSLELLTWLTTHIDQLDAQIAEAAAADARAQRLLTHPGVGPLTALITVLVLGPAARFPTSKHVVSYVGLAPAIHSSADKYHLGKITKQGNALLRWILGQAAPLAARADGELRRAYFAVLHRRGRPKAKVALARKLLVRLYIMLRDQIDYEEFRRRGRVRRSRIAVNPVSATTM

SEQ ID NO: 455368 - protein, 348 aa, unidentified
MRSVGLDLHKVNTQVCEVDEEGTVVREVRIATGREHLAKLFGRRERLRILVESATESEWVARYLEELGHEVIVADPGYAPMYPHRVRSVKTDRRDARALAEVCRTGTYRKAHRCSETNRRVRRELTVREALVRTRSRYVSIVRSTLRSEGFRVRSGAASTFVARVEELELPGHIEKVIEPLQEQMNNLTAHVKEMDRALSTIAGTDEIIRRLCTAPGVGPVTATAFKAVVDRVERFESAHELESYLGLVPGERSSGEKRLRGHLTKRGNVRARWLLVEVAWVILRGAGGPRGRGLEAWSQRIAARRGKRIAAAALARRIAGILYAMWRDGTEFQAGKIRLPQGKLKVA

SEQ ID NO: 455369 - protein, 337 aa, unidentified
MSYLGVDLHTNSFTVCRRTKHGKDSIRTFQIIRIADFRKTLRKRDLLAVEATGNTAWFVSQVRDRVKKVTVVNPFQFEVIRRSVKKTDRNDSKTLAFFLSKDMLPEARMKTKENAQLHSLATTRDKLVKQRTALINKIHNVLNSYGIKFKKESLGSEKGLKSVWAYEWDVIVKIELEVLVEQIRSLNKSIKTLDKEMTDHGKKLKGHKSLTSIKGIAGRSATMLLTVIGDVNDFADENKLAAYFGIVPRVSDSNETVRHGRITKHGSKLGRTTLVQCTLVAKRYSPYLNRYYERIKSHRGSGKAIIATARKFLGIIYNTLKNDWVFEDFPNFVIANS

SEQ ID NO: 455370 - protein, 310 aa, unidentified
MEQICVGIDVAKDRLDVHIRPSGEAFTVSRDHEGLSTLADRLQALAPALVVMEATGGFEVTVVAALSAARLPLAVVNPRQIRDFARATGRLAKTDALDAAVIAHFGEAIHPEPRPLRDAQAQELAELVGRRRQVIEMLVAERNRRRLLRSNRLRERIDRHLANLNKELTEIERDLDETIRGTPVWREKEELLSSVPGVGSATARSLIADLPELGTLDRKAIAALVGLAPFNRDSGTLRGRRTILGGRACVRTALYMATLVASRHNPVIADFYARLRAAGKPAKLALTACMRKLLTILNAVLRDRRPWQNA

SEQ ID NO: 455371 - protein, 309 aa, unidentified
MEIVVGIDVSKERLDVAILPQEEVFAVGNDHAGIDELAERLKGIGVDAIALEATGGFELLAVAGLSAAGLTVLVVNPAQVRAYAHAIGRRAKTDPIDAAVIAAFVLATKPEIRPLRDAETQALSELVARRRQIVQMVVAEENRLRMALAKQAQKSIKRLLKALRRELESLDADLDSHIRKSPVWRVREALLTSVPGVGATTARTLLAELPELGSLDRRQIASLAGLAPWTRQSGKWKGKSFIGGGRGKVRAVLFMAALVASRYNPDLKAFRDRLVAAGKPKIVATVATMRKLLTILNAIIRDGRPWQNA

SEQ ID NO: 455372 - protein, 399 aa, unidentified
MAQPVWAGVDAGKADHYCMVINDDAQRLLSQRVANDEAALLELIAAVTTLADGGEVTWAIDLNAGGAALLIALLIAAGQRLLYIPGRTVHHAAGSYRGEGKTDAKDAAIIADQARMRHDLQPLRAGDDIAVELRILTSRRSDLVADRTRAINRMRAQLLEYFPALERAFDYNKSRAALILLTGYQTPDALRSAGGARVAAFLRKRKARNADTVAATALQAANAQHSIVPGQQLAATVVARLAKEVMALDTEIGDTDAMIEERFRRHRHTEIILSMPGFGVILGAEFLAATGGDMAAFASADRLAGVAGLAPVPRDSGRISGNLKRPRRYDRRLLRACYLSALVSIRTDPSSRTYYDRKRTEGKRHTQAVLALARRRLNVLWAMLRHHAVYHPATTTAAA

SEQ ID NO: 455373 - protein, 355 aa, unidentified
MNEYIALDAHKHYSLMERMDARTGRAVQQRIEHRPGAIRRALATCTPGTTVAVEAMGSWYWIIEEIEQAGLKPALVHPRKAKLMMGMINKTDKLDVHGLNRLQRNRSLPTVWIAPRPLRDLRELTRTRMTLTQHRTRVKNRLLSSLAKYGLEVAGYSDAFGVGARRVWPGLLGQLPEHTRWTCERLWEHLVLSDGQIAEHEKRLVGLLPTLPELGLVQTLPGIGTILSAVIVLEIGTVRRFASAERLASYAGTTPRVHASGGRTRYGRLRPDVNRYLKWAFIEAGNSIALHAGRKPDRHVSQLYRRLKQRKGHGKAVGAVARHLAEATYCVLSKRKAYRDPGLGRASEGVSAVSA

SEQ ID NO: 455374 - protein, 421 aa, unidentified
MNQLTATEYSAYVGIDWAAEKHDICVQAGADGGREFACISSQPEGIDAWARDLYRRFGGPIAVALELSKGPIVSALQKYDFFVLYPINPSTLARYRETFTPSGAKDDPTDAELAVDLMTRHPERFSPLKPQSMGMRKLIGLVEQRDTFVSDQGRLVNRLGHALRQYYPQVLEWFSEHNTVVFCDFLSQWPTLTQVKRARKTSLDRFFKSHHVHSAELIERRIRAIKTAMALTADAAVIEPHRLQVEILVEQLRITIKALKRFDGEIAVTAQKLPDYDLLFRPLPGAAKVLAPRLLAAFGEDRQRYPQADALQKYSGIAPVTKRSGKSTWVHWRWQCPTFVRQTFVDWAAQTINKSAWAGAYYRQQRAKGCSYQVAVRALAFKWIRILHRCWQDRTPYDESKYLEALRRKGSPLLKYLAHSA

SEQ ID NO: 455375 - protein, 356 aa, unidentified
MNEGTTRKGSWTIGLDLGDRFSQVCVLDAAGEVGARFRVATTRKGLEGGLARYPGARVVLEVGTHSPWVSHALEETGFEVIVANPRRLRSITQSDRKDDRADAEQLARLGRVDPKLLSPIRHRGLSVQRERARLTVRDGLVRSRVLLVNQARGLAKPLGLRLPKCTTEGFASRMRREGMVDAFPGMASLVAMVEQLTQSIRALEREIERVSQDHYPETKHLRQVAGVGSLTALAYVLTLEDPQRFRRSRSVGAYLGLRPRRRQSGEQDPLLRITKAGDPYLRRLLVQSAHYILGPFGPDTDLRRFGLRLMARGGRAGRKKALVAVARKLAVLLHRLWVTGAIYEPVRGGAAEADAA

SEQ ID NO: 455376 - protein, 408 aa, unidentified
MELLHSRCAGLDVHKDTVVACRRVEGGGHLDQEVRTFGTTTGELSRLSDWLGEAGITHVVMEATGVYWRPVWHILEGHFELILANAQHVRNVPGRKSDASDAQWLAELLAHGLVRGSFVPPSQVQEVRELTRTRKQLVRTISQNTQRIQKTLEAANLKLSSVVTDTLGVTSRLILKALVKGETDPEVLADLAQGRLKSKRSELVEALRGYVTEHHRFLIGLHLRTIEALEKEIERIEKRLGKLLKPLAEQEARLMTIHGVSTTTAQVILGEIGWAMERFPTVAALISWAGLCPQMHESAGKKKRSRIRKGASWLKTVLVQAAWAAVKTKNSYLRAKYLRIKSRRDATKAIVAIASDILQASYFILRDGVEYKDLGPDYYEHQDKNRAVRRHVKRLQALGYDVVIAPVA

SEQ ID NO: 455377 - protein, 349 aa, unidentified
MNEYDGRQFVGIDLHRRRTVIVRQSETGEQLGSTRIVNDPVALAREIGKAGVEPEVVLEATYGWYWAADVLAEAGAQVHLAHPLGIKGFTYRRVKNDVRDAADLADLLRMGRLPEAWIAPPEVRELRELVRHRAKLVTVRSGFKAGVHAVLAKQGLHLQVQDLFGPAGRVALAAAPLDRPYRARVNAYLRIVDTLDTEIELAGGWIAARLATDPGYRVIQQIPGVGPTWAAVFVAEIGDVTRFVSARHLCSWAGLTPRHRESDTTVHRGPITKQGSTLVRWAAVEAAQRIPPSAGWLVSTRSQITARRGRNIATVAVARKLLTLVYYGLRDGHIRALQPRPAETGTGAA

SEQ ID NO: 455378 - protein, 425 aa, unidentified
MKKSTYRTMAVQSVDVLTLLSVIAGRVVLALDIAKEAMVFAVADSAGKTHALVRFSHPKETSVFLHLAERFRELGREVHAVMEPTGLYGEALRHQLTLRDFVVYRVDPKRCHDFRAVLDGVSSQHDAKSCTLIAALHAQGISSPWRQRSDTEEQARALVDEHRLYAEPLEVLYGRMEAITAAAWPELNEMMEQRTSWHLRLMSKYPCAQDVARHRDEARAVLQHGGRGGLRKERVERVLDTAATTLGVPMSRGRRIVVQRTAERMLVLRKDVESVEKRLRELCASDAALGRLAAVVGPVAATALFAEVGDPEQYASAGALEKACGLNLREASSGKHKGKLHITKRGSSRVRHYLYLATLRLILSSSTARAWYERRSAHTAGHKMKAVVALMRKLVRALFHVARGAPFQVEKLFDLRRLDNTSRAA

SEQ ID NO: 455379 - protein, 394 aa, unidentified
MIYAGVDIAKTDHVIGAVDERGAEMCPPMPFKNTGAGLERAVAWLEGLAGSPSDVVVGMEATGHYWMACYSFLVARGYSVAVINPMQVKAVRKLKGLDKVKNDRVDAGLIAEALRIGRYDETRLATDEVASLRSLSRYLQSLRGMVAELKTQCICLMDAHFPEYAGVFSDMFGAGSRAVLSKSPLPFELARRRADSLARDIAEASRCGGKSSGYAAKIKAAAKSSIGVRLGQEAASFQVKSLIRQIEFADSECAGVEARLRSLLDEVEPLVLTIPGVSYVTGAQIVSEIGDVSRFRNAPALVSYAGLNSSVSQSGQFDSGGGPITKHGSPYLRRALWLAANRARQYDPGLRAFYDKKRAEGKPHRVAVTAVARKLCHIVFAVMRDRVPYDPGRE

SEQ ID NO: 455380 - protein, 313 aa, unidentified
MSFVGIDVAKAQLEFAVRPSGETGTVANDEADIQELVTRCQGLAPALLVLEATGGYEAAAVAALAAAGLPVVVANPRQVRDFAKATGQLAKTDALDAPILALFAERVRPAPRPLPDDALQALDALLTRRRQLLGMLTAERNRLLIAVPAVRRDLQQHIRFLERRVHEADGELHTAVKASPAWRVKDDLLQSVPGVGRVVSLTLLAELPELGRLSHKEIAALVGVAPLNRDSGTLRGKRLVYGGRAPVRTALYMAALVASRCNPVIRAFYERLRAAGKPAKVALTACMRKLLTILNAMARSGAAWQPARTFVRT

SEQ ID NO: 455381 - protein, 347 aa, unidentified
MVTLGGDCHKRTHTLVAVDDNGQQLGAKMVSAVSAGHLEALDWARQWAERRWALENCRHLSRRLEADLLLAGEVVVQVSPKLMAGARRSAREWGKSDPIDALAVARAALRESDLPVAQLEGKSREVKLLLDHRDDLVGERTRVQNRLRWLLHELDPNLNVPERSLDRKVVLKRVAKVLAVHRGVAADIAVEQLERVRQLTERINELEGQIRAVVSHLAPNLLELDGCAALGAAKLIGETAGITRFKTPARFAMHNGSAPIPVWSGNSARHRLNRGGNRQLNVVLHRIAITQMRLGGRGYDYIQHRRACGDTKKEAMRALRRRISDEVYRRMWQDSMKATSDQACAAA

SEQ ID NO: 455382 - protein, 311 aa, unidentified
MCSAVGIDSHKDDLVVAVHDGAQWRVKRTEAGLTRLTTRLDALGPDVVVLEPSGGYEQTVMDALHQQGIPVARVHPRQVRQYIQGIGVHAKSDRLDARMLALFGVETQPRLIPAPTETQQRVARLSAWRRTLRDDIVAKTHQRAERPDEVRASIDRVIAELERELAAVTATITDLVATAPEWARTREILRSCPGVGPGTVALLLAELPELGHRGAKEIAALVGVAPFTHQSGADAGHARIQGGRRHVRGDLWMPTLTAITHNPTIRALAERLRAKHKGFHCVTIACMHKLLTLLNAMVMKDELWHARETQP

SEQ ID NO: 455383 - protein, 412 aa, unidentified
MFKIFRKNCCGLDVHKTWIYACIGVTDTNGLTEYKQARFSSFSKGLKALAAWFAKYSCFEVCLESSGKYWIPVFNILEKTCFVTLAHPKYTKPQKGNKTDRKDAKWICDLFMCDMIKPSFIPSPEIRQLRDLIRYRSKLTNMMTGEKNRALNCLTVSNLKLDDVFSDVFGKSSRSITNYMLDHPGETFDVAPFVDGRCKTPVEEIQAAVDGAISPEQAVKLRQCLSHIDELEAHRNEIEREILLIAEPFSAVLDLLYTLPGLDKNPMTAIAILSEIGPDMSVFPSSKNLVSWAGCCPRNDQSASKVKSTRISRAGCYLKPLLVQVANALIKSKKHPEFKERYHRIKSHRGHKKAIIAVCKMLLTAIWNMLSKLEPYNPQGFLEHRPVNAKKVLTKSQALELLRLRGYTINDD

SEQ ID NO: 455384 - protein, 307 aa, unidentified
MSVFVGIDVGSDQLDVALTAGKGARQFRNTSHGWQALIAWLQPLAPQWIVLEATGQYDAGVLSALHEAGLPVTRINPRQARDFAKASGQLAKTDELDAQMLARLASVAAALHLRPHQPKAAWQKELAAYQQQRTHLQQMLLSERQRYLTLEPAWLRRQVRGTIAHLERRLWQIDQQLKAQIQAQPQLATLRTLKGVGEVTVATLAAHLPELGHLRGKAIAKLVGVAPLARDSGYQHGKRAVWGGRSVIRQVLYMAALTAVRHEPCLRDFYQGLRQRGKAAKVALVAVMRKMLVILNARMRDALLTAT

SEQ ID NO: 455385 - protein, 341 aa, unidentified
MNNIKKIIGVDIAKRVFQLHWIESGTGEIVSLQLKREQFLEYFANLVPSLIGMEACGGAQHWARQLQKMGHEVKLLPGKQVKPFVGGNKSDVHDARAIWTAMQQPGLKPVAIKSEEQQAVLALHRMRSQLVKFRTAQINGLRGLLTEYGEVMPQGKVGIKKAIAETLQRLSDRLPSVVIDTLREQWERVSILDKQVTDIERRLAQWLKQDPASACIFEIPGVGLLTATAAVATMGDAKAFKSGREFAAWLGLVPRQSGTGGRIRLLGISKRGDTYLRTLLIHGARSVLMHAKEPDPWVTELRHRRPLNVAVVALANKRARLIWALLANERAYQKGYVNQVA

SEQ ID NO: 455386 - protein, 392 aa, unidentified
MSQEGTQFRATSGEEPVMQNKVRFLGLDVHADTIAVAIAEPDGEVRSLGTIANRAESIRKMVKKLGSIEHLRACYEAGPTGYVLYWQLAELGVNCEVIAPTLVPMKAGDRVKTDRRDAERLARSHRSGDLTAVWVPDAGSEALRDLVRAREAAKQDQLRARHRLSKFLLRSGQRPAQGMKAWTQAYMIWVKQIRFSQVAQESTRLDYLTEVEHMGERVARLEKAIEEAVKLASPEIQEVVKDLQALRGIAQISAVTIAAELGNISRFEGARQLMGYSGTVPSESSSGKRRQRGSITKTGNAHLRRIAVEAAWCYRLRPGIGPVLRKRQDGVPEEIKEIAWKAQHRLHRRYCKLAAAGKDHRKIITALGRELLGFVWAIGTKAEAAVKLQRAA

SEQ ID NO: 455387 - protein, 320 aa, unidentified
MNQQPQWVGIDVSKATLDVYLRPSSKQFQVPNQASGIAQLIEQLQSFEIAQVILEASGGLELDAAQALQEQGFAVSIINPRQGRDFAKASGKLAKTDRIDASVLAHFGQAMQPAITVLSTANEQALQAAVTRRRQLVEMLTAEKNRQSKMRGKMQQNIDAHIEWLEQRIRELDSEIEQLSQSQAEWKSRITLLRSVPGIGKVIATTLVAALPELGQTSDKRISALVGVAPFNRDSGKYRGARTIWGGRASVRAVLYMGVLVAVRHNPVLRAFYTHLLAQGKAKKVALIACMHKLLRMLNAMIRDGKPWQPPAVADQAAHP

SEQ ID NO: 455388 - protein, 412 aa, unidentified
MRVLHERCCGLDIHKRFVVACLLTTSADGTGHKEVRPFSAMTNDLLALADWLRGEDCGPVVMESTGSYWRPVFNLLEEQCDVLVVNAYHAKAVPGRKTDVKDAEWLADLLRHGLLRASFIPAPAQRQLRDLTRYRIHLVDERARLINRLQAVLEDANIKLASVVTDVRGLSAREILQRLLEGETDAEALTELARGKLRAKRDALAQAVVGRLQEHHIFLLREQLAHLDYLDAAIARLDAELEARLAAEQEAMALVQTIPGVARRTAEVLVAEIGTDLSRFPSAEHLASWAGMCPGNAQSGGRRLSGRTRRGNAWVRRTLAEVANVVSRMKGTYLAAQFRRIAARRGKGRAVLAVGHSVLVALYHMLTRHEPYHDLGADYFDDRQRDHVQRRLVHRLERLGYVVTLAALTTSS

SEQ ID NO: 455389 - protein, 482 aa, unidentified
MAERKKSTFQRLQDGRLNRKQRKELAQRLAKDDPGLEIVHRDAAGIDIGNASHFVAVPADRDAEPVREFGAWTGALLQMAEWLKKCEIRTVVMQSTGVYWIAAHDVLEQAGFEVWLVNARGTKNLPGRKSDVQECQWLRKLHTYGRLRNSFRPPEQIRAVRTVWRLRDRIVSDAGRTVQQMQKALTKMNVHLANAINDVSGVTGLRIIRAIVSGQRDPRQLAKLRDLRVRASEEEIVCSLEGHWQSDVLFELEQALETFDFHQKQLAACDAQLQRYMAALPDREGVPAAEPVAEPKEPAGKRRKAKSKRKAKNYPSFDLAVELQRKTGVDLTTIDGINVLTAQTIFAELGADLSAFPSEAHFCSWLTLSPKRDVSGGKVIKHVSSPMQNRVALALRMAAQSLFNSNSYLGAKSRQLRARLGGLKAIKAMARYLACLVYRLLTKGQAWVDRGAAHFEEQRKCRDMAALKRRAAAMGLRLVPNA

SEQ ID NO: 455390 - protein, 347 aa, unidentified
MNYIGTDVHISTLDFKVVNDGGKVKMASNVQTSALNFIEFVKSVPKPRQVFVEEGPLAAWLLELCVQNKEQLIITDPKRNRWIGSSGQKEDPIDAGKLAQLARGHYIKEIHHPIGQRRRFRELMTAYHDTVKNSVRFKNKIKAKFMQNGIQCSGETVYLPEHRNEWRKKLPQEPVLLVIIDSLWQQLDQTLENQENILSEAKSQAKRYPEIKLIDEIPGVGFINAATIVAILENPHRFADKRKVWAYAGLGIDKKSSANKTFSEHLGKEYNRLLKYVVETSAQAAVNASNDNAFRRNYLDKTIRQGIDPHKALLTIARDVIATVWAMWKKNEHYNPEIDKKKIDVEA

SEQ ID NO: 455391 - protein, 344 aa, unidentified
MITIGIDPHKNSLTAVAVEPGSQSHPRLRVVVDKNTSASLLAWAKQWPDRQWAVEGATGLGRGIAQQLVTAGEMVIDVPAKLAARARLLGSGNARKTDVTDAISVAAVAQHNRRLNRVQPEDHTTIMRLLTERRDDLVAEHTRGINRLHVLLRDLHPGGAEVRLGSTQASALLATIRPATPADRQRKQIARDVVRDLKRHEASIKELDQELRAAVNASGTTLPQIQGIGFLTAAKILALTGDIRRFPNQEHYASYAGTAPTDVSSGDQQTHRLSRRGNRQLNAAIHVAAVTQARDPGPGRDHYRRKLTEHKTPKEARRSLKRRLSNTIYRRILADHQHTQMPTA

SEQ ID NO: 455392 - protein, 344 aa, unidentified
MLDPATGEIKTQRITGRPGEAVVEWLATLPQPFRAVYEAGPTGYGLVRRARDRGLDVVVCAPGHILKNATDHIKVDKRDAVRLARLLSAGELRLVRIPEPDEEQLRDLVRSREDLRVDLTRIRNRIGKFLLRREIYAPQHAETWGVLHRKWLRGLLFEDRASEFVFEDAMHAHDILVARREQLERALTEIAETSAWALTIARLRCLRGIDTLSALGLVAEVGDFRRFQHPRFLASYLGLVPSEHSSGEKRRQGGITKAGSKHARRLLVEAAWQYRHVPRTSHHISQRQKGQDPRVIDIAWRAQRRLYKRWQRLLGERRKRSTVVAVAVGRELATFCWEIATLTR

SEQ ID NO: 455393 - protein, 318 aa, unidentified
MKTPNPHQNPTPAYVGVDLGKETLDVALAGQSPCRYANDAAGIAALVKALQAWPAPVQVICEPSGGYEQPLLEALWAAGIAVSLVHAPRVRAFARAQGRLAKTDPIDAAVLRAFGELLQPAPLAAPAPARERLAALVQRREQVVNLLAMEEQRLAQARDAVLRQLGASLLKTLQKQVAQLDALIAAQIDEDDTLKGQSARLQEVKGIGPVTASTLLAELPELGTLNRNQTGALAGVAPYNCDSGAHRGRRMIRGGRIKVRRVLYMAAVVAARFNPILRAFYERLVAAGKPKKVALTAVMRKLVVLLNHLLKNPNFKLA

SEQ ID NO: 455394 - protein, 313 aa, unidentified
MAQITPKAGIDSSADWLDVHLYPLEIGFRVSNDAPGWRELHRRLGAERVEIVALEASGGCERAACHFLLERGYSVRLLDALRVRQFAKATGRLAKNDRIDAEIIAHFVTVVATRPMVRDRQRERLAELVGARAQLADQLVLLQNQARGHGEALLRRLDRQRVARAQADMQTIERRIAEVIAADPDMTADNALLRSMKAVGPVLAFTRQAFLPELGHLTRKQIAALAGVAPFEDQSGKRQGVRYIQGGRASVRGPLYMAALVAARYNPVLKQTRDRLRALNKKPKVVIVALMRRMLTILNAILRDGTQWQNRAV

SEQ ID NO: 455395 - protein, 427 aa, unidentified
MNVESNRLEQLRQLKKEIRGSEEYLIVGIDIAKDTHKAFFGTATGKTLLKVVVFENNKEGFARLLSRTEAIKVQHCLTKVVYGLEPTANYHKPLGEFLINCGHQVVLVSGVAVSKNRELLDGRWDKHDAKDSANVADLISQAKCLYYDYPSAHLRDLRGLLSLKRRVKKQEHSAKVRIRNHLVAQYFPEFDRFFAKGCSESLAIVSWCLNPSMIAGMQYDQFVRLVAPGLKSVNQEKRLRSIWEMAADSIGCHVGDDIDFEAKLMVEQLQRLKDTVREVDKHIKEICLHFPEYRYLLTIPGFGPDISSKVLGAIGNPFRFTSGKQVLKLTGYDLSAHRSGKTSATSVPVISKRGKAYLRYALYQAAFVASTSNPHFIRYYTNKLRGREREKGIKTKMRVKLAAKMLIIAWTLMKKKEAFHPQYLTVA

SEQ ID NO: 455396 - protein, 416 aa, unidentified
MDDIQWFAGVDWASEKHKVCLLNASGEVVGQRDVDHSGAGLSELCDWLLAKTDATPGQIAVAIETPHGPVVEALLERGFAVYAINPKQLDRFRDRFTMAGAKDDSRDAHVLGDALRTDRRALRRLAVQDPLLIELREWSRMNEELQQERTRLANRVRDQLWRYYPQALEITDDLAADWFLDVWQQVPTPARAARISEKTIARILKTRRIRCIDAAEVLRILCKTPLVVAPGTAAAASAHIDTVAARIRLLNQQIKQAHRKLDELCAQLETPSENAPGQVCEQRDVAILRSSPGIGRIVLATLLAEASEPLQRRDYHALRTLSGQAPVTRRSGKQCVVIRRRACNKRLENALYHWARVAMQHDPVSRCRYAELRRRGHSHGRALRGVGDRLLYVLCKLLERQVLYDPDHPRPQMAAA

SEQ ID NO: 455397 - protein, 314 aa, unidentified
MAEAVFVGIDVSKLELVVALRPSGESFQFPNDRRGIKRLVEQLGRLAPELVVIEATGGMQRAVVAALWAAEIKVAVVNPAWIRNFARGAGRLAKTDRIDAQMLALFAERERPQAKAPADAETRALQALVMRREQLLEMIGAEKNRLATAEGATLRQEIKHHIVYLGGRLNDVDKEIDKTVRRSEPWRRKSELLQSVPGVGKVLTAMLLAKLPELGQLNRKQAAALVGVAPVANESGKWRGHRAIAGGRWEVRNKLYMSALSAVQANPVLKPFYQRLLARGKSPKVALVAAMRRLLLILNAMLKTNTPWNPTCAV

SEQ ID NO: 455398 - protein, 345 aa, unidentified
MTIVEARAITGGVDTHADVHVAAALDPIGGLLGVQEFPATAGGYARLPGWLGGFGTVALVGIEGTGSYGAGLARHIIAAGVRVVEVDRSDRQDRRRQGKSDPLDAVSAARAAQSGRARGAPEGRDGAVEAIRALMVAKRSATGERTQTINQARALILTGPDDLRARFAKHTAAAMVAGIASLRPRPGDAAGYATRVALRELGRRAVFPGGQLERLDELIVPLVTARAPGLLALYGIGPNTAALLLIAAGDHPGRLRSEAAWAHLCAAAPIPASSGKVTRHRLNPGGDPQANHALWRIVFTRMGSDPATRAYVERRTKEGKSKAEIIPRRMPQAVRRPAGLPAPAR

SEQ ID NO: 455399 - protein, 368 aa, unidentified
MKKSITFVGLDVHKNSIAVAIADAGRNAEVRNYGIIGGTLDDLDRLVKKLSAPDKELHFVYEAGPCGYEIFRSLTVRGLECAVCSPAHIPKSPADRIKTDRRDAMMLARLHRAGELTYVFVPRADDEAMRDLTRCREDAKKAQRVTQQQLCGMLLRLGFRYSRDNWTKAHFGWLADQKMPTPSQQVVFQECIHAIKETTDRVERLTKQIETLVPTWRMAPVVTALQALRGVSLIVATTTIAELGDLTRFESPKKLMAFLGLVPSEHSSGDKKQRGKITKTGNGHARRVLVEGAHAYSYPARMTRLILKRQEGLSQEVRDIAWKCQVRLCARFRRLVAKGKSRNAVVTAIARELAAFMWAIANKTPIAT

SEQ ID NO: 455400 - protein, 343 aa, unidentified
MERVYYIGLDIHKRIIAYCIKTIDGSLYAQGKIEADRKSLGEWVKGLPGSWIGAMEATIFTGWVYDFLKPHAVDLKVAHPEMLKAITAAKKKNDRADAERIADLLRVDLLPECYMLPEEIRELRRILRYRNHIVRTAVKMQNKMAGLLMEVGVPYSKKRIQGKKYFRELLERVEEIPPSVKELLKLSRSSYEIFRSYQKRLVEGLRTNDLIRDRVQGLMAISGVGELTALTWVLEIGDPGRFASIRQAVSYCGLCSAQRESAGKEQRGPISKKRNKHLQTILIEAAKLAPRWNRPLAILHERELQKGNRNRATLAVARKLVAYLLAVDKQQTGLLLLGEKQAA

SEQ ID NO: 455401 - protein, 312 aa, unidentified
MAAMVRLAGIDVSKQTLDVHVMPSGESRTVRYDPRGLDELRQWLLDLGVAVAAVEASGGYEREVSAVLEGVGLVVRRLNPLRVRRFAQLRGRLAKTDRLDARTIAEFARAYPQDQQLPRDPRRDRLAEHLLVRRHTQAAIVDCLNQLEHLRDGRLRRLVTARKTAMARALATLDRHLAQLIAEHDDLVELHDRLRSVPGVGPILATTLLALLPELGSLTRRQIAALVGVAPFDHSSGRQIGAKSIQAGRVCVRNVLYMAALVAMRRNPAIKAFAERLAGKPGKVRLVACMRKLIVTLNAMVRDRAQWQPGTA

SEQ ID NO: 455402 - protein, 455 aa, unidentified
MSKKDAFESLAHVHPNAAGLDVGSREIWIAVPPDRDSESVRCFATFTPDLHALADWLVACGVDTVALESTGVYWIPVFETLEARGLTVYLVNAGHVKHVPGRKSDVLDCQWLQKLHAFGLLSASFRPDAEMCTLRAYLRHRAQLIQHRAPHILHMQKALQQMNVQLHHVLSDITGATGQLILRAITAGERDPVALARLRHPSCKSSEETIAKALSGNWRDEHLFVLRQALELFDAYTAQLAACDAEIERQFAAVKPRWEISEELPDLPPVKPGSKSKNKPAESTRAELYRITGVDLVAVDGISASLAQTILTEIGTDMSKWPTEKHFCSWLRLAPHNDISGGKVLRSRTLKTDNRAGQAFRQAAASVTRSDSAFGAFYRRKRAQLGPQQALVATAHKIARTVYYLLKNKASYHDIGAEAYEGQQRERELVALQRKAAKLGFALTPKELAPAEVAA

SEQ ID NO: 455403 - protein, 356 aa, unidentified
MPRYKAEAWRGKDLFIGIDIHRKQWHVTILNEDGLKLHSNRIPGSCEALSQLLDRFSGARKITATYEAGYFGFWVYDFLLGMGIDARVTPPSLIPREAGNRVKTDRVDSFKLAEYLKNGVLKSITVPSPEERGHRQVSRRRRQFVQDRIRVQNRIKAELRFTGLELPGESIGRWSRVFVKNLRAVRFRDTYQQASFQNLLDQFDQTSELIGRQKDLLKELAGSSKYADRVKILESVPGIGWLSAMEILLELQDVARFQSADALAAYVGLTPSQHSTGERVRMGRITRQGKPTVRTLLIQASWRLIDTDPAMEQKYERIKKRAGGKRAIVAVARTLVIRMRRILLDQQMYQLGLVSG

SEQ ID NO: 455404 - protein, 355 aa, unidentified
MNSEKYIGLDVHQATISVAVMDSQGKIIMESILETKASTLLEFIAGLRGSLFVTFEEGTWAAWLYDLLKPHVAEVLVCNPRKIALIKQGNKSDKIDARKLANRLRLHDLKPVYHGETGVRMLRELARSYLTVVKDLSRVMNRLKALYRSWAIPCAGRDVYYKRHRSQWLEKIPEAGTRRRAEQLYQQLDMLQHLRQQARRELLAEGRKHAITAKLRQIPSLGPIRSALTVALIQTPYRFRSKRQLWTYSGLGLETRDSGEYHYVNGQVRRRKKQATIRGLNKDYNHDLKGLFKGAATRASVQPGPLQEFYQRSLAKGIKPTMVRLTLARKIAAITLTLWKKGEDFDINKLNSEAA

SEQ ID NO: 455405 - protein, 350 aa, unidentified
MSTRNEPKDAAVFGIDIGKTAFHVVGLDAAGAPIQKATFRRETLLQFFMRASPRLVGMEACPGSQWLARKLQGMGHTVRIVPAQFVKPYVKSNKNDIIDAEAIAEAVTRPTMRFVEIRTPQQIDLQALHRIRDRMISDRTRLISQMRAFCLEYGIAIHQGAGKFKMEMPRVLADEENELTPTMRRILSDVFAELADLERRIAAMNRELEAIAARSDTARRLMTIPGIGPLVSTGLLAAVGSGRQFRKARDLAAWLGLVPREHSTGGKTKLLGISKRGNKYLRRMIIHGARSCVAHLDRSRDRLGPWLDDLERRMHKNKVTVALAAKIARILWVVLTKPGASYERRDPAFG

SEQ ID NO: 455406 - protein, 413 aa, unidentified
MQVLYPRCAGLDVHKKTVVACVLTSTSKGTATPVVKTFKTMTRDLEALSAWLVTLQVEQVCLESTGVYWWPVFNLLEEAGLPVTLVNARDAKQLPGRKTDVGDALWLADLCRHGLVRASFIPPAEIRVLRELTRYRATQVQARAREVQHLLKTLASANLQLGSVASNVVGASGWQMLEAVAAGEVDPHTLAAMAKRMLRRKLDELEQAFIARVQPHHRLLIQTSLDLLRFLEGSIEALDQAITAAAAPFAAQLAALDAVPGIGTVAAAALVAEIGVNMDQFPTAGHLASWAGVCPGNKQSGGKRLSSKTTKGNIWLRRILGEAAWAAIREQHSIFRARYYRLKPRLGAQQALVAVMHQLLKVIYRMLKTGELYRELGADYDQTADPRRAVQRLTKRLERLGFTVTLAPAAKAG

SEQ ID NO: 455407 - protein, 314 aa, unidentified
MRIIGCDLHARQQTLAMLDTITGEMVERTLTHEGDNVREFYSALPLPVRVGIEATGSMQWFVSLMEELGIECQVGHPADIRAAEPRKQKHDRRDADLILKLLVENRFPAIWRPSKELQDLRALLRHRHQWVRIRTRLQNALQAIALANGLRRGPGLWSHDGQKTIASLPLAPHTAYRRSELQAMYVKFEAEIDKLNQRVEEQACERPGARLLMTHPGVGPVTALATEVFLGDPARFADSKDLASYVGMIPKEYSSGGRQRLGGLSKQGNPLLRFLWGEAGAHAAIKATQQTFTDHADGSSKDGAAQQPGAGHAL

SEQ ID NO: 455408 - protein, 430 aa, unidentified
MKSNTQNAKIEAITEKTLVLGIDVGSEMHYARAFDYRVIEYSKKPFKFSNTEAGFATFKEWVLDLKERHEKDKVVPGMEPTGHYWFNLGKFLQDNEMKPVLVNPHHVKKSKELDDNNPTKNDRKDPKVIAGLVREGRYMIPYLPDGVYADLRTASNIRFQLQAELTRIQNRISRWFNIYFPEYKTVYGKPDAKSGMLILKAAPLPEDILTLGIDGVNQIWRDAKLRAVGKARAKTLIEAAEHSVGSKEGAVSARMEIRMLLEDYESRNTRLQEVMVLIEELVRKIPMAEKLLEIKGVGIRTVSGFLAEVGDISRFNNPKELQKLAGLALVENSSGKHKGETTISRRGRKRLRYLLFEVAMSLVSKNQEFRELHNYYTTRRLNPLKKMQSLMAIAAKLIRVFYVMLTKGVNYDPKKMVNDIKRPAVYLQTA

SEQ ID NO: 455409 - protein, 373 aa, unidentified
MNNNTTVYIGMDVHKGNFTLCSLAEGEENPRNVMTVEADYLQIVKYINGLRKRYGEETEFVCGYEAGCLGYSLYRSLTGCGQKCVILAPTTMAIEEGNRRIKTDKRDAKNIAICLRNHTYRAVHIPTEEDDQVKEYIRMRNDLKANLRRIKQQLLAFCLRHGWVYKETKHYWTQAHMKWLEELSLEGIYQEVLDGYLIELKHLMETIDRYDKRIEALSQRDTYQKPVDQLICFLGIKRPTALSVLVEIGDFMRFPSAEQFASYLGIVPGEHSSSDNRNRLGITKAGNAHVRRLLVEAAQCYTRGKVGYKSKDLIKRQEGNSPKVIAYADRANERLRRKYYQMMYRSKNSNVAKTAVARELACFMWGMMTGRID

SEQ ID NO: 455410 - protein, 421 aa, unidentified
MTNRQPIPTDALLVAIDIAKVRNEVLIEAPNHKRRRRLSVLNTRAEHDRLIETLRAYGKPVICAFEATGNYHRPIAWRLIEAGFDVRLVSSMALARTREALHNGWDKNDPRDAQVILHMLRIGATQRYHDPLRAGINDVQELSKTHEAIAKAKTEIQHRILTHYLPLYFPEIERFRGNSRSDWFFAFLDAFPTPASIMALSKEAFIEAAWDVVGRKVSKERLLADIYETARTSIGLPLPIDAPAIRMFRMVIAEARSLIRQRNEIEDMADAMLRDSADYKALRKVPGIGPVIALTILAEGGDLRRFRHHRQFLKFCGLDLSTQQSGQHRGQTRLSKFGNARLRRTLWIAGQVAIRQRENGFRHKFERYIAKDRDNPDLRRKALTAITAKARVDTRSSKAVPITGPSSKGGCQVEESLSAEP

SEQ ID NO: 455411 - protein, 447 aa, unidentified
MKTLPIINPRAAGIDVGSEKLHVSIAGDVPVVFGTFTSEVYRLRDHLKAHTVTTVALEATGVYWLYLYTVLEAAGIEVVVVNGRHVRNLPGRKTDLADCQWLATLHAHGLLRGGFVPPAAIRQLQDYQRLRSDHIVGAASQVQKMQQALERMNIKFHDVISDLTGVSGLKVVQAILQGERNPAALVALCDGRIQEKKRPAMLESLRGTWAPEHVFALEQAHRVWSFYQGLLRECDQRIEDILKSLAGPELPAPDATAPKPTSRAKQPGKNAPQINQLHDLLVRLCGRDVTALPGIADYLLLQLVAETGPDLKAWPTEKHFVCWLGLSPGSKQSGKRRGNVKRQRNRAGRLFCTGARSLVQSVDKALGGFYRRLAARKGGLVAMKALARKLAGLYYRVLRYGLEYAEQGLQKYNARYEEGQRRLLVKLAAQQGFQLVASPIPSVGKMT

SEQ ID NO: 455412 - protein, 307 aa, unidentified
MCCVLMVVIAPKKFANTTKGHDELVSWLKGHKIDHAHICIEATGTYMEPVAECLYDAGYIVSVINPALGKAFAQSEGLRNKTDTVDARMLAEFCRQKSPAAWEAPHPLERALRALVVRHQALTDMHTQELNRTETAREVQRPSIDAHLLWLEAELKRLEKQIKDLTDDDPDMKHRRKLLESIPGIGEKTSAVLLAYIGLKDRFAHARQFAAFAGLTPRRYESGSSVRGASRMSKAGHVSLRRALYMPAMVATSKTEWGRAFRDRLAANGKKGKVILGAMMRKLAQVAYGVLKSGVPFDASRHNPVAA

SEQ ID NO: 455413 - protein, 343 aa, unidentified
MGRFIGVDLHKTSFTNCFFESESKHELKTYRVSAKGITDFKKHLRLDDEVAVESTGNTAYFVREIEASVKRVRIVNPNQFKVIAHSVKKTDKIDAFTIALFLSKDLIPEVRMKTKEESQTSSLISTRDKLVKLRTSLKNKIHNILSANGVISKPEMFSSEKGLEKVLKLGLEDSYRFEIELLVGEIRHLNDSIEKINAEIKSRGEKLPGHKNLTSIKGISDTGATIFLNTIGNVNDFRDEKALASYFGIVPRVHNSNETIRHGRITKMGNKIARTALVQSTLVAIRYSPYLKAFYERLKAKKGAGKAIIATSRKMLGIIYNTLKNNWVFEDFTQFKLAPQVAA

SEQ ID NO: 455414 - protein, 375 aa, unidentified
MQEKLRFLGLDVHAETIAVAIAEPDGEVRSLGTIPNRAESIRKLIKKLGPVEKLRACYEAGPTGYVTYWQLAELGVKCEVVAPTLVPVKAGDRVKTDRRDAEKLARCYRSGDLTAVWVPDEGSEALRDLVRAREAAKQDQLRARHRLSKFLLRSGQRPPSGIRPWTRPYLIWVAQLRFTQVAQEATRLDYLHEVEHMRERVARLEQAIAEAVKLASPVLQQVINDLQALRGIADISAVTIAAELGQVSRFDGARQLMGYCGAVPSEDSSGKRTRRGSITKTGNAHLRRIVVEAAWSYHRPPCIWYGLRKRQQSISEEAKEIAWKAQHRLHKRYMRLAAAGKDKRKITTAVARELLGFIWAIGIRAETVARQRIAA

SEQ ID NO: 455415 - protein, 364 aa, unidentified
MKKGSKSQQSGTVAESKPAQVVGLDLGDRYSRYCMLSSTGEMMEEGRIQTTAAAMEKHFGSDPRMRIALEAGTHSPWVSRLLKSYGHQVIVANPRKIPTLTKSESKNDRNDAEQLARMAAFDPKLLHPIEHRSPERQQDLNLIHTRSVLVRARTMLINSARGLVKSAGQRLPACSSEAFPEKVPAAVPPALKAACTPLLEQVTQMNRTIATMDKQIDKLDKKYPEITVLRTVPGVGPVVAACYVLTLDSPQAMKTNRQAGAYLGLRPRQHQSGDSDPQCGITRMGNTYLRSLLLQSAQYILGRFCPDSELRRWGLKLAASGGKRGKKRALVALARKLAVVLLSMWRNRKNFVPFPQPAAQLATA

SEQ ID NO: 455416 - protein, 331 aa, unidentified
MDRQNFCYFIGIDISKKFFDAAIIENDRTTSYVFENTKKGSNAFIRLLKNQKIPLENTLICMEHTGVYGKLIITKLVEKQAHFCVEMPIQITRSIGVHRGKNDKVDAKRIAEYASKNHKELELYQPLPEVLEQVKILLKIRRKLVNTRADVNKYPNELELFSPELGKLAKKNLKKINKNLCDEIERIESEIKKLILSDDRLNKTIGLVTSVTGIGQITALHMTVFTNFFTKYDNPKQLACYCGVVPFEHTSGTSILRKSRIHPMANRTLKKHLHMSALAAINHDPDIKTYFERKVEEGKNKMLIVNNVRNKLVHRICAVVRRQQPYVKNVA

SEQ ID NO: 455417 - protein, 371 aa, unidentified
MNNNNTKSTSGSEGNEAREQHKGDRVLKLGLDLHYRQVTVAMQEDGGRIKGAGKMSHQAFGHWMDKKLAAGWQIESCYEAGASGYWLHRQLVALGVKNLVVAPKAMGQGGKRQKTDRRDSAELVDGLDRYLRGQDKALSVVAVPSVEGEEKRALIRYHRQVMADRSRLEGRGKGLLCAQGIEVRGRWWQAKGWRELNADPGLKDWMKEQLEAWRQKVLSAEEEQGELRRRIEALAPAMRPKGVGAYSTAVLEYEMKGWQRFHNRGQVSSYTGLCPGIHQSDGRGKEGSINRCGNRVVRWNLVEMVWRLMVWQPHYGPVRQLAAGLVRSKRAKRRLVVKAARQLAIDLWRLATDQTTAEKLGLIMHSDRRRQ

SEQ ID NO: 455418 - protein, 426 aa, unidentified
MNTQNSDLLQTTEFAAYVGLDWGDQKHAFGWCTGSDKTPAQTGSLVNSPEVLHTWLQELAQRFEGRPVALAVETSRGPLIHLFGAYPWLTVYPIHPATSARYRAAFKPSGAKDDLPDALLLLELVRDHRPKLRPLQIPDAATRKLAALVELRRDLVDRRTQVLLQLMALLKSYFPQALELVGHDLTSGLALAFLRRWPDPVALKAARPSTLKSFYYQHAVRSETLVTHRLALVQQARALTTDEAVLMPARLHLAALLEQLRTLAKHIELVERQSQSLFKEHSEAYLFRELPGAGKALQPRLLVAFGEDRALYPDPGSLQKYGGLAPVIEKSGRQAWVHWRWHASRFLRQTFVEWAGQTVVYSSWAREYYQHMKAKGKSHHVILRALAFKWIRILWKCWQTRTAYDEARYLKQLLARKSPHAVTISS

SEQ ID NO: 455419 - protein, 321 aa, unidentified
MENGRNYLSEWKLEELPRFIKKLRASDEIAVEMTGNTRFFHQAVAPHVARVVAVDPNQFKVISQSVKKTDPHDARNLALYLAKDLLPEVRMKEKAEAQIASLTQTRDTLVKLRTALKNKVNNILAAHGISLAKEALSSEKALAGVLEMRFDEMVELELQVIVEQIRALNQSIGKLEQTIRDRGQKLKGHSNLTSIKGIGNLGASILLSVIGDIDDFADEGKLAAYFGIVPRVQNSNETERSGRITKRGTKLGRTTLVQCALIAKRYSPYLARYYDKIKSRRGAGKAIIALARKFLGIIYRTLKNNWVFEDFPNFVLAESAR

SEQ ID NO: 455420 - protein, 340 aa, unidentified
MGDITTIGLDLAKSVFQVHAVDEMGSVVMRKRLRRSQVLAFFAEIPPCLIGLEACATAHHWARELIALGHEARLMPPNYVKAYVKRNKHDVADAEAICEAVRRPSMRFVPIKTAEQQSALMMHRARDLLVRQRTMLVNALRGHLAEFGLIEAQGLHKVAKLIAIVTDENDGRVPYIARQVLQVMINHIEDIQVRIVGLEKQLLAWHKSNPVSQRLATIPGIGPIIATAIAATVADPNTFRSGREFAAWLGLVPRQNSTGGKARLGGISKRGDSYLRRLLVNSAHTVLLCSKQAKTDPWLTSLLTRKPRLVAAVALANKTARLVWALMSRQDTYRHAAATA

SEQ ID NO: 455421 - protein, 372 aa, unidentified
MIIIGCDYHPGFQQIAFVDTDSGELQERRLQHCEEAEKFYRNLAAQGMKVRVGMEASGHARWFERLLAELHFELWIGDAAEIRSKRVRKQKTDRQDAQLLLRLLLEDRFPRVWVPSWENRDLRQLLWHRHRMVQARTRIMNQLQAVALNEGLLCKKRLWRETGRKQLESFPLAPWASRRRQDLLELLDRLTPTIAELTQAIEREVENSPEARRLQTHPGVGPLTALAFVLVIGKADRFQCGKQIASYLGLIPLEDSSGKRRRLGHITKQGNSLLRFLLVEAAQVTVRSDPEWRSKYFHLAMRRGRKIAKVAMARRLAVRMYWMMRKGWDYERLNKFGSQGRKSGLSCWSTQCFDPVPEAAKFPNHSISAPAS

SEQ ID NO: 455422 - protein, 409 aa, unidentified
MYIGLDVHKKHVYATVMRKDGTIVEQRNFNNTKEDLQNFVASLRRGKHCAVLEASRSWMQIYDFLDEQGIDVCLAHPLRLRAIAEERIKNDRIDSETLAELLRLDGIPKSWVPPAEIRELRNITRHRASLMRMRTQIKNEIHSLLAKKGVKAEFSDLFGKAGIEFLRSLKLDTTERTILTSYLRMVEPLTNEIAATSRYIALLADRRKEVRLLLTIPGINVYSAMLILAEIGDIKRFKSAGRLCSWAGLVSSVYKSDETMRYGHITKQGSKIFSALKGEAFEFPAVFLRFISSLKAGAFCGENFSKWLRWILVQCVHTAIQHPGRIRDFYLRLEKRKESRVAIVATARKMLSIIYYMLTRNDSYRDADDALTARKQKTMERKAGEYTARDLDKMLESMEEYRHMTWHSA

SEQ ID NO: 455423 - protein, 464 aa, unidentified
MKFFFQDRMPDMKKDKNKEQKVVELDAFEQINHNAAGIDVGAKEFYVAVPKGRDTQSVRVFLTFTADIHHLADWLAQCGVKTVALESTGVYWIPLYEILEQRGFEVYLVNARHLKNVTGRKTDVLDCQWLQQLHTYGLLRASFRPSEQICAIRSLVRHRDMLVSYRSAHIQHMQKALTLMNVRLTNVLSDITGVTGMKIIRAILSGERNRKTLASYRDAKCAKTEEEIEKSLEGNYKLEHLFVLKQALELYDFYDQQIKQCDQELETLYNEFEEPDQPGTSAPEKRKRKRRKNQPNFDLSESLYRMTGGIDLTKIEGLDALTVQEILSETGTDVSKWPTVKHFCSWLCLAPNNKITGGKVKSSHTPHTQNRAANAFRIGAQSLMKSKSALGAYCRRIAALHDAPTAITATAHKLATIFYFMLKRREAYRPLAADYYEKEHREKVVRSLQRRAATLGFRLEPTVS

SEQ ID NO: 455424 - protein, 344 aa, unidentified
MDHFAGLDVSVKETSICIVDDTGRIMKEVKVASEPQALLKVLGNPAYRFKRIGLEAGPLSQWLFSGLAEAGLPMVCVETRHMQAVLKAQINKTDRNDARGIAQMMRAGLYRPVHVKTLRSQKLRMLLTHRKLLQSKAIAIENDLRGTLRNFGLKVGMVGKVRFEARIQELAENFPDLAVLVEPLLIVRRALREQIVILHRRLLTIVRNDEVCRRLMTFSGVGPVVALTYRATVDVPARFRKSKEVGAVFELTCARYQSGEIDWSGRISRCGDEMMRVMLYEAAQSMLRSKKWSWLKAWAMQIARRRGMKKAIVALARRLAVIMHRIWVDGTEFRWTREQAAAAA

SEQ ID NO: 455425 - protein, 379 aa, unidentified
MKSSYYIGLDVHKDSIAVAFTKAGERREPTYFGECGGSVLAAERCLRRLAAKLGVALRDLKVCYEAGPSGFVLARRFLRLGLECVVMSPSRTERKPNEKIKTDKRDAIHIAKAFRNGDITVVRVPPALDEAVRDLCRARTDASDDLSRAKQRLNSFLLRNGFHYSGKARWTPSHLNYLRHLTLPDPVQNLVLEEYLQAIDAGYERVERLATRMKEVLADWEWEPVARALMACKGFQEVAAMTLISELGDLRRFDHPRKLMAFLGLVPGEYSSGSKRRQNSITKCGNSHARWMLVECSQHYRKAPKIGAALSQRQVGQSKEVKALSWRMQHRLHRRYVKLKARGKRENKAIVAIAREMAAFLWELQNKLNLPIPGNVPAH

SEQ ID NO: 455426 - protein, 356 aa, unidentified
MSRDVKYIGMDVHKEATVIAVRNSRGELVMESMVETESSTIVQFIHGLRGELHVTWEEGTWAAWLYDLLKPHAHEVLVCNPRRNALLKEGSKTDRIDARKLSELFHAGMLGAVDHGENGVRTLRELACMYQTVSQDLTRVMNRVKALYRGWGIACAGTQVYAPRYREEWLQKIEQAGVRRRAELLYEELDGLQALRRKVRPELLTESQKHKAAKLLRQIPCIGPIRAARLIALMQTPHRFRSKRQLWTYSGLGIETRDSGQYRFVDGQLQRSKKPQQVRGLNRNHNHEMKEIFKGAATRASCGVGPLREFYGSLLDKGRKPEMARLTLARKIAAITLTLWKKEERFDAEQLKTQAA

SEQ ID NO: 455427 - protein, 341 aa, unidentified
MSTTDEERPGAALEVVLGVDTHLDAHVAVALDHLGRRLGVATLPTTEKGYEQLVSWAQGLGPVRCAGVEGTSSYGAGVARHLKSRGIEVLEIERPKRRQRSTSRRNGKSDHADAEAAARIVLAGEAAGVPKSGDGCVEMIHVLRAARRAAVKARTQAANQLRNLLVTAPEGLRGRLRELSTKALVATAVRFRPGDSPGNPEEATRFALRSVARRYRSLSEEIVELDVQLTRLVTRVAPGLVALPGVGTDHAATLLVAAGDKPERLRSEGRFASLCGVSPVQASSGKVVRHRLNRGGNRDANRALHSICVVRMGRDRRTQAYVTRRTVEGKSKREIMRCLKL

SEQ ID NO: 455428 - protein, 299 aa, unidentified
MSSEELEAYVIAGVDNENLGHRVFKNTRGGIKKLICWLTVNKSELVVMEASGGYERMCWKMLRKVGIKAYIVNPARIRHFAKGIGKIAKTDRIDAEVIARFGQVVGLEELVDLSEVELELQELVKRRQELLDMVLAEKNRLRLAEGIKAKSLKRIIRVLKKELQLIEKRIEEISRNDEQIMAKVNALRKQKGIGFITAISMLVCLPELGKVGRKQIGALAGVSPFNRESGKWKGKSFISGGRGLIRKILYMPVLVAIRFNQRLKVFYQRLLDSGKIKKVALVAVMRKLLIICNATLKYA

SEQ ID NO: 455429 - protein, 347 aa, unidentified
MVIVDSARQIVGGVDTHRDSNVAAVVDMNGGLLGIESFPTTAEGHRSLSLWMTGFGTIERVGIEGTGAYGAGVARHLQRCGVVVIEVDRPERQKRRKQGKSDRIDAVEAARGALSGRCDGQAKTGDAHAEALRALLVAKRSARSTRIRTIVQLRHLMFTAPDELRARLGSLSTTQLVNEAARLRPRPGGDVALHGVKTAAVILARRVHALDAELAAIDEQITPLVKAAAPELLNVYGVGADTAAVLLVTAGDNVERITTEAKWAMLCGIAPIPATSGLTVNQFRLNHAGDRHANNAIWRIVITRLGQHEPRTIAYMQRRLDEGKSKRYIIRCLKRYVAREIFKALPR

SEQ ID NO: 455430 - protein, 317 aa, unidentified
MQELQVFVGVDVAKAELVVARHGQTGSRTLPNQAQAISAWLRELPDGACLAMESTGRHHQMLASLAQAAGLQVFVLNARDVHFYAKALGARAKTDRLDAHVIARYAAEQHTRLHRWIAPCPALQQVRSLLGQRWAVVSKRTALRQSLQGCDGAITLEVQALEAGFAALLKAIDARIVALLGQDGGVRQRQRLLQSIVGVGPQSSALLASVLAQVQFASADALVAYSGLDPRACDSGSSRGRRRLSKRGQPALRHQMYMAAMSACHTSTFKSLYQALRARGLKTTEALVVLARKLLRIAFAVWRSGQPFDPTRFAAAA

SEQ ID NO: 455431 - protein, 492 aa, unidentified
MTIRRKMSTFERLQRGKLNRKQCKELERRLQSPDPGLEIIHRNAAGIDVGSGSHFVAVPPDRDAQPIREFGSWTAALHEMAAWLKSCRIDTVAIQATGVYWVVLCDVLEAAGLKVWVVNAQGTKNLPGRKSDVQECEWLRKLHTYGLLRNSYRPPEEIRGLRDLWRLRERLVGDAGRAVQQMQKALTGMNLQLTNALTDISGVSGMAIIRAIVGGERDPWKLAKLRQPGVRASEAEIAENLRGTWREELLFELRQVVAHYDFLGKQVVELDQLLEKRMAAMPSREGTPKAKPLAEQEEAPKGKRRGRKPKTKVKPAPKNAPAFDIGAELTRLLGVDLRTIDGVNIHIAQTVYTEVGPDLSAFPTEGNFTSWLGLTPMRSVSGGKVIKHEKKRVKNRLADALRMGASTLERSQSYLGARFRYLKARLDGRRAVKAMARYLACLIYRLMTKGQAWVDRGEAYFEQKKTERELRTLQSRAQKMGLQLVPLAAVNA

SEQ ID NO: 455432 - protein, 378 aa, unidentified
MSNCTRYLGLDVHAETITAAIAEGRGKIRSLGKFPNRPEAVRKLIEKLGGGKNLKVCYEAGPTGYALYWQLTKLDVDCEVIAPSLIPRKPGDRVKTDRRDAEKLAQCYQNGELTPVWVPTLEHEALRDLVRQRAAAKADESRAKHRLVKHLLRRGLREPKEARAWTHPWWRWVQSLKFDYEAEQVAFLDCIAEVLHMGERLARLDKAIDRLVATAPSHMQAVIEALQALRGVAKLTAVTIVAEVGTFKRFRRPTELMGYTGLVPSEYSSGQREAKGGITHTGNAHLRHVLGEAAWHARHRPWLNKRLKRLLPTLPAGVAEIAWKAQERLHKKFSRMTFHRKHAGTVASAVARELVGFIWAIGSMVESQHVAKTEAQAA

SEQ ID NO: 455433 - protein, 482 aa, unidentified
MVLPHDEPEQPRRPRKPKGPIEPKPSARAADRSVHLPVPASTAPLRVVNPDAAGIDVHSDMHMVCVPADRDAEPVRRFGGDTADLRAIAAWLKACGITTVAMESTGVYWIPLFELLESEGLEVKLVEPGQLSRCGARPKTDVLDAQWIQRLHSYGLLRGSFRPPDEVLALRAYWRQRQMLVRSAAGHVQHMQKALEQMNVKLTEVVSCITGVTGMLIIAAILAGERDPVKLARLRDRRCHRREGEIASALEGSWRPEHLFALRQAYDLYQFHHRQIDECDRQVEAELAKLPDRSGEKQRQKATRRRGRKSNDVRFEAKGPLFEALGVDLTAIEGIDAGTALVVLAEVGPDVGRFPTERHFASWLRLCPPQDRSNKTDRRRRGPKGASRLSQALRMAAQALGRTQTPLGVFYRRIRSRLGGVGAVKATAHKLACLIYRMLKHGQEYVVRSMEEYEAKVKANLLRSLERKAKSLGFGLSPLPSE

SEQ ID NO: 455434 - protein, 354 aa, unidentified
MRTTEQAVRKVISAKEVYVGIDVHKESWHVTVRSDGEERFNGRIPGRYQSLKMVLERYRDLRIKVAYEAGPFGFWLLDRLVLDGIEAIVVPPSLIPIESGNKVKTDKRDSRKLATLLEKNMLKRVYVLTREEREHRDLLRTRRQIVDHRNNVARQIKSKLMFYGISSPFTSTTRWSVQYVEWLKTITFETTYLKEAFDLLIELYENLTRQIAKINRNVVALCRDKKYRQKIKLLCTAPGIGKLTAIELLVELQDITRFKSAEEIASYIGLTPAEYSTGERTRQGRITRCGNKRVRTYLVESTWVLITKDPYLRAKYLRLKNLRGGKRAVIAIARKFLIRLRRVLLDNVPYRMAA

SEQ ID NO: 455435 - protein, 377 aa, unidentified
MRKTIRFVGLDVHAETIAVAVAEPSGEVRSLGVVPNRPEAVRKLVRKLGPPHSLRVCYEAGPCGYVLYWQLSELGVHCEVIAPTLVPVRAGDRIKTDRRDALKLARSYRSGDLTAVWVPDEAHEALRDLVRAREAAKKDQLRARHRLYKFLLRHGLRPGEKIKAWSAKHLAWAKTLRLELPTLEATLLDYLTEVEHACERIARLERAIDQAIESAPATIRAVIDGLQALRGIARVSAATIVAELGQLSRFSRPKQLMGYMGAVPREHSSGEHVRRGAITKTGNAHLRRILVEAAWSYRHRPKVGSQLRRRQRRASEQVKEIAWKAQQRLHYRYVRLMGRSKLKQQVVTAVARELAGFVWAIGVEVEKHLASRPVRAA

SEQ ID NO: 455436 - protein, 421 aa, unidentified
MKRADTRKVRGVREDTLIVAIDVGMEMNRGYCTTPDGRNTKPFKFDNTREGLDTLWGMIMASKNRFKCNEVIVGYESTGPYGEPMVHYLIKKPVKMVQVNPMHTKRVKEINDNSPLKTDDKDPRVIADIIKLGRALSIVIPEGDAAYLRRLNNSRERHVRERTALVNQLQQLVFLLFPEFRKVIKDIKCRTPLYLLKKYPTPEAISVLDTHVLGEEMRKKSRGKFREYHAGMLINLARNTIGIKEGVSGLSMDIRHILVQLEMLKSLIAEIEGEMEISLGRIPYSSKLLSIKGLGVVSVAGIIGEIGDFKKFGTQPEIMKLAGLDLYEISSGNMKGQRRISKRGRSLLRKILYYAAIQTIRKNGILHDYYTRLTERGMKRMMALVAVSRKLLGIIYAIVRDDSEYSVNFKSMKRQVIKKAA

SEQ ID NO: 455437 - protein, 376 aa, unidentified
MSYPLTELPEVLRVAHQFVGVDAHKRSVTVAVVDAVGGELAAASFANSSHGVEEVAVWLHAAAPAVLRIGVEGSSGHGRHLAQRLVAAGYDVWEVPPRRTAERRRARRAPKTDHHDSYAIARAVAGEPRLGPVKPGAGLGEAHDELVIVRDHRNLLVQRRKTMLNQAEAALDAAPLAWTDTGRAGRKVLPRLQAVLHTGQQPATAAERELLALLRELDADIAELNGRIRILDKRLAALIIACGSSLLDEPGIGVVTAAALLAEVGDPARFRNEGAFNRWWGGAPVAVSSAEGDAEPTRHRLDLLGNRTINSVLYVMSLTQSRYHQPARDYLEHKRSEGHSAKEARRAHKTVLGRRIIRRMWTDRRRQLDPPTSKAA

SEQ ID NO: 455438 - protein, 347 aa, unidentified
MEVLIGVDPHKGSVALAAIDEATGELLEHASFLQDRVGLRALERWAKRFPERRWAMENARGLGRHLAGRLAASGECVVDVPPKLSARVRVLSTGNARKNDGLDALATALAASRNERLAPIDPEADSEVLRLLSERREDLVAERTRALNRLHGLLRDLLPGGVAGKLSADRAARILRSIRARGGASDRLRRRLASEILRDVRTLDRKIVDLNARVEAEVEASGSTLTEIFGIGPILAATILGTVGDVGRFPTKAHFASYAGTAPLEASSGKVVRHRLSLGGNRKLNYALHMVATSQARSDAPGGSYYRKKLGEDKSSKEALRCLKRRICDAVYKSLVADSRAPSRSAA

SEQ ID NO: 455439 - protein, 404 aa, unidentified
MVFLGVDWAEEHHDAWLENEQGEMLGKARIANDVGGVRQLHELVAEHAADPSQVVVGIETDRGLLVSALVGAGYQIYAINPLSVSRYRERHGTSGAKSDRADAKLLADLVRTDRHNHRPLASDSDLSEAIKVLAREHQDLVWTRKRFINRLRSTLREFYPAALEAFGTDLGGLDAIAILERAPTPWQGRQLSNAKIVSALRKAGRQRYLEQKATEIQRALRTEQLQAPSQLQAAMATVVSSCVAMIKSLNLQLEQVAAEMAASFEGHPDAEIYLSLPGLGVVLSARVLGEFGDDRARFVDAKARKAYAGTAPVTQASGTKKIVLARFARNRRLADACYWWAFSSLSGSLGANHYYRTLRTRGKTHHQALRALANRLVGILHACLAASQTYSESVAWPQPREIAA

SEQ ID NO: 455440 - protein, 379 aa, unidentified
MQSAQRLNGISRLDVSLELAKKAWKVAVTDGQRLNPSVVRVDAPDMWVRLQQLLQLLAGFLAKWALPADTQIVIIYEAGQDGFWIARALQAKGVQVHVVDAASVPVPRHARRAKTDRLDALRLLEELRAWLRGERRELRMLYIPSEEDEERRLLTRERGLLQKEMTQHVDRARKLLALHGCTEEIDGGFAQRLAGGEVRRADGRPLPEELVQWLLREDERLKLAHRHFAGVEKTLMHQLPEPVQRCIAVLSQLCGVGWVGATRIVLELFWRDFSNRRQVGACVGLVPQPYSSGDSQTDQGISKQGNRRVRALLIEMAWMWLRYQPQSALAQWFARRTSGSGKRGRRIAIVAVARRLAIALWRLLKEGVLPEGAQLKRAA

SEQ ID NO: 455441 - protein, 413 aa, unidentified
MSEENFTWFAGVDWGSEEHQACIVDAQGNVAGEREFPHSGAGLAELGDWLLSIAGAVSSVAIAIEVPHGPVVDALIDRGFVVHAINPKQLDRLRDRFSVAGAKDDSRDAYVLADGVRTDRRLFRRLHVADPQLIALRAWSRLAEELQEERVRLSNRVYHQLWRYYPQMAKLTDDLAAPWFLELWTIAPAPAKARHVRQSTVEQLLKQHRIRRIDAETVLRTLREPAIRVADGVAEAAGIHMRSLVARLRVVNRELREAEGQLDKLCTAIGETEPTSGDCLRRQDVMILKSMPGIGRINLATLLCEGSGPLSRRDYPALRTLCGVAPVTKRSGKSHIVVMRHAAHVRLRNTVYHWARVATQHDPKSHSRYVELRRRGHSHGRALRGVADRLLGLACVLLQRQTPFDPQFGQPAT

SEQ ID NO: 455442 - protein, 362 aa, unidentified
MNAYGIDLHSDRFTVAKMMVKNEKVYEVVSTYSFKNESYERFLGSLREDDYVLVENSTNAFWFHDQLVGRVKACFVYDTNDIRSSGNKNDKIDARHLVRKLSFYLVMGERKKDLPTVYVPDAEIRELWGLFTTYRLYNKTKVQLKNRIHSILKKNGICIDRGNIDKKGFEPSIEDFEISEVWKLQIRSAYRQLQSVQTEQKHIMDMIYVQGNKRFKREVELLMGIRGFSAFTAIALMSDVVDVARFQNAKSFCSYLRATPKVRSSNQTTHVGQVNRQSRPLTCSLLTQSIYQLAQAGEHMAKFYARVRVGKSPGKSRIALIRKVLVSAYHMLKRNEHYFWVEQELYSGKLRTFQRALQRIAA

SEQ ID NO: 455443 - protein, 376 aa, unidentified
MNTIIYIGIDVHKSSYSYCSFLKEQDSFFAEHKSEASSKNAINYIKSVIKTVGSDTPVLVGYEAGPTGYKLCRDLQKADFACVVIAPSTIYRPNGPRVKTDRRDARLLAQTLAYKTFKQVVIPTEKTEAMKEFTRARCSKKRQLKKAKQELLSFLLRMGMTYPKKGSYWTQSHFEWLRTVNFKDEWLQLAFEEYFAEVNELMAKVARLDAQIKQMAENSDIKEGVEKLICFTGIDYLTAVSIAVEVGDFSRFGNAKSFSNYIGLCPGEDSSGLTVRHTAITKSGNSRIRQLLIESAKSIKYGRLCSAKSKRLVQRQEGQSPLVIQYADMAIARIRHKMMSMERKGLHYNVITTAAARELSCFIWGMMTGNMSRACV

SEQ ID NO: 455444 - protein, 362 aa, unidentified
MDKNNVPTLTAGVDLGDKQSTICVLDASGATILEEVVKTSRRGFERFFAKRERMRVAIETGTHTPWIHDLLVHKGHEVIVANARQLELISKNDRKNDRNDARLLAKLARLDPELLSPVQVRDPKIREDLAQVRARDGLVRARANLINTVRGLVKSAGGRIPSGSAERFHRVAPEHVPEGLEPSVEQLLTLIESMTRSVEAFDEQLDRLARTKYPVTTHLSEVHGVGTLTALAFVLTVGEPKRFKKSRSLGAYFGLVPRQQTSCSVEPELRITKAGDALVRRLLVQSAQCNLRKRAADSDLRRHGLAIAERGGKKAKKRAVIAVARKIAVLLHRLWLTGEVYEPLRNSTAKHATKAAEKRVAS

SEQ ID NO: 455445 - protein, 373 aa, unidentified
MSSDSVVLVGLDVHKDSIMVAYSVGFGDVENLGKISPRATDIDRLCKRMQSKASQVMFVYEAGPCGYGLHRQLTGKGHQCMVCAPSLIPRKPGERVKTDRRDAARLVRSLRAGDLSPVHVPTIEDEACRDLVRAWGAAKQDLKQARQRLKAFLLVHDVRYTGRADWGPAHRRWISGYSFDLPWQQIAFEEHRRTIEDRLTQCARLETTLREAAPQWRFYPVVEALQALRGVQFTTAIGLMAELGDLSRFDHPRQLMAWLGVTPSEHSSGQHRQLGSITKAGNSYARRLLIEAAWSYRHPAKVSPAIQKRHDGLPKAIIDRAWDAQLRLCKRYRKLTARGKHRNVAVVAIARELAGFIWDIARMTPITAAVQAA

SEQ ID NO: 455446 - protein, 320 aa, unidentified
MNSITIPVGIDVSKDTLDVFIDRVSGRKRMNVSNDEEGVRQILCELEVGTYKVAMEATGRYEVLARRMLEEAGLAVSSLNPRLARHMAIGFGVEAKTDPIDAEILARLATVCKPTDPRSQLRESLGDTSRTVSTLILERSGHKKRLQSPGFHPQVAQSLEVIIAVLDTEIARLEKLFVVEVRKSELAERYKLAQTVPGVGPAMARVLTSELPEDLSRYTTRQICSYAGLTPVDNASGKSIRKSKLKAHGNMFIKAATYMPAVSLLACDPKAMELYRRSIAQGREHQQALVPVMHRLLRRAAAVIKRGSPWRSDPPATTLT

SEQ ID NO: 455447 - protein, 313 aa, unidentified
MQNSFIGIDISKNSLDVHVLPENVSYSYPYETQKVKALIRKLKKHNPALIVMEATGGYEISLAVQLSAAGLNSAVVNPRQIRDYARAIGKLAKTDKIDAYVIARFAQDVKPEARQQLTVKELQLKELVMRRQQLIDMRTAEKNRLSRAYAPQVIKGIQKIISTLDTHIDVLEEELSNQIKSNPSWDQKVELITSVPGVGANTAHMLLFCLPELGRLNRKQIAALVGVAPMNRDSGMLKGKRTITGGRAIVRKVLHMPILCAVTRWNKRLKELYAHFMAKGKKHKVALTACMRKLIIMLNCMLKNNQVYNPNFY

SEQ ID NO: 455448 - protein, 373 aa, unidentified
MPKYSTAFGMDVHLRSTTVCALDADTGEAVTRRFPGNPWGEIAGWMDGFPGPSLAAYESGYLGFAPQRELAGLGVECVVAAVSKIPRSAADSASKNDRNDAARMAKAILAHDISPVWVPSPEVEGIRDLAGAYDGATARLATAKQRLLAFLAKRGFVYGGTTPAGNPRKYWTYDFLRWLDKVRPEDDGGVRTLAALRNEVEAAAEARADLLSEYRAAVDASPIAAEVAALQSIKGCAFALAAAFSAEVGDFTRFRSGRQVTAYFGLAPSQRSSGDSVRLGGVSGAGNALVRKLAVEGSWCYAAARHQPKLMPRDTGVPLEIRMHGRKGSERLLRRREEMLARGVPAAKANAATAAELVRWLWALGMMCREGAE

SEQ ID NO: 455449 - protein, 351 aa, unidentified
MDYRVYCGVDFHARQQTISCLTIEDGLVSTHELKHQNKAELKAFYAQFRGPVLVALEASGYSPWFEQMLEELGHEVWLGDASEIRRRARRRQKNDRRDAELILDLLLHDEFPRIHRPAVNSRELLRMLRYRHKLVQMRTIIKNSLQALSIQSGLSLRARLFTGRGLDQLRSLSMSPVMQYQRDQWLLALESLNQQIDAATNWLSEQAAGDARVQRLRTPPGIGLLTGLAVVHTLEPVIRFRNQRKVAAYVGFDPQERSSGETKRYLGISKAGSRVLRYLLVEATHTAIKSDPDLKRFYLRLLHRHGKAKAKVAAARKLLIRSYILLRDHIDYAEFGRRAVAARLARLASKA

SEQ ID NO: 455450 - protein, 392 aa, unidentified
MYIVGIDIGKNHHEASIVSPEGKQIGRSLRFATTHKGAHSLMSFIFKNIGNSPCVFGMEATGHYWYPIYSFLKAKGYTIYVINPIQSDSLRKMYIRQTKNDSIDSFLIAEVIRFGQFGTTSMADENILAMRQLCRYRDSVISSRTEIKLRIGTIMEQIFPEYEKQFSSLWVSTSMGILEKYLTPENIENAPIDELFEIIKDKSHNRLTRAKAISIKEAAADTFGIKIAQDAFSFQLKQLIDRMNFLDKQIEALDCQILEYYEKFDCYLHTIPGIGIIGAATILAEIGDISRFKNSSSLIAFAGIDPTVRQSGEFNSTHNHMSKRGSPYLRHAIFLEATTCSFHTSPLNAYYKKKRDQGKHHLTATGAVARKLTTVIYAVLRDSKPYEPKKFC

SEQ ID NO: 455451 - protein, 397 aa, unidentified
MYIVGIDIAKRKHEAAVIDGEGAVIIKPFSFTNNCSGYNRLLAMLAKAKLPLDEVSFAMEATGHYWLALFTRLQKEGFRVQVINPVQTNSIRSFYIRQAKTDPRDALLIAEVIRFGHFSESTLHPENIYELRELCRGRHAIVSMQADVKRKVVALLDQVFPEYETAFTNLFGDTSMAILQTCPTPKELSEMPLEELCHLIEVSSHKRFRMAKAQELQALARNSFGFAMAGDVFSTMIRLYAKHLVFLKQQVREMDRKIAEIMDTLDTPITTITGIGPTLGAYILSEIGDISRFPSAAKLAAYAGIDPTMRQSGEYNGVRNRMSKRGSPYLRHAIWLAASSAVLHDPALKLYFQKKRDEGKPYMASVGHACRKMVSIIYAVMRDNKAYTPCIPNEISA

SEQ ID NO: 455452 - protein, 421 aa, unidentified
MKELRARSIRMVKEGTLIATVDIGITNNTGYCTTLDGRSTKSFRFDNTKEGFEKFWYMTVASKNRFGCDEVLVGYESTGPYAEPLVHYLANKQVKIVQVNPMHTKKMKEVNDNSPLKTDDKDPRVIADIIRLGRALSIVVPEGDAAYLRRLNNARERHVGEQTALLNQLQQLVFLIFPEFKTVLKNMKGKTAQHILKRYTIPGRIGTLSKEVLGEEMRKRSMGKFGIKEAESLIGLARETVGIKEGIAGIFMDIRHILMQLEAEVRFISEIEAEMRATLERIPYSVRLLSIKGLGTVSVAGLIGEVGEFSKFSTQSEIMKLAGLDLYEISSGKRKGQRRISKRGRSLLRKILFYAAIQMIRNNGIMYDYYARLTGRGMERMRALIAVSRKLLRIIHAIVRDNRDYVRQYQALERRVIKMAA

SEQ ID NO: 455453 - protein, 320 aa, unidentified
MAESFVGIDVSKARLDVSARPSSERWSVPNNERGIADLVDRMLKVGPSLIVLEATGGFELACVGALAAAAAPVVVINPRQVRDFAKATGRLAKTDAIDAEVLAQFAEAVRPEVRVLPDETTEELKALVARRRQIVEMLGVEGNRLLSARPRVRPDIEAHIAWLKKRLGDFDRELEACIRSSSVWREKENVLRSAPGVGPVLTTSLLANVPELGSLNRKQIAALVGVAPLNRDSGTLKGRRTVWGGRASVRAALYMATLVAVRHNPVIKQFYVRLTSAGKPHKVAMVACMRKLLTILNLMIRDGKRWQFSDAPLPDIKDSC

SEQ ID NO: 455454 - protein, 424 aa, unidentified
MKFKMQDKQNQLIERISIKHLIVGIDIAQQFHVARAVNFRGIVIGDPLTFENNEDGFARLIQWIDQLKALKGLDTTIVGMEPTGHYWVNLSKWLYERNIEVVTVNPHLVKRNKENRDNTQSKSDKKDALVIADMVKNGYYAFIRPSSEIFEKLRVLMSNRDMTVKRLVSAVNQINRWVDIVFPELRQVFKDVKGKGAIATLRLFPTPLEISSMKPQDIVNGWKSLMKRQPGLRKAQLLIELATHSVGTRQALDAYKLHLEQLLEEFDLATVQLERIEKEVTEVLKKIPFAKKLLAIKGVSEIALAGILGEAGDLSGFTHGNSLLRHAGLHLAEASSGKWKGQIVLSKRGRSRLRRFLYLATMSLVMNNPDFKELHSNNVNEKKMKKMKSIMKLINKFARILVGMARKNESYNSDKVKPLIQMAA

SEQ ID NO: 455455 - protein, 383 aa, unidentified
MKKSSRMSIVHPHAAGVDIGAEFHVVAVPPDADTGPVRTFQSFTGDLQRMSDWLKTCHITTIAMESTGVYWLPAFEILEAAGFKVILVNARDAKNIPGHKTDVNDAQWLQKLHSFGLLRASFRPEHDISVLRSYLRQRERLTEYRAAHIQHMQKALMQMNVQLHHAVSDITGVTGLSIVRAIVSGERDPSMLIQYRDVRCKKTPEVLRQALTGNWQPEHLFALEQSVAFFDFYQEKIRECDAQIETSLLQLSTGIEEPEGVLPSARHRTKQPNQLSFDVRPLLWKITGADLTQIHGFGPYMALKFIAECGTDMNRWPDASHFTSWLCLSPGNKISGGKVLSSKTRRSSSRIAAALRLAATTIGRSDTALGAFYRRLSSRIGKA

SEQ ID NO: 455456 - protein, 322 aa, unidentified
MAMLSFGGIDVSKDRLDIMVLPDEQSSWVSNDAAGWAELVEQLRGSSITAIVVEASGGYERGVVRALLAAGMSVRQINPFKLRQFAKASGTLAKNDRLDARMIASFVAIMPTRPAQRQAPMIEQLAAMLTVRRQLSDHKVATENASRLLEGAMLQRLSRRRIAGLTADIDLLDQRLVEIVTADPALAHRFRLLTSMPGVGAVLACTLIALLPELGQMSRKQVAALVGLAPYDFDSGKLKGRRCIWGGRARVRHVLYMAALSASNWNPGLKAFHDRLEATGKKPKVVIVAVMRKMITTLNAMLRDGTTWVDRYSGRRSASTAR

SEQ ID NO: 455457 - protein, 344 aa, unidentified
MEHKFKLIFGIDVSKLTLDVTYFFDKKKEYIQVSNDAKGISKLVQMIGELGLCESDVLVCCENTGNYMDKLAFVMKGLSATFWVIHPVIMKSYRLDLQRSKNDKVDSAKIAEFALAHQHKSVSYHHPDQKTKEMKELHLLRKQLVGLRQKTLNFIASEQDKAVPGIMNTLVYEQIHSLLNDLVKEVEKSIKLLIKSEKTISTPFLILKSVPGIGDVTAQRMLIATDGFKKIKDYKSFACYAGIAPFARSSGTSVHYRPRTSKKADQDLKAIMHQGAISVTRKGQLYHSYYQNMKQRGKHHLWIMNSIMNMIAKCAFNQIKKMTEFDKEIFIKNKKSWHENLVLS

SEQ ID NO: 455458 - protein, 410 aa, unidentified
MLEVKVERCAGIDVAKKFVMVCVSTGLAHQRPKEEVRRFGTTVVELERLKAWLWETGCTEAVMESTGSYWKPVFNILEGSLKVVLANPVQVKALRGKKTDPKDCRWLAGLLRHGLVEGSFIPPRDIRDLRDLTRRRRTLLEEGTGEKNRVQKVLEDANVKIGNVLTDVFGMSGQAMLEALLENRMKAEEMANLAQGRLRPKIPDIIDTLEGHRMSDHHRLLVNQGLKHMRFIEEMISELEVQIYEKLKPYYKQVELACTVPGIGPAAAASILAETGMDMSEDGPFADCHHLASWSAICPGNNESGGKRKSGHTRKGNRWLRAALAQTGWAGAKKKNSDFQSRYHRVKLRRGSKRAATAVSHAQIIALYWVLRTGKPYEEHVGESEQTRRKSQIDHHLRRLTQLGYEIQHG

SEQ ID NO: 455459 - protein, 316 aa, unidentified
MNASEVFVGIDVSKETLDVAVRPSGERWRTTNDERGITELVSRLRRMGAMLVVMEATGGYETALALSVVEAKIAMRIVNPRQVRDFAKGKGLLAKTDSLDAAILAEYGEIYRPEARVLLDEQAREMADLLSRRRQLIEMKTAENNRLEHARGQVRKEILAHLSWLSRRIKKIDEDLDKRIRNSPLYLDKRERLKSVPGVGNQTALSLILNLPELGTLNRKQIAALAGVAPFNKDSGRRRGKRSIWGGRAQVRAVLYMAAVVASRHNDVFRDFYAKLCAAGKPKKLALTACMRKLLTVLNAMAKNQTSWTPSLATAR

SEQ ID NO: 455460 - protein, 458 aa, unidentified
MPRGHRRRVTRPVTMPILHPNTAGVDIGATEIYVCVPLDRDAEPIRRFGTFTEDLHVIADWLRKCGVTAVAMESTSVYWIPLFQVLEHRGFAVCLVNARAVKNVPGRKTDVQDCQWLQYLHAVGLLRASFRPPEAVCAVRTLLRHREALVQQAAAATQHMQKALNQMNLQLHHVLSDLTGVTGLAILDAILAGERDPAVLAGHRDYRVKASPETIMRALVGDYRPEHLFTLRQSLASYRHVQGLIEECNCEIQTRLGAFTSTIDPAQCPLPPVAARRKPHRKTPRFDLRTELYRILGTDLTAVPGCQIALVSTVFAELGTDLSAFPTAAHFASWLGLCPDNRISGGKVLSVRTRPVKHRVAYALRLAAQSLSRSQSVLGAFFRRMRAKLGGPKAITATAHKLARIIYHLLTTHEPYDDTRLAQADQQYRRRMESRIRSQAQALGYQLVPIAPVATTVS

SEQ ID NO: 455461 - protein, 415 aa, unidentified
MAEVSFPSQVLRGCGIDVHLKVVVATIKGEGIRKETRSFDTFTSSLTELKEWLLQNGITHVAMESTGVYWKPVYHVLEDAIPNVWIVNARHIKNVPGHKTDKMDSEWICKLLLAGLLKPSYIPPKEQRQLRDLTRYRNKLIQHVSSEKNRIMRILEDCNIKLSSVVSNTSGTTATKLIDWLCEGKFITLQDIESIYHGRLSATPEELLKACTGFVESHHVYMLQMIRRDIDQTTVLIDELGVKIREVLSKYDNAIELLKEIPGFSDKVVEDLVAEIGFDMSKFPSEKHLASWAGICPGNNESAGKKKSGRITHGNKQVKAVIVEAAWAATRTKNTFFSERYHRIAARRGKKRGLIAVAHSQIVAAYLILSTGARYHELGAQYQQEKIEKKRKAYLTAELKKLGYSVALEKKIATE

SEQ ID NO: 455462 - protein, 429 aa, unidentified
MQPGDIDVWLGLDVGKSSHHACALDHDGNTILDTPVDQDEKRLRRTIAKLQRRGTVLVIVDQPNTIGSLPLTVARDMGARTAYLPGGAMRKAAQLLPGGSKTDRRDAHVIASTALRMPETLRDCEPDDETMAALRLLSGWDEDTAHELTRTVNRLRGLLLHLHPALERALAGDRIKSDTALGLLEHYKGPDGLRRAGAARIREYARRHGLKGTAITDAVADAIGEQTVTVPGTRAAESLIPQLASDIRRLRDRRTDISRQVEELLADAPLLTVLTSMPGIAARTASQILLAIGSDIGRFKDAAHLAAYAGIAPVTRQSGTSIHGERPARGGNKRLKNALFQTAFAAIRLDPESRAYYDRKRAEGKRHNAAVMCLARRRCNVIYSMLRNGTLYQPGGTHTTTTAPPRTETTPAHAPRPRQDTTHPGIRRT

SEQ ID NO: 455463 - protein, 380 aa, unidentified
MKANSDTTPQLYIGLDVHKEKTSVALADPGAKGEIRHFGEVATSQVALDRLIRRIAKTKQIPLNAISVCYEAGGCGMWIARMLHKMKVPCTVIAPSLIPTKSGDHVKTDKKDAIKLARLLRAGELVSVFVPDETDEAIRDLCRARVDAIDDRRRAKTRLLALLRRLGFHYSGKTTWTDAHKRYLRDLSLPFPSHRVILEELISQIDQLDERIARYENHMESLHADWRCKPIVDAIMGLKGFQMIAAMMIVSEVGDFVRFTHPKQLMSYLGLPPGEYSSGGKSKRTGITKCGNSHARWIIVECATHYGKEPRVGANLSIRQEGLSRAIREISWSAQNRLYLRFTALRKRLMHHNKIKVAVARELCGVIWEIGYKIQSGTVK

SEQ ID NO: 455464 - protein, 342 aa, unidentified
MMIIGVDYHPSFQQIAFCNQETSECGEARLNHSDGEAERFYRDLKQRGISVRVGMEATGYSRWFERLLAELGFELWIGNAAEIKTKRVRKQKTDRNDARLLLRLMREGTFPRIWIPSLENRDLRQLLWHRHRLVQMRTRISNQLQALAMNEGQAWKKKLWSQQGRAELEKLALGPWASRRRQELLDLLDRLHPTIEELTSAVEKEARKRPEVLRLMTHPGVGALTALAYVLILGTPERFRCGKQIGSYVGMIPSEDSSAGKQRLGHISKQGNSLLRFLLVEAAQAATRVSSEWRRRYIHLAMRRHKSIAKVALGRKLAIRLYWMWRNGCEYSPSLEFGSYAG

SEQ ID NO: 455465 - protein, 422 aa, unidentified
MQEITEEPMELVERVCAIDIGKATLMTCVRAPHETRPGRRAQEVREYRTTTSALLGLADWLRCQQVELVAMEATSDYWKPVFYLLEAEGFTCWLLNARHVKNVPGRPKTDRLDAVWLAKVVERGMCRPSLVHPRPIRRLRDLTRYRRSLVRERSREKQRLEKTLEDAQIKLDSVVSDVHGVSGRHMLEAMIAGERDPKVLAQMARGVMRRKIAQLQEALSGHFDDHHGFLCAAMLRRIDTLGADITELDSKIAEVIAPFGGAVEQLDEITGVGLRSAQELIAEIGVNMAAFPTAAQLVSWAHFAPIDQQSAGKRKGGSTGKGNPWLAATLGEAVTAVSRTDTFLGDRYRRLARRRGRKRAIVAVGNSMLTIIWHLLSDPDARYQDLGAGHYESKINKKRRQHDLIRQLEHLTGQKVTLHPAA

SEQ ID NO: 455466 - protein, 351 aa, unidentified
MVHVGMDLHHRSSVVRALSDTTGELYPARTIHHDRIEELWQYLDSFGAEPIRVVFEAISNARWMYRLLGQRPNVEPVAVTPHKVKIIAETVSKTDKIDAGKLAWLSSVNMLPRAWLPDERVERLREMTRHRTDLLGIQTKCKNQITSGLVRLGMQRPYDNIFGSLGRRWLAEVPLPEVMRLQVEHWLTLLDATARRMLRMDRKIERIIKDDPVWNRAAVLLDTIPGVGKVTISTILSELGDWKRFRRRAEVASFAGLVPASKRSANTKRYGHISKRGSKELRRVLTEIAQGVARKVPRYGRLYDRVADQKCANVAKTAVARRLLEDAWTVLMKDEPFRLMPVQAESLTRAG

SEQ ID NO: 455467 - protein, 320 aa, unidentified
MATWVGIDISKDTADIGWFEESNKRHLKVSNDPDGFQKVLDSVPIDSKFVMEATGTYYLNFALFLAEKGIHVSVENPIRIKNHIRTDLQRSKDDKSDSFAIAKFGAEKNPRPWVPVTEKAIKLQQMAGLIDLYGKQIIQQSNQIHAYSQVKYVSTAVIKSLQKSIKFIQAEKARIEKKFIALVKKSFRRELEIIESIPGIGENTAARLIASVGDFKRFSNSRQLIAYFGLSPTKKQSGSSLNKRGPISRMGGGKMRSFLYFCGISAAKYNDDCKAMWTRMKAAGKPGKVIIIAIANKLVRQAFAMVQHNSIYIKNYGNSH

SEQ ID NO: 455468 - protein, 412 aa, unidentified
MDVFCGIDWAEDHHDIALVDRDGTLLARRRISDDAAGLAQLLGLLAEHGDSAEDPIPVAIETPRGLLTACLRATGRQVYPVNPMAVARYRDRHSIAGRKSDHGDAVVLAGVLRTDAHAHRPLPADTELAQAIAVLARAQQDAVWARTTCHNKLRSHLREYYPAFLAAFADMRGGINRPDARAILAAAPTPAAAAKLTPAQLRGLLRKAGRKRGIDAEAARLREAFTAEQMRQLPLVEQAMGRQAIALLGQLDAACAAADDLEQATIESFNQHPDAEIITSFPGLGPLTGARVLAETGDDRSRFADAKGLKAYAGAAPITRASGKTTAVLHRRIKNQRLAAAGYLWAFSALTASPGARGHYDKRKAGGDRHAAAQRNLFGRMLGCLHHCLATGQHYDEHAAFPAAPRQQAAAA

SEQ ID NO: 455469 - protein, 357 aa, unidentified
MKKRLTNNSINFNGKVVNIGIDVHKISWRVTALVEGVVVKAVTIKPSYSVLKKVLSEFKGARIRIAYEAGPAGFSLYDELTADHMECMVVPPSLIPVESGNRVKTDKKDSTKLAHYLEHNLLKRVWVLSKQERAHRQLLRTRRQISNHRSNVMRQIKSLLLFHGIHSPYEGPQIWTKSFVKWLRSINGDQYIVHSLNILVDLYEYLTQQVKQLTEEVIQLAGTEKYAHRIPLLTSIPGIGVLSAIEILVELQDVSRFKSAAQLSAFMGVTPSQYSSGERVRMGSITHPGNHRVRRLLVESSWTLIRKDPLLYRVYESIKKRRGAKRAIIAISRKLIIRIRRILLDGQPYKINHSLVA

SEQ ID NO: 455470 - protein, 410 aa, unidentified
MRFAGIDVGAERHMVAIVGEQGEVLCRSSPFGEDASGYARLFELLGPPEGCLLALEATGHYWRNLFVALLAKGYAVAVLNPLRTRRFAEEELQRTKTDAIDALGIARFAAQKRPPAAQLPDVATEELRELARLRERLAEDFASRLRQLHRAVDLGFPEFTRHVRTLESQLAATILSRYPTAASFRGASVKKLARIVYDGSHKIGEELARALIEAAAKSVGSYHSEPYRLRIKYLCEDLDVLRRRLKDLARDIECKLDDHEVGKLLTTIDGVGPLTAACLIAELGDPARFRSAGAIASYVGVAPRLRQSGKKRFFSGSPTIPFGNARLRKALWMVVLNAVRCNPWLRQYYERLRAAGKPGKVAVIAAMRKLLAAVWSVATHRRPGIRDRGKSQVTPRSMPREDDACGSGEL

SEQ ID NO: 455471 - protein, 377 aa, unidentified
MVKEMVIQNNQNGYRYLKNYIKHLDSLFILFESTGIYSRGMKRFCEIHKIDYLEMNPLEAKFKTSSLRSWKTDKSDAHKLALLAFRMKDSKVQRQSEEIYFELRERARFHLEMEINQNRLKVELVETLHQTFPGLEKLFTNRYSKIALNIAKAFPHPDFVSTLTHDELVEKVLHSTDKGISVNKAHKYVQKLIEIKNNSFPNVDKSSFLLQKVQYLCDKLLIGIEEMKEFDQEMIDLAKNTTEFENIISIPGIGELTAALLIGELGNIREFKTNKQLNAFVGIDIKRYQSGTSKSRDTINKRGNKKARRLLYLIIMNIIRGRNHYQSHIVDYYYKLREQPHGKTHKTAVIASINRLLKTIHYLIVNNKLYDYQKAPH

SEQ ID NO: 455472 - protein, 341 aa, unidentified
MGEVSTIGLDIAKSVFQVHGVDVAGSVVIRKRVSRAKVLEYFGGLPRCVVGIEACPSAHHWGRELQALGHLVRLIPPNYVKAYLKRSKNDANDAAAICEAVTRPSMRFVPIKTKEQQTVLMLHRTRQLLVRQRTMLSNALRGHLAELGIVSAKGRNGTAELLRIIADRRLSPAVCGILEVLARQYGAIGTEIASIDKNIMVLHRACEASRRLAEIPGIGPISATALVAEIGDWKAFGSGRSLAAWIGLVPKQYTTGGKDKLGRITKQGNRYLRWLLVVGAMAVIRYARNHGTEKRPWLGRLMERRPTKVAAVALANKIARMAWAIMVRDERYKEPKPLLAA

SEQ ID NO: 455473 - protein, 364 aa, unidentified
MTRYIFAGIDLGDKNSVARIAKDKDSSERFGFNNTRRGRARLLEELKRRSQAVKESRIVMAYEASSCGFVLRDEAQAEGLECHVLAPTKMEKSVDQRKHKNDDRDADDVVDRLRGHILAGTRLPTVWIPDAETRDDRELLRTRLQCSERLTQVKTQIQMLLKRQGLERPADLGSSRTKGYFQWLEALSVSESLNWGTRQSLASLLRQLQGIEAEIQHLDKLVDQLAQHPRHKAIVEALRKEKGVGLLTALVFRTEIGHAGRFRRGRHIGKFVGLTPTSHESGQQSDRKGHISRQGPPRLRKVLCQASWVHVRHDLVSQQFYQKLVQKNPKKKKIALVAVMRRLAVRLWHRMREAELELMPKYSE

SEQ ID NO: 455474 - protein, 418 aa, unidentified
MSDEVRWFVGFDWATEQHRACLLDAEGKPIPERDVTHGGAGLLELCTWLLETTGAQPAQIAVAIEMPRGPVVEVLLERGFAVFAINPKQLDRFRDRFTVAGAKDDSRDAKVLGHSLRTDRQAFRRLALDNPLVIELREWSRMHDELKQEQGRLANRVRDQLWRYYPQAGEVTDDLAADWFLDLWEKVPTPAQAARASEKTVARILKNHRIRRIDAAEVLRILRQPPLVVAPGTVEAASAHIRTVAARLRLVNQQLKETERRLDELCAAIEASAETGPGQICEQRDVAILRSCPGLGRITIATLLAEACEPLRRRDYHVLRVLSGQAPVTRRSGKSCIVLQRHACNNRLQNAVYHWSRVAIQHDPISRQRYAALRRRGHSHGRALRGVGDRLLYVLCTLLERQTLFDVGDTSPQQAAAA

SEQ ID NO: 455475 - protein, 343 aa, unidentified
MKISRVGVDLAKNVFQIHGTDAHGNAIWKRKLSRERWIEAICTKLPEGCEIGMEACAGSHHWARRLSEYGFNVKLIPPQFVTPYVKSNKNDANDAEAICEAMSRPSMRFVKMKTVEQQDIQAIHRIRSELMSHRIAKMNQIRGLVAEYGLVAPKQVSALRKAIPLWLEDAENGLTDRFRHLVSDLWRDLNYLEERISGLDAEIREVANTDPMAIRLQQLRGVGPLVATALIATVGNGDQFTKGKQMAASIGLTPRQYSSGGKDRLLGISKRGDAYLRTILIHGARSTIAHAKHREDRLSVWVMALAKRSHTNVAAVALANKTARMAWAMMRNNTDYDPERAVA

SEQ ID NO: 455476 - protein, 403 aa, unidentified
MNAVGIDVSKGKSTVAIFQPGDQVILKPRDFHHTQSDISSLIGIIKGLDGETKVCMEHTGRYYEPVASWLSDAGIFVSAVNPILIKEFGDDSLRTPKTDKADAKKIARYTLDRWTKLKQYSHMDKTRNQLKTMNRQFGFYMDQKTAMKNNLIALLDQTYPSANTFFDSPARSDGSQKWVDFVYTYWHVDCVRGKSLESFTEHYKNWCKRKGYHFSAAKAEEVYHDSADLIAVFPKDANTRMLIHQAVDMLNLASKTVESLRAEMDQTAATLPEYPVVMAMNGVGPTLGPQLIAEIGDVTRFVKRGSLTAFAGVDPGKNDSGKHSQKSVPTSKKGSPYLRKTLFQIMGSLLKRSPIDDPVYAFMDKKRTQGKPYYVYMTAGANKFLRIYYGRVNEYLSTLSEGE

SEQ ID NO: 455477 - protein, 411 aa, unidentified
MPVQHAVQVSPLTVVVAIDVGKNEFAMSVTDASRNRLLKPLLGCPMTASSSVRDVVAKITGLLPVGAAVKIGIEAAGHYHLPLLAPLVWPCGWELLELNPGHVSEQRKVLGKRTIKTDAIDLEAMTELLLAGRGLPVGHREAVLVELAAWAGHRSRRVQIRTATKNQLLGQLDRTFPGLTRALPDVLATKVGRLVAAEFADPTRLAALGVNRFIRFGATRGLQIRKPLAGKLIAAARDTLPMPDAAVARQVLAADLVLLADLDTQIEAAATELARLLPLSPFRTLSTVPGWGPVRAGNYAAAVGDPGRWPGPKQLYRAAGLNPIQYESAGKRRDFTISREGSVELRRALIDLGLGLWLNDPAAKQRAAGLRARGKKGGVIACAMAHRANRIAFALVRDQTNYDPKEWITHD

SEQ ID NO: 455478 - protein, 341 aa, unidentified
MEPLSGISVLKEIAMTVSSSSNTYNWVGVDVSKTYLDVHCLQSGRTSRYANNANGIQQLQAYIADLEHPAVVCEASGGYEREMVLTLSAAGVRVSVVNPLRVREFARAMGRIAKTDPLDAHCIAYFAQVVCPDPGVLALEVEQDIKALVKRREQLVEILSGEKNRRSQLQGPMADDVDAHIDWLKDHIEQLENQIKDLAANHQEWSERQALLQSTKGIGPVISIALLVYLPELGRLNRKEIAALVGVAPFNRDSGRYSGKRRIWGGRAEIRSLLYMATVVAIRYNPPLRAYYQHLREKGKLKKVAIVACMRKLLTCLNAMMRDNTPWQDDQVSAFFKPADA

SEQ ID NO: 455479 - protein, 403 aa, unidentified
MNTLYVGIDVSSKSNVIYLMLPNGDKHSNFSVANSHEGSTQLVKRILSALTSHSLDTVLIGLEATSVYGDNLVYFLREDATLAPFNRKIHVLNPKQVKKFHDAYNDLPKNDYVDSFVIADCLRFGRINKEVYMGDYRYKALQNLTRARFFAVQNLVKEKQRFMNVLFKTQEKVFSDTFSTTALAVYDEFESAEALANMDLHELTDFIIEKGKNRFPDPDAVAKAIQKAARSSYRLPKTVNDSVNQVLSISITSMKALESQIKEFDKAIKAQMELLPNVLISIPGIGPVYSAGIMAEIGDINRFNSQAALAKYAGLAWKQHQSGGFESEVTRLIPSGNRFLKYYLCEAAFSLVRCDKEYSDFYRLKYKEVNRCQHKRALALTARKFVRLVFRLLKDNRLYCPAK

SEQ ID NO: 455480 - protein, 402 aa, unidentified
MNAVGIDVSKGKSMIAVMRPFGEVVRSPYEVSHTDSELSELAKALKSLPGETRVVMEYTGYYHAPVAYVLCEAGIYVSVVNPMLVHDYGNNSLRRAKTDKKDAVKLANYAIDHWLSLPQYFPEDDVRLMLKTCYRQYEQLSKIRTMQKNNLISLLDSVFPGANTLFSSPPRADGSEKWVDFIAKFWHCQCVSNSSVKVFTERYEKWCRKHGYNFSADKAANIYALTCGHIYTMPKSDTTKMLVQQAVSQIQVSSAALVALRSQMQELSSKLPEYPVVMQMYGVGPTLGPQLIAEIGDIRRFHSKASLVAFAGVDAPPFQSGQIDVRSRSISKRGSSSLRRTLFLVMSVILQKAPEDEPIYQFMNKKRSEGKPYKVYMMASANKFLRIYYAKVKKRLDLLDQA

SEQ ID NO: 455481 - protein, 341 aa, unidentified
MESISTIGLDIAKSVFQVHAISEAGEIVVRRQLKRRQVLQFFGAIKPCLIGMEACATAHHWARELTKLGHDVRLMPPRYVKPYVKRNKNDAADAEAICEAVTRPTMRFVPVKTVDQQSVLMLHRTRQLFIRQRTTLINSIRAHLAEFGIVAGIGRHGVEALLEVIAKGEEDSVPTEARTCLLALAAQLELVKRQILEMDRRVLAWHRASSLSRALEAIPGVGPLISTALVASIPDPRVFRSGRDLSAWIGLVPKQNSTGGKEKLGSISKAGNRYLRQLLVVGALAVIRRAKQLGYTRHPWLVKLMERRSAKVAAVALANKMARIAWAMMARNEPYRAMQPV

SEQ ID NO: 455482 - protein, 458 aa, unidentified
MGRNKSRNKDRGTISVVHPNAAAIDVGATMHTAAVNADRAPEPVRSFGTFTTDLHRLIDWFAECGVDTVVMESTSVYWIPIFELLDARGFAVFLVNARDAKHVPGRKTDVSDAQWLQRLHSFGLLRASFRPKGQIAELRAYLRQRERLLEYGASHIQHMQKALTEMNVQLHHVVTDITGVTGLRIIRAILAGERDPAVLAGMRDRRCHATVETIEKALAGNYRVEHLFALEQALALYDTYQQKAFACDARIEAVLKELSVRRGREEGQLPAARQNRSSQQNSLLFDVRAALFALLGKDLTQINGLGPYLALKLIAECGDDLSAWPSAKHFTSWLCLAPSNKISGGKVLSARTRRSGSRAAALLRLAARTVGRTDTALGAFYRRLAARIGKAKAVTATARKIAVLFYNAVQHGMNYVDPGASSYETRYRARVIANLHRRAKAFGFVLQPVDPAPGVAVS

SEQ ID NO: 455483 - protein, 421 aa, unidentified
MLGVGIDFAEEFHLVALGTPGEGVIEIRRVEHTPEDLRQLFDKIGELEADPAEVRVVLETRHGMLVEALVDAGYVVVPVNPDLVARRRGPAKKKDDAEDARIACMIALDRFERLRPLVPHGEVAGELRAIARDDERAARDERRLLNRLRADLIATFPVALIIAGEDMGAPTFLNLLQAWPTAESLAGVSRDELVAFARSHHHGWPERFADKVAEALSAEVFVARPSLVRAKADTIRLEASQLLLLGAQRRSWERRMGELLLGGPRTGRERTVKEHDPGKAFPGGEIYLSFPGLGDRLAARVAAEIGDHIEQFDTPSSLQTYAGKAPVTRRSGKSEFVISCRLACNRYLRDAVQQWAFCSLRHSGWAREFYDAKRARGQSHHAALRALGNRWLEVLWHCLTKGVDYEEEVHVANRKRFLTAA

SEQ ID NO: 455484 - protein, 345 aa, unidentified
MHYCGIDVAMKSSYLYITDSAGRIKGKGELPTTAEDFRRALKRFVPGGLKVAVEAGPQTAWIHDFLVALGAEVHVVNPNKVRLIAESRRKTDKIDAKVLCELLRLDGLPHPVHVPDQETRSLRGLLVARRQLVSARTKVCNVVRGMLRQEGIRLPSRFLTSLAAWGRLLAMEFTHSHLGPVVEAYAETFKALTRSIQVLDKQLARREKADDRAARLQTMPKVGRIASLTFLAAVDQVERFGSSRKLVGYSGLAPTARSSGERTEYGSISREGRRELRAVWVQIAQLVAMDTGKATAPLRKWFSKVAFPRGKKTAIVALARKLLTIAYPLLKQQTEYDAKRLRRAA

SEQ ID NO: 455485 - protein, 345 aa, unidentified
MEPMYYIGLDVHKRKISYCVKDSGGKVYSEGSLSATRLDLDVWMKTLPQPWSAAMEATMFTGWIYDHLKPHAAALKVAHPLMLRAIAAAKKKNDRIDANKICDCLRCDFLPECYMAPTAIRERRRTLRYRNLLVRQMVQMKIKISSLLMEAGVSYNKQRLHKAGYFRELLATNPDIDEGLRSLLRLCRETVVRLQKTESALVRSLESDSLLMDRVERLMTIPAVGPITALTWALEVGDVQRFSSIKKAISYCGLCGAEKSSGSTVQRTPLSKQRNKHLQTTLIEAAKMAPRNSPELAMLYDKEKQKGNANRATLAVARKLVAYLVAVDRRQKEFLTVERETRTAA

SEQ ID NO: 455486 - protein, 400 aa, unidentified
MMTPDDIDVWVGLDVGKSAHHAHALDHDGNTLYDKPLKQDEKAIRTMLGKLSKHGRVLLVVDQPNTIGSLPLTVAGSMGIAVAYLPGGAMRRTAQLLPGDAKTDQRDAHVIAWAALKLPETLRDAGPDDETLAALKLLAGHDEDLAHESTRHVNRLRSLLLQTHPAFERALKGERITRDATLALLERYGGPMGVKRAGIEDVKDWAKSNGLRAGRIIDDMFKAIGEQTVTVPGTLMAETIIPSIAHDIKTIRDRRREVGRQVEKLLEDHPLLTVLTSMPGIGVRTASNILLGIGGDIANFKSSAHLASYAGISPVTGQSGTSIKGERPSRRGNKRLKNALWQTAFVASTKHPPSVAYYKRKREQGKHHNAAIICLARRRCDVIYSMLKNGTLYQEPALVA

SEQ ID NO: 455487 - protein, 470 aa, unidentified
MSRSQSPDPFAQGEIRSTEGLPVVNPHAAGADIGAESIYVCIPGPGQTQIVRSFGTYTADLHAIADWLVENGIQTIAMESTGVYWIPLFEVLEGGGIHCCLISGNLARRLPARHKTDVLDCQWIQTLHSLGLLTESFRPDADLIALRSLLRHRAQLIEHRSPHVLHMQKALIHMNIRLDQAVSDVTGQTGLAIIRAIVAGERDPHKLAALRNPRCKKTEDEIAQALTGTWREEHLFVLKQSLEFYDFYTRQIEACDLEIERTYSAIRPDWPDPAPDDREPLPPNKRGSHSKNLPKETPIRVRQHLRRLTGVDITAVDGLSLDLAQKIVSEIGTDMSQFPTVKHFTSWLRLCPNNQVTGGKTIRSSTGKSHNRARQAFLQAAASVACSDCAFGAFYRRLKARVGPAQAQVATAHKIARVVYHMLKFKVEYLPTSAQEYEQQFREREIRHLQRKAARLGFTLSPQPASGAVS

SEQ ID NO: 455488 - protein, 332 aa, unidentified
MTYIGIDVSKATFVVAYSPEKTSRTRTFKNTANGIHEFIRTISKDEHHCVMEATGNYSSLLVYLLSEAGIATSLENPLKVKNFARAMLSTVKTDEIDARLIALYGEKMQPAPYKLRNDAILTLKQKRTVIRQLKKQLIATKNLKGSMEVLPFFDSKCRKSIEQTIAFLAKQVKHLEDDLAVLADSEYKKQMDLLTSIKGIGVTLAAALIMTTGGFTYFGNAKQLTRYLGLSPTYQQSGTSVNFKGHINRNGDSTLRSQLYVAAFSSLRCNAECRACYDRLRSNGKPGKVAVIAVANKLVRQAFAVVKQEKPYVDGYVSTLRSTPASSETGKG

SEQ ID NO: 455489 - protein, 376 aa, unidentified
MRNNAFVPRDYDVFAGLDVDKKSISVTFTNHQGFIRSLHMPYSVEHLVNHVRKHFPDQKVAFAYEAGPTGYGLYDGLVANSYPCLIASPSMIPKAPGQRVKTNRLDGVSLSENLRGGQLRSIHVPSPVYRELRHLTQLRDTFVSEMVGMKQRIKSLLVLEGIGFPPAPAGSQWSFMVKAKLRKLPCSGTVRFKLDELLDSLEFNEKRVVKTTQQIRRFCQNDPELSRCIEYVMSVSGIGWIVASQLLARIGDWRELKNVRQLGGFLGLVPTEHSTGDRTDRGSITHTGDGRLRSKLIQASWSAIRQDDELREFFGSVCQSHARHLASRVAIVAVARKLSVRISVVLMKQRAYVVREKVESAPLTQEETSPQGTTRR

SEQ ID NO: 455490 - protein, 340 aa, unidentified
MQIAAIGLDLAKHVFQVHGIVADGQVAIRRRLRRAEVIAFFSSLPPSLVGLEACSTAHYWARELIALGHDVRLMPPTYVKPYVKRGKNDAADAEAICEAVTRPTMRFVPVKSAEQQSVLVLHRTRDLLIRQRTMLANAIRAHCAEFGTVVAQGRAQLAQLLARIADDARIPSLARGCLLALAQQLQELQVKIGEIERVLHAWHRSNEVSRRLETIPGVGPITASALAVTITDPTLFRSGRHLAAWLGLVPRQNSSGGKERLGGISKQGDRYIRRLLISGAHAVLQYAKKSRPGSQWTIGLLQRRPFKLVAVALANKTARIAWAVLTRGETYRSTREACAA

SEQ ID NO: 455491 - protein, 366 aa, unidentified
MSANATSVGLDVHARSVVGCGLDGRTGELFERRLTPDHGDIESWVRSLPGPVAVTYEAGPTGFGLARHLIGRGVECQVAAPSKLQRPSGDRVKTDLRDARHLARLLHLGEIVAVAVPSVEQEAARDLVRAREDVRGDLMAARHRLSKLLLRQGIVYYGGKPWTASHDRWLRARRRAEVFTVPGLGVAFDVAYDRVLDTVARRDRLDAAIAAMAADSEFTPVVTRLGCLRGVSTLTAFGLATEIGDWHRLGGRSIGAYLGLVPTESSSGGTRSQGSITKTGNGHARRLLIEAAWHHRKPYRVGVDLRRRLDKAAPPARDRGQRGNRRLHARWASFDARRKRAVVANTAIARELAGWCWSLAVLDGGD

SEQ ID NO: 455492 - protein, 442 aa, unidentified
MQILYSRCCGIDVHKDSLTVCVLIYSGTPEPKIRKREFATHKKALGNLRLWLFAQQVKQVAMESTGVYWKPVWQALEGNFELLLANPYQVKNLPGRKTDIRDSQWIAELLAHGLIRRSFVPPADTRNLRDLTRYRVRLVEEHNRIHNRIHKVLEDACIKFDTIATDILGVSGRRIIQAILDGYQHPMELAERVKGTLRGKIPELRLALNGRITAHHRFMLRELMDDLETVEVKIQRVEKEIAGRVDMRQVERLCSIPGVDVLTAWTLLAELGTDMNVFASPQHAASWAGLCPGNYESAGKRLSNRTRKGNRWLRRALCQSAWGASRKKDCYLAAFFYRHAAKQGLRKAIISLAHRILLIAFCLLRDSTEYEEAGGNYFDNLNPVRTRNRLIRRLQRLGVEISLTPRPDLPSIPPQTPPIRRKRGRPCKCAERLIHCIHTTYI

SEQ ID NO: 455493 - protein, 408 aa, unidentified
MVYIGIDIAKRSHVLSAVDDDGKAVIESFKFANTDRGFEKLLERLKKAGVEPGGSLSGMEATGHYWIALFDFMTSHGYDVAVINPIQSDAFRDVWTVRKVKTDAIDAAMIADLVRYKRYEPSALGEEATDELRSLARYRMSLVERSTMLKNRATAILDRVFPELDGLFSGSFGPTQRALLEHCSTPSQVLSTNVRTLERILREASGGKCGREKAEKLKAAARSSVGVGFGSRTLAFEIRLLMEELDFVRGQIDEVDGELARLLDETDGRWLLTVPGIGLVLAATIAGEIGDANRFDDAHQLMAYAGMDPTKSESGETVASDGNMSKRGPAALRWAFMQAADSARKYDPYFGDHYAKKKGEDKKHHYVALSGVARKLMGVSLALMKEQRPYEPTPPKHHLPGHLQEAAK

SEQ ID NO: 455494 - protein, 401 aa, unidentified
MNAVGIDVSKGKSMVCVMRPFGEVVLEPFEVLHTAQNLYDLAEKLKALDGETRVVLEATGNYHKPVAFVLHDAGLFVSVVNPVLIHDYDNNSLRRVKTDRKDAVKIANYTLDKWTRLRQYLPEDDTRLALKNCYRQYQQAVAIRTMLKNNLISSLDLTFPDANKLFTSPAKSNGCEKWVDFIGDFWHSECISSLSANAFAKKYLKWCQKHGYVFTRSKSDEIYACAVNSASLPKSPTSKLLIQQQVAQLKAVSQSVAAFRQEMLRLSQQLPEFDTVMEMYGVGPSLGPQLMAEIGDVRRFSSKKSLIAFAGIEPQPNDSGKVVGNDKGISKVGSAVLRRTLFLIMTVILQTQPQDEPVFQFMNKKRSEGKPYKVYMMASANKFLRIYYARVKAVMDSERSQ

SEQ ID NO: 455495 - protein, 327 aa, unidentified
MEPEYIGIDLHKAFFQVCAVSAAGERQWEHRWPTTDLGIAALLSRCDRRSRVAVEASSPTWAFVDRIVDQVGAVQVVDTRKTRIKAGYAAKTDRLDAQRLADALRRDSVVGIYYPPAAIRDLRELGRYRCHLARLQASLKQRIHALLLRQGVAAPRALFTQRGTTWLDACVLAGWAGHELRGLRHVLADVRKQLVPVLTAMRTIATTDAIAAALDQRPGFGPVFSVTLRAEVGTMSRFPDGSHLASYAGLVPRVERSGGRRWSGRITKTGSPWLRWVLIEAAIHQFRRPDDFGRWARRLALRIGGLKARVAVARALCSEVFDAWPRA

SEQ ID NO: 455496 - protein, 352 aa, unidentified
MYIGVDTHKKQHVLVAINEQGRRDGMHYSLNTPEGWAQSVAWARAHESACHWGIENSGSLGKGFAQFLLAQGETAVHEVSPHRTAQYRRRGRTQDKTDETDALAIARLMLAEGDQLPRVRRDDMSTELRLLSDHRDNMLVERTRLINQLHGQMLQIDPSYKEKSGRLTAESGVIYCRDLTIADADGLVQTRLRIVRQLAAQILRLDDDIAAVTADLERRVQESETPLLALRGVGTIVAARVIGELGTTPRISSAPALAALAGIAPVAVSSGGRGGYRLNRGGNRHLNRAIHIIALAQRRCEPRAQAYYAKKRAEGKSARAAMRCLKRRLVDVLYRALPQDQAGMALTDAPAA

SEQ ID NO: 455497 - protein, 325 aa, unidentified
MEKVFIGIDISKLTLDIYVKSYSSAQHYQIENNTKAIAKFFKSFNNTSNIIVTMENTGRYNFSLYAVLSTMNISLYVLNPLHLKRSIGLLRGKNDKLDSQRICGFIEKYYMDLEPWKSSSLAIQKLSVLRAERRHRIKIKSGLMAQQKDKELLKDIVDKEMIKLNKAMITLIDKQIKVIEEKMMSIINASIELKDQYKRLQSIPGVGKVLATLMIIKTKGFTEIKSARKMACYSGIAPFEHQSGSSIYYKPRVSTMADMELKKILHLAAMSAIRLKNDLAVYYHRKVQEGKNKMAVLNAVRNKIIHRIYAIIKNNSVYENNLLLS

SEQ ID NO: 455498 - protein, 411 aa, unidentified
MNAVGIDVSKRKSTVTIRQPGDKVILAPRDYRHTQSSINELIATIKSLDGETKVCMEHTGRYYEAVASWLSAAGIFVSAVNPWLIKDFGNDSIRAPKTDKADAKKIARFTLDRWANLRQYSRMDELRNQLKTMNRQFSFYMDQKTAMKNNLIALLDQTFPGANSFFDSPARPDGSQKWVDFVYTYWHVDCVRGKSPAAFTEHYKSWCKRKGYNFSASKAEEVYHAASDLIAVFPKDDNTKMLVRQAVSVLNVTSETVEALRVKMDQTASQMPEYDVVLSMDGVGPTLGPQLIAEIGDVTRFEHRGALTAFAGVDPRKKESGDYERRSNPTTKKGSPHLRKTLFQIMEGLIQRSPQDNPVYVFMDKKRAEGKPYYVYMTAGANKFLRIYYGKVNAFLSPKGDAEAEADESDS

SEQ ID NO: 455499 - protein, 365 aa, unidentified
MKKNTTTNQYVPTDVLKCTVIAVDLAKRVFQVAGQDAAGLTVYEERINSRESFHAFLRKLPTSITVLVETGPGAQAWAQLLKTQGNPVRILPAQHVANHRSGPKNDRNDALAILRAGRDTSISSVPVKSAAALAMQALHRVRQGYVRRRTAMSNQMRGLLLEHGLAMAQGDSAFSQGIPRILEDATQPLPDMLRELIDELLGEWSQLGESINVLTGRLETAAKNDETAKRLMTVRGIGPIISTAVIAKQTEPERFANARQFAAYFGLVPKQNSSGEKVRLGKMSKHGDAYLRSLAIQGAHAVLRQVKATSEDPDDRRLQRWVSRLGRKEAAVRLANRNLRIIWVLLQNDQTYRRQVGNAQEAAMS

SEQ ID NO: 455500 - protein, 395 aa, unidentified
MYKLLVGIDVSKERFSAAGMDSGGKEAFSRAYTMDSKGFEELLKAVRSLCEEDSKVLMAMESTGCYHINLFSFLNSQGIGALVVNPLLISNYAKLSLRKTKTDKKDAMTIARFLLDHHKEISQLSISQDNQDLRDLSRERESLSHLISATKVEIKRVLRTTFPELETVGDVYTGVMLRLIQEYPSARLVRAAKLKGIIKLLKEPRRGNKRTYTAEDIYRAAKTSIATVSPGKEIILRGKVATLLHLQERLEEITKLLTELCQSTRMEDLDILQSIKGVGPNTAAPLLAEMGSIENFSSHKKLIAFAGLDPSVTESGQYIGASRLSKRGNRHLRRAIYLMTTSVVSWNAWFKAYFQKRKAEGMAPQKALFATAHKLIRVIFAMLSQRTYFKVKEAK

SEQ ID NO: 455501 - protein, 313 aa, unidentified
MEQFVGIDVSKAVLDVAVRPAGDAWSVANSPEGIAQLVDRLREIAPKLIVLEASGGLERRAIAALAGARLPVVAVNPRQVRDFAKATGRLAKTDAIDAEVLALFAERIRPEVRPLPDEETQELQALVVRRRQVVDMITAEKNRLSAAPPSKRVRTAIGKTIKWLQKQLEEIDNDLDGAVRKSPAWREKDDLLNSVKGVGPVLSRTLLSMVPELGTLGRRQISALIGVAPLNRDSGTQRGRRSVWGGRASVRAVLYMCALAAIRSNPAIRAFYERLVAAGKLPKVAIVACMRKLLTILNAILRTKTPWTSEKAA

SEQ ID NO: 455502 - protein, 430 aa, unidentified
MTTELPTTPDDDPRWFVGFDWGSEKHRVALFDHTGKLIEHRDVAHTATAYAEFGDWLLRTTGATPAEIAVAIETTHGPVVDALIDRGFRVYAINPKQLDRFRDRYSVAGAKDDTRDADTLGRSLRTDREAFRQLSSDNPLIVQLREATRTAADLTKDLGRLTNQLRDLLWRYYPQMLALDDNLAANWLLELWQQAPTPAKGARLHQQTIARILKAHRIRRLDADQVRTILKEPPLPSAPGVTEAAVTHIRLLLPRIRLLNTQIKTNNAAIDALCGQLAGPQTIEPGESVPGQTIEQRDVAILHSVPGVGRIVLGTLLAEASGPLHRRDYHAIRTLAGQAPVTKRSGKSCFVQRRLACNKRLATTMYHWARVAVVHDMKSKQRYAALRARGCSHGRALRSVADRLLKLVCTLLQRQVLFDPNHNAKEAAVA

SEQ ID NO: 455503 - protein, 410 aa, unidentified
METIVKHAAGLDVHKAQVTACVRVPGRGRERAQELAEFQTTVRGLLALRDWLKADRVAQVAMEATGVYWKPVWAILEDEFDCLLVNARHVKQVPGRKTDVSDAAWLCQLLEAGLLRRSFVPPKPIRALRNLTRYRKAQIGERQREANRLHKLLEDTGIKLDCVATNILGKSGRAMLDALVAGTTDPEVLAELAQGKLGRRSRPCVRRSSAASTAQHALIVSAILAHLDFLDEQIQLLSDEIEAQLAPFAAAVELLCTIPGVQQRTAEVIVAEIGVEMSRFPSERHLASWAGQCPGNDRSAGKRRSGKTRHGSKWLDSALTEAAMAATRSKDVYLAAQYQRLRPRRGHGRALGAVKHSIITGCWHMLTTGELYREAGGDYFTRRDPERATRRLVAQLERLGHHVTLEAAAA

SEQ ID NO: 455504 - protein, 343 aa, unidentified
MSGAYEGKQIVGMDLHRRRSVVVRMTDTGERLETVRISNDPDYLRAVMARAGDAPEVVLEATYGWYWAADTLAELGANVHLAHPLGVKMFGLRRVKNDERDAADLADLLRMGRLPESWIAPPATRELRGWVRHRAKLVGLRSSVKNQIYAVLAAAGVAVSMSDLFGVAGRQLLATTLLAVESRSRVDSLLRIIEALDFEIDLYARLIAGRLRTDPGYHAIQTIPGVGPLLGAVFVAEIGDISRFQRPAQLASWAGLTPKHHESDTTVHRGRITKQGSRLVRWAAVEAVQRVPAHTRLGQTRDRVGQRRGRNIGAVAAARELMTLVFYGLRDHHIRCLTSTPAA

SEQ ID NO: 455505 - protein, 373 aa, unidentified
MTASMDEEAPAMESMRWVGVDVHAKESVAAVLDQATGEISTHRIAGRPEDVLLWLTTVAQPFRAVYEAGPTGYGLVRRAEERGLDVVVCAPGHILKNATDHIKVDKRDAVRLARLLSAGELRLVRVPQPDEEQLRDLVRSREDVRVDLTRIRNRIGKFLLRRELYPPRHAESWGVLHRKWLQQLRFEDRASELVFQDAMQAHDILVARREQLEQALAEIAANSPWSRTVARLRCLRGIDTLSALGLVAEVGDFRRFVHPRFLSSYLGLVPSEHSSGEKRRQGGITKAGSKHARRLLVEAAWQYRHVPRTSHHISQRQQGQDPRVIDIAWRAQRRLYKRWQRLHEERRKRSTVVAVAVGRELATYCWEIATLTG

SEQ ID NO: 455506 - protein, 274 aa, unidentified
MGIDVSKASLEIVLLFNDQEVSASQTVPNSEEGFDTLLSWIEKQTNRIPEETPEQIHVCLEASGGYQRPVARFLHERGLTVSVVNPQRTSAYADSQLTRSKTDKVDARLLARFCRREEPNPWEPSSSEQKSLKEMTRGLEQLKKERDRLKNQIGQSENPTVTGSLESVLESVGEQIDQLEEAIDQHVESTDTLARNRDLLETIQGVGSTTAALVLAELGDPERFESARQAAACAGLTPSHHRSGKPSAFKSRKFSAPKSTVLPSNCGPLVQRRR

SEQ ID NO: 455507 - protein, 386 aa, unidentified
MQSMNQEDRRVIGGVDAHADTHHAAVLDDRGALLGTESFEVSAAGYRELLAWLRSFGELDRVGVESTGSYAAGLTRHLLAASVEVLEVNQPHAHTRRRRGKTDAIDAEMAARHALSLSDPVTPKQTTGIVEAIRQLRVARESAVKSRSVAMLQLGDLIITAPSGLREQLATRKTLKGQAALCRRLRPDTDHLAEPVNAAKLALRSLARRIALLDEEIAELDTRLTPLVATAAPRTTALLGISTGHAGQLLVTAGQNIDRLRGEGAFAALCGASPTPIASGKRGRYRLNPGGDRQANRALHMIAVCRLRYCPRTRAYAARRTTEGKTKKEIMRCLKRYIAREAYHALRADLTDLQPASPTRSEHAISITCGAGFTGRTRHKISTTRP

SEQ ID NO: 455508 - protein, 391 aa, unidentified
MSTYFVGIDISKYKHDCCIINAADQTIVAKFTIQNDKVGFNELIISLQSLSTPDDIKIGFESTAHYALNLELFLEKAHHSFMEVNPVLISEYKKSTSLRRTKTDSVDCESIARWLMTVEYKPHSKGFYHAYSLKSLTRLRDRLIRQRSFYLVKITNVLDHTFPEFKPFFQERFSKTALYLLENYGSAEKMSHMNSASYENLRRISHGKFTPQKFIELKALATNTVGVNNSIFDTELNCLLTLYKETAKQVSVLEAQITELIEEVHPHYMSIPGIGPISAAVIYAEYGDISNFSSPAQMLAFAGLEPGISESGTESHKGRMVKRGSSQLRYTLMNCALPLIRFDVTFATYYAKKRSEGKPHRVAISHVTKKLVRVIFALERQNIDFVSTSLR

SEQ ID NO: 455509 - protein, 387 aa, unidentified
MPQPNDLSRSLAALDENSTLIAVIEMSQSSWLVAGIIPGVERHPAKKLNPDEAGLLQLLHRWRGEAKKAGRNINRIAVAFEAGRDGFWLARWLRAHAIEAYVIHPNSIAVSREHRRAKTDRLDTALLKRAFLGWLRGEREHCSMAAIPSLEEEDAKRPSRERENLIGERTRIGNRIKSTLARLGIRGFKPTLRTAAQQLERLRTPEAESIPPHTLAELRREMSRLHLLAEQIREIETARLERLERQPNRGAHPMIRLLAQVRGLGIETADMLAHEAFSRSLRDRRAVARYGGLTGAPDESGARRREKGLARAGNTRVRRGMIQLAWRFLMFQKDSALAQWYRTRTTDARSATRKTLIIALARKLLVALWRLVTTGDVPHGVVLRPAS

SEQ ID NO: 455510 - protein, 365 aa, unidentified
MKKIAYVGIDYHLNSLSLAVVVKGKNEPVDMVRLKNDDKLIRKYMSKLSERFEIKTCYEASSNGYSFQRKMAAWGYPCEVIAPSLIPRKPGDHRKNDFRDARDLAQNYAHGTLSIVHPPSEEEEAVRSLVRCRFAFKEAAKRVKQQINSFLLAQDQHWNRSKWTSQHRKWLWEMRMPNACLQQVLDEHLAHLDYLETRLAHLDGQIEQVATSPVYAPSVKKLAAMKGIKTLTAMLLIAEITDFRRFPNPRALMAFLGLIPSEDSSGDKRKDGAITRAGNKRCRSALIESVQHYARSPHMSAQMKSDLSQLDAHSAGVAVKCLKRLHKRFWALTLKGKLRPVAITAIARELVGFIWAMMQPQPAIA

SEQ ID NO: 455511 - protein, 347 aa, unidentified
MLIIGCDFHPGFQQVAIFDNRTGEIEGKRLQHRWEAEEFYRSLAGQEVWVGMEACGHYPWFEGLLAGLGMELWFGDAARVRASVVRKQKTDRRDAEHLLELLRQDRFPRIWVPSLEVRDVRQLLVHRHKQVQARTRTKNQLQAMALSCGVQKKYKLWTKAGRAELEQLPLLPYASERRKRLLEGLDGLEAEIVELDRRVAEEARQRPEAVRLMTHPGVGSVTALAMVLTLGPAERFGSGKQVGSYFGLIPSEESSGGKQRLGKISKQGSSFLRFLLVEAGQTAARYDPQLKRFYRRLAVRKNRSVAKVAVARKLATRLYLMLREDWTYAQLCQAVMQVSPSHSVAGE

SEQ ID NO: 455512 - protein, 427 aa, unidentified
MLKQNTEPDPAEEFAAFLALDWADEEHAFHLQVVGQSKIETGTLEQKPHVLGPWVAQLRERFGGRPIAVGLEQSRGALIHGLMAYDFLVLYPIHPTTVAKYREAFKSSGAKSDPLDAGQILEILTKHQDRLHRFNPDTVQTRLLGRLVEDRRKAVGLRTTHVQALGANLKEYFPQALELTSDNLSSRLACDLLLKWPTFSDFQQAEPSTLRSFYYGHNIRSPEVIERVLALAEKSQALTTDEALVESGSRLTQMYVGLIQALNPVIVKYDLRIERVFDAHPEVKIFTGLPGAGPALAPRLLAFFGTDRSRYAAALNVQSFTGVAPVTKSSGKSRVVYARAACPKFDRQTFHEFSRLSVTHCQWARNYVQYYTDKGKKYHTIIRALAYKWIRILHKCWQERTPYNDDLYMETLKKRGSIFATLHLQTK

SEQ ID NO: 455513 - protein, 412 aa, unidentified
MSIDPNAAAPRVTAGVDWAKDDHAVCVAGDQGEALERFTVRNDAAGLRQMAARLLRAGALQAGIERGDGPVVETLLQAGLTVFVIPPGQVKNLRSRYGSAGNKDDRFDAYVLADVVRTDSRRLRPMERDSERTAALRSAVRARRDLVGHRVGAANQLRAHLQAVFPGAAALFAHIDSEITLAFLSRFTTQEQADWLSPLRLAAWLKSVSYSGRTDPAVLHARLLAAPRGKSGPHASALAGVTVALVAVLRTLNAQIQALADSIAAQLDAHPDAAIFQSLPRSGTIRAARLLAEIGDARGRFPTRDSLTCLAGVAPSTRQSGKVKSVTFRWGADKQLRDALCDFAGGSRPASPWAADLYDKAVARGCDHPHAVRIVARAWAHVIWRCWQDHVPYDPAAHNSLQTILKQQPTAA

SEQ ID NO: 455514 - protein, 348 aa, unidentified
MLHAGLDLSRKRLDYCLLDERGRRVEVAAAPPDLDGLAGLARRVEQRHGRVPVRAAIESMNGARFVHDTLERLGWEVEVADAQKVKGLAPLACKTDKIDAWVLAELSRRELVPAIWLPDFELRAERERARFRLFLVRKRSALKHRVHAQLLAFGHACPVSDLFGRQGRELLERLEFPEPWRSGVLAAVAMIDDLERQIAAIDRELRELGADHRYVPLLQSVPGVAWVLGYTIAAEIGDIRRFDSPAKLCGYTGLCPRVYQSGAKDRRGQLTHAGPRYLRWALVEAATHACRHPAYRERYQRNKRRLGRQRGAKVAQVDIARKLAEAIWHMLTRNRPFAPVGATPPLTA

SEQ ID NO: 455515 - protein, 325 aa, unidentified
MSNKILYCGIDISAESFDICMLQPEGDFAWHQLSNDNKGFRQLLKLCSGNYHFVMETTGVFHLPLCLFLHEKHCAYSVVNALQIKRYIQMNLERNKTDKKDAWHICRYGIERRPAQYEMPEQQYFECRALNSSIETITAEITAFTNKIYAQKKQKTDTAAVLRSYHQIIRTLKAELKKLKAELQKKMLLWQPGLVKQVSSVKGIGSRATTTLIVATQGFKNTHSYQQLISYAGLSPKEYRSGKSIKGKVRISKRGGKQLRHILYMCALNAKATNSACKALYDRLVAKGKNKKLALIAVCNKLLKQVFAVVKSGKLYNDNYYKQIA

SEQ ID NO: 455516 - protein, 409 aa, unidentified
MSSVYVVAGIDVHKKMQAVVVAEVREHGIEYRERCCGATVRELKELAEWLAGQKVTEVAMESTAQYWRPVWMVLEQAGFKLHLAQPRSTLAPRGRKSDFADARRIVNRLLAQDLTLSYVPERAQRQWRTITRLRVRMSDQQVRLRNQMEGLLEESHIKLSSVVSDLMGVSGRRILWAMVKGESDPVQLAALAESRLKASPEQLQEALRGSLDAVQRSLLKMLLEQWDQFQTHIGQLEQHMHEAMKPQQQVIERIVEIPGVSLVAAHQIVAEVGPQAAAFDAPEKLASWVGVCPGMQQSAGKCYSTRSAKGNPMMRRLLTQCAWAAVRVQGSIFQHKFRSLLPRLGARSAIWAIAHLLLRITWKLLHDQVPYQERGALLDPLTAQRRRKRYIRELRNLGYAVSLTPLSAS

SEQ ID NO: 455517 - protein, 406 aa, unidentified
MFQRENKKACVSLDVSKGSSHVQAFYSVGQKATDVCVIKHTKSGFEKLKEIIVALENTTGEKCVVVFECTGVYSKPVENYLQKIGRKYFLIPPLLSAKVRKSDIRPTKTDSKDCETIANVYYLKKIKPAKPFEKLHDKLKSFCSYYLFLMNRTTCMKTKYRHYLDNVFPRIDEYFNVYSPFFIDLIIKNPNPQKLKKKNDEFLYKFITSYDYFGNGKAAVFINSFHRYFEDAAIDINEDDAAIDVLSSAAKKLQEDMKTLDNLLEEIILLGMKTEEYKYLITIPGMTKNTASRIAAEISGIDRFPTASKFIAYAGIDPTVKESGKMTSDHLPITHKGNQRLRCLFYLVASGTSKSKSEGNPVRDFIIKKKSDGLSAKAAIIAGCNKLARIIYAVCSKREPFSLQNQ

SEQ ID NO: 455518 - protein, 348 aa, unidentified
MAVVADHFEHIVGIDTHARTHTYCVVEARTGTVIDTAAFPTTKAGNSRAIGWIARRSKGTTVLAAVEGTSSYGAGITAALTAIGIEVAEIRPLSRPSRARTGKSDPIDAEAAARVVLGEDISRLAQPRRTGDRAALRVLLAARSLMDQQRTANRNALTALLRSVDLGIDARKPITDAQIATISAWRSTRDTGSTRVFRTEAKRLATTILEQSALLQQNHRDLAALTEALAPGLQSIPGVGPVTGAILVTSYSHHGRVRSEAAFASLGGIAPLPASSGNTSRHRLSRAGDRQLNRAIDVIVRSRLSYDPATRAYAERRRTEGLSKREIRRCLKRYVCRALYRELRARMT

SEQ ID NO: 455519 - protein, 313 aa, unidentified
MKVLIGVDPHKASLAVAALEEAKGQLLERASFPQDRIGLKSLERWAKRFPERRWAVENAGGLGRHLAVRLAGSGESVVDVPPKLSARVRVLSTGNARKNDRVDAVATTLAASRNVRLATVDPEAASEVMRLLSERREDLIAERTRALNRLHGLLRDLVPGGVARTLSADRAARILRGIRAQGGASARLRRRLASEVLRDVRTLDRKIADLNGRIEAEVEASGTTLTEIFGVGPILAARIIGTVGNVARFPTKAHFASYAGTAPVEASSGEVVRHRLSLAGNRKLNYALHMVAVCQARFGHSRRYLLPQEDRGG

SEQ ID NO: 455520 - protein, 344 aa, unidentified
MSEVIIIGLDIAKYVFHVHGADERGRVIFSKRISRGKLLDFFAAQPNCTVALEACGGAHHWARQLTQLGHEVRLIPPAYVKPFVKRQKNDAIDAEAICEAAQRPSMRFVAVKSERQQAAGLVFRTRDLLVRQRTQLINAIRGHLTEYGWIAPKGPSHVAMLADLLEEEEMASSLPEAARAMFRLMLDLLAGLNGKIADLDKEIARRAREDEVSRRLMTIPGIGPISATAIAALAPPAETFAKGRDFAAWNALVLLQRSTGGKRKLGATSKMGERTLRRLLIIGSSTVVLQASKRGAPKGSWLDQMLARKPRMLVTVALANKMARIIWALLVKQENYRAPVAAKA

SEQ ID NO: 455521 - protein, 318 aa, unidentified
MEEEIGFEQLVSRGCGLDVHKKEIVATIRGTGLRKETRSFGATTRSLTELKDWLLENEIIHVAMESTGVYWKPVLNILEPGGFTILVVNARHIKYVPGHKTDKKDRAWICKLLLGGLLKGSYVPEVNQRNLRDLTRYRRKLVGQQSAEKNRMIRIFEDANLKLSSVFSDVTGVTCTRVIDSIIRGKDDPEELIELCKHKNLKTSREEIKEAIRGHMTDHHRFMLSIIRKDIENIQSLINELDKKIENLMVPYAEEIARISEIPGVGFQTAKELIAEIGTDMSQFPTEGHLASWAGMCPGNNESAGKKKVPAPLTEVNR

SEQ ID NO: 455522 - protein, 404 aa, unidentified
MDDPTVRFGGVDWAIDAHAACAVGAEGEVAGEFDVEHSAEGLRELCRRLVKLGVRRVAIERPDGPVVDALIEARLEVVVVSSRSVKALRERYGTSGNKCDRSDAYVLADCLRTDGHRWSSLEPDSPATVTLRSHVRARKDLVETRVATANQLRAHLRVCFPGAVGLFAEMDSAISLRFLERFPSATRAGWLSEKRLGAWLRANGYCGRKSAAELFGRLEDAPRGLLGDEGDTRGAVTLAYVAVLKTLRAQVDELETRIAELLDAHPDAAIFQSLPRSGTVRAATLLAEIGDCRARFPEPEALVCLAGVAPSTRASGRHRAVTFRWSADKKLRDALCDFAGDSWRGNLWAEHRYRQLRADGKSHPHAERILARSWAHVIWRCWQDRTPYDPTKHRALQRLTAEAA

SEQ ID NO: 455523 - protein, 321 aa, unidentified
MNSSNIIAGIDVSKTKLDIHIHPFGHHKVFENNVQAIDQILDFLRLHNVSKVGFEATGGYEKLCAYTLLSNGFEVYVIQPRWVRDYAKSLGITTKTDKIDCSIISRYINNTDMRVTPLTVDNGNIDCLKQKLSRRNQLVEIAKIQKTQIQQVTDISIIKQIEELLAILHNQIKTLEDEITTFIDQNQELKKKYVSITSIPGVSKITAITLICYLPELGTLQKKQISSLVGLAPFNRDSGFSRGKRCIHGDRSQIRTVLHMCILSAQKVNSYIKPFFTRLYNQYKKPYKIASTVAMRKLLLLANSLVRDGRVFTEEYSPKSA

SEQ ID NO: 455524 - protein, 370 aa, unidentified
MNNSIFVGLDVHKATISVAVAEGMRGGEVRNLGIIPNRADQIDKLANKLGKGDRQVSFCYEAGPCGYGLHRQLTGLGHNCIVVAPSLIPMKAGDRVKTDRRDAAMLAKLHRSGELTAVWIPDAAHEAMRDLVRARATAMRVLGKARQHLQGFLLRHGRIYAGKKGWTLAYRRWLTTVRFDHPASQIVLQDYIHAVTDAEARVDCLTKRIEELAPQWSMTPFVEAVQAMRGVAFIVAVTVVAEVGDFSRFDNPRQLMAFLGLVPSEHSSGATIRRGGITKAGNALARRALIEGAWTYRMQARVSRKLHDRNERLPQAIRDIAWKAQVRLCARYRRLSAAGKPKVIVTTAIAREMVGFLWAITRQVQLRPAA

SEQ ID NO: 455525 - protein, 341 aa, unidentified
MEHCGIDLHTTSSEIAVIGERGEVSEQARLATTETSLRRWFGGRPAMVICLEAGGQSAWAARILQSLGHEVVVANPWRVRLIAEATLKNDQVDAVTLARLVRADRRLLCPIVHRSAETQRQRGVLRARRVLVGARTACLNASRGILRSFGIRTPAKKAARLAARLAEASIPEELVAVVAPLVQLALELDERIEALDEQVEALGASHPEVNLFRTVPGVGPVVALSYALCIEDPQRFARSRDLAGYLGLRPKMRESGTTSRFGRITHQGDTEMRMLLVQAAHCLLRARADSDLKRWAVGVAGRVGKQKAVVALARKLAVVMHAMWVRGEVFRPFSKAVDAAA

SEQ ID NO: 455526 - protein, 343 aa, unidentified
MQTVTTIGVDIAKSVFQVHGIDAAGQVVIRRQLRRRHVLTFFQKLPPCLVGIEACASSHYWSRELQVLGHTVRLMPPAYVKPYVKRQKNDATDAEAICEAVSRPNMRFVETKTAEQQSCLMLHRTRHLFIRQQTAVINSIRAQLAELGIVAPVGRRGVDQLLVIVADPSDKRLPEIARICIAALGAQLQMLKLRILEFDRLIRAWHRSNEVSRRLDRIPGVGPALATALVASIPDPKVFRSGRDFSAWIGLVPKQNSSGGKDRLGNISKRGDRYLRSLFTTGALAVIRYAKIHGTRHRPWLTALLARRPTKVAAIALANKLARMAWAMMARNEDYKEPVALAA

SEQ ID NO: 455527 - protein, 437 aa, unidentified
MSQNKNHAKKSVCLQSLPLIHPHAAGIDVGAKEHVVAVPADRDPRPVRSFKAFTPDLYELAEWLQQCGVKTVALESTGIYWITLYEILEERGFEVRVLNARHVKNVPGRTKTDVLDCQWIQKLHSFGLLSGSFRPDQQIRTLRSLMRLRDNLVVQSTQSVHHMQKALFEMNVQLSNVISDIVGESGMRILEAILAGEHDPARLATLCTPRIKAARETVAKSLHGNWREELLFSLRVALDSFRFAQGKIAECDARITEHLAQFADRAVLETPPSSLKSELHRVCGGDLTKIPGIKEQAAQIIISEVGLDMTRWNTEKQFSSFLGLCPNNSISGGKVLRRSTRKVYNRAADALRLCSQSLTHSKTALGAKYRRLKGRLGAPKAIVAMAHHLARLVYRMLRYGRQYVEKGIAEYEIKFRLQRLKWLKHEAKSLDTHLLTA

SEQ ID NO: 455528 - protein, 357 aa, unidentified
MKKLFIGIDFSKEKLDATIILACGMYEIGSREYGCFPNNTTGYRKLCNWVKTNAWNTIAEEWLFCGEDTGSCSIGLSKWLYGKGYDIWIENAYAIKHSSGIQRVKNDKADSAIIAEYAWRQQDKVVPFEPLNESLAQLREIFLYRHKLVGQRVAMELRKEDKSQSNKSKAISFINRKSKHLIAEINKTIAECDKAIDSIIEADEELKENYAIITSIKGVARQNATCMLVYTNNFKKFGYDPRKIACYYGVAPFGKQSGTSVNTPAHTSHFANKLIKSLLGQAAHIAKIYNPEIRDYYQRLISKGKKPQVALNNVKNKLIRIIVALVRKKVPYDQNTYKYYEEREVIERKKNEKLIYC

SEQ ID NO: 455529 - protein, 346 aa, unidentified
MKKIFIGIDFSKEKFDVVIIMAENLEEKAPRVHEQFANDKAGYRKFLKWVKVNSHGVDMSLWLFCGENTGDYSKGLANFLYGKGCDMWLENAKCIKDSCGIRRLKSDRADAAMIAEYAMRNHDRMTLYEPLSRPLAQLRELFLFRQMNVRKRSGYIVRKGEKGRTLDSSPAKSFMARKCKHMIAELDKTIKECDKMIEALIASDRDLQETYEIVTSVPGIGAQNAVCMMVYTDNFKRFDCNPRKIACYYGIAPFGHDSGTSVHCDPHVHYMANKTIKGILTQAALCAINHCPPVAHYYARLIERGKKTMVALNNVKNKLVRIVTALVRTKQKFIPEYEFAKRYAMD

SEQ ID NO: 455530 - protein, 378 aa, unidentified
MDRASTSTPYADRLFCAMELSKNTWLLGIQFPDRQQGSVYSIKGGDSEGLMAKLIAACGRWTKVTGRKPSILLCYEAGYDAFWLARFLEARGVECLVIDSASMQVNRRSRRAKTDRIDLARLLRALIAWCRGERHVWSVVRIPSVDEEDLRRSHRERSRLISERTAHVNRIKGLLFAQGIRGINVKAGYKTLRIDKLVTGEGRPLPPRLAHEIAREIDRLRLVQQQIAAIEQERDMSPTTCKETEKKRAQLLLLKGIGPTASAVMAREVYYRQFGNRRQVAGFLGLATSPYDSGQMEHSQGISRTGSGPVRVTMIQIAWLWIKHQPKSAITQWFLQRTTGQSGRIKRIMIVAVARKLAIALWRYLEQGLVSQGATLTR

SEQ ID NO: 455531 - protein, 449 aa, unidentified
MSKPILAVGIDPAKRVHRAIGVLFPDEVVFDCELPNALDAIQSLDLRLAELAATHAAELVYGLEDHRRYGRLLCEVLTERGRDVRVVNPLWTNRQRAFYGQDKDDAIDGRSIAAVVLRRRDQLPLANDFGLVAQAIREAERAIEDLGKKRTELVNRLHLQLNDVYTSAYETYFGKLKSPIALRFFRRFPIPQDLGGQDAVQLSKVILGLANGRVGPHKGRDREKFLQAKAEGILKTSASLRQTPRTPALELKAELIRQLCDELLVNHDRVTRLERMLRKQLLPATGQTITTMPGIGTILAAAIIGETASVARFRSRAAYAVYNGTAPARHSTGGRERHKARRDCNHRLKRAFWLAARAAALHDPLAKAYFNQCKSRGLNYNECIKRIARRMSDIVYSLLKSGRDYDRTIVEQAIQKRQEQVANADDSRVKEALPIPDQKRLSRRSHGGN

SEQ ID NO: 455532 - protein, 410 aa, unidentified
MEVLYPHCAGLDVHKETVVACLRHMVDGTVKREIRTVKTTTKDLLGLSDWLASEGCTHIVMEATGVYWKPVWHVLGDGDFGLVLANAAHVKNVPGRKTDINDATWLADLLAHGLVRGSFVPDAQTQEMRGLLRTRKQLVRERTSHVQRLQKTLEDANIKLDSVISDVMGMSGRAMVEALIAGETDPDKLVALANRRIKAPPEELREALRGRVTKHHRFLLRLHRQQIDALDAAICGIDQEVDANLAPFRTAIRLLTTIPGVSDLSAQTILAEIGNDMSRFSTEGHLISWAGLCPRNDESAGKRRSNRLRKGAPWLKTALIQCAWAAARKKGSYLQAQFHRLRSRRGAKKAIGAVAASILTAVYHMLKDGTLYADLGADHFDRRAKAVQTKRLVNRLRNLGYAVQITPLAA

SEQ ID NO: 455533 - protein, 321 aa, unidentified
MNKSTLFIGIDISKDVFDVYDPIQGHCQFTNNVKGFRSFYKSLGANTWCVMEATGCYHQQLALFLFDKEIRVTVMNPLVIKRFIQMKLNQVKTDKSDAKMICHYGQEQKIDLWQPSPQYVEDCKQLQTITQLYFKQSTAIKNKLHALQTRGYKRNKMISSLKRQLKCLQKEIKLLETEMEQLIKANQQNLYTRLNTIPGIGKKTAILLIVTTNGFKDFESSAQISSYLGLAPNERSSGSSIRGKTRISKAGNPLVRNHLFLCSFTASIHNPQCKALYERIVAKGKSKKLALIAVCNKLIKQAYGISKSGLPYDKNYVSKLA

SEQ ID NO: 455534 - protein, 357 aa, unidentified
MTICIGIDVHKKKCIATLKRDSQEIVEQTSFYNNRHGIKEFIEHIKLYDEGAIAVCESTGNYWIRLHDTLEDNGIDTVLANPIKTKIIAQAKLKDDKIDSNVLADLLRADLVYTSFVPDKEHRELRQIVRTRVDLVATKTSIKNKVHAILAKYDYSCPTNDIFSQKAIQWLKTVDLSWIDRMALDAYLETLCGIEKQIKIFTAKIASISKEDVRVRLLMTIPGIDYITALTIVSEIVDIQRFSTPWKLVGYAGLAPSKRESGTTHRRGGRITRQGSRWIRFTIVESATTAIMYDDRISKFYRRIASRRGAQKAKVAAAKEMLVIIWHMLTKNEPYRTKNNDLVQRKYKRMERESVLA

SEQ ID NO: 455535 - protein, 343 aa, unidentified
MAIVGAFDVHRAQLTYDYISTETGEIRVGRIRPADREHLRAWLGRFEGEEEVVFAVEACTGWRYVVDELRRAGCEVHLAEPADLSRDRGPKKRAKTDAADARHLRELLQQDRIPESWVPPTGVLEARAMVRLYKDLTEERVGWAQRIRATLFHQGVPSLESVLNASGRELLPGVELSPAGHRAVEVGLRQIDRLSAEIKMLGQELRGRAQVQPGCRALVVAHYGVGPILAFAIWAEMGDPRRFSSSSDAVRYAGLDITVYSTDGKRSRGHLSRQGPSLLRWALYEAALHASRLTSPDHPYYEAVKARHQGDAQIAILSVARKLARRCYHTLRELGSEAWPAAA

SEQ ID NO: 455536 - protein, 368 aa, unidentified
MKKRITFVGLDTHKNSIEVALADDGRNTEVRLYGSIGGDLASLDKMIRKLQATGTELRFVYEAGPCGYQIYRHLRAQGFHCDVVAPSMVPKRSGDRIKTDRRDACNLARLYRAGELTAIYVPQEDDEAMRDLVRGRQDAINAQRKVRQQLGGFLLRHGFRYPGKCAWTLAHRRWLAGVRMPHPAQQIMLQEYIHSVEECTQRVHRLTEQILQLMPDWRMRPLVGALQALRGVAPVVAATAVAEIGPMGRFERPRQLMAYLGLVPSESSSGGSVRRGAITKTGNGHARRALIEAAQAYSHPARISRVMCKRQEAVPEPIRQIAWKAQLRLCARFRKLTARGKSRNRVVTAIARELSGFMWAIAKQVPVP

SEQ ID NO: 455537 - protein, 379 aa, unidentified
MEIITRNEKILYIGIDVHKDTYSLCCFDFHKNELSDEMTIKATTKAVIKYLEAIKKKHREEILFACGYEAGPTGYGLCRGLQKAGYGCVVMAPTTMSNPDGKRRVKTDRIDARAIARILAYKSYSQVHLPSEEMEALKEYTRARDAKKRMFKKAKQELLSFLLRNGKSYPESGNYWTEKFFKWVKTVQFSEKWMQEAFNEYLSEVYSLKAKIELMDMKIREIAELEIIKDKVDKLVCFSGIDVTTAVETAVEIHDFTRFATAAQFVSYLGLCPGEDSSGKTKNMLPLTKAGNKRVRALFCESAKAIKRTNPYGQKSKRILERQKNASPEIVAYADKATKRIRTKMRHLEERGKNYNVSSAAGARELACFVWGMMNGKIA

SEQ ID NO: 455538 - protein, 341 aa, unidentified
MTDKQTVIGVDIAKRVFQVHEVDWQTDEVISVQLRREKFLEHFVNRTPCLIGMEACGGAHYWARQLMAMGHAVKLLPAMQVKAFVYGNKNDAADARAIWTAVQQPGVKAVAVKSEAQQAVLAMHRMRQQLVKFRTAQINALRGLLTEYGEVMAQGFAAVAKAVPGVLARLVDKLPAVLIDTLREQFTRICDLNKQVTEIERRLQAWLKQNEACRRIAEISGVGLLTATAAVATMGNPAAFKSGREFAAWLGLVPRQVGTGGKVKLLGISKRGDTYLRTLLIHGARSVLWNSKELPSWAASATRHRHVNVAAVAIANRTARTLWALLAHGRDYEPNYASRPA

SEQ ID NO: 455539 - protein, 347 aa, unidentified
MKHYVGLDVSMKETSICVVDETRTVVKEGKVGSEPETIAAWLKRTGLSFERVGLEAGSLAPAMHDGLAAAGLPVVCLDARHLKAATSAMPVKTDRIDARNIAWALHAGWYRVVHVKSQATHKLRALLRSREMLVRSRVMLDNHLRGILKAFGLKVGKVDPGRLDQRVRELVEGDEVLELVVGAILSVRREVLQRFDDLHRMVLAAVKADPVCRLLVSVPGVGPVTALAFRTAVEDPTRFAKSSLVGAHFGLTPRKYASGETDRNGGISRCGDRMVRSLLCEAANVLLTRVQRWSWLKRWGVEVARRRGKVRAQVAVARRLAVIMHRMWIDGTPFRWSRDGADEAAPA

SEQ ID NO: 455540 - protein, 409 aa, unidentified
MRIIGLDIHRAFAEAVAWDDGKLKRLGRVDMRRHLLEAFAKKLTKEDVVVVEATGNAASVAAVIAPHVKKVVIANPKQVRIIAHAKIKTDTIDASVLAQLYASGFLPEVWIPDQPTQALRRQVTRRNQIVRQRSRLKNIIQSILHSHLIPSCPHADLCGAGGRAWLFHQVLPEDERLAVERHLREFDRLGEDLKVIERDLARSALGNEGVKRLMTIPGVDMVVALAIAAAIGEVRRFDRPEKLVGYLGLNPSVRQSGPGPAYHGRITKQGRGHARGMLVEAAWAAARAPGPLRAFFLRVRVRRGQHVAAVATARKLAVIIWHLLSKGESYAWARPALHARKLRDLELKAGYRAERGQKGAAHAYNIKSRRDQERRWVEQAEAAYARFVAGWNPRGPKRARTGAANEVRR

SEQ ID NO: 455541 - protein, 341 aa, unidentified
MNPDREVPDVEKIFHDEESVRRLIGRFPEPRLLRTCYEAGPTGYDLARLLASMGVSCQVIAPSMIPKAPGDKVKTDTRDCRRLARLHRAGELVAVRIPTTGEEAVRDLCRTRADMVEDLTRARNRLTKFLLRHSRVWRGGVNWTHKHEDWLAVQRFEEPAMQTTFEHYRAVVLGRDAQLAAVEADLVGYFTREPFAAGVARLGAYRGVTHMGALALQAEVCDWRRFGRASALMGFVGLVPSEYSSGGSTHRGHITRAGNVHLRTQLVEAAWAYQHRPAVGVEIAKRHEGLPPEVVARAWKAQLRLCGRFRHLAAKKNTKSVVAAAVARELAGFLWAEMTAA

SEQ ID NO: 455542 - protein, 391 aa, unidentified
MSMYFVGIDISKYKHDCCIISAADQQIVSKFTVKNDKDGFEHLLTTLNSLSNPEDIKIGFESTAHYALNLELFLENAHHSFMEVNPVLIKEYKKSTTLRRTKTDSVDCESIARWLMTVEYKPHSKGFYHSYSLKSLTRLRDRLIRQRSFYLVKITNVLDHTFPEFKPFFNERLSKTAIYLLENYGSAEKMAHMNSASYDKLRCASRDKFSIQQFLRLKELAANTIGVNNSIFDIELNSLLTLYNSLCKEIKTLEAEITKLIEEVHPHYMSIPGIGPISAAVIYAEYGDISNFSNPGQMLAFAGIEPGINDSGTESHGGRMVKHGSSQLRYVLLNACLPLIRFDITFATYYAKKRAEGKKHRVAITHVAKKLIRVIYALERQDVDFNVQKLR

SEQ ID NO: 455543 - protein, 344 aa, unidentified
MGKVSTIGLDIAKSVFQVHGADSSGAVVIRKRVSRLKLLEFFAALPPCLVGIEACPSAHHWGRELQALGHTVRLMPPSYVKAYLKRSKNDANDAAAICEAVTRPSMRFVPIKTKEQQTALMLHRARQLLVRQRTMLSNALRGHLAELGIVSAKGRNGIGELLRIIADGADNRIAPATRAILAVMARQYSAIGAEIRSIDKSILAWHRSCEASRRLEEIPGIGPIVATALIAEVGDWREFSSGRNLAAWIGLVPKQHTTGGKDKLGSITKQGNRYLRWLLVAGAMAVIRYAQKHGTERRPWLGRLMERRPTMVAAVALANKIARMAWAIMVRGERYQQPKLLVAA

SEQ ID NO: 455544 - protein, 399 aa, unidentified
MIYGLDVHKDFIQVCALGAKGSKRKEYRIAGTEEAVTDWARKLGPRDQVVLEATFHSWAIHAIVARTAGRVVVANPMEVKAIAHARIKTDKVDAYTLARLLQADFLPEVVLPDASAWALRQLISHRRLLVKQRIAIKNTIRSALNRRLIPQPEGEPFSAKARRWMRSLELPPTERFLLHNSLDLLEAIDERIAAADAELLATAAVEEQARLLMTIPGVGVNVALGLLAAIGDIQRFPSPEKLSAYLGIVPRVSQSAGRCHHGRITKAGSTLVRSLVVEAAQILARSPSPLATTYWRVRRKRGHNVAVTALARKLVVVAWHLLQKSEPYRYAPATRTRQKLRALIPRDQRRSAARSPETLEQVYREAGLPELSPPSPAERRAAAVNRRARTRSTNASPRA

SEQ ID NO: 455545 - protein, 343 aa, unidentified
MDHFAGLDVSVKETSVCIVDETGKIVREVRVASEPEALLAVLASPAYHFKRIGLEAGPLSQWLFSTFAEEDLPVICVETRHMRAVLKAQVNKTDRNDARGIAQMMRVGLYRPVHVKTLRSQKLRMLLTHRKLLQSKAIAIDNDLRGTLRNFGLKVGMVRAARFEARIKELIENFPDLAALVEPLLVVRRVLREQLGILHSRLLAVVRDDDVCRRLMTVPGVGPVVALTYRATIDVPARFRKSKSVGAVFGLTSAKYQSGEIDHSGAISRCGDELMRTMLYEAAQSMLFHSTRWSWLKAWAMQIARHRGMKKAIVALARRLAVIMHRIWVDGTEFRWTREAVAA

SEQ ID NO: 455546 - protein, 346 aa, unidentified
MNFYTNQHKFYCGIDLHARKMYLCVLDEKGEIRLHQNMDTDREAFLKAIEPYREDVVVAVECMFTWYWIADLCQKEGIAFVLGHAFYMKAIHGGKAKNDKIDSKKIAVLLRGGMIPQSYVYPEKMRATRDLMRRRNHLMRKRAELLAHIQNTNSQYNLDETFGCIAVPSKRGNIIEKFSNPAVQKSMEADLEVISVYDTTIIDLERTILKLAQYHDPVSYALLQSVYGIGKIGALTMLYEIEDIRRFPRVQDFVSYARLVKCSHESNGKKYGTGGSKIGNAHLKWAFSEAAVLFLRNNDPAKKYYERLSRKHGKGKALSILAHKLGRAVYFILKNKEAFDQAKFLR

SEQ ID NO: 455547 - protein, 362 aa, unidentified
MRGQRTSVGLDVHARSVVGCGLDGQTGELFERRLTPDFGDVLAWVRSLPGPVAVCYEAGPTGFGLARFLLAEGVDCLVAAPSKLQRPSGDRVKTDVRDARHLARLLHLGEIVAVTVPSADTEAARDLVRAREDVRGDLMSARHRVSKLLLRQGIVYSGGKAWTGVHDQWLRRQAFSAAALQLAYDSVYETMLAAVDRRDRLDEAIAAMAADSQYTPVTARLGCVRGVSTLTGFALAVEIGDWQRLTGRSIGAYLGLVPTESSSGASRSQGGITKTGNGHARRLLIEAAWHHRQPYRHPGVHLRRRWDKASPAARARGQQANRRLHARWQGFDARKKRPVVANTAIARELAGWCWSLAVLEDR

SEQ ID NO: 455548 - protein, 425 aa, unidentified
MHTKQYSKQQEKRKRIGNQTLVIGMDIGSEFNAACFMDKEGNVLGRYPTVYNSRKGFDYFQTMVMKIKRKHKLTDVLIGMEPTGHYWRKIAFFAKEQGYEVRFVRTTAVKHQRGLDESSPAKSDSKDAFTIANIVREGKYIDTVIEDNVFRQLRTVAHARERILRYIVGSTHGLQAHLNDYFPELRKLFWSMKAKGLWSLLETYPFPEDVRSAGVAAVVTLLAKGRGKKRHIREQAEQVVKAAAESAGLTAIGRADRARLAMYLDEIKRSDARRQLLEREMKELLKEIPCAQYILSLPGMGKVGCAVFLGELGNPEYFNNPRQIIKYAGYDPKENDSGLRVGRKIISKKGRWLLRKCLFFMVLRLVQRSSFFKTYYEHKKKGFDRPLEKTEALCAVILKLIRVLFALIRDRRMFTEELPRCEKAA

SEQ ID NO: 455549 - protein, 412 aa, unidentified
MNQDKLYVGIDVSSKNNVCYLMYSDGSKHSSFSVPNNRNGAKIIVDRVTSVLLLQDIPQVVIGMEATSVYGDNLMRFLRESGSLGRFERSLHMLNPKQVKKFRDAYSDLPKNDYVDSYVIADHLRFGRINKEVYMDDYKYQALKMYTRARHQLVQELTREKQRFLNTVFISFSGLTQEKIFSNKFGATSMALIEEFSSLDELAYMSTDELVDYIRKKGKNHFENPEEIAEAVQRAAKNSYRPPQVIADAAKQMLAISMNTIRLLQKQIKEYDKAIEKMLEAFPQTLTSIKGIGNIYAAGIIAEIGDINRFPSQASLAKYAGLVWTQHQSSDFEAEDKRMIQGGNHHLKYYLCEAANALRRCDPEFKRFYALKYKEANKHNHKRALALTARKLVRLVYTLLKTNRLYIPPEEY

SEQ ID NO: 455550 - protein, 397 aa, unidentified
MDSLESTRLEQFRQFKSEIRGSERYLIVGLDIAKDSHHAFFGTATGHTLWKRWLFDNSREGFQKLLLQTEALQVRHGLPQVVFGLEPTANYHKPLGEYLIRGGHQVVFVSGVAVKRNRELLDGRWDKHDTKDAANVADLLSQGKCLYYEHPDPRIRDLRILLSLKKRWKRQEQSLRVRIRNGLVAQYCPELDPSFSRLIAPGKERDLLSAMQQTCSIGCATHPEVGFAAKLMVQELQQARESLKAIQERIQKICFQFPEYPYLLSIPGFGPQVSSQVLAAIGDPFRFAKGSQVLKMAGLDLSADRSGKTSAAATPVISKKGKANLRYALYQAALIASIKNPNFMAYYTGKLRGRAQEKGIQTKMRVKLAAKLLLIAWTLMKRKEPFDAKRLVLSALF

SEQ ID NO: 455551 - protein, 321 aa, unidentified
MLGLDVSKDSIAATLLDTAQHLCWERRVPNSPGGIEVLLRETPVEHPWVLEPTGRYSTSIARRAVEAGRRVLLARPREAQAFLRAVQPRAKTDRLDSRGLAHYACAVPLPPYPLKSPALEELDQLLAARQGLAQSLARLRQQRACLPAAGPVLTAAISALQAQARVLDRQIAAQTRAAQVSGVDTLDRVPGIGPVLATAAAACLHAKQFAHPDQFVAYIGLDVRVRQSGKRQGQQALSKRGHAQLRRLFYLAAQANLRTKDPHNPFKLQYARERAKGLSSTAALNAVARKLARVCWSLMRHGAEYQPDRVHRQVAPLDKQP

SEQ ID NO: 455552 - protein, 429 aa, unidentified
MNYNTQNAKIASITEKTLIIGIDVGSETHYARAFSWRNYEYSKKPFAFSNGEVGFAAFKEWMDDIAEKHGMEVIIPGMEPTGHYWLNLGAYLQEQGMKPVHVNPHHVKKSKELDDNNPSKNDRKDPKTIAGLVNEGRFSYPYIPTGIYAEIRNLSNLRIQTQEEITRIKNRMARWFSIYFPEIKDVYRNPDAVSGLMVIKQAPMPCDIRELGVEGVNKIWRDARLKGAGIKRATTLVTAAEHSIGNTEAPRSARKEIRNLLEDYEGYKKRMDELMEEIEKTLSEIPYIDKLMKINGIGIKTVSCFIAEVGDIGRFDNPKQVQKLAGYAIVADSSGKHNGESRISHRGRKRLRYALYESAISVIGKNKEFKEIHSYYRTREKNPLKKMQSVIAVACKLIRIFYTILTKGVDYDGQKMLNDIVRPEIQPAA

SEQ ID NO: 455553 - protein, 401 aa, unidentified
MGSKIAVSHVGMDCHRTFSRLTARDVNNRVLFRRRLEHADRQQLRTSLQRLPQATPVIIEGTFGWSWMADELSDCRLDPHLANCRAVDKWREAKRMAKTNKLDADLISQLWPEAERWWEVWLAPQEVRDQRELLRYRMALVQMQTATKNRIHALLHRHGILNPYSDLFGTHGRAFLKQLLEADEPLRVAARQTLSGHLRILEQLRKQLAQLTRQFRSAVQRNDQARIWASMPGFGWILAYTVQAEIGDIRRFPSDGKLARYSLLAPMAEDSGEESGETPLGRHVGYMGRRTLKWAFTEAAHGAVRKSLRMKAVFDRRTDGGKRDKNKGYIAVGRQLCHIGYACVSKGVKYMEQRPPRPGEQPPAVAATVSCPESGQPDHPMTRPKEPRRKPGPSARGSTCK

SEQ ID NO: 455554 - protein, 343 aa, unidentified
MLKVTIIGVDLAKNVFQLHGATADGKVVFRKKLTRPLFERFMAGHHPCTVAMEASAGAHHWARKFTAYGYQVRLIAPHYVKPFLKRQKNDAADAEAIVEAALRPTMRFVEPKTAEQQAQAVAFRMREQLLKQRTESINALRGYLYEFGYVAPEGIAHVPDLAKIVKDRRSDLPDLVRDLCKKVLIHIEELTEHLAELGTKIAAVSQNSSMPRRLQTMPGIGPIGALAIETFAPPMHLFRRARDFAAWVGLVPRQHSSGGKQRLGKTSKNGQRDIRRLLIMGATSVIRWAARKGVPQHPWLAQMMARKPPMVVAFALANKMARAIWAMLTRGEDYRAPALVNAA

SEQ ID NO: 455555 - protein, 320 aa, unidentified
MNASIFVGIDIAKSFLQIACLELKLETQLPNSLVGWNRLVKLLKIHGPKVLLICESTGGLERGLVDQLQKADLKVCVLNPRQARDFARAANRLAKTDKIDAAMLAEFGRRMETRPAAKVAPWVRTLAALVGRREELTAMRTAENNRLEQNLLSFVAKQLKASIKRLNQDLKALDVQIDRLIESTPELKTKHQLLCAVQGVGSITATTLLATMPELGSLESNQVANLLGVAPLNCDSGQWRGKRRIYGGRRFARRVMYMASLTATRHNQILKAFYDRLVLAGKPKKLALVAVMRKLIIYLNRVLKPKNIVTSQQTAQAPCF

SEQ ID NO: 455556 - protein, 354 aa, unidentified
MKRTTKHVGLDVHQATTLISVREDSGRIIARSIIPTEPVPLLEYLRGMRGTIHVAFEEGTQAQWLYDLLAPEVDRVIVCNRRGDAQRGNKADQADADELSDLLRCNRLRAVYHGSPERQTLQELARTYENLVEDGTRVMSRLKALFRARGIKTPGQQLYDPARRAEWLEQLREPGARFRAESLFAFLRTIQELRPTAKRAMVAEAQRDPSWGVLRSIPFLGPVRVAQLLATLKTPWRFRTKRHLWGYAGLAVVTRTTAEYELHQGRPVRRRRAPLTRGLNRNHNRVVKNVFKGAATSAAARDADLRAWYEARLAQGMREEMARLTLARKLAALTLRLWKTGESYDPTKLTVQAR

SEQ ID NO: 455557 - protein, 343 aa, unidentified
MEIRAIGIDLGKTLFHLVGVDAGGNVVVRKRCSRRQLLTYTANIKVGLIGMEACSGSHFLARALREQGHDARLIPAQYVKPYVKTNKSDYIDAEAISEAVQRPAMRFVPIKTEEQLDLQAVHRVRERWVMRRTAVVNQIRGLLLERGIVLPKGRTHLEEGLPEILADASVRLSDSFRVLLAQLRLELDALAKRIGEMDRVMEETAKENEDCQRLTTIPGIGPVTATAVVAAVGNASAFRRGRDLAAWVGMVPREYSTGGKQKLLGISKRGNSYLRRLFVQCARSVMQHRNKQPAAMSNWLAQLIGRAHQNVAIVALANKLLRTAWAVLRKNETYRIPVLATAC

SEQ ID NO: 455558 - protein, 312 aa, unidentified
MNWCGVDVSSQVLDAKVWPGLAELQVSNTPQGVAELAAWCKAQGVELAVMEATGGYERSAFRLLWAHGVAAAVVNPRQVRRFAEAMGFLEKTDRIDAGLIARFAAAKGVEPQPPPPQAQDRLAALVTRLGQLTALKVAQENQRRLVEDETVDASIGEILSLVNGQVRRFETQIAELLQADPLWRELDRVFRQTKGVADRTVARLMAQMPEIGTLSGKEVAKLAGLAPLAKESGKQKARRSIRGGRPGVRALLYLIAGLVARYEPDYAAFRQKLLNAGKPRKVVRIALARKLLVRLNAKAREVRNNLPTSLHA

SEQ ID NO: 455559 - protein, 319 aa, unidentified
MAMRTQEITVGVDISKGWFDAAVDDSQAVERVPNEAKAIERWLGRFTAPVQLALEPTGGYHEALARLAHAAGHRVYLVDPFRLSRYRGATGRRAKTDKIDAQLLRRYLEKEGPELRPWQPVSAGAYRLWQLLKRRTVVVKAQVQLRQSFDGVADLKKAVASSLAPMTLLLKEIDRRLQEEAEALGWSDQLRRLRKVPSVGPLTAVALVAAYDRGTFSSADQFVAFLGLDVRVRDSGKSRGKRKLTKKGEPELRRLLYLAAMSASRTPRWQGYYRQLRERGLSSTAAFVALSRKLVRLAYALLRDGTSYEPERRRACAQP

SEQ ID NO: 455560 - protein, 465 aa, unidentified
MIKNTKKSPKTQSASNFRLAPMNPCVAGIDIGASSVFICIGFPDGHQEVREYLTFTEDLKDMQSWIQQNGIKSVAMESTGVYWIPVYDILAQAGIDVILVNAYYLKTVPGRKTDVKDCQWIQQLHAYGLLRGSFRPDDEGVMLRGYVRQRSRLFELASQQVQLMHKSLVQMNLQLNHVVSDITGATGMNIIRAIVSGERSPVVLAKYRDYRCKKDEKEIAKALDGNYRQEHLLALKHALAAYDFFHQQALECEEAIEQMLAKWEKQVESSPAQDSNLPKRLNKNGRGIQKKTKYNLSPYHFEAESSLEKILHVNLTDIPGLDVNGIMKILAEIGLDMSKWPSAKHFASWLGLCPGNKISGGKILSSKTKPSANRAAQAFRLAANTLYCSKTALGAYFRRMRARLGAPKAITAAAHKLAKILYTMLKERKSFTEVGQAAYEQAYKERQLLSLQKRARELGYGLVAC

SEQ ID NO: 455561 - protein, 318 aa, unidentified
MEIKEIGGIDIAKKDFVIHLYKTNDQHLFKNTPKGFIKMYNWCLSKDVSMDNFWFVLENTGLYSHLISFFLTEKKCNFSVVSGLEIKKSMGVVRGKTDAIDAYRISLYGYRCREELKQTVLSGANLFKIKTLYSMRSKLVNQKKGHIVRHKEQKGVFEAKEFKVFFKMQKDFIAYYDKQIVLLEKQIKSLIAEDESLKKNIKLVKSVKGIGNQTAIALLIYTNNFTKFKNARKFASFCGIAPFHNQSGTSIRGKTKVSSLANKKVKSLLDMCAKSVIQCDVELQDYYQRKLAENKPKMLALNAVKNKLVARAFAVVKR

SEQ ID NO: 455562 - protein, 378 aa, unidentified
MDSTKYIGMDVHKETISIAVLNSSGKLVMETIIETKASTVLEFVQGLRGSLHVTFEEGTWAAWLYDLLKPHVTEVLVCDPRKNALLKTGNKSDRIDARKLAELLYLNKLKPVYHGEHGVRTLKELSRSYLTISGDLARVMTRLKALYRSWAIACAGKQVYAPRYRSQWLGKISEAGVRRRAEFYYQQLDALRALRQQVRRELLAESGKHKASKLLCQIPSIGPIRAALLIAILQTPDRFRTKRQLWAYGGLAIETHSSADHRYVEGQLRPSKRPVSLRGLNRNHNHELKNIFKGAAIIAATKAGPFQEFYAALVAKGIRPEMARLTLARKIAAIALIVWKKGEERRPPRWGGCRSQKLSLRELSDRRALGAIRIPGTT

SEQ ID NO: 455563 - protein, 326 aa, unidentified
MTLSHLTDNIFVGIDVGGASLDVAWHRGDSAHYANRPDAIATLVERLRTGPEVTRIVLEPTGGYEKSLVKALRQAQLPVEVIHTTRFNAYRALVGVKAKSDTSDARLLASYAAAPDEVRGRKAGYVELPEDAIREELSELASRRDQLKHMIHAETCRLGTVRQAELRQMVAAHLDILRADDKQVHQMMLELVRQRIDLRRDQRLLKTIKGIGVKSALSLLASVPELGRIDNKAAAALVGVAPFVRKSGTMTAPARIHGGRAAVRSILYMAAVTASRHNPVLGPFYERLIAKGKPPKVALIAVLRRLVVFANAVLRSGQPWRGAVTS

SEQ ID NO: 455564 - protein, 416 aa, unidentified
MKKHNNSGKKSEPTSKRTKSRGPVQRDTKEVLAELVGKLKEKLDPTKVAATSAGEKHQRGELRPNLDRLTVGVDLGDQWSHYCILGLEGETLAEGQLRTTQEDLATFFQGLNGARVVVEVGTHSAWVQEVISGCGHEVLVANPRLMDGSKRRKRKNDRIDANKLARLGRVDPESLYPIQHRSREVRQDLVMLRARDALVAARTEIINTTRGLVKSMGTRLPKCSSRSFAQKGEEAVAVEMREALLPLVRLAATLSADIKEYDKKIETLGQEKYGHAALLRQVKGVGPITALAYVLTLENPQRFAKSRDVGPYLGLVPKQEDSGESQPQLGISKAGDTMVRKLLVGSAQYILGPFGPDTNLRRYGLRLCERGGKNAKKRAAVAVARKLAVLLHRLWVSGEVYEPLHNAMSAPIAAAA

SEQ ID NO: 455565 - protein, 361 aa, unidentified
MEAVIGVDPHKHVLSAVALDSRGGVLGQWHGATSRRGVEALRLWADEHAPHAIWAIEGSTGLGRRLTMALLAAGADVRDVCASRTADRRRRRPGRGKSDSVDAEAIARELLAHPELPRAFKAVDGGQPNPQREELAVLVRARHQLVDAHRRLLTEAEALLGELPGWLDERLPSGRKVAPRLAAAARLHRTGDRLTDLRLTLLRAKARDERVVSSECAHLERDIARVLKEMNTSLPALQGLGPIGSAQLVVEVGDPRRFRSADAFASYTGTAPIPASSAELQGRPVHHRLNRFGNRRLNSVLYQMAVVRLRVDPETQSYVARLLAGGKTKRDALRILKRRLARQIWQTMIRDLPFQLAPVAA

SEQ ID NO: 455566 - protein, 338 aa, unidentified
MTCIGFDHHKKWTQAAAVDDQGKIIREMRVLNDNSSLKGFLKGLPQPLKGVVEAGPTWGWIYDTLTELGVKMIVANPSAVRAIAEAKIKTDKIDARMLASLLRVGLIPEVYVPTEEVRSQKMLWRERIWLVRMHVRLKNRIHRLLNHYHLEVPEFSDLFGAAGRRFLEELKLPEPGNRILNAQLKLLQSYRLQIEEVQRWAVKATQGHPNRAYLESLPGFGKVFAPIVALEIDDPKRFASPGKLASYCGLVPSLYSSGGKSWQGGIGKEGNHWLKWAFIEAAWAAIRSSAYFRVVYQRLRQRKTAQVSIIACARRLCEIAYHLLKERRCYEERPFRCA

SEQ ID NO: 455567 - protein, 311 aa, unidentified
MNVVYKRCCGVDIHKNSIVACFINEQGKKEIRSFGTMTHELLDFCQWLQQHRVEMVAMESTASYWKPLYNLLEVQEIPAILVNAQHIKAVPGRKTDVKDAEWIANLLRHGLLKASFVQNRSDRETKELVRYRNSIIEERARELNRLDKVLQGANIKLSSVASRIDTQSGMDMIRALARGEISETVLANMAKGTMRNKIDDLIPALKGLIQPHQQMMLGSMLSHIDSLNKQILLLDEEIAKRMADKQPIIEALDTIHGVGQQSAQVILAEIGTDMSVFPTAKHLASWAGLSPSQNESAGKKKEDQSEEEIQP

SEQ ID NO: 455568 - protein, 391 aa, unidentified
MIYIGIDAAKDKHDCHFVNSDGEVLLDNLRILNNLDGFNKLKQAIEQFSTGDTTQIRVGLESTGSYSANIISFLKQLNLSVTVLNPYNVANLRPATTLRKTKTDKSDARLIATATALCSPNQTYLDISYHIQTLKSLCRSRYRLIKIIQPIKNRFRRILHVIFPEFETLFNVSINSSYELLKKYPGPKAILHTRKSSLEKFLKDISHGRLTRKADALIEIAKNSIGSYNEGDAFELQDTCDNILFLENKLANLESKIKDTMLIINSPITSIPGIWDIMGASILAEIGDIQRFDSPEKLQAFAGLAPMLYESGKYIARDTPMDKKGSVYLRNALYQVTKSSYVLNSFMRSYVDKKRAQGKHFYTAMSHGMKKMVRVIFAVLKKNSNFVEPII

SEQ ID NO: 455569 - protein, 401 aa, unidentified
MKRLSGGIDVGSESHHIIILDEEDNFLYNQKVAHKLNEFTESIKLFRKIEKQERGKISFALEGKNGYSNPLDRILLDKGFTLYNVDNFKLKRFREAFAGEWRDDERDSLMLSKMLKLKEHINSPREKVFIKIEQPSPLAESLKLLSRHQQTLIDERVRLINRLGKKLLEVCPRILELGKLKNKKIIAILAKYPDFSKYRRITLCSLLKIKGIGKKGVPFLLKRLNNIEYMPGLTDIYKTIILSYAQRILELQKEIEDIDKKLDEIGEKSKEVNHLKTIPGVATKLASRLIGEIGDINRFPSEKQLAVYCGIACVDNNSGKVTKAKAVYKANKICKQTLITMAGCSIRFNFQCKDYYLKKRAEGKSHNHTLRCLARQLIKVIYRMLTEDREYIVRKELKKVA

SEQ ID NO: 455570 - protein, 342 aa, unidentified
MTAIGIDTHKATLTACAIDDVGRPIAEATFGNDPRGHDTFVAWARAVAPEATIGIEGSSSFGAPLARSVQGAGLCVREVPPHLSRAERRRTRRPGKSDPGDALAIARVTARETNLPPIRLPDRSTELRLLLEAREDLVGEATRVRNRLHAHLLVLAPGYGGTVANLVAARHRTTVGRLLRGNHTLQAELARALLHRLTGLEREIEASTRRIGALVERHPLLGLPGAGPITVARLIAEVGDVRRFRSADALASLAGVAPVPASSGQVQRMRLNRGGNRQLNRAFYVIALSQWRFHPPAKAYVARRMQADHKTWQEAIRALKRQLVRPVFRLLVEGADALRAAA

SEQ ID NO: 455571 - protein, 337 aa, unidentified
MKYCGIDLHSNNSVVVVSDEEDRMVLQKRLPNDLGQIRAALEPHREDVAGVVIESTYNWYWLVDGLMAAGYRVHLAHPSAIKKYEGLKYSGDFADARYLGHLLRLGLLAEGYIYPRAERGARDLARKRMQLVRYRSAQILSIENILARQTGARMSTNAVKRLTAEQVEEFGFMPDVALALEANRAVSQALGQQIETLEKRLKERVRLREEFKLLKTAPGIGEILATTIMLETGTLERFAKVGNFSSYCRCVDSLRESNDKKKGEGNAKNGNKYLAWAFVEAANFARRYCAPAKSFYERKKRKANAILATKALAHKLARACYHMLREQKPFDVSRCFG

SEQ ID NO: 455572 - protein, 391 aa, unidentified
MPMYFVGIDISKYKHDCCIISAADQQIISKFTITNDKDGFEQLLTALNSLSNPEDIKIGFESTAHYALNLELFLENAHHSFMEVNPVLIKEYKKSTTLRRTKTDSVDCESIARWLITVEYKPHSKGFYHAYSLKSLTRLRDRLIRQRSFYLVKITNVLDHTFPEFKPFFNERLSKTALYLLENYGSAEKMARMNSASYDKLRCISRGKFSIQQFLRLKELAANTVGVNNSIFDLELNTLLTLYKSLSYEINTLETEIIKLIEEVHPHYMSIPGIGPISSAVIYAEYGDISNFSNPSQMLAFAGIEPGINDSGTESHGGRMVKHGSSQLRYVLLNACLPLIRFDLTFATYYEKKRAEGKKHRVAITHVAKKLIRVIYALERQDVDFNAQKLR

SEQ ID NO: 455573 - protein, 412 aa, unidentified
MEETEVGQIASWVGLDVGKEDHHATVISAAGERVFELAVRNDEAAIERLLDRALESGACALVIDQPGSIGSLAVCVARRRGVPVAYVPGLVMRRASELYPGEAKTDRRDSFVLADTARTHARRLHWLEVSDETLERLRLLGGYDDDLAHDVNRTANRLRDMLLAVSPALERVLGPRLDHPVARALLARYPTPTALRAAGRRRLGPLAKRHAPRMGARLVDEIQAALAAQTVTVPAEETAGRVICELAEELDRLAGRRDRLGREIEQTFASHPQAPVLVSIPGIGARTGARILTEIGDINRFPTAGHLAAYAGLAPVTRQSGRSLNGETRSRRGNHRLKNAMWLSAFCSLHHDRSRDYYARKRSEGKLHNAAIMCLARRRCDVIHAMLRSGLSYGEPQGPARPAPKPELALAA

SEQ ID NO: 455574 - protein, 394 aa, unidentified
MKLIGIDIGKNKHFFCIMDQQTGEIISQPVSFSNDKEGFDFLIQKIKSYSKDSVLIGMEDTGHYHFALLKYLLDLQYTVALINPKTTDFNRKMQGGITKNDKLDTINICDVLDTPERKKQYRISKVNSFDLYEQKQLTRHHHNLKEEENVYKNRLQKCIDIVFPEFNKLFNSKYGTVYMNILKTFGSAENVANTDIRTIRKCFEIEGRGNRISLTPERLKECAESSIGISSSAEVIQIKHLTAQIELIEEQLTEIDKKIEEFSIQNNSPILSIPGISHFSGTSILAELGDISNYSKPSQIIKFAGVAPLHYESSQFNAQHTSITKKGSKYLRKTLYQIILPVIRHNQVFYKYYQLKISQGKGHRCAQGHCVRKLLRIIYHLLKTNQQFDPQLLR

SEQ ID NO: 455575 - protein, 396 aa, unidentified
MDRQKTVAGLDVHKDSIYLCVMGHDEAIIFQKTYGTLTTDLRQMCADMVSHGVTEAAMESTATYWVPVWNALCDSMSLKLVNPFFIKQLPGRKSDVKDAQWIAECLLKNLIKGSFVPDSVVQDMRKYNRRIFDLNDDMVYNTNKLDAALQRCGFRLSNYVTHVKGKSYQSCISAIISGITDPFELAKLVHGRTINKHGKDVVMAAVTADFHQADIDLIRQYKEMIDIIDRQIKECQSALTALCKEHFPTQYERLQTIPGVRERAATAIIAETGADMSHFHKSTNLVGWCGLRPRNDESNRKIKSNKITHGNKFLRKILIEIAWTASRTRNCFFSNFSYVQCTVKRKTKMKVQVAIARKILVAVWHMFSNDENFFDVYLKRLEKEAEGQRLFQESIQ

SEQ ID NO: 455576 - protein, 415 aa, unidentified
MKEEKEKVKQYYLGVDWSDEFHQVWVSDPEGKKVMEKKVLENVEGLAEFGRWLDESRAKGIELWAAIEKPAGRIVDFLLDHGVVVYPVNPKALDRVRDRFRMSQSKSDSFDAYVLAEFLRTDHVHLRALEPSSEQAQELKLLTRDHHRLGRHKTRILNLLGRTLKEYYPRPLEVFGDLESKIALDFLTKYPTPQALSNLNRRQWNRFAKREHHLAEARCKELWDNLNKPQLKVPEHVVRAKAQLTRVLLIQLRGLIQAVESYSERVKSFFGSMPAAELVQSLPGGKSGTILPMLWAELGDAKSRWDSFKHLQAEAGAVPVTRSSGKSAYVQFRFSCNKHMRYAAYWFAFVSLNRCEWANKYYRDQRARGKSHHQALRALGAKWLKIIFVMWRDHKPYDENYHLANITRQQMRQAA

SEQ ID NO: 455577 - protein, 335 aa, unidentified
MGIDLHRRRSVIVRMTTDGDPLECIRISNDAERLATVMARAGESPEVVLEATYGWYWAVDALREQGAQVHLAHPLGVKAFEYRRVKNDERDARDLADLLRMGRLPEAWIAPPATRELRELVRHRAKLVGMRSNCKAQIHAVLAKCGIQVSMTDLFGLAGTELLGRLELRTPYAARIASLRRIITALDFEIDAFAGQVRARLARDPGFVAVQAIPGIGPILGAVFVAEVGDVHRFTRAEELTCWAGLTPKHHESDKHVHRGRITKQGSRLVRWAAIESVQILPKTSVVGRIRDRVGDRRGRNIGVVAAARRQLEFVFYALRDHHVRALQGPRPVAA

SEQ ID NO: 455578 - protein, 359 aa, unidentified
MLVERTSVGLDVHARSVAAAAIDGVTGELKRARLTPSHDHIRSWLGELAGPVAVAYEAGPTGFGLSRSLTALGIRCVVAAPSKLQRPSGDRVKTDARDAVHLARLLRLGELTAVCVPSVDQEAARDLVRAREDCRGDLMRARHRLSKLLLRQGIVYCGGNAWTDAHDRWLRRQRFDSPATTTAFESDYDTILTVAARRDRLDNTIAELAADSEFTPVVRRLACLRGISTLTAFALAVEIGDWHRFTGNTIGSFIGLVPSEHSSGASRVHGSITKTGNTHARRLLVEAAWHHRASYRPGKTMHQRWERAPAAARARGDAGNRRLHARWITFNLRRKRPVIANVAIARELAGWCWSLAVMD

SEQ ID NO: 455579 - protein, 407 aa, unidentified
MGITCGIDSAEAHHDVDLVDTVGTTVAKCRIDTGLPGFTVLMALIAEHSDEPGSVPVAIETDKNLIVAALQAAGLTVYAINPRAVARYRERSAQAGGKSDPGDAIVLANILRTDRQVHRPLPHISEGGLAVKALARQHQEAIWARQLTVNRLRSVLLEFYPNALKAFPVLTHKAALEILGAVPSPAHGLKLTHKRVVTLLRRSGRGNRPGLADTILKHLHEPALRQPAAVEAALSHAVSGLVNVIKTMEAAIADLEVAMAAEFDQHDAAEKLRAAPGLGPILAARVLGEVGDDTTRFATAGGLRAFAGTAPITRASGRSKSVRTRHVKNKRLADACYWWAFAAITKSPGARGHYDRRRVAGDRHNAALRNVANKLLGRLWWCLVNDVAWDEHAAWPALANPHQQVAA

SEQ ID NO: 455580 - protein, 421 aa, unidentified
MKRNVRIVGFDCGEDAHCAVLLDTAGEFEERVDVINERGQIQESLAGLMLAVGPEVKLVVVVESKRSHGRVVADVAAELGCEVWQVNTVALNHFRDLEGQPRKDDEWDAYLGARMMFLRMGGCRIATETTEEERVLSRLTRVYSRETNDRKRQIARLRAVLLELAPEMLHASWEGPQPGSKAVLYLLERWPGFEGLERAQLRSIEKILHQCRYGSKATHVAKLIRNMARGIDLGAQERSAFTLELSILVRQIQVCNESADHVYAEIARRVERHPVGQKLLEMHGIGPVIAGVLVSELLPVARTSTEPKCATYSGVTPLARKSGKSLNKDRLAQGVNKRVLHALYTSSVVAIKNSAVDRAYYQKKLRDYAGHPKPHVAAFIALSRQRHKLIHKLMTTDARYDKETLIARHLERIEQTRAAAA

SEQ ID NO: 455581 - protein, 332 aa, unidentified
MSIVSTVGIDLAKNVFSVHAVDSQGLVVVRRSLSRAKLSELIAQLPPCLIGMEACSGAHEWARRFVMLGHIVKLMAPKFVAPYRKSGKNDGNDAEAICEAVARPNMRFVPVKSTEQQSDLTLHRVRQGFVEERTATLNRLRGLLAEFGHVLPLRPSELHRRVPQLLEKLPARVATCAQDLLEHARGLQEKVLQYEREIKQHVHSNALACRAQTRLGIGPITASALVATVGNGRDFKNGRQFAAWLGLVPRQYSTGGKTRLGHITKRGDPYLRTLLVMGARAVLQRAVSLTDPLSRWALAVRERRGYHRACIAIAAKNARVAWALLAKEAVAA

SEQ ID NO: 455582 - protein, 371 aa, unidentified
MTEAVKYVGLDVHKETIAVAVADGERGGEVRFVGTVANEDDAIRKLVKRLTGPGVTLNVCYEAGPCGYGLHRLLSKLGQNCIVIAPSMMPRRPGDHVKTDRRDAMTLARLLRAGELTAIWVPDEAHEAVRDLIRARRSAQDDAIGAKQTVRSFLLRHDRRFGGKAAWTKMYWRWLSEQRFEFPHQQLAFEEMQKRVLEAQARVARLEAALAEAVDAWCFAPLVRNLQVLRGIRLVSAATLVAEVGDLTRFDNPKQLMAYVGLVPSEHSSGAKTKRGRITRAGNAQARTMLIEAGWSYRLSAREERRYRERVIDLPEDIQAIGWKAQVRLCQRYRRLAATGKPQPKVTTAIARELVGYAWDIARRVSPAIAG

SEQ ID NO: 455583 - protein, 342 aa, unidentified
MFYAALDVSLRSVAICIIDEKGKVRLERSVSSELPDLIRCLQEFGQPIHQVGLEAGNLSQHIAAGLTEAGYEVVCMEARQVSAALSAMRNKTDKHDARGIAQILRSGWYSRVHVKSQESLYTRALLTSRKVMQRKCIDLENEIRGVLKVFGVKLPMRLARGGFDRAVRDIIVSDPGLSHALLPMLEARQMLFDTFVQLDRRVRRAAHEDAVCRRFMGVPGVGEITALSFKAAVDDPARFKSSRTVGAHFGLTPRRFQSGEKDNPGRISHAGDADVRATLYAAANAMLMRSIAWSSLKAWGVRLMKTKGRRRAVVAVARKIAVVLHRMWVDGSDFRRGSEAAA

SEQ ID NO: 455584 - protein, 399 aa, unidentified
MFCGWDWGSTLHGVCLLDEDGTTIKTWMVKHTREDLSALFAELDQLGDPGLMPVAIERGEGLVVGLIAGAGHPVLMVEPAAFKAARPRWGAAGAKSDAADAFMLADYARTDSHRLRRVEPRAQATRELAALVRARTSLVEARTAASNQLWAVLAEHWPGAALVFQKLTSQVALAFLSDYPTPQAAALLGEGRMRQFCRRHSYRGGKPPAELISRLRAAPASANPIAEKVLEAIVRSSIAQIGLLNVEITALERQTADALAAHPKTALLTTLPRVANVSLAALIAEIGPLLERCENPEQVAAMCGAAPVTRASGKSRNVGFRYTANKPARVAITSFADNSRHSSAWAGDCYRRARARGARHPHAVRILARGWVRVIWACWTTDTPYDPSRHRGEQRLAAA

SEQ ID NO: 455585 - protein, 346 aa, unidentified
MKINRVGVDLAKNVFQLHGADRRGETVWKRRLSRGKWLAVLCDTVEPGTEIGMEACAGAHHWARQLIQRGYPVKIIPPQFVKPFIKSNKNDANDAEAICEAMGRPNMHPVKVKTVEQQDLQAMHRIRDEIKGHRIAKANQIRGLVTEYGLVAPQQLPALRRAIPDWLEEADNGLTFLFRQLLQGLWGDLYALDQRMTELDKQIAVIAQEDPTARRLQQLRGVGPLIATALVATVGDGKQYRKGRDMAAALGLTPRQHSSGGKERLLGISKRGDAYLRCLLVHGARSAVRTAKDKDDRLSRWITNLQARRHSNVVAVAMANKMARMAWVMMTRGVDYDPDLAAASVN

SEQ ID NO: 455586 - protein, 317 aa, unidentified
MWFVGIDVSKATLDAAALSNDGEIDRLSVKNTGPGHAELVHWLLRFESPAVALEATSSYHRHLVTALQAAGGCVSVINPTQANYFVRSQQRRNKTDKADALWLALYAKERRPAPSPVTSYLQQSLAREIHAIDKDLTRLKNRLGTAGPGEGHPEVVASLKRRIRVLEDEKRALESELERETRKLQGNDLALLTTIPGIGTRTACMLLAEIGDVHRFTSARKLVAFAGLTPARFESGTSIGGYTRISRMGSTSIRRVLYMPCLSALRFNPVIKVFFERLIERGKSGKSAVIACMAKLLKIVYGVLTHATPFSASPTRA

SEQ ID NO: 455587 - protein, 412 aa, unidentified
MKLFVGIDVSSQDLKVCAMNIDGDTLDSFTVLNDYDGATHLRDKLLSLADKEKPKEIHIGLESTSVYSWHPAMFLHEDGSLQKRGAKVFTINPKLISKFREAYSDLDKTDYVDAWIIADRLRFGRLPMTMVLQEQYVALQRLTRMRFHLVHNLTREKQYFLQHLFFKCSAFTSKVESSVFGHAITELLLEQYSLDEIGSMELADLADYLKEKGKNRFPDPEKVAKCIQKAARSSYRLSKCVEDTIDILLATSIESIRAIKEQIKQIDQAILRVLDGIPNTLETIPGIGRVYCAGILAEIGDIHRFKDQASVAKYAGLTWRKHQSGKFEAEDTKRIKSGNRFLRYYLVEAANSVKRHDLEFRDYYQKKFAEVQKHQHKRALVLTARKLVRLVDALLRNDQIYTPRRKVNMAKH

SEQ ID NO: 455588 - protein, 455 aa, unidentified
MKANRVSALRSKRGLHRVNGAEPQVVGLTPQTTDERKTDTMKTYILRDPKPVEPQKSIRSPRHQLVITAIPITVVGRPSVSAKDPVLFIGLDVHNDSIAVSLAPSDSTEVRRYGIIGGEHDDVLKLAHKLQAAHPGMILKFCYEAGPRGFALCRCLQMHHWNCILVCPSKIPRKPGERVKTDRRDADDLARLYRAGELTGLYVPEPVDEAMRDLIRARFQVGRQQHRSRQQLKMYLLRHNLRYGGQTSWTPAHLRYLAKLKMPFPTQQIVFQEMLDVISEATARLERYDQEIERAVPGWRWEPAVRALMSLRGMALLHAATLVAELGDFNRFEHPGQLMGYLGLVPSEHTTGKDRQQGGITKMGNAPARRALVEAAWQYRVPARLSPHLKKRQEGLPKAITDIAWEAQRRLHHRYTHLTRVGKKKSQVAVTAVARELTGFVWAIARQVKPVTAHP

SEQ ID NO: 455589 - protein, 431 aa, unidentified
MNADGKSPSMELLSPPEYEMSQRSKVCGVDVHKQFFVAALLSQSGGSTIKRFQSDKPGLLEFKDWVLNEQCELVALESTGIYWYSLYSTLEDHIEVIVANPYLIKNIPGRKTDIADAQWIAQLALNDLIKPSRIFPKKQREIRNLTRSREHLVNNRTMLKNRVHRVLESASIKLSSVLADIFGKSGLHIVQGLVAGTDLDTILASISNEKVRAKEPELRNAIQHNLESSQILIIDQCLSLIDQITCRIDELDVEIGAQMNDREKDLKIAMSMPGIGKISAMTILAEIGNFEEFITPEKLAAWSGLTPSVYQSADHLKTGPITKRGSPHLRRIMVEVAQAAVKTKNSRIRSFFLRLKMKKGYNKAIVAVARKILCILWTILKKREVYCEENVPKKKVLITLKSSRNPPTIQEAIEILARAGYMIQKLDSPGG

SEQ ID NO: 455590 - protein, 421 aa, unidentified
MHRKNDNRQVEKRQRITDATLVIGMDIGCEFNAMCLMSKEGTILGRYPKIYNSRKGFDYFHGIVESMKEKYGFTDVLIGMEPTGHYWRKIAYFAMDKQYEVRFIRTTALKHQRELDESSSAKNDIRDAYTIANIAREGKYIDTVIEDNIFRQLRTLAHTREKIQRISTGAKHALKGMLEDYFPELKHIFWSMKAKGLWALLEHYPFPEDVLKTDIDTVTELIAQSTRRKIQAHEKALQIYKAAQHSIGLQRVGDADRWRVAAYLSEIRHSETQLKEIEAQMEALLKKIPFAEYILSMPGIGTLTCGVFLGELGNPCNFTNPKQIVKYAGYDPKEHDSGQRTGRRIISKKGRWLLRKYLYFMAMRVVHRSPFLKDYYENKQKTMTKKEALCAVVIKLIKVIFALLRDKRTFTEKQSCLKQAA

SEQ ID NO: 455591 - protein, 338 aa, unidentified
MKLYGGMDLHSTNVVTQLINEEDKVIYRKKQSCDLEQILQGLEPFKDSIEGLAVESTYNWYWLVDGLMEAGYRVHLVNTAAVKQYEGLKYTDDDSDAFWLAHLLRLGLLPTGYIYPKQSRAVRDLLRKRGQLVRQRTAHILSIENLYARNTGNRLSCNAIKRLTQEQIQQQFADPNVALAIDSNRSLMNALDEQINVLEQAILKQAKLDPRYRCLLSIGGIGEILALTIMLETGDIGRFQQVGNFTSYCRCVGSEHLSNGKKKGQGNTKNGNKYLAWAFIEAANFAIRFNDQAKRFYQRKATKGNRIVAIKAVAHKLARASFYVMRDQVPFDSAKLFA

SEQ ID NO: 455592 - protein, 403 aa, unidentified
MNSVGIDISKGRSMVAVMRPFGEVVISPVEVRHTDSELSELARQLKSLNGETRVVMEATGNYHAPVAKLLHDAGLYVSVINAKLVHGYGNNDLRRVKTDRKDAVKLANYGLDRWLTLPRYVPEEDTRLLLKNCYRQYRQYSKVQTVLKNNLISLLDTVFPNANRLFSSPIRGDGSEKWVDFVAEFWHCRCVSEKSQKAFTNKYQRWCRKHGYNFSEAKAHIIHAETCGHIDVIPKSETTKLLVEQAVAQLRATSAALAALKHEMQSLASVLPEYPVVMDMFGVGPTLGPQLMAEIGDVRRFYSKKALVAYAGLDAPPNDSGDVTGRHKSMSKVGASSLRRTLFLVMSVYLQNAPLDEPVYQFMDKKRAEGKPYRVYMMASANKFLRIYYATVKAYLESLEHTA

SEQ ID NO: 455593 - protein, 344 aa, unidentified
MQIARIGLDLAKYVFEVHGVDCRGKTVLRKTLRRHAVSAFFANLPPCLVGLEASNGAHFWAKALSDLGHDVRLISPQFVTPYVKSNKNDRNDAEAICEAVGRPNMRFVPVKSAEQLAVQAVHRIRSRLVADRVRLVNQIRGLLGEHGVVVAKDIGNLRRALARIVGDSEDRTLNPLVGVLMGELREELTELDARIAGYERKIRELYRNSEICQRLGKVEGIGPVTATALVAAVGDRSSFKNGRQFAAWLGLVPKQRSSGGRARLFGISKRGDRYLRTLLIHGARSALGRVRDKQDPRSLWLGRMRQRRHPNIVAVALANKNARIAWSLLTGDSVYDARLSVRAA

SEQ ID NO: 455594 - protein, 397 aa, unidentified
MSNLFVGIDVSKDSSTAKGLDDKGQSKFYIEFKMNAKGFGELLDVISSISKDFSKVLVAMESTGCYHINLFSFLTAKGIETLIINPLLISNFTKLSLRKTKTDKKDAATIAQFILVHKNSLNSMVLSEDIQDLKDLARERESLVFMVSGLKNDIRRMLQITFPELEPMCNIFSETALKFLIRFPSARTIRCAKPRVIANALVHKDKRKRISASHKDIIKAAESSVASNRTAKELILPEKIETILYLMEKRDKITKALIQSCESMMVEDLEVLTSINGISNISGSLFLSEVGDFTSFNSYKNLIAFAGLDPTVNQSGKFKGGSKISKRGNRRLRRIIYYMTFCVVKGDNVFRTYFLKRSKEGLPYRKALIATSHKLIRVIFAMLSSKSKFKMNELPHS

SEQ ID NO: 455595 - protein, 358 aa, unidentified
MPMLAELVDGVIGVDTHRDTLAAAALSSVGGVLAQTAVRADAAGYQTLLGFADTYLPGRRCWAVEGAGSYGAGLAARLRSAGEQLVEAGRPKRPPRRTGAKTDAIDAVRAARDALGQPPQQLAAVRQGGDHQALRVLLTTRHTALAARVAAVNQLKALLVSAPEELRAQLRGLPTRRQVAVCAALRDRPAKSLEHRMTVRALRCTARRVQALQAEADELLTELERLVAAIAPWLLELFGVGPISAAQLLVSWSHAGRFRSEAAFAALAGTSPIPACSGQVVRHRLNRGGDRQLNQALHTIALVRLRDDPETRAYAARRTAEGKSSREIKRCLKRIIARQLFRLLERYNQPGVEVLRAA

SEQ ID NO: 455596 - protein, 318 aa, unidentified
MNPLNHSNETNVGVDVSKAKLDICIRPNNETFTVDNSPEGIRIALKKLRQVKPDRIVCEATGRLELAFINACRKAGFSCVISDPVRIKKFAGVLGQRAKTDYLDAQLIAQFAEVMRPEPTPKKAESLNRISDLLTRRNQLIDLRTQEKNRMKIMPKFLTHSMKAVIKHLDMHIQRMEVLLELEIEKDADYDKKTKIIKSVPGVGNVVALTLLADLPELGTMSNKQAASLVGVAPISRESGTFRGKRYIRGGRAKVRTAMFMAMMSAIQCNSKFKALYQRLVDAGKAKRAAIIACVRKMVVVLNSMVRSGKTWDPNLAI

SEQ ID NO: 455597 - protein, 418 aa, unidentified
MNKNWTDYAHFAALDWADDHHDITVVDRAGAIVAEFRIAHTAAGWAEFTQKMKPYEGCPMTLETSSGPAVDQLLQRGWMIYPVAPTAAERYRERKIPSGSKTDRHDTWSLADALRTDGHAWRPLRPQDQATATLRVLCRDEIELIEQRTALVNQLRAALREYYPAALEAFEDWTQPFTWAFVQVFPTPAALQGAGPAKWKKFLNTHKLWHPETTKKRLAVFAAATALPAGAAITSAKSLLALSLSKVLGTLQTQLNEYRRRIVQAFREHPDHDLFGSLPGAKDVLAPRLLAELGSVREEYPEVESLLCQSGVSPVSYQSGQLRKCHVRYACNKTLRFTVHLWVNASRWTCQWAQVYYQQKRQEGHSHASALRCLGKRWLKILWRLWQQRQRYDESKHLESLQRRNSPTWAQLQLTPAP

SEQ ID NO: 455598 - protein, 331 aa, unidentified
MKKETLVGIDVSARSLDVAVERGKASRQDLIFENTAEGHRKLAKRLTRGGMRARVCLEATGIYHLDLSLALHATKGIEIMVVNPRVAKDFARAQLQRSKTDRVDARSLLEFNRRMAFVPWQPPSRTILALRALSRRIQALLINRAQEKNRLHADQVVADTAPAIRESIERHIESINAEIAALTDAALDIIGADAELQSKFDHLVSIKGIAAASAVTILAELAVLPGDMTVRQWIAHAGIDPRRMESGTSVQGQVRISKVGNRRLRAALFLPAMVASQHEPQIQAFYQKLIANGKKPMQALVAVMRKLLHAIHGMFQHDEDFIGEKFYAGKA

SEQ ID NO: 455599 - protein, 415 aa, unidentified
MEVLFSRCCGLDVHKSTITACVRIQDVGAKPRKIVRRFGAMTGDLRALANWLIEQGVTHVAMESTGVYWKPVWNILEGQFTLVLANAQHVKNVPGRKTDTKDSEWLAELLQHGLLAGSFVPPRLIRDLRDLTRTRAVLTQESSRLASRIQKVLEDANIKLASVASDTLGKSGQAMLEALIAGQDDPEQLADLALGTLRGKIPQLRRALEGLIREHHRFLLKRLLAQWRFVESETELIDQRLEQIGREEAPIAEAVARWDTVPGVDRIAAWGLVAEMGIDMEQFPSAKHAASWGGVCPGNHESAGKRLGGRTRKGNPWLKRILGQSAWAAARTKNTYVAVQFRRLAAKRGRKRAIVVVGHNLLVSGYYLLRKQCFYQDLGADYFDRLNAEGLKRYLVKRLESLGQKVTLEPRERIA

SEQ ID NO: 455600 - protein, 343 aa, unidentified
MKLSRVGVDLAKNVYQLHGVDRSGKTMLKRRLKRHQWFKVLLDKTEPDCVIGMEACAGAHHWGRQLQARGYTVKLIPPQFVKPYVKSNKSDAKDAEAICEAMSRPNMRFVTVKCVEQQDIQATHRIRAELMTQRTAKANQVRGLVAEYGLVAPKQLSSLRAAIPCWLEDAENGLTADFRALLQGVWNDLLGLDDRVCEMDKLIKRLAENNEDCVRLQQLRGIGPMTSTAMIASVGDARQYHKGRQMAAAIGITPKQHSSGDKHRLLGISKRGDVYLRTLMIHGARAVVARATHKDDRLSRWVTNIANQKHPNVAAVALANKTARMAWAMLRNETDYDPDYAIS

SEQ ID NO: 455601 - protein, 311 aa, unidentified
MTSQFVGIDVGKDSLICNLYGENPIRTYPNTSRGIDRLNSWLQKKEVVLVVMEATGGYEKQASMQLGRTGMAIAVVNPTYVRRFAEGMGTLAKTDPIDARMIAWYASVKQPKPQPPRTEAAEALSACVDRREQLLAMRTMEKNRLSSAAAYVQQSIKVHIQSIDEQIAQMEATIDRLIAQEKEWQERITCMMSCKGVGKVTAVTLLAEMPELGCAKREQVAALAGVAPMNRDSGRKSSRRKTRGGRTKLRRVLYMAAMSASKYNPVIRDFYKRLIGKGKPKNVALVACMHKLLTILNAMLRKNDLWRPDFA

SEQ ID NO: 455602 - protein, 447 aa, unidentified
MAQRKRPTTQSAITLTHPNAAGIDIGSAAHFVAVPPDRDDEPVREFQSFTADLHRLADWLDACGVDSVAMESTGVYWIPLYELLESRGFTVLLVNARHVKNVSGRKSDVLDCQWLQQLMSFGLLHGAFRPAEQVCVLRSLTRQRTMLLRNQGRLVQHMQKALTQMNIQLANVISDVAGETGQRILRAIVAGERDGQALAQLRNARIRASEDEIAKSLQGSWRAEHLFALKQALDAFDFCGTQLAECDAQIQAQLQALHVREDAPAAGKKRGRARNAPKFDLRTQLFQMCGVDLTRIDGIDVTTALVVVSEVGADMGKFPSDKHFASWLGLCPGTKITGGKLMSGKTKRCANRAAQALRLAAAALRSSQSALGAYYRRLCARMDKPKAVTAAAHKLARLIYAMITHGQEYTDQGQDYFEERYRQRVLHNLAQKAKAMGMQLVSADNPA

SEQ ID NO: 455603 - protein, 415 aa, unidentified
MKNWTERNHFAGLDWATDHHDVVIVDRAGQILEQFRFNHDASGWELFRNKIKAFAELAVAIETSSGAAVEQLLQSGCTVYPVNPKSAKAYRHRKAASGAKSDLLDAWSLAEALRVDGQQWKALAVQDPLLQELRLLCRDEVSLIEQRTALILQLEQALAEYFPAALEAFDDWTSESSWDFIQAFPTAQALSQAGKRRWEKFLHTHRLARPQTYENRLSIFAKAEEFCGTEAVSRAKSRLALALVATLKTVQKQLREYRQAIEELFEKHPDKDLFGSLPGTGPKLAPRLLSELGSDRNAFETPQSLQCVAGTAPVSFQSGQIFKVYLRRHCNRHLRATIHLWANLSRSQVPWAQQYYQAHRDKGQSHACALRCLGQRWLKILWKMWQTGATYDADLHARNQQKHGSWLLTLNPKTA

SEQ ID NO: 455604 - protein, 347 aa, unidentified
MEHIGIDVHKKETQICILTEDGKLIERRVRTLAERFGEVLGGRSRARIVLEASTESEWVARCLEGLGHEVIVADPNFAPMYATRTRRVKTDRRDARALTEANVLGAYRPAHRLSDGQRHVRAQLAVRDALVRTRTRGIAVSRALLRQHGYVVPSGGAETFGRRVVALGVPGRVLSEVGPLLALMRTVNAQLAYCEGEIGHVSEQDPRVGRLRTAPSIGPVTAAAFVATLDDAGRFRRAHQVEAYLGLVPGEWSTGESQRHGRITKTGNTRMRWLLVQAALSIMRLRDPRAAGLRAWALRIAARGGRTVAAVALARRLAGILWAMLRDGAAYDPQRWAAPTTPATIPA

SEQ ID NO: 455605 - protein, 403 aa, unidentified
MNSVGIDISKGRSTVAVMRPFGEVVISPFEVHHTDSELSALARRLKSLNGETRVVMEATGNYHASVAKLLHDAGLYVSVVNAKLVHDYGNNELRRVKTDRKDAVKLANYGLDRWLTLPRYIPEEDTRLLLRNCYRQYRQYSKVQTVLKNNLISLLDTVFPNVNRLFSSPLRGDGSEKWVDFVAEFWHCRCVSEKSEKAFANKYQRWCKKHGYNFSVAKAHTIHAEASGHIGVMPKSETTKLLVEQAVAQLRATSVALTALKREMLTLAAQLPEYPVVMGMFGVGPTLGPQLIAEIGDVRRFYSKKALVAYAGLDAPPNDSGDVTGKHKSMSKIGASSLRRTLFLVMSVYLRSAPLDESVYQFMDRKRAEGKPYHVYMMASANKFLRIYYATVKAYLESLEHTT

SEQ ID NO: 455606 - protein, 412 aa, unidentified
MEVLYPRCCGLDVHKSSITACVLLAQAGKPLKHIRRFGSATRELLELVAWLREFGVEHVAMESTGVYWKPVWNVLEGHFQIVLANAQHIKAVPGRKTDTKDCQWIAELLQHGLLRASYIPSVMIRDLRDLTRARTSLSQEHSRIASRIQKVLEDANIKLASVASNALGKSGRAMLEAIIGGEESPERLADLALGHLRLKIPQLQTALEGRVRDHHRFLLRSLLRQLQFLEAEIALLDARLDEIGREHLDLAEALDRWTTVPGVDRVAAWSFIAEMGIDVTQFPTAAHLASWAGVCPGNNESAGKRISSKTRKGSPWLRRMACQSAWAAARTKNTYLSALFKRLAARRGRKCAIIAVAHSILVIGYNLQRRSCTYTDLGNNYFDRLHADGLKRYLVKRLESLGLSVTLQTRTA

SEQ ID NO: 455607 - protein, 364 aa, unidentified
MTEVTRAAIARVGVDLAKRVYQVHAVDRYGRVVLVKAFSVERFYAWCSTLPAGCMVAMEACGGAHHVARRLQTMGLDARLIAGHFVTPYRMAGKSGKNDANDAAAICEAAGRPQMRFVPIKTAEQQGQVTIHRLREGYKQERTACINRIRGLLREFGLSVAQSPKELRLALPMLIEDASNELPGVVRMALQQAHLHWIDIDVQIAWCDERITVHVRSDKRAGMAAEMLGVGKLAASAAVAIVGNFAQFRNGRQFGAWLGLVPSQNSTGGKASLGRITKRGDDYLRTLLIQGAKSAVRTAHKRQDRLSQWLVQLNERVGWQKAAVALANKNARIMWAIFTRGVAFDPNHVSIAPHERAALDAAAS

SEQ ID NO: 455608 - protein, 429 aa, unidentified
MNCTQNKKIEQVKETTMIVGIDVGSEKHYFRAFNWRGIELTRKPVAFSNSMEGFNSFYNTIVELMQKSELEEALVGIEPTGHYWFDLGQFMGEKDIKFVMVNPHHVHKTKELDDNSPSKNDRKDPRVIAGLVRDGRYFYSYMPTGAYAELRNASNRRFVLVEEQTRAKNRLQKWIAVYFPEYKGIYTHIDAKGGLLVLKQAPTPEEIVKLGEEGIIKIWKDAKLRRNGNKKALKILNAAMRSIGLKAGLTEARMEIQDLIEDYELQTKRLERVNDLIKGLCQQVRYADKLLEIKGIGITTVAGFIAEVGDITRFDSTKELQKLAGLELVADSSGKHNGKTKISKRGRKRLRYLLFEAAISVVGKNEEFKEIHRYYTTREKNPLKKMQSLIVVACKLIRVFHAILTKGIRYDASKMLKDIRHPGEQLKAA

SEQ ID NO: 455609 - protein, 425 aa, unidentified
MFHDYISVGVDVAADFSWFSILSPDEKEFRKPFKVDHNNADSLRNAVLTIKKAEEQYSMKSKTFLESTGIYHFPLFCYLKDLGLEVCVINPLITHSNKNVGIRKVKNDRYDAKCIAVLGYSPDLKVSSTPDDLILNLRCLCREYYNLVDHRSAYVNKLKAQLRIVFPGFSKVFSNVTGTTSIAILKKFPTPEDIIAARPNEIIDLIAISSRKGLKYARTKYNLLSAAAANALNFRYNLPAVYDILEMYIGLIEVFDKRIDSILTKIREFVQENSTEEFVKQIQYLDSIPGVGFLSAVTLMCEIGNFAAFTKPKQLFAYFGLDPSVNESGKFRGTNNKMSKRGTRIGRRALYAVALASVRKKRNGAAINPVLYEYYQDKKKSKPKKVALGAIMHKVCNIVFALLRDNKNFELITPSQHKLQFQQAA

SEQ ID NO: 455610 - protein, 451 aa, unidentified
MAERNRKLTGKSSGQHRSLEIAYPNAAGIDIGNAAHFVAVPPDRDDYPVREFPSFTQDLHALADWLTACRVDTVAMESTGVYWIPLFELLEARGFKVLLVNARHVKNVSGRKSDVLDCQWLQQLMSYGLLAGAFRPDDEVCVLRSLWRQRARLLREQGRQVQRMQKALTQMNIQLANVISDIVGVTGQLIVRAILAGERDGHTLAALKNGRIHASEDEIARSLQGNWRREHLFDLGQSVAMFDFIGTQLAHCDREVDQQLRLLQSHDALPEKSGKRKGSRNAPEFDLRARLFQMCGVDLTRIDGINITTALAVVSETGADLTRFPTVRHFTSWLGLCPGTKISGGKILSAKTKRVVNRAAQALRLAAASLRASRSALGAYYRRLCARMDKPKAVTAAAHKLARLVYTMLTRGEEYTDQGQEQYEHQYRDRLLRNLAKRAEQLGMTLTPATA

SEQ ID NO: 455611 - protein, 422 aa, unidentified
MSQNQPEIQYAAFLAIDWADQKHVWSLQDANSSTCERGEVDHMPEAVEAWAAQMSQRFAGRPIAVAVEQSRGALVFLLSKYEQLHIFPVPPAMTANLRKAFYSSGAKSDPSDADLLLDLVQQHREKLRRLSPDTEATRLIQNLVEERRKLVDEKTAQSNRLEAHLKIYFPQIPRWFGDVGSPLVCALLERWPTLEALQKARPDTLRSFFRKQHSRKEELIESRIKAIGEAMPALKDRAVVEAKVAVVKVSVQLIQDLHEGIEGFNRQIQEAAEAHPDFFIFDSLPGAGAVMAPRLLAAFGSQRERYQNAAEVQTFSGIAPVTESSGKSSWVHFRFACSKFLRQSFHEWAALSIPQSKWARAYYELQCRRGKKHHAAVRALAFKWIRIIYRCWKERVAYDENVYLAALAKHNSPLVAATKAAL

SEQ ID NO: 455612 - protein, 358 aa, unidentified
MERYIGLDPHGTSCTFGVIGPSGRKLRHDVVETNGTALVSYLRSIPGRKHLCLEEGTHSSAWLYEILSPHVEEIVVAGISESRGQKSDVLDAFRRAEELRTGTIKTPVFKAPRLYSRLRELARVHSMLVRDVVRVQLRLKVMYRARGIATPGKSVYSPSGRDQWLKRLPVSSRWATEKLHEEYDRLLDLKREAEQELVAEARKHRISRVLATAPGLGPIRVAQLLPIVVTPHRFRTRSQFWAYCGLGIVMRSSSDWVQTRAGGWVRAQVQQTRGLNRNHNSTLKGIFKGAATTIVTRLDTDPLYEHYVRLTSAGTKPNLAKLTVARRLAAIVLRMWKDEKEYDPGKLKQQASLASAVS

SEQ ID NO: 455613 - protein, 360 aa, unidentified
MSKRVSKKESWFKENSFTEKDEIYVGVDVHKLNYHVAIWHNGRIGCAYSMTSDNNKLLRDIQQVRSSLKNIVYEAGPTGYSLVRLLRSANLPAEVVAVSKTPRMTDSSAKTDRLDCQRLAEYAAKGLLTFVAIPTEQQEADRQVVRLRDQLTSKRKRIMHQVKSLFLQHSISWPGGTWSKILIERLRQLDISSELRFSLDQNLDEYEFFCSKIAETEAKLRQIFSSERHSAAIEIFKSHPGVGNIVAWEYRAEMFNITRFSEPKQISKYTGLCPRVSQSGKKCHQGPITKTGRRQLRAMLVQAAWAWYRRDPHARQIYNRLLHNTGNGKKAIVGLAKRIAIHLWRMLCDGCMYDANVVKG

SEQ ID NO: 455614 - protein, 342 aa, unidentified
MEHYAGIDVSLECSSVCVVDANGKIVREAKVASEPQALIAWVGSLGFGLERIGLEAGPLSQWLFAGMKGASLAVELLETRHVRKAFEAMPVKSDRNDARGIAQLMRLGWFRPVHCKSMSAQETRSLLTARKLVQSKLHDVENSLRGILRGFGLKVGKTTGQKFAGRIEELVAGHPHLQTIAKALLAVRAVLRAEFAAFEKQTRRMVRSDMQARLLTSVPAVGPIVALTYASAIDDPARFKSSKQAGAHFGLTPKKHQSGETNYTGRISKIGDASVRTALYEAANVMLTKPVKGCSQLKSWAMRIKRRAGTNKAKVALARRLAVIMHRMLADGTPFNAAAAAA

SEQ ID NO: 455615 - protein, 340 aa, unidentified
MSNPAVIGLDIAKNVFQVHGADTEGRCVLRRRLRRAEVVTFFARLPKALVGIEACPGGHHWARELRSLGHDVRLIPPQYVRPFVKTNKNDAADAEGICEAIVRPNMRFVPIKSVAQQAAMMLHRTRALLLRQRTQLINAVRGHLAEFDLIARRGARNIRELADLVRDTEADKLPDAARAMLVLLLEQIHEAELRVRKTEQALEAWAKQSDACGQLLAIPGVGIMSATAIVLTMDDPKRFRSGRHFAAWLGLVPRQSSSGERQVLGRISKRGDGYVRTLLIHGARSLTRWQRESWGWLAALLKRRPTNVAAVAIANKTARTAWAILARDRQFQPTRRAEAA

SEQ ID NO: 455616 - protein, 351 aa, unidentified
MNLAGDADLIIGVDTHLDTHTAALCDARGRALSRLQVPATAAGYAQLLAWARSAAAGSRAVWAVEGTRHYGLGLARHLVSQGEQVSEIDASHHAGKRRAGKSDAIDAVRAARELLARPHPAQMRADGDREALRLLMTGRDNAIQSCKTARTALAAILVTAPAPLRERLRQLPRERRARECAALTCPEAADRQTRILHQTLIRLGQRIAALAETAADLEAQITEIVEEMAPGLVAAEAGLGALSAAQILLPWSHAGRIHSEAAFAMLPGTAPVPVSSGRTGRHRLNRLGDRQLNRALHIIAVTRMRCHPQTLAYVQRRRAEGKTDQEIRRCLKRYLARHHYRTLNSQISRPA

SEQ ID NO: 455617 - protein, 428 aa, unidentified
MYYTQNEKLLQVGEEKIIVGIDVGSEKHYARAFDWRGMEYSKKAYVFTNDAEGFAGFFEWITGIMEKSGKETVMPAMEPTGHYWFDLAKFIQDNGMQPVLVNPLHVKRSKELDDHLPSKNDRKDPKTIAKLVIEGRYAYPYMPEGVYADLRNATVLRFQAEAELTRIKNRIQRWFAIYFPEYKDVYGSFSAVSSMMILKKAALPCDIIALGEEKINEIWREAKLRAVGKKRAKTLVETAKRSIGHTEGLETARLEISLLLDDYDRLQDRLEKIMELIETQVSKVPYAKKLMQIKGIGIKTVSGFIAEVGDIGRFKDPKQIQKLAGQAIVANSSGKHKGQSRISKRGRKRLRLLLFEAVLSLTATNPEFKEIHRYYTGRKTNPLKKKQSLMVLSNKLIRVFYAILKSGADYDPEKLLRDIRRPEELQAA

SEQ ID NO: 455618 - protein, 408 aa, unidentified
MTVVGIDVSKGKSMVAAMKPGGELVAAPYEVRHSDIELSHLALDVLCMEPDTRVVMEATGRYHEPVAAQLHSAGIFVSILNPLLIKQSGAGSLRKVKSDPKDALKIAKYGLDNWSTLREYTPMEAIRQQLKLCARQCDLYNKSIVMLTNNLISLSDKTFPGVNELFSSPEKADGHLKWVDFYRTFWHCDCINRMSPDTFGERYQKWCKRKGYHFSADAADALYAASCGLYTTLPRDNNARLLVTVAADQLIALRENQSKLEAEMLNFCKQLPEYETVMAMYGVGKSTGPHLMAELGDVRRFLHRSSIVAFAGVDPGVVGSGKMQLSSVATSKRGSPQLRKALFQVVSTYVKCKPENEAVYQFYTKKRDEGKPFFVCTTAAANKFLRIYYARVKECLNAAESATQVEEG

SEQ ID NO: 455619 - protein, 337 aa, unidentified
MTHPIYIPLGIDISKHHFDVALCKAPSTARSKSAFHTSQFANNETGFHELLAWLDQHQVRHVHACLEATNIYGHELAAFLYQREQRVSIVNPSQVKGYGQSRLKRTKSDQADAGVIAQFCRDLTPPLWEPLPEALEQLQQLSRRVEALLSMRTEEKNRLDSCRNPHLQTDLQAHIAYLSERIDDLKKLMREHIRAHEALAHQSQLLCSIVGIAETTATNLLAEIGVIQRFASARQFAAFAGLTPREFISGTSVRGKTRLCKIGNGRLRKAFYFPALSACRYCPEIAAFRNRLIAAGKTPMQAIGAVMHKLARIVFGVLRHDTPFDPSQLAVTTAPCS

SEQ ID NO: 455620 - protein, 409 aa, unidentified
MDIVPIYRRVIGLDVHQAQITGCAITEQPDGSVTYERREFGGFKRDRKALAEWARAIGPDVVVMESTGIYWKSPYAALEREGIIAWVVNARHVKAVPGRKTDVADAQWLASLARAGLLRASFIAKADLRSLRHIARHRQKLAGMLASEKNRLHKLLTDAGIRLGVVVSDLHGQSARAMVKALIAGKSVPDVLGLASNRLRASREDIFEALQAEEITPAHRFCLAEIMAHIEELEARMARFDVELLRSLQDAGYGVPLRLLQTLPGIDLMGAAMLLVEIGSDMSVFGSAQRLASWVGMCPGNNESAGKRKSARIRKGNAWVRRLLCEFAQAAGRSRCALKDKFQALNVRKGHKRSIVALGHKMLRTIYAMLSKNTHYVDKTVDYEALMVARNAPRWLQMLVKHGFVPAPA

SEQ ID NO: 455621 - protein, 381 aa, unidentified
MLYVGIDVAKNKHDVTVIDNTGKMVLKPITITNRKQGFELLHNTLKQLNQNCLIAMEDTGHYALNLLTFLHQNNYQIYTYNPLLIKEFTKSLSLRKTKTDKKDARTIALKLLSDPNRALFMHDNRQEELKIMTRHMNRLKKHQSDWKVQYTKCLDIIFPELHQVVTKHSDYVYELLKRFPSPEKMVTAGFDKLIEIKRLTAKHALDILELAPNSIGTTSLAREFELIEIIENIQHYEKLIKQTEKKIDELMAELNSVITTVPGISNRLGSVILAEIRNINTFNYSAQLQAFAGLEPAIYQSGQLDAQGKMVKRGSSHLRWALIQAAIKVARYSPAFKAYFKTKLAQGKHYNVAISHVAKKLIRVLFYLLKNNETFDEDKLR

SEQ ID NO: 455622 - protein, 387 aa, unidentified
MSKKKGRVVGLDVHPDSFAGAVVEGSDPASAQVLSTSRRVELEQLEKWASSHTNKEDILVLEASGNAFAVAARLRRIGREVEILDSHRAGKVGKVYCANDRVDAVKIARIYLSALSPVVWQPDAKTLERREIFSAYQGVVKESTRARQQLRAMLNEHCVRLEKGFRVCHPKAITRLLALREWTPARRMLLQQLHGSLVAARARRTLLRRHMAQEIVAEEALLRLTRLCGINLVTLYGVVAAVGDVRRFSHSKKLVAYLGLNPSVSQSGNFEGNGALKSHGRGALRALLIQSGKRLLEVTNPLQKWGLAVAARRGRNKAAVAVARKLCVALWHVMMGHLIGALERLDTLETKLSKFATEVGPAALTAFGYNNKADFAEKKVYVLRSYP

SEQ ID NO: 455623 - protein, 352 aa, unidentified
MEHYAGIDVSLELSSVCIVDAKGKIVREAKVASDPDALVAFFKQLGFPVVRIGLEAGPLSQWLYAGLAQAGFEAVLLETRHVKAALLAMTVKTDRKDARGIAQLIRMGWFRPVHCKSPGSQEVRALLVARKQLLGKLLDVELSIRGILRGFGLKMGVVTRKTFEARARELSSGQTMLETVVGAMLTARVALQSEYAKLHKTMLVIVRDDKICRRLMTAPGVGPVVAITFKTAVDDPTRISKSKAVGPLFGLTPKKYQSGETDVTGGITCVGDMMVRTALYEAANILLSRVTRFSALKRGHGGGETARIEAGQGRARAQDRRDFASHVGRWDGFPMDESGVGLGRRGALSRRN

SEQ ID NO: 455624 - protein, 377 aa, unidentified
MSKVQFVGLDVHAETIAVAVAETGGEVRSLGAIPNRLESVRKLIHKLGPVQHLRACYEAGPTGYVLYWQLTQLGVACAVIAPSLVPTKASDRVKTDRRDAEKLARCHRAGELTAVWVPDAAHEALRDLVRAREAAKKDQLKARHRLGKFLLRHGQQRPEGVKAWTKKHREWIKSHVRFEQAALEATLADYLEEVDHVAARIVKLEKAIDEAIQQAPPEIRAVVEALQALRGVAQTVAVSIVAEVGSLSRFPSPRELMGYSGLVPSEHSSGNRVQRGAITKTGNGHLRRVIGEAAWAYQHRPNVIGLLAQRQKRLAIDEESAKIAWKAQQRLHKRYKALSARGKNKNQIITAVGRELLGFIWAIGVSVERQHQVIAAA

SEQ ID NO: 455625 - protein, 340 aa, unidentified
MGEITTIGLDLAKQVFQVHGIDADGTTVLRKQLRRSQVLSFFSRLAPCLVGMEACATAHYWGRELAALGHEVRLMPAQYVKAYIKRNKNDAADAEAICEAVVRPTMRFVPAKTAEQQAALLLHRGRERLVRQRTGLVNALRGHLAEFGVIAPQGLRNVGKLIAVVRDPSDARLPDLARQVLEVLAAQIEQLEGAVAAVEKQLMAWHKSNPVSQRLATIPGIGPIIASAIAASVAEPSGFRSGREFAAWLGLVPRQNSTGGKHRLGGISKRGNQYLRRLLINGASANLLRSKATKADPWVIGLRRRRPSLVVAVALANKTARIAWAVMQRNENYQRMAAAA

SEQ ID NO: 455626 - protein, 343 aa, unidentified
MERYIGLDVSLKQTSICVVNHVGSIVQEGVVDSDPEAIASFVRSKAPGTVRIGIETGPTTTWLWTELKRLGLPVICIDARHAKAVLKMQINKSDRNDAAGIARIMQTGWYKEVHVKDLDSHAVKALLASRALLVKIKRDLENQVRGLLKNLGLIIGRAKFNVFAVRAEALIENRPELVAAVMPLLAARKAIERQVGDLDRKVHKLARHDAQVRRFMTAPGVGPITALCFKATIDDPTRFKRSRSVGAYIGLTTRRHASGEIDWSGRISKCGDAMLRMYLFEAAGVLLTRVPKWSGLKAWGAKLTKRNGLRKAKVAVARKLAVILHRMWIDGTEFNWSTKSAAA

SEQ ID NO: 455627 - protein, 358 aa, unidentified
MKQVKKLDFSGETIYCGVDVHKKSWRVNIQDSEFELEDFSQDPDAVLLHKHLARRYPGARYKIGYEAGFSGFSMQRTLSASGCECWVVNAADIPTSDKDKKQKQDKADARKLCHYLQSKKMKGIHIPDTDWEHSRTLVRTRERIVSNQTRCKNRIWQLLHFSGLPVPAQQEEGKYWSKRFVEGLQQMNCGGSIHLQQSLQLHIKDYLQTRGLLLEATRAIRALCKEEKYAGDIKLLRSIPGIGEINAAVMLFELQDVTRFKRFDYLCSYVGLVPDTADSGDTKRTKGITYRHNYYLRTALVESSWSVVRKDPALLMKYKEYCKRMEKNKAIIRVAKHLLSRINFVLKTKQEYVTGVVA

SEQ ID NO: 455628 - protein, 317 aa, unidentified
MRASAAFFVGIDVSKQQLDIAVRPSGESWTVAHEEASLSALVARLRGLAPTLIVLEATGGWEVPVTGALAAAALPVAVVNPRQVRDFARSTGLLAKTDRLDAQLLAQFAEVLRPAPRPLPDAQAQELTALLQRRRQLVEMLTAEKNRLPLAARRIRPQLQAHIAWLHQQIAQFDEDLRQLIRSSPLWREKDDLLRSTPGVGPVLATTLVAALPELGTLSRRQIAALVGVAPLNRDSGTLRGRRTVWGGRAQVRAVLYMSTVVAVRHNPVLIAFYQRLRAAGKAPKLALTACMRKLLTMLNAMLKHHRRWAPVRAQHA

SEQ ID NO: 455629 - protein, 322 aa, unidentified
MELFHLGIDVAKAKLDCALRSPEGKIRHKVITNDAAGFAQLQAFLSRQHALTLHVCMEATGVYWEPVAEFLAALPQVTVSVINPAQIKAFAASRMVRTKTDKVDAALIALFCHERSPEPWQPPSEAERTLRALVLRLDSVQSMRTQESNRLLVAQSALQQGITQHIEWLDAEIERLARAIRDLLDQDDDLNDKRRLLDSIPGLGERTIAILLAFYARVSRFDNARQATAFAGLDPRQHQSGSSVCAKPRMSKVGHSFLRKSLYMPAMVALYRTDWGKLFRQRLSAAGKPPKLIIGAMMRKLIHVAFGVIRSGKPFDPAAHGV

SEQ ID NO: 455630 - protein, 336 aa, unidentified
MSSSLTPSLVVGVDIAAKTFTAAWTPTTKPVSFNQTTEGFQKLQDSLLAVVRKPHDVLVVMEATGSYWVSLAVALHEMGFDVSVVNPKVIHNYAKTLPRRSKTDTLDAQLIRQFGAERTPPRWTPPPAVYHELRQRLVARDALLEMYQQARNQRHALLQWPVLVQSVVDQFNAIEQDFLARLKVLDKEIATTLQLGDWATSAALLQTIPGIGVQTTAWLLVATLNFALCPSPEMAVGYVGLNPLQYESGTSVRGRPALGRGGHRRLRRALYQAAVTAARFNPPLKIFYERLRERGKPCKVARCAVARKLLHLAWAVTTKQQPFDLSYGRGGHEDSI

SEQ ID NO: 455631 - protein, 311 aa, unidentified
MYYIGIDVSKKDLSVFDGKDLNFINKEGLKSFKKYLKKKYQLSEIALIFEPTGIYSQYLKEFCAENSIKAYIVNPKQSHNFARALGIRPKNDKIDARTLYKFHKLIEAKDIRVPKIDQQAKTLSSYLVSYEFALKQRISLSNHLESLRDKRLIALMKKDLKRAKMLEDKLFHDIKEYVSKNQNLREDYQRLLTISGVGEKTAIALLTLFKTYQGTNRAQITALTGLDPVKRESGSSVKYKVKISKNGKGIYRKIFYLPTVCATVHNQKIRVFYQRLLANHKPKKLAIIASMRKILLIAHAMYRDKTEYVTV

SEQ ID NO: 455632 - protein, 520 aa, unidentified
MHQTKYRGIIAEGRIIDVSSLGTSGFPLAKPLRKSVSPFGGDLCFGWLGGLRLYLYEPLGCVSTFWNWMPAGKDKTMHYQKVLRMLQSVPYLSVGLDVGADFSWMSIMLPNGTLTGKPFKIIHSDPRSRELAVKKIKEAQEMYSLESRCFLESTGIYHIPLLCFLRNKGFDCSVINPIITKNSTNMNVRKLHNDKFDSKKAAKVGLDASLKTSIVPDDTVIDLRNLVRDYYYFKDLRSAIVLKLHAELKVSFPAYLNVFSKVTTQTSLKLLEAYPLAADMLAAPRDELVESIRQTARFGEKYAISKYDAICAAAKDAAVFGRALQSNALRIRLYIKNCREYQEHLDSILQELHKAVDKLEGTPVYDRILLLQSLRGVGFLSAVVLIAEMGSFDLFSSPKKLYAYFGLDPGVNDSGKFHGDRVHMSKRGSSLARRILHMAAINNLKVDKATKTPVNPVIYDYYIRKCDCKKKIVAVGAVMHKICNIIFAMLRDNKPFELITPEEHCKRYAAEHPESVNNAA

SEQ ID NO: 455633 - protein, 366 aa, unidentified
MKKISTVQVFGNEIFKEQKLTIGVDLGDRWSFYCVLDEAGKIILEQKVSTTTEALKQAFAKIPRSLMALETGTHSPWVSRLLKELGHEVLVAHAQKVELISKSNRKDDRHDARTLARLARIDPELLGPVRHRSAKAQIHLTVIRARAELVRARTGLVNAARGLVKSYGERLPKCGTKQVSRELAAELSVELREVLEPLLNEIESLNERIKEYDARMEKIARESYPQVELLKQVKGVGTQIALTYVLTLDDPHRFRRSRDAGCFLGLCPGRRDSGQSQPQMHISKEGDRYLRTMLVQGAHYILGPFGEDSDLRRWGLRLAERGGKNAKKRAVVAVARKLAVLLHRLWVSAEVYEPLPNSQKAMRAVA

SEQ ID NO: 455634 - protein, 348 aa, unidentified
MKKLVAGMDLHSNNVVIGVMDLDGLRVASGKVACALKAVEQFLAPFQPRLEQVAVESTYNWYWLVDGLQAKKYPVVLANPAKMEPYSGLKHGDDTSDAFFLAELLRLKILPTGYIYDAQLRPVRDLLRRRMLLVQQRTALLLSFKSLYTRTTGQALALNQLKALAIPEAQQLYTHPANQLIAGMQLEHIEQLNGSIAKLETSVLAAARELPGYARLTTLPGVGRILGMTITMEVGDIQRFADAGNFASYCRTVKAERISNEKKKGENNAKCGNKYLAWAFVEAANFARRYDEQCRKWYDRKAAKTNQIIATKALACKLAKAAWHVMTADVDYDAQRVFGPRPTPALKT

SEQ ID NO: 455635 - protein, 366 aa, unidentified
MKRLAPRGGIATPQVFDALYGARKGLAVDYAAIDLGRPYSLVCFDENGRKAHRRFRLSRAGLDRWFKDRPSCRVLMESGTESEWVAQHLEGLGHEVVVGDPNYAPMYGERSRRIKTDTRDVDALYEANRLGIFRPAHRRSERSRQTIELLGIRESLVRTRTRWINVMRSSLRRKGVWVGSGSAASFCERMNELGAADEALQRLDPFVALWDGLHEQIDLLDVQIEKLGAGDQRVRLLQSAPGIGPMRSAAFVAVIDDPHRFRKAHQVESYLGIVPSEWSSSERQCKGRITKAGDTRVRWLLVEAGWTILRSRRPECQALKHWAQGIAARRGKKVAVVALARRLAGILWAMLRDNASYAPERLGRAA

SEQ ID NO: 455636 - protein, 417 aa, unidentified
MQYARSVLPDQPVNGLTCGIDWARDDHALSIVDGRGCEVHRYTVEHSAAGLRELVAVLAGAGATEVAIERPDGPVIDALLNAGVTVVVISPNQLKNLRSRYGSAGNKDDRFDAFVLADTLRTDRARLRPLVPDSPATVALRASCRTRKDLITHRVATANQLREHLKAVFPGPIGLFDNLDSPISLKFLTRFDCQDRADWLTPSRLANRLTSVGYTGRTTPATLHARLTAAPRGITGAASEGFIAITHALVTVLDTLVQQIKTLDKQIARQLAAHADAHIFTSLPRSGTVRAAKLLAEIGDCRARFPTPEALISLAGRAPSTRQSGKTCIVGFRWSCDKNLRDAVADFANDSRHANPWAPDIYNRAIARKKKHPHAVRILARAWLYVIWHCWQNNTTYDHAKHRALQALLEGQQQPAA

SEQ ID NO: 455637 - protein, 362 aa, unidentified
MQTKTETQARTKQARTNLLRRKNQNQPGRHLGVDLHRDSFLVCVRDEGEARMQRWSVEQVGEFARTLRPQDELAVEATGNTRWFSQQVAGRVRRVVVVNPQQFRVISESVKKTDRRDAALLAEYLEKDLLPEVRQKSAAESELAQMAKARDQLVKMRTMLKNQLHGLFHSYGVALPKQALASRRQRTALRGRALSPLADVQRRVLLQQIEALEASIAELEGALTEAARSLPGYEHLVSIKGIGSLGASILLSAIGRIEDFAEPRKLAAYFGLVPRVEQSNQTEHHGHITRRGNKLARTTLVQCALIAKRYSPHLRNFYERIQHRRGTGKAIVATARKLLTIVYYTLKNHWTFTNFPQFEVAS

SEQ ID NO: 455638 - protein, 335 aa, unidentified
MDNLVFCGIEVSAQELVVAWTGKKGQAVMQRFANSAAGHRALSAALTRGGKRVRACLEATGLYGWDVALFLSTQAGLELMVANPRAARHFALARMQRSKNDRLDALGLWEFAKRMEFTAWRRPAEHCLTLWALARRLQALTQQRVAEKNRQHAAGVSQAIPAAVRRSVARTLRFLEREMQQLREQARRCIAGDARLQQRYAQLCSVPGIGENSAIQILAEVALLPEDRDVRQWVAYAGLDPREYSSGTSVHKHTRISKVGNRHLRRALYMPALVASRREPHLRGFYEHLLARGKKKRQALVAVERKMLHAIFGMFRTNQPYHGALVYQLPAEKVA

SEQ ID NO: 455639 - protein, 351 aa, unidentified
MDNITIGMDLGDKEHAVCVLDISGTVTLNSFIDNSSEAILSFFKKYKGAKVVIEAGTHSPWISRQLSTLGCIVLVGNPRKLRAIWQSDNKTDIRDAEMLARIARFDPHLLYPIQHKGRQAQKDMTLLHAREALVKNRSNLINHVRGSVKSFGGRLPSCSTESFHKQAVVHIPEELQSTFHSILGLIEQISLEIKAFEKRIEQIGKEQYPETELLRAVKGVGPLTSLAFVLTLEEPERFRKSRQVGKFLGLTPRKGQSGETDKQLRITKAGSPFLRKLLVNASQYILGPFGEDCNLRRFGLRLASRGGKNAKRRAVVAVARKLSVLLHRLWRHGEIYNPLYKRDSLLLAKAA

SEQ ID NO: 455640 - protein, 358 aa, unidentified
MKDTIKQLDYSGQNIYIGLDTHLRSWKTTIRVGDTYFKTFSQDPSAKILFEYLKRNFPMANYFSAYEASFSGFSAHRELTKLGIKNIVVNPADIPTTDKDRKQKEDARDSRKIAEHLSSSSLQGIYIPSIEAEGDRALQRFRKVLSKEIGRNKNRVKSFLYYHGINIPPQFTDKSYWSKRFTVWLQEVALPTKSARTTLSSIIEIVTFLREKQYQTLKSIKELSQTEGYKENVNLLLSVPGIGLITAMTILTEIEDISRFKTLDKLCSFIGLVPMTNSSGEKESVGGITKRQNKALRSLIVESSWMAIRNDPALMLAYQELIKRMKPTRAIIKISKKLVNRIRYVLKNKKLYVSAVVQ

SEQ ID NO: 455641 - protein, 340 aa, unidentified
MQVTTIGVDLAKNVFQVHGITASEEVVFNKPLRRAQFLPFFAKLDPCLIGMESCSSAHHWARELTALGHEVRLIPPMYVKPYVKRGKSDAIDAEAICEAVTRPTMRFVATKTVEQQSLLSLHRARDLLVRQRTQLINNLRGLVAEFGIFIPKGLARVIGFAEDIILGEVLDLPDIANEVIRNLSEQLMALHKRVRWYEERLKQVAKEDARVRLLRTIPGVGAVTASAIIASIGDGHQFKNGREFAAWLGLTPANKSSGGKEKLGRITKMGDQYLRSLLVVGMTSLVRQTRSHPERASKWLTSLLERKPARVATVAMANKTARIVWAVLTRNEPYSPHTVA

SEQ ID NO: 455642 - protein, 348 aa, unidentified
MKTTTVGLDLAKNVFQVHAIDEAGEVIVGRALRRRQVIPFFERLEPCLIGMEACGTSHYWARELSALGHTVKLMPPAYVTPYVKRGKTDAGDAEAICEAVARPTMRFVAIKSVEQQAVLALHRVRDLLIRQRTQLVNMIRGQLAEFGIVLAKGIQHALRLVERLLDGEALELPALAAKIMITLAQQVRDLQGRLRDLDKDLMAWFRGNEVARRLETIPGIGIITASALAATVTDAHQFTSGRQFAAWLGLTPRANSSGGKERQGRISKMGDRYLRRLLVSGMTSQLQSVRRHPDRHPWTTGLLHRKPAKLVAVAMANKAARVAWVIMTRDDIYRVPHPATGANQEAPA

SEQ ID NO: 455643 - protein, 361 aa, unidentified
MFIERTSVGLDVHARSIVACGLDTVTGQVMRRRLVPSSEAVLDWLRELPGPVAVAYEAGPTGFGLARDLVTAGVRCVVAAPSKLQRPAGDRIKTDARDALHLARLLRMDEIVGVRVPGVAEEAARDLVRAREDVRSDLMRCRHRLSKLLLRHGIVYSGGPAWTGVHEAWLRGQQFTQRGIQLAFDADLEAMVLTLDRRNRLDRAIIEMAANCEYTAVVHRLGCLRGVSTLTAFGLAVEVGDWHRFTGATIGAYLGLVPTESSSGQQRSQGSITKAGNTHARRLLVEAAWHHRRAYRAPGAAMRARWSLATPAAKARGHAGNHRLHQRWQMFLARKKRPVIANVAVARELAGWCWSLAVLDD

SEQ ID NO: 455644 - protein, 352 aa, unidentified
MDLYAGLDVGLNETSICIIDREGKTIRELKIATDPAGAAEALAPYVAELQRVGVEASSLGLWLYRGLHAEGLPMVMAEARHMSVSLSTMRNKTDRNDARGIAQMMRLGWFRAVHVKNVETQKLATLLTQRKFLKRKLIDLENHIRGALRAYGMLVGPVGRKDYDRRVRELIVHTDYVFIRLIEAMLDVRAGLLEGYHRLHKILLLVVQHDVVCRRLMTVPGVGPVTALAFKVGVDDPHRFRRSRTVAAHFGLTPRRIQSGTIDIEGHISKRGDRMVREALCEAAASLLNRVRRYSALRAWGQRIAKRKGAMCAIVAMARKLAGILHRMWIAEADFEPLRGAKITQKLKLKPA

SEQ ID NO: 455645 - protein, 440 aa, unidentified
MKKEIVAWLGVDWADESHAICEYNVETRRKQQYQIAHRSESLQDWLNQLRSRYEGKRVAVVLEQSRGGLIYALMSAEFIEIYPVNPQSLAKFRKALYPSGAKSDPPDAELVGDMVRQNPERFRAWVPGDGDTRALQLLAEGRRKLVDDMTALTNQLTSVLKTYYPQALEWTGELSREQACAFLAKWPTLMDLQKSRAFRIREFYQKYGRPQREVLNERIVQIEKASPLTVDSAVVKAGVMMVNALVAQIVPLRSAIETYDIEIERIFQRHPDQAVFKSFPGAGKVLAPRLLAAFGADRDRFVAASEVQEFSGIAPVTERSGKSKWVHRRFACPKFVLQTFHEFADQSRKFCQWAKLYYQQQLARGKGHHAIIRTLAYKWIRIMFRCWKDHRPYDDRQYVKSLVQRGSQFAEALKAHEKGFVHREMAQGLGHLEAASLVEI

SEQ ID NO: 455646 - protein, 359 aa, unidentified
MSTQRKEFSFKGQKIFVGLDVHLKNWTVTILSEQSVLKKFTQDPSPAALYKFLSNTYPGAEYYSVYEAGFCGFWIHWELHNLGINNIVVNPADVPTMGGERLRKTDAVDSGKLARSLRAGELRGIYVPDSITTEIRSLIRLRDSLTKDQTRHKNRIKAHLRYLGIDIPEEFCRPGNTWTNRFVLWLKDLKMETDYGRKTLDLLIAQYEDLRVQRLNMMKELRALSKTERFAEPLRLLMTVPGIGQVSGLTILSEIDDIARFKDASHLASYVGIVPMCYSSGEHDGTGNLTVRRHAQLRWLIVESAWIAVRKDPVLSAAYVEYCRKMKPSKAIIKIARRIINRIYFVMKHQHPYVNCFVS

SEQ ID NO: 455647 - protein, 415 aa, unidentified
MYFIGIDIAKHDHVAAVVDDSGTLCAGPWSFKNDAQGMKELAVHLAKLKAQPDKALVAMEATGHYWMATYTSLIDAGWKAAVINPVLIDAYRKTDTLRKTKTDALDATLIARFAREKQICATGLNPETTDALKHLTRYREHLVEEKTMLKNRCTSLLDRVFPEFASLFSNPFGVTAKALLKYDPTPTGIKTTDIRTLTRIVVASSHGRFGQAKAKQIKEAATHSIGVDFASGALAFEVRHIVELIEYVEDQIGELEEEIARILDETQGKWLVTIPGIGETLAAQITAEIGAPERFAEPSKLIAYAGLDATRRQSGKYVGTKEHMSKRGSSHLRRSLMLAAEQVSRKDPYFKDYYLAKKAEGKHHYVALSGVARKLAGVILVLMKEQRAYEPRPSIQSSKAAKTNEKNPELPIDSL

SEQ ID NO: 455648 - protein, 376 aa, unidentified
MGSVTRFVGLDVHADTIAVAVAERGEVRSLGVIPNRPEAIRKLIRKLGPAKDLKVCYEAGPCGYVLYWQLAELDVACEVVAPSLIPTKAGDRVKTDRRDAEKLARCYRNGDLTAIWVPDAGHEALRDLVRARLVAKEDQRRARHRLGQLLLRHGIRKPEGMTSWKRPHRVWLNQLRFEQRALQLTFEDYLAEVDHAAERIARLESAIEAAVEAAPEKLRELIRALQCLRGVARVAAAIVAVEVGDLSRFQTAPELMSYAGVVPSEHSSGAKTSRGRITKTGNGQLRRVLVEAAWAYRYRPAIGPELRKRQQCLSAQVREISWKAQHRLHSRYIKLTLKGKHRNVAVMAVARELLGFVWAIGKEVERGGTTCVPVAA

SEQ ID NO: 455649 - protein, 412 aa, unidentified
MSHGHVMWVSREAAFRSTDDWKDTTMPSAISPPKAVLGIDVGKSSHWACLVTREGEVALNRRVRNSEGDLDGLFSQVARDTIVVVDQCRNIGLLAISRARLAGLGVAYLPGLAAHQAARLFAGDAKTDERDALVIAKTALGIPDALLPVPEPDESLEAARSLAAQRSHMVTCATRDKNRLRSILLESCPAFEALADLGDRRWLNMLEKLGGPWGCIDAGKPAFGAVTKGANRARMDAAWNAAMASTRPSKRRVDAENPQVRMLARRIREALEEADRIDREIAALLAGDGTYECLVTIPGIGPRTASELVIGINIEDFPDHDHLASYCGIAPRNRQSGTSISSVSASRQGNRRLKNLLIFSCNSLVRSENRFGEYYRACRGRGMCHGEALKAVARKRLKVIYAIMRDKVPYSA

SEQ ID NO: 455650 - protein, 421 aa, unidentified
MRFIGLDVHKDFCVVAISEGGKARQAGRVKTRRDELELFAQSLMPDDKVVLEATGNAFAIARVLEPHVGEVVVANPRRVRAISHAKVKSDQFDARTLAELLAADLLDPVWIPDEQTRVLRRLSKRRLAIVVAMGRRKAHVFATLQRNLYVEPKGTDLFGTRGRAWIASLELPSDERQTIAGDLRQFDFLAAELKVVDREIAQISIAREDIKRLMTIPGVDMITAATMVGTIGDVSRFPTSRHLIGYLGLDARVRQSGMTAARTGRISKEGSAEARRVLVEAAWSAKRVPGPLRAFGQRIQARRGSQIATVAVARKIAVLCWHLLTRGEDYAHHRPTLHRRKLRKLELRAGASSQQGKHNANPIWETRSQDERERDLVAQAEASYRRSVADWKASGPKQGTGAASGRALDAARQDQAPDPAL

SEQ ID NO: 455651 - protein, 420 aa, unidentified
MLFSGIDWADKEFVIVITDEQGKVVKSLIVKNNVKGFEDFIEKVRTVTSDLDEILFAIETPHSLLVDFLMEIGYTVYAINPKSVDRYRDRYRTSGAKDDFFDATVLANILRTDRDRHQPIAVASDLARELKILTQDREKFVQTRTKLTNQLRACLKSYYPEACSLFGDFVSPSALTFLRLFPTWEDLNKMSEKEVIQSLKKRKVTTPSILKKIVEHRQRLPIPVDSVLKRAKKRQMVTLVEQLIHLCERIRQYDHEIEQLLEKHSDKDIFLSLPGAGTNLSSRILSQLGDDRSRFQCVSEVRPLAGVAPVTKQSGNYIHVTFRFGCQKAFRNALQLFAFCSLSRCKWAHRYYQTHRKMGKTHHHSLRLLSDKWLKIIFAMWKNYREYDERIYLTDMVKHAMNQPNYSERILSRQIYFENA

SEQ ID NO: 455652 - protein, 398 aa, unidentified
MNAVGIDVSKGKSTVAVIQPFGVVIAEPFDVSHTESDLNKLVQLIKSLSGETKVVMEYTGAYYEPIANALHNQGIFVSVVNPLLIDDYGTNRVRKVKTDKKDSLKIASFAIDKWLDLREYIPANDIRKTLKILNRQYVQYNKILVMQKNNLISLLDSCFPNANTLFTSPRRESNGHEKLVDFVLKFPHIHSISKLSLSAFKVKYQSWCRKNNYNYSDKKVADIHSYCKTQISVLPMTVSVIKIITEAAVMLNSTLETLCTFRDEMDRLSSTLPEYNAVMGIYGVGKVLCSQLIAEIGDVRKLNNSKSLVAMAGIDPPPNQSGKVDTKSRSISKRGSPVLRKTLFQIMTIIIQNKPVDDPVYQFLNKKRSEGKPYRVYMIAAAHKFLRIYYARVMQALN

SEQ ID NO: 455653 - protein, 357 aa, unidentified
MSPIQPSFEQPPHQMVVLGVDTHKDVHVAAMIDVTGRLLGTEAFAATTHGYEALWSWARSHGQVSQAGVEGTGSYGAGLARKLCSLGVAVIEVNCPDRSMRRSRGKTDAVDAEAAARAVLSGRATAVPKSGNGAVEALRVFKLAKDSAVKSRTQAINQIKAVLVCADPYLREALAGLTNSTLIAQCAELADPASPGVALPVELTLCLLARRVQSLTEEIRQFGRLIKQQVQDAAPDLLELHGVGPDSAAALLVAAGDNPQRFHSEASFAALCGVSPVERSSGKSQRRRLNRGGDRQANAALFRIALTRLRDHPETRAYLARRTAEGRTRREIIRCLKRYLARKIFKIVSTSIATRTA

SEQ ID NO: 455654 - protein, 365 aa, unidentified
MTSVPSAAELIHLGMDTSVGEIVVAVLRPGQEIPAVDRIRNDEEPVRRLIGRFPDRRLLSACYEAGPGGYELHRLLTSMGVACDVVAPSLIPKGGSDRVKTDKRDSARLALTHRAGLLTAIRVPSPAEEAVRDLVRARADLVGDRKRVQQRLNAVLLRHGRVWRGSKWTYAHRAWVDKQVFAEPALAETLALYRGALEAREAELAAVDRQLSAWAQRDPLAGPVARLGGYRGIAELTGLTLAAEVIDWRRFASARAFMGFTGLTCSEYSSGSRTRRGAITKAGPEAVRTALVEAAWAYRSRPRIGADLRRRQDGLPPATLARSWKAQQRLHATYAKMTARGKPSGVVVTAVARELAGFVWAEMTS

SEQ ID NO: 455655 - protein, 415 aa, unidentified
MVDVIVERCAGLDVHRDTVVATVRLPGTGKSRRRRLQETRTFGTTIGQLERLSDWLVECGVTRVGMESTGCYWKTVFYALEGRFDCWLVNAKHLRNVPGRKSDVIDSRWCCELVELGLVRPSFVPPPEIRRLRDLTRLRATQVQERTRAIERLEKVLQDAGIKLTSVASRVYSVSARAMLEALLSGVTDPFVLAELAKGRLRKKIPQLQEALANRFDISHHGVLIAGLLAHIDAPDQAIGNLEARIGTATAPYAELIALLCTIPGVGPVVSQVLIAECGVDMTVFPTVAHFVSWAAICPGNNQSGRRRGSGKTRKGDTWLRTALTEAAHAAVHTKGTYLASHYWQLRGRRGEAKAIGATRHDILTAYYHIVRDRVPYHELGPDWLTRRHSPEHRTRRLVRQLEALGHHVTLQPAA

SEQ ID NO: 455656 - protein, 411 aa, unidentified
MLFAGDDWAEDYHDVELQDETGRKLAARRLPEGAAGIARLHALIAAQPGADGDPGQVVAGIETGRGLRVQALAAAGCQVYGLSPEQVARFKERCNVSGARSDAADAHALAGMVRTERHQLRAVAAGTAGSAAVKVVARARQTLIWERTRHTLRLRPALREFFPAALLACADPGLTGTGTLELLARAPAPAAAAKLTAAQISAALKRARRHDIPARTEAIKDALRSPQLAQPAAVTAACAAAVQATAAVLITLNEQIRRLEIQVEAHFLQHPDAEIYLSQPGIGTINGARVLAGPGDAPGRCASARARKNYAGSSPITRASGRSKIVLARFVRSSRLADALHSRALSALTASPGARACHDQQRARGQGRNAALRQVSNRLVGIQHGCLKTSTRYDEATARPNDVAHTGPLAA

SEQ ID NO: 455657 - protein, 353 aa, unidentified
MKSDKYMGMDIHQAMTVVAVLDADGKVILETMVATEGSAILRLVESLSGPLRVTFEETTQAKWLYEVLRTHVTEVIVCDPRRNKLLGEGSKADKVDARKLADLLRTGMLRSVYHGHQETRKLKELVRAYETLSIDTQRTMTRIKAIFRGHGIRTPGSGVYQLKQREQWLKMLTEPGIHQRTVWLYEQLDQLRALRRKIRQTMLAESREHRAVGLLKTIPQLGPIRAAFIVATVDTPHRFRTKRQLWSYSGLGVVTHMSAEYEMREGRVVRNRKPIATRGLNPNCNRRLKDAFISAAIGGTRTEPYRSYLGRLQDGGMRAEMARLTLARKIAAIALTIWKKGETFDPKKLNWMT

SEQ ID NO: 455658 - protein, 355 aa, unidentified
MSHLNSGIAVIGIDIGKNSFHLVGQDRRGAIVLRQKWSRGQVEARLANLSPCLIGMEACVGAHHLSRKLQALGHQARLMPAKYVRPYSKGQKNDFRDAEAIAEAVQRPTMKFVATKTADQLDLQALHRVRERLVSQRTGIINQIRAFLLERGVAVRQGLRFLRVELPGILATRTDVLSPRMLRVLEDLSADWRRLDARIEGLSSEIETFAHQDQHCERLMTVPGIGPIISSAMVAAIGTGDVFSKGRDFGAWLGLVPKQISTGDRTILGSISRRGNRYLRALFVQAAWVVLVKLGPKQWERYGLKSWIEAAKKRLHHNVLAIALANKLARIAWAVLNKGRAFTCVKTDAMASRPV

SEQ ID NO: 455659 - protein, 420 aa, unidentified
MKVVYQTCCGVDVHKSFLVATIIKTTSGIQPSYQKKRFSTFNNSILEFKKWLLDNSCRDICMESTGKYWIPVFNLLEDEINVTIANPKWVKAVKGNKDDTKDSKWIGDLFRLGLVPGSYIPCKEIRILREFTRYRYKMTSCRTSEKNRFQNALTVCNVALDSVVSDIFGKSATSVIDYLLEQSDNSINHEEISSRLLRSLKKKSESVIESIEGHLMTDPQKYRMRLVHAHMDYITSTIADIDSMIDSLVEPYDNAVKLLCTIPGVDRNSAINIISEIGTDMAQFSNSKRLCCWAGLTPGNNESAGKKKSVRITRAGVYLKPALVQVAHAAVKSNKSPYYKFKYESIMKRRGKKRAIIAIARMILTAAYQMLSTGEVWNPTDLYKIDMPELLKEKQKEKAIKQAMKLLIAEGILKESPIAS

SEQ ID NO: 455660 - protein, 351 aa, unidentified
MLIIGVDYHPSFQQIAFLDQDTGECGERRLNHGDGEAEKFYRDLQQKGVRVRVGMEATGYSRWFERLLAELSVEVWIGDAAKIKTKRVRKQKTDRQDAQLLLKLLLENNFPRVWAPSPENRDLRQLLWHRHRLVQMRTRIMNQLQALAMNEGTRWKNRLWSEQGRSQLEKIPLAPWASRRRQDLLELLDRMNPTIAELTAAVEQEAKKRPEVLRLMTHPGVGPITALAFVIIIMTPDRFPCGKQIGSYVGLIPCEDSSAGRQRLGHISKQGNALLRFLLVEAAQAAVRYDPDWRRRYLHLAMRRERRIAKVAMARKVAVRLYWMWRNGWEYSQSVEFGSHAGQLATGHGVK

SEQ ID NO: 455661 - protein, 351 aa, unidentified
MFRSVNGYINFIKHQFMETVYYLGIDIAKKKFDGSLTVDGKAFHQVEAENTSNQIKALFKDLKKKFSMSNSQLVVCMEHTGIYCRPLLDFLTENQIRVCVESAVQIQRSQGIARGKNDKVDAKRIALYAYTNREKLRFWTPQRLIIQKLKALLVTRERLVKVKTELQVPINECEEFIEESICKIMEKSCQTSIKSLENDIQKIEKTVDDLVKADVQLNHQYQIATSVIGIGKITALNIIVTTGEFERITKAKQFACYSGVAPFEHSSGSSIRGKTRVSKMANMNIKKLLHLAAMAAINYDSELKAYYQRKVAEGKNKMSVINSVRNKLISRVFSCISDNRLYEKNYRNALA

SEQ ID NO: 455662 - protein, 339 aa, unidentified
MRLYGAIDLHSNNNVLVLLDEQDRVVVERRLRNELPMILAELEPHREWVTAIAVESTYNWYWLVDGLMDAGYPVKLVNTSAVKTYEGLKYTGDEHDARYLAHLLRLGILPTGYIYPRAERSIRDLLRKRAQLVRCRTAQILSIQNLVSRNSGHGISAEEIRSLRQPGLERICGGDTDRRLAIESNQVVLRCLDKQIAILEGVIRAEGRLRPEFKMLQTVDGIGEILSLTIMYEVGTVERFAKVGQFASYARCVESSRWSNSKKKGEGNRKNGNKYLAWAFVEAAHFAARHNERIQRYYQRKKAKANVAVAVKAVAHKLARACYHILKDRTPFDATRAFA

SEQ ID NO: 455663 - protein, 350 aa, unidentified
MLIIGCDFHTRYQQIAMLDDTTGELVERHLEHESGEAQKFYRDLSKPVRVGVEATGPLHWFERLLAELGHELWIGNSAKIRASEVRKQKTDERDARLILDLMLTNRFPKIWVPTPAERDLRQLLWHRHKLVGLRTMLGNQLHFLAMSQGLCRKKKLFTRHGRRELMGLALGPWAGRRRGELLHLLDQLDPAIDELDRAVLEEARRREDAVRLMTHPGIGPVNALAFVLTIGPVARFERSKQVASYLGLNPSEHSSGGKRRLGAISKQGNTMVRWLLIEAAHHAVRFDPELRQDYQRLKSRRGNAVAKVAIARKLAVRMFWMLRSGADYARLVRMQASPGGTLVSNSSPIC

SEQ ID NO: 455664 - protein, 350 aa, unidentified
MDNTFPPLGIDVSKVTLDVRLLSQHRPGPPRRFATTTDGLTLLAQWLESQGTSRVHACLEATGTYSDAVATFLFEHAHQVSVINPARVTAFRLSEGMRTKTDRHDALVLARFCEQKRPALWRPTPVEIQRLQSLLGRLDDLQLTVHQERTRFENLRLDAQIRQEIAAHVSWLQQQRERTLQCAITQVQQYPHLQQACDRLDSIPGIACLTAMRLYSVYFDQHRFRGAPQLVAYAGLCPAQRLSGTSVHGKPSIAMAGNAQVRQWLYMSALSVLRYDPDFAQWAGELKARGKCGRVIVVAIMRKLLHVVHGVLTSDEDYDPRKAFPTHEHSTGVQAPMPTDQEHVASARKE

SEQ ID NO: 455665 - protein, 456 aa, unidentified
MARKRKPKEGGKTSQAAMPVMRPDAAGIDIGATEIFVAVPADRATENVRSFPTFTQDLYALADWLKACGIQTVAMESTGVYWIPLFQILEECGFEVCLVNARHVKNVPGRRTDVSDCQWLQFLHSVGLLKASYRPAQEVCAVRSLLRHRESLVQMAATHVNHMQKALDQMNLQLHHVISDIVGQTGLAIVDAILNGQRDPLELAKLRGERIKASEAVIAKSLVGDYRHEHLFTLKQSLEAYRSYQKMIEDCDREIRQHLEEFQPPAAPPTPPPSEAEAGPKKQQSTDSILRSELQRVWGVDLTRIPGIRTGIAQALFGEIGPDFTKFRSASAFASWMGLCPDNDISGGKVLFVGTRKVKCRAALALRMAAQSLHHSKSALGDFYRRMRAKLGAPKAITAAAHKLARIIFHLISAHQEFDDSKFAADQLRYQKRQEAKLHAKAKSMGYALIPLAVAG

SEQ ID NO: 455666 - protein, 399 aa, unidentified
MSAASVPITRYIGLDVHKHYLVAYGVDRDQHPVYGPRRVDYADLEAWLARDLRPTDAVALEMTTNTWQMVDLLTPCVHSVTVVHPPEVKAIVKARVMTDKKAARILAQLLAAGLLPPVWVPPRDVREIRSLVAGRRRTVALSTEAKNTLHAVLHAHHLLPPAEVKDIFHPKARTWWDALPLSPVEMTRVQVALETLDFATRQRERYEAVLAQLAAEDERVPLLAQLPGIGLVAAMTLLGAIGDISRFPTATQLVGYAGLGAQVHDSGQTRWTGRITKSGRRDLRRVMVDAASHAVKMKGHWREVYERLKLRLGRPKALVAVWHVLTKATADRFATPEQVAAAFYALAYKVGVKNLPEGVGARQFVRDQFDRLGLGDDITHIPWGSKRFRLPPSRVQPDR

SEQ ID NO: 455667 - protein, 343 aa, unidentified
MDHFAGLDVSVKEASICIVDDTGRIAREVKVASEPDALLAVLSNPLYHFKRVGLEAGPLSQWLFSALAEAGLPAICVETRHMRAALKAQINKTDRNDARGIAQMMRAGLYRPVHVKTVRSQKLRMLLTHRKLLQSKAIAVENDLRATLRNFGLKVGVVGTVKFEARIRELVENVSDLVVLVEPLLLVRRVLREQIGILHRRLLVIVRDDDVCRRLMTVPGVGPVVALTYRATVDVPARFRKSKAVGAVFGLTPSRYQSGERDRTGGISRCGDEMMRAMLYEAAHIMLVRSTKWSWLKAWAMKIAKHRGLKKAIVALARRLAVIMHRIWIDGTEFRWTREAAAA

SEQ ID NO: 455668 - protein, 400 aa, unidentified
MVSIGIDISKEKSTVCTLRPYGEVVEPPYDVAHNESELNALIEHIQSFDEDVKVVLEATGGYHHVVVSKLISVGIFTVVVNPYIMKKYCAATLRKAKTDKIDSVKIAHYGIDHWFSMTAYCPPDEVYAELKLLGRQYEQYVRLKVGCKIHLADLLDGVMPGIKKILAGNVPAFSTKDKLCDFVEKYWHYDNIKKLSEKQFLASYEKWSKKKGYRYNESQAIAIYQLSKNNIPTLKSSTPSTKMLVLQAVKSVRDAELTLSLIISQMQEIASALPEYSVVNKMKGVGTVLSVRLIAEIGDVRRFHNGSALVAFAGIDAPPYESGAFVGTNRHISKRGSATLRKIGYEIMHALKVTKPTEDSAVYDFMIKKENEGKPKRVAKIAGLNKFLRIYYARVMEVYC

SEQ ID NO: 455669 - protein, 461 aa, unidentified
MKKPKRRATGKVDQGSKLSVIQSDVAGIDIGSREMFVCGPADQEGRREIRVFATTTQQIQQCVGWLKQQKVRSVAMESTGVYWIPVLEIMESSALEVLLVDTRPLSRVPGRKTDVEDCQWLQTLHSHGLLRGAYRPSEQISELRTIVRQKAVLVRQQADWIRRMHKCLDQMNVRVHHAVKDTQGVTGMAMLRAIVGGERDPRNLAKLRDPGCQKSETEMIELLTGNWRSDHLFNLKQHMTMYDSAARQIAVYEEEIQRRMQAVTPAGRKDIQAPPLANIEKRKTMKKRDQEGKRQALYGVMGVDLTTIDGIGVETVEVIMSEYGTEMSKFPTEGEFVKHVGLAPHRPVSGGKVLKNKPKKQKGTRTAEVLRNAATSLKHSRSALGAYYRRMARRKDSGVAVFATARKLGALIYRMLRYGEQYVDVGQAAYEKQYEEKRIRALRNTANQMGYNLLKQEAVSA

SEQ ID NO: 455670 - protein, 375 aa, unidentified
MKEKLRFLGLDVHAETIAVAIAESDGEVRSLGTIPNRLESIRKLIKKLGPAEKLRACYEAGPTGYVVYWQLAELGVKCDVVAPTLVPVKAGDRVKTDRRDAEKLARSHRSGDLTAVWVPDEGSEALRDLVRTREAAKQDQLRARHRLSKFLLRSGQRPPTGIRPWTRPYLIWVAQLRFTQMAQEATRLDYLHEVEHMRERVERLERAITEAVKLASPALQQVINDLQALRGIADISAVTIAAELGQVSRFDGARQLMGYCGAVPSEDSSGKRTRRGSITKTGNAHLRRIVVEAAWSYHRPPCIWYGLRKRQESISEEVKEIAWKAQHRLHKRYMRLAAAGKDKRKITTAVARELLGFIWAIGTRAETTVRQRIAA

SEQ ID NO: 455671 - protein, 332 aa, unidentified
MYLGIDIHKQYAQVAVMDENGEIDREVRVENANLDEIAQEYAGSEAAIEATGNYYHIHDTLSEYLDVVVANPSELNLIANADTKTDRVDAKELARLVRLGSVPESYVPSEEIRECRALVRGRHKLVENRKDYANKIHGLLTDHGITRKVKPLSVGGREFLEELTLPAPWDTLLETYLEVIETFTDQIERLEVAIEDRAASREETQLLMTIPGVSYYSALLIHAEVGEIDRFDEDKQVVSYAGLNPVIRESGDSRFEGGISKKGSEKLRWILVQCSRVAVHRSEDEYLSRFYQRLKNRKSGKEAIVATARKLLVSIFHMLDRKEVYDPPGVSA

SEQ ID NO: 455672 - protein, 466 aa, unidentified
MTAGNKLWRNRKERKEWARRLRSEDPGLEVLHPHAAGIDVGNSAHYAAVRPDRDPEPVRRFECFTADLYRLAEWLQSCGVKTVALQSTGVYWIPLYEILEDRGFEVYLINARHTKNLPGRKSDVQESQWLLKLHTYGLLNNSFQPPAEIRVLRTYWRQRAEHVSGAATCIQRMQKALTQMNLQLANVISDLSGLTGQAIVRAIIAGERNPQKLAELSHPRIEASREEIAKSLEGNWRPELVFVLRQEVEMYDTYQRRITECDQQLQKHLASFGDTVLPQSPEAEPRERKAKPTKNAPRFDLGSELKRITGVDLTRIDGIDVMVAQTLLSEVGMDMSRWNTEAHFSSWLGLCPDNRISGDKLLGKGTRRVVNRAATALRLAARNLIRSRSYLGAQYRRLRTKLGAPKAITAMAHRLARLVYRMLKYGQRYVDKGTEYYENRYRQQQIHLLQKKAAKLGLQITVAVQS

SEQ ID NO: 455673 - protein, 348 aa, unidentified
MQSKTQIKSIGIDLGKTTFHLVALGIRAQVVVRKKFSRQQLLTYTANLPSCLMGMEAGVGSHFLGRALREQGHEVRLIPAQFVRPFVKSNKNDYGDAEAIAEAVERENMRFVPIKTEDQLDLQALHRVRERLVSRRTSVINQIRAFLLERGISFRKGPASLRRQMPEILENADEKLTARMRRLLDFLWQEWKHLQLQIESLSEDLEKIASSDAACVRLQQIPGVGPLVSTAVVSAIGNGAAFHKGREFSAWLGLIPGQWSTGGKTKLLGISKRGNPYLRKMFIHGARAVVLRAKREGSYLGQWMKGLEGRAPRNVVIVATANRLARISWAVLSSGENYHPMPALAVAS

SEQ ID NO: 455674 - protein, 414 aa, unidentified
MSDVNTTQHTAVALVAIDIAKRNHDVAILWPNGKTATMKITNSKDGFQRLMEVVQRYGDPVHVAFEPTADYHRNLAYWLQNAGATCFLVSSLMSARARELLFKTWDKNDRKDAQVILYLMRQNMMKPFYDPLVEGTMDIQELSNTYHQISLARTRCQHSLINHYLTLYFPEMERFYHASRSEWFCRFLCKFPTPQSITRYKIATFVKRAWVIVGRKVAKQRFLEEVHETACRSIGLPVELQGQAVKTFRIQLQRIIDLNQLRHQLEKTSENILNAREDYQQLRSVPGVGPICAMMIIAESGDLNRFGHYRQYLNFCGFNLCSSQSGQRQSKHKISKRGNSRLRYAYWLAATIAIRQRENSFREKYERHIKSSPNNPDLKRKAVVAIACKLARVCHSLVKQNTPYRGYYEFNHGT

SEQ ID NO: 455675 - protein, 485 aa, unidentified
MKGGGRERPRVTARGLLTRGPFPAELPEAQQQSVPVGKRTALEVQEKVAPPEGQYKANLPFTRLGRESTRPEGGRVGYYLGVDWADQTHAVWGVDEDGTKIAARTVPHTAEGLSEWGRELDEWRAQGIALWAAIERPEGRVVDFLLDHGVVVYPVNPKALDRARDRFRQSGAKSDPFDARVLADFLRTDHAHLRALQPSSDAAQELKLLAEDYQRHIRQQNRLVNQLTATLKAYYPRALEVTELTTALAREFLQAYPTPEAVAVLTARQWQRWARARRLSEARTRALWDVLQQPQLPVPAHVVRAKARLMLTLVAQLTPVVAAVGAYREAIEDFFASMPAAQWVRTLPIGNHGIMAPTLWARLGDAPGRWESFRHLQAHAGTVPVTKRSGKQLRVVHFRFACDKALRYVVDHVAFLSLHSSEWARAYYDEQRARGHSHRQALRALGAKWLKIIFVMWQRQVLYDEQYHLATMTRQQLRQRQKEIA

SEQ ID NO: 455676 - protein, 313 aa, unidentified
MTKITIGIDISKAKLDVACFPGSEIRQFSNDGKGHKALLKWLRRFDLTLMVFEPTGPISSPVGALGADCGLPYAKINPRQARCFAEATGKFAKTDRVDAIMLARLGALLTPTQSTIKSQLLEDLNELHVARRGLMKDRTAIKNRLHSLVLPFLKRRATQQLKQIDAYIADIDEHCRDLVDADPQLRQRRDILLTIPGIGELTALILLIEMPELGTLDKRQAAALAGLAPMTRQSGTWKGKSFIRGGRANLRKALYMPALVASRFNQDLKQKYQAMIEAGKPPKVAITAIMRRLITIANALLRDQRKWTENRAC

SEQ ID NO: 455677 - protein, 336 aa, unidentified
MFQLGIDVSKKTLDLCLLREGVKGRVKTRKLKNDVDAACSVIDWLRRQRCEPADVHIIMEATGVYHESLAYGLHTAGARVSLANPHRSREFARGMGIMTKNDSVDAWVLACYGALKEPAPWEPPPENVRYLSALLRHRDALVTDCTREKNRLEKCRATDTPDAIIESIGNVLQSLSAETDHLDNLIREHLEQYPELKKDFDLLTSIKSVGFQPGLNMLVILRGHRFDTAEQAAAFLGVVPVEKFSGTSVRGKPRMSKIGPPEIRAKLYLAALCGLRFNPVMKAMYERLCLSGKAKMCAIGALMRKLVHWCYGVLKTQKPFDAEYLSSDARSACQAA

SEQ ID NO: 455678 - protein, 333 aa, unidentified
MSSKHPVPVVDPDLVFVGADVSKSRLDIHGVGQGLSVSNDRHGVGHLVGALRKSPPGLIVVEATGGYERPLVQGLLDAGLPVVRVNPLQVRRYAQSRGILAKTDRIDARVLADFGRQNADRLHPMQPVSDNARMLHELTARRRQLVEQCVANKSQLEHASVKAVRQSIGRTIKHLRTEIASVETEIQKIIDGDQTLADKHRKLLTVKGVGPRVSRILVSELPELGELDRRKIAALVGVAPFNDDSGTHSGPRHIRGGRATVRAALYMATLVAARHDPVIKAYYKHLKNSGKPKKVALVACMRKRLNYLTSLLSTKPQATEKGPQAAERNEAGF

SEQ ID NO: 455679 - protein, 418 aa, unidentified
MNNPRPGRPVLAQGRAVVGIDIGKRTHAATAISPQGQIIAQLASFPNTREGFDRLENEVLRPAGGPGRVLVAMEATGHYWMCPRAELERRGYDTVVLNPIQTNARCNAQIRKTRNDRIDSASIARLVLSGEARASRVPNERTLELRLLTRHRRRLLRAIGDQERFAHTLVDRIFPEYADVFSEPFLPSGEQLIRQVGLAPDSLLQRKDQVRDVLRRTSRGRLGPDTIDQLLCAAQTSIGVQQAQGVVHQQLTSILDFRHTVREQIALIEGELERRVQQLKSPLLSLGISSILAATIHAESDPIADFACADQYVAYAGLDPSIHDSGDTLHRRGKISKRGSPVLRHSLYLAAFVVYRKHNCFQRIYSKHRGKGKGHRNALVIVARHVACVIWRLLTDDRPFTKRPPKTTVRSGKQHPNA

SEQ ID NO: 455680 - protein, 375 aa, unidentified
MMRLYDRQHRFYCGIDLHARSMHVCVLDASGCVVLDKGLPCNFDSLLQALAPFRDDVGVGVECMFGWYWLADRCAQHQIPFAVGHALDMRLIHGAKAKNDKIDARKVAHLLKGGNFPLAYAYPKGMRETRDLLRRRMYLVHKRAELITHLEILNAQNNLPPFGKKLAYAANRSELRVAQRFADPSVKMSATLDLALIDKLDELIAQVEQHLTRTAKVDDVQTYHRLRTIPGVGPVLALVLLYETHRAERFDHVGQFLSYARLVPCLHESAGKKLGAGGKKIGNAHLRWAFAEVACLFLRGSERARKWKQKQENKHGSGKALGVLAARLARAVYHLLRKGEAFDEDRFWGGRSPAAPAAAKHGTGRKGRPARAAAE

SEQ ID NO: 455681 - protein, 349 aa, unidentified
MLIIGCDFHSRFQQIAMVDTETGELIERRLEHGNGEAKKFYAELQKPGRVGMEATGYAQWFEGMLAKLGHELWVGDAAEIRAAMVRKQKTDSRDAVHILDLLLTNRFPRIWIPSPEERDVRQLLRHRHKLVGLRTSLRNQLQALAMGQGVCRKKKLWASSGRAELKALGLDPWARRRRQELLEILDRLDPSLAELDRAVAQEAEHRPAARYLMQQPGVGPVTALMFVLTIGPIERFQRSKQVVSYLGLNPRESSSGGRQRLGAISKQGNSLARFLLVEAAQTASRYDEGLRRDYQRLKFRRGSAVAKVAIARKLAVRLYWKLREYSSPAPSTRTQGSPETSVVGASLSS

SEQ ID NO: 455682 - protein, 397 aa, unidentified
MRFYNAQHRYYCGIDLHARRMFMCILDAEGKIRVHRNGPATPEHFLDLIAPYRDDIVVAVECMFTWYWVADLCAREGIPFVLGHALYMKAIHGGKAKNDKIDAHKIAALLRGGLIPMAYVYPQEMRATRDLLRRRCHFMRKRAELLTHIQNTASQYTLPTFGKKIAAKANRTDVAERFTEPAVRKSIETNLALLDHYDRLLNGLELYLVRTAKVHDVQAFHRLRSVPGIGKILALVLLYEIHDIHRFPRVQDFVSYCRLVKCAQQSDGKTYGYGGKKIGNAHLKWAFSEAAVLCLRQNPAAQRYVARLAQQHGKPKALSILAHKLARAVYYMLHRQQAFEAARFFPGLAAAPPTPAGEPATSPGQAHTCRRRRAQRRRHAVALTTSSEAVMPTVPTH

SEQ ID NO: 455683 - protein, 351 aa, unidentified
MPRATSSTNVIATIGIDIGKNAFHVIGLDDKGAIILRHKLSRGQVYARLANIPPCLIGMEACVGAHHLGRQLSALGHDTRLMPARYVRPYSKGQKNDFRDAEAIAEAVQRPTMKFVAIKTVEQLDLQGLHRIRERLVCQRTSVINQIRAFLLERGIAVRQGLRTLRTEMPIVLAKTDKLSQRMIHMIEDLCTDWRHLDRRIETVSKEIETLSEQDDGAKRLMTVPGIGPIISTATVAAIGTGEVFSKGRDFGAWLGLVPKQMSTGGRTILGPISKRGNRYLRMLFVQAARAVLLRPQSWEKHGLKLWIEAAARRLNRFKLAIALANKIARIAWGVLHGGRNFEVRPTNQAA

SEQ ID NO: 455684 - protein, 412 aa, unidentified
MEVVYPCCCGLDVHKKSITACVLWAEAKGKSRKEKKRFGTFTHDLLQLADWLEQCGVTHVAMESTGVYWKPVWNILAEQFEVLLVNAQHIKAVPGRKTDQKDSEWIADLLQHGLLRGSFVPPQPIRELRDLTRYRVSLVQEINRIANRIQKVLEDANIKLASVATDALGASGRAILEAMLAGEQDAARLAEMSKGLLRNKIPELKLALEGRMTEHHRFLLRQLFEHLRFTESKRSEIEQEIDKRMRPFEDKVTRLCTIPGVDRVTAWGMLAEMGMNMNQFPSSEHLASWACLCPGSFESAGKRLSGKMRKGNVSLRRCLSQAAWAISMMKNNYLSALYRRIAARRGAKRAIMAVAHALLEIAYHMLKRKEDYRELGADHFDRIDVNRIRRSLVRRLERLGHKVTLEPLAQTA

SEQ ID NO: 455685 - protein, 388 aa, unidentified
MQTVADRPEAPTAIRTDLGAIFVSLELSRSTWLITSLSPGGGEKMSKQVVRGGDVAGLLERFARLREKARARTGKVFPFVVIQEAGLDGFWIDRALQNEGIESHVVDPASIATSRRRRRAKTDGIDGEALVRALLAYKRGEPRVCAMVKAPTPEEEDRRRLCRERKVLIGERVQHVNRIKGLLFSQGISGYEPLRRDRRERLDTLQTGDGRLLPVHLKAQVCRELDRLELLLEQIKAVEAERDVLLAAQQVAAPAPAAMLLDIKGIGPEFAAILWSEGLFRHFDNRRQVASYAGLAPTPWQSGSVDREQGVSKAGNPRLRTTLIQLAWLWLRHQPQSALALWFEERVRRNGGRLKKTTIVALARKLLVALWKYVTAGVVIEGAVMKRT

SEQ ID NO: 455686 - protein, 361 aa, unidentified
MSKSSKRSKRGPEFVSVGLDVSDRKSCWVGLGDDGKVLERGQVSTRLPEIEKWAMGMAPTTMALEAGPHSPWISRLLERCGHEVIVANPAKVPSISRSRSKNDWRDAEQLARLARFDRSMLHEIKHRTERAQQDLQVIRSRDAAVRARSRLISHVRATVKAHGQVIGRCSTTAFAGRAGAVVTGALLEIVEPILEAIDKLSATIDAYERKIEQLAAGPYAETRWLMQIKGVGALTALAYVLILGDASRFRRSRMVGAYLGLVPARDQSGESDPQKGISKEGDRLMRRLLVQSAHYILGPFGIDSDLRRHGEAIAARGGKNATKRAAVAVARKLAVLLHHLWISHDEYVPLFNHKTNDAIAA

SEQ ID NO: 455687 - protein, 369 aa, unidentified
MRGKWTLRADGIKVPEVEGVQTSQATGGSEMNRIVVGVDIAKRVFQLHWVEPETGEIVTLQLKREKFLEHFANRASCVIGMEACGGSQHWARSLQKLGHQVKLLSARMVKPFVVGNKNDVADARGIWTAVQQPGIKVVAVKSEEQQAVLALHRMREQLVKFRTAQTNGLRGLVTEYGEVMPQGRAGIKRDIPAALGRLSERLPAIVIDTLREQYARLGQLDEQIGEIERRLRHWQREDAATQRIAAIPGVGLLSATAAIATMGDAKAFKSGRAFAAWLGLVPGQTGTGGRVRLLGISKRGDKYLRTLLIHGARAVLTHSKSPPEWLSELLKRRPKNVAVVALANKMARTIWALTAHERAYQPGYVSQPA

SEQ ID NO: 455688 - protein, 411 aa, unidentified
MQVIYSRCAGLDVHQKTVVVTAMITQDEGTVQREQRSFSTMTADLLALDEWLRQRQIEVIALESTGIYWRPLYTILEEGRTVILVNARHMKAVPGRKTDLKDSEWIADLLRHGLLRASFIPPRPIREIRELTRYRKTLIQERADEVNRLQKVLETANLKLATVATDILGKSGRAMLTAILAEQQDPEVLAELARGRLRAKLPQLRQALEGRVQAYHRLLIERILAHIDFLEESIQVVQQDIQDRLKPYEETEELLKSIPVLQEAAIATIVSEIGVEMDCFPSEKHLASWAGVCPGNYESAGKRLSGKTTPGNAYLKAVLCELAWVIAHTKGTYLSAFYHRIARRRGKKRAILAVAHKLLVIIYHVLKTKKPYTELGEDYFDQLEKAHIERRSVRRLEQLGYEVLLTPKQVA

SEQ ID NO: 455689 - protein, 376 aa, unidentified
MEHDSTLYVGLDVHKDSITVAYAVGMADVELFGKVGTMQIDVDRLCKRLQTKAGHICFVYEAGPCGYGLYRRLVDKGFDCMVCAPSLVPRKPGDRVKTDRRDAVKLVRSLRAGDLSAVHVPTIEDEAFRDLARAWSAAREDLKAARCRLKSFLLAHGVHYLGRPNWGPTHRRWLSTFSFDSAWQQLAFNEHRRTIEDRLAQCERLEQALHEAVTSWRFYPVVLALQAMRGINFTSAIGLVSELGDLSRFEHPRQLMAWIGVTPSEHSSGGKRRQGSITKTGNSYARKLLVESALSYRHPARVSIDIQRRHEGLPKPIIDRAWDAQLRLCRRYRKLVAKGKPAHVAIIAVARELAAFIWDVGRLGMTQALPRNVQVA

SEQ ID NO: 455690 - protein, 390 aa, unidentified
MSNKEQAKRIIGLDAHPYMFSAAALSGANALEARTEWCVDRVNIKNLERILKKKAKPGDIIAMEASGNSFAIAERLFAIGLHPVVLESQAVGKVGKAYCATDKIDAVKIARVYFSGLAHEVWIPNAKAAERRELFFAHRNAVRDSVRERNRIWKFLNQQCVRRPRGLRLAAPTALPTLLALREWTPMQQVLLAESVDAFQIAEARRRRLKARIAEEVTSDPQVLKMVRLLGVREQVAFALAAFIGNIERFENPKKLVAFFGLNPSVSRSGIGGGNGPLAGNGRSDVRAMIIQAAQSIMRHGQGQTHKWALALKMRKGNNIAVAALARKLVVSVWYLLRGLFTPMTEVTEHIKVKLHKIASTIGKSRLKEMGYDKLMQFEMEKIQLLIGTT

SEQ ID NO: 455691 - protein, 400 aa, unidentified
MISVGIDVSKGKSTVCILKPYGEIVSKPFNITHTQKDLSELSSMLFRLNDEVKIVMEATGIYHLPVLTYLQEKGFFVSVINPYLMKSYRNESLRKAKTDKIDSRIIANYGIDHWFKMKEFQISGVIYEELKLLGQQYRHYMKLHLLSLAELTHLLDLTMPGIKNLLASWNETNRKDKRSDFVERFWHYDVITSMSEQEFTEKYILWAKEKKYVPSQEKAKVIYTLAQESIPTLPSETSSVKMLVTEAVRVLKEVDATLGLILSRMQEIAKTLPEYSVVREMGGVGNTLAPKLIAEIGDVRRFRNGKALVAFAGIDPPPYESGQFVGCNRKISKRGSASLRKVGYETMRSLKMHSRPEDPVYRYVVKKESEGKSKKSAKIAGLNKFLRIYYARVTELYKNI

SEQ ID NO: 455692 - protein, 354 aa, unidentified
MVVVGTDVHKRTHTFVAVDEVGRKLGEKVVKATTEGHHKALAWAREQFGEELLWGIEDCRNLSARLERDLLTAGQSVVRVAPKLMSQVRASARTRGKSDPIDALAVAQAVLRHPDLPVASHDEASRELKLLIDRREDLVAHRTSTINRLRQRVHELDPAAEPKPGSLHRTKPCTTLGKWLHTQHGLLAELARDELADIMRLTEAINTLAARIGERIQKVAPTLLAVPGCGELTAAKIAAETAGIARFKSEAAFARHSGVAPIPVWSGNTAGRVRLNRSGNRQLNAALHRIAITQLRISDSAGQCYYRRRLADGKATKEALRCLKRHLARTVYRSLHTDLHDDRSHQKPETPLAA

SEQ ID NO: 455693 - protein, 316 aa, unidentified
MTSVAVYVGIDVASAELVVAVRPTAEGWSVPNDDAGVAAVVRRLRPLAPAVIVLEATGGYERAVVAALAAARLPVVVANPRQVRDFARATGQLAKTDQVDAAVLALFAERVHPEPRALADAATQALDAVLTRRRQLLDMLTAERNRLAQAAPPVRRDVQAHIHWLERRLADFDRDLDALIQHSPVWRAKDNLLQSVPGVGPVVSRTLLGALPELGTLTHKQIAALAGVAPMARDSGLWRGRRRITGGRAAVRATLYMAALVATRHNPTIRGFYQRLLTAGKPKKVALTACMHKLLTILNAMVRANAVWRHELAQTV

SEQ ID NO: 455694 - protein, 414 aa, unidentified
MLKIVYRVCCGMDVHKSFVVACIASTTEYGVTTYKSKRFSTFTGDLRRCAAWLAENSCKDVCMESTGKYWIPIYNILEPTCNIVLAHPKYVKAIRGKKTDKRDAKWIADIFKHDLVAGSFIPPADIRQLRDLVRYRWKLTNFTTGEKNRAQNCLTVSNIKLDDVFSDVFGKTASAITTRILENPAEKITDVSGFRTKGMKATNEQALAAVDGEMCEEQAEKLRIIRSHMDSLQLCKLDLESLILATAEKYLPQLGLVMTVPGIQSFTAIGIISEIGVDMSVFPTSKHLCSWAGLTPQNNESAGKKKTTRISRAGAYIKPLLVQCALNAVRAKKFPEVRNRYLALKKRRGHKKAIIAIARMLLTAIYNILKKNESYNPELYRQTDRPPAHREVSVAEAIFILQRQGYLVAAPPTP

SEQ ID NO: 455695 - protein, 357 aa, unidentified
MPPITPDDAAIIEVTGGVDTHLDTHTAAVIDPIGRVLGTQQFPATASGYSTLLAWMRGFGPLRRIGVEGTGAYGAGLARRLRGEDVKVIEVDRPDRKTRRVQGKSDPIDAIHAAKAALAGERTGTPKQRDGRVEALRNLRVARRSAVDQRADAQRQIKTLIVTAPDELRAQLRGLSVKQLISTCASLRPDRADAATPGTAAKIALRSLARRHQQLAVEVADLDELLEPLVAAINPALVAVNGVGADTAGQLLVTAGENHDRLASEAAFAMLCGVAPIPASSGKTNRHRLNRGGDRQANKALYRVVLCRLRWDPRTRDYMQRRTKDGLSKKEIIRCLKRYVARELYQIITSNNLELAA

SEQ ID NO: 455696 - protein, 481 aa, unidentified
MKTKPPEKIQQATNPSTRGHWNKMNRKQRREMMRQIQSEDLSLEVVHPHAAGIDIGNESHYVAVPPTRDRQPVRHFGCTTVELKALAEWLKQCGIQTVAMQSTGVYWIAVYDILETAGLDVYLVNARDTKNLPGRKSDVQESQWLMKLHTYGLLRNSFRPSQEIRTMRTYWRQRNDLIRAAVSHIQRIQKALTQMNIQLGNVLSDVSGVTGQAILKAILAGERDPHKLAALRDPRVKASEEQIARYLEGNWQEDLLFVLKQEQAGYEFCQQQIAECDRQLEQYLQLREDRSQGASLPQEMRKGRLVRKKGNKPVFALRAELFRITGTDLTQVDGMDVVTAATILSEAGWDMSKWEDEHHFVSWLRLCPDNRISGNKVLGKGRLPTNNRASIALRMAASTLRVSNTYLGAQFRRFRTKLGAPIAIKAMAAKLARLVYRMLRYGIKYVDQGAKIYEAQHRQRQIGQLKWNAAKLGFRVVEAAA

SEQ ID NO: 455697 - protein, 395 aa, unidentified
MFIVGIDIAKRSHVARIIDSEGRIAAKPFSFRNSCSGYNALLARMHKITNRKSEFILAMEATSHYWLALYTRLCREGYLVVLLNPIQTHAVRELLNNGDAKTDEIDTMAIAETIRFGRYKPSRVPQDKLLALRELCRNRYYLVDMASDLKRKITALLDQVFPEFETQFSTIFGKAALAVLKQYPTAEKMGRAQLGKLTQLLQTASNGRFGEWKARQLRETAKGSFGIPDCEGVYSTLILLHLQQLQSLLDGAAALERQMAEIFSQFDTPLTSIPGIGPLLGAAILSEIRDISSFPSADKLLSYAGLNPRVKQSGETKFGGIHMSKRGSPYLRRAIWMACTNAVQCDPMFRAYYEKKAAEGMKYMCIIGHVTRKMTAVIFAVLRDNKAYQPILTAA

SEQ ID NO: 455698 - protein, 387 aa, unidentified
MPQANDLSRCLLTLEQDSTLIAVVELSQASWLVAGIVPAVERQPLKKIEADEAALLRLLGRWTDEATRAGRAITRVCVAFEAGRDGFWLARWLRARGIEAHVIHPSSVAVPREHRRAKTDRLDTELLKRAFLGWLRGERGHCTTAAIPTAEEEDAKRPNREHESLVGERTRIVNRMKGALARLGVRGFKPTLRKACERLGTLRTAEGAPLPPNTLAELRRDMARLRLVREQIAEVEAARLERLEEEPGSRPHAMVRLLARVIGVGVETADMLVREVLSRDLRDRRAVARYAGLTGSPDESGRRRREKGLAKAGNARVRHGMVQLAWRFLLFQRESALARWYRERTADARGGTRKTMIVALARKLLIALWRLVTTGAMPEGVVLRPAA

SEQ ID NO: 455699 - protein, 353 aa, unidentified
MTSTKYIGMDVHKESISIAVRNDAGKIVMECVIETKANSILDFIHGLRGELQVTFEEGTWATWLYDLLKPHVTKLVVCDPRKNTRQGNKNDQIDARELADRLYMNKLSSVYHGGAGVRTLKELARSYLTISKDLARVMSRVKAIYRSWGIPCAGKQVYAPRHRADWLAKITEVGVLRRAEFYYQQLDALRSLRHEARRDLLAESKKHKATKLLCQIPSIGPIRAALLIALIQTPHRFRTKRPLWKYSGFAIETHSSADYRSVKGQLQKTKKQVSVRGLNRDCNHDLKNLFKSAATIASVKPGPFQEFYAALVAKGMRPEMARLTLARKIATIVLIVWKKGVSFDAQYLKPQTA

SEQ ID NO: 455700 - protein, 423 aa, unidentified
MDILYEQVAGLDVHKNTVVACVRIVAEGKTKRECRTFSTTTDQLMELRAWLEECRCTDVAMEATGVYWMPVFRILGEGSFELVVANAAHIKNVPGRKTDVNDATWIADLLACGLIKASFVPDEEIQELRSLTRTRKQLVREQTRHVQRIEKTLAEANIQLDSVISDIMGASGRRMIEAMIDGVRQPRQLAALAGKQIKATPKELYDALHGRLTDHHRFLLDLHLKQWDGLDETIRKIDREIDQRIAGMHTKAASGEVPFRTLIELLSTVPGISTVSACAIVSEIGCDMSRFPTAGHLVSWSGLCPGNNESAGKRKPSRLRKGAPWLKTMLVQCAWAAKRKKDSYYRAQFFRLQSKRGPQKAICAVAASILTAVYHILKNGIEHHDLGGTYFDRRPVELKAGQLVARLKKLGFNVQLQPIAEAA

SEQ ID NO: 455701 - protein, 337 aa, unidentified
MPTLTIGLDIAKNVFQIHGVDRHGKVVIQRKLRRSDVLKFFAKLESGLIGIEACHGSHFWARELTALGHTVRLLPTQYVKPFLIGGKNDANDAAAICAAVTRAGIHFVAIKSAEQQSLQSVHRMRQRLVLERTAKSNQIRSMFAEEGVIFPIGLPQLKKGVMALVNDPDSGITTLLRRLGSMYLEQLKALQQWLDELATEIAEIFKSNEACQRLATVPGIGPVIATALVSSVGDPSQFKNGRQFAAWLGLTPMQRSSGGKTRLGGITKRGDTYLRTLLVQGARAVMHFVSRRNDSHSQWIKSVMQRRHVSIAAIALANKTARIAWAILTGNGCFRAA

SEQ ID NO: 455702 - protein, 337 aa, unidentified
MTIIRIGLDTAKHVFQVHGVDENEQTVVRRQLRRSEMEKFFGKLAPTRIGLEACGASHYWARLLRGLGHEVVLLPPQYIKPYVKRGKNDANDAEAICEAMSRPGMRFVPIKSAESQAGLMLLGVRDLLIKQRTMVINAIRGHAAEFGVIAARGPVKVAELLQRAHAEEASVPALALDMLRLLAAQLDALDVKLKLIETQLMASHQENPLSQCLASQPGIGPIGAVSFALRVSDPKSFRSGRHFAAWLGLTPKDNSSGGRRRQGRISRQGNEALRKLVVLGATAVIRFARPGHASPWLLNLLARKPKKLAAIALANKMARTLWAMMVSGEVYRRPLPA

SEQ ID NO: 455703 - protein, 321 aa, unidentified
MSHTTSTPSFVGIDVSSGTLDVYSLPEKQTWTVGNDPAGRAALAKELQSHGVALIVLEATGGYEAPIAAELAAAALPVVVINPRQIRDFAKALGITAKTDRLDAGVLARFAQDIRPEIRPLPSEEERFLRELLARRRQLVQLQTQESNRFQQAASAKVRYSISDVLRILEKQLRQIDADIDRLIRQSSVWREKEEILRSVPGVGPTTARTLLAELPELGRYGNRQISSLAGLAPRNRDSGKFRGRRSIGGGRGNVRKVLYMAALTAIKHNPSLHEFYQRLCNEGKKFKVAITACMHKLLIILNTMMKNNTPWNPKFNLQFP

SEQ ID NO: 455704 - protein, 426 aa, unidentified
MDVNCSTTTTLVAIDIAKFFHDVLIEYPDGCHRRMRIANTRADWEKLAAAVGTAGAPCRVAFEATGDYHRPLACFLDQQGYTLQLASSVAVARTRDALYNSWDKNDPKDAQVILHLLKTGATQHFHDPLKSGYHDLLEIANTYEQISRRKVVLWNVIVTHYLPLYFPEAEQYSHSSRAEWFTQLLILAPCRAAVAKYTEAEFRKVARKIGGAKTDKMRWLNDFYQTAMNSIGLPVGEESEAIRMFRVVLGEYLAVCKLRSRLEKEIVERLKDHMDFQRLQTIPGIGPILALIILAESGDMRRFSHHRKFLKYCGLDLSTEQSGQFRGTSKLSKRGNARLRYAFWMAGAVAVRARQNTFRQKFERYIRRDPANADLRRKAYTAVAAKIARVAYAIVKAGTDYRRFHEAASPGGGVRSLRSVEALTTS

SEQ ID NO: 455705 - protein, 389 aa, unidentified
MKIFVGIDIAKLNHFAAAISSDGEILIEPFKFTNDADGFQLLVSKLESFDKNSIIIGLESTAHYGDNLVRYLVAEFYQVCVLNPIKTCQMRKNNVRKTKTDKVDTFVIAKTLMMQDDLRFITFFDLDMMDLKALGRFRQKTIKQRTRLKIQLTTYVDQVFPEIQYFFKSGLHQNAVYALLKEAPSPKEIASMHMTHLANLLKVNSHGHFTKEQAKELRVLAQKSVGANDSAISIQITQTIQQIELLDSQLEKIEAEMTDIMKFNDSVIMTIPGIGYINGGMILGEIGDIHRFSNPNKLLAFAGLDPSVYQSGNFQAKTTRMSKRGSRVLRYALVNAAWNVVRNNATFKAYYDAKRSEGRSHYNALGHCAGKLVRVIWKMLTDEVEFNLE

SEQ ID NO: 455706 - protein, 457 aa, unidentified
MGDDVMISVDPHKASNTLAVMDPVTKTVIARQRFMNTAVGYRRLREFAGGWTHRRWAVEGCHGAGRSLAQRLAGDGEIVLDVPAKLAARVRVYSQGHGRKSDADDAISIGLAALNSTRVAVVRRDDTLVSLRLLCDRRDELGALRTQAVCRLHRLLCELTPGGTHRGLRASRAEQLLAKLRPVDPVDVVRCQLAHQHLDDIRALDAKMTAVRAQIAALVDGTGTRLTELYGIGPVIAGRILAEVETIDRFPSKDHFASYNGTAPIDASSGEQVRHRLSRAGNRRLNHALHMMAVTQIRQPETIGRRYYERKRLEGKTPKEAMRCLKRRLSDLVYWQLVADRRATITQCGSATTPTRTRPTSTSATTPVPRTAPPRRPPHPTASTGSSHSTGKTAASSASKSSTPAVGSPKTSSTKQKTRAEATRKPRTNSAAVPDRRPTSAAAAGVKAGAATRRARP

SEQ ID NO: 455707 - protein, 328 aa, unidentified
MTETAASQQPTAFIGIDISKGSWDIHLLEEGRSWPSTTTPSDLTRLLTQLKPFVGRSFIVLEATGGLEKPLAAALIDAGHRVAIVNPRQARDFAKGMGILAKTDRIDSRGLAIFGEKVQPRLAVKPTEKESELEALVVRRRQLVAIRTEELNRQKQTVSKTAKKSIEKVLKTLQSEIDAIEAEIAKLIQSDDDWKHKAELVDTAPGVGPVTAATIVAELPELGKLNRQQIAALVGVAPINDDSGKHQGKRFVQGGRIDVRNVLYMAALSAVGAKTRSSPIKDLFNRLRKKGKVFKVAIVACMRKLLTTLNTMIKTNTAWKNTEGHPAH

SEQ ID NO: 455708 - protein, 345 aa, unidentified
MQSMYYIGLDVHKKTISYCVKDGSGIVHAEGTISATRWDLDRWMKMLPQPWTAAMEATIFTGWIYDHLKPHAAALKVAHPLMLRAIAAAKKKNDRIDANKIADCLRCDFLPECYMAATEIRERRRTLRYRNLLVHQAVQLKNKISGLLMEAGVSYNKQKLHKVGYFKELLATNPDINEGLRPLLRLCRETLVRLQKTESALVRSLQRDSLLAERVQRLMTIPAVGPITALTWVLEVGDVKRFSSIKKAISYCGLCGAEKSSADTVKRTPISKQRNKHLQSVLVEAAKMAPRLSPELALIYDREKQKGNANRASLAVARKLVAYLVAIDRSQRDFLVVEKENCAAA

SEQ ID NO: 455709 - protein, 345 aa, unidentified
MNATTVAVDLAKNVYELAVADERWKVLERARLTRGQFERWFQNRAVGLVVMEACATAHHWGRTLRARGIEVRLLPAQYVRAYVKRNKTDAADAMALLEAARGADITPVVVKSVEQQGLQALHRLRSGWMTSRTRRINMLRGFCREFGMEVSVGAARGLAQIARLLADEHSAIPAMLRTPMRLALEEIRLMEARIDALERELAQIARQSEPCKALCSVPGIGLLTSTAMVAAVGDPRTFRSGRRYASFFGLTPREYSSGDHRYLGRISKRGNRYVRMLLTHGARSVLRAATVARRAGRELDRLRTWALEVQARTNHNKATCALANKLARIAWAVWVKHERYQAQAA

SEQ ID NO: 455710 - protein, 413 aa, unidentified
MQTEAERLVAYRQLRTGIRGSETHLIVGIDIAKEKHHAFFGTATGKTLCKQFTFPNSRDGLELLLSKTETVRLQQQLQQVVIGVEPTANYHKPLADHLVQQGLQMVQVSGVAVKQNRELLDGRWDKHDRKDAANIADLIAQGKCQFYEYPSPAIRELRELLHLKHTLNKEEHRVKTRIRNNLLAQFFPEMDQFVTTCQQDTLAVIGTCCSPEQITALDYESFFEKVVTVYKGKRQEEHLFRIWQCAQTSIGCQAGNVPIYEGKVLIDQLLHLRQIIKDIDEQIAALCSGFEEYTCLLSIPGIGPAIAATILGALGNPYRFDTAKQVIKLAGLDLSAARSGRPALKATPVISKRGNPELRYALCQAALVAGSRNTFFRCWFARKLQGRERERGIMGILRVKLAAIRREQPVEQR

SEQ ID NO: 455711 - protein, 459 aa, unidentified
MAKAKARKSGKNELQVINSHAAGIDIGSKFHIVAVSPEHDPNPVRKFNSFTTDLHRLADWLKAVGITTIAMESTGVYWIPVFEILESKGFDVILVNAREAKRVPGRKTDIKDAQWIQQLHQYGLLSASFHPSEKIASLRSYLRHRERLTEYAAAHIQHMQKALMQMNLQLQHVISDITGETGMRIIRAIIEGERSATKLASYRHYCCKESETTIAAALTGNYRAEHVFTLKQAVALYDFYQEQIKECDQEIEKALDALNVDRQAPLGPLPEARRKRKQKKEPGIPIREKLFTLTGVDPTQIYGIGPHMALRLVAECGTDMTKWPTSKHFASWLTLSPGNKISGGKILSSRTRRTKNRATALLRIAAVNIGKTQTALGAFYRRLAERVGKAKAVTATARKLAVLFYTLMRYGKEYVEPGAEYYEEQYKKRLLRALSRKAASLGYSLVLKQQDSPAMGNVS
